United States Patent Application Publication US 2007/0150978 A1 - sequence listing, part 10

SEQ ID NO: 60223 - DNA, 419 bp, Oryza sativa
  unsure (1)..(419): unsure at all n locations
taactgcaacaaacaataaacggaacagaataattctaattatgctttntgtagattggggagtgaaaagtttttgcatgctagtttgtttgacacaaccaacattttattgtgagataacacaacaactgacttcagacatgttttgagtaatataaattcaacaaaataaaggttcatctatgctacatgccaatagccacgttatgatctctgaaagtttagactaatcagcacccaagttatagctgtgtattcgtctgagttattctatttcaacacagtattacttgggtcatgtaataacagtagtatcaaagaaatatgctcaataaaatctttctaggataatgaactaaggcatgagtttaggtattagtttgtttggataaacttaaatgagttttaaattactaata

SEQ ID NO: 60224 - DNA, 362 bp, Oryza sativa
agcttttcatctagcttggggatcttgtcggagacaccaagtagcatgcccacctcatctttggccacctgcaagagcaggtcgctgacgtaggacgcaaaagcatctaggacaacggccatttttcttgttcgcagacaagggctgtaagctatttgtgtgtagtggtgtggaagatagcaacaacgtatttatagtgctgcagaaggtagcaagctatgtgagtgccttctgctatctgacatggaaaaaaatttgatccgtttcttgagacatcagcaaagcaaaaaagacatgttgtgcaagcatcgatgttggattccataccttgcttgctttccagccagagaaaatccccattg

SEQ ID NO: 60225 - DNA, 422 bp, Oryza sativa
tgagcctggcaggtaagctcgtttgagcttggctcattgatagacctagcatggacccaccgcgaaggactccatagaaattctcattttgtggtaatattatatatcacaaaacttgattttgcagcccagaaaatgcactgtatataagcaataactgacacatgatatgatttgcgggtgatgctatatagtggacaatgcgattttcgttagttcttttttggatgaacaaattaatgacacgatataatactaagatgtacatatgaaactgtaacaagaagaaaccatgtatttatctttttgaaagatgagaggatagaaccgaaagctagttggtggcttcctatggatgcaggtcacaagttaaaaaaaaaaaggtgggggcaagagactctttcactatatgtatgcatgat

SEQ ID NO: 60226 - DNA, 141 bp, Oryza sativa
aaaaacagaggaggaggggtgtagggaagagggaacagggaggaaaaagaggaagaaaagagagagaaggaaggaagggggaaaaggaggaaagaggaagaggggaaagaaaggaagaagcgagaggggggggggaagaaa

SEQ ID NO: 60227 - DNA, 418 bp, Oryza sativa
  unsure (1)..(418): unsure at all n locations
tcaatgtgctgtacattgtttcccacagtttgcctttgttaattntgaatttaataacagataccagctgagatcactgctgcactggaacctattaaagataacgaggaggcggtcaaagcatatggaatccaccttggtactgaaatgtgcaagaaaattttagctactggaatcaagaccttgcacctttacacgctaaacatggagaagtctgctctaggaatattgatggtaatttccacatcttacttgatgcagtattttggtctggtgcatttctaacaagtaaaatttatccagaaccttggattaattgaggagtccaagatctcaaggtcattgccttggaggcccccaacaaatgttttccgtgtcaaggaagatgtccgccctatattctggtagttgtttaaaa

SEQ ID NO: 60228 - DNA, 356 bp, Oryza sativa
agctttggtgacctagcgcgtgtttgtgggatctgcaaatagtcacatgagttgatttcattatttctttataaatatgaatgggaacaggttcttagtgccatacaaaagatagcatatgtataaggaaactgaacacccaaaaaaaacataagaaaccacagagaagttgtttatcatgttctgaactatgaatagtctagcttactgtaaaatggcaaagctggttctgctagcatacagcttggatggagaagaccaagtatttgtcagtactccgattaaattaccttacaaactacaaatcttggtgattactccgtcaaaacatatagacatattatgatggatgattt

SEQ ID NO: 60229 - DNA, 416 bp, Oryza sativa
  unsure (1)..(416): unsure at all n locations
tntttttttttacacatcgcgcacactaacaaattttatttgaaaatctaaaaaaagcgtaattaatcatgcgccagtgatccatcacttttatgagctgcgaacagccgcatagatatctgtgataatccaggatatgcccaatcactagttatctgttgcggccaatcttttggtggctagatgttcatgttcaaaggaagaggtatcttacatctagccaaattctaactactctgcattagtgtgcagcacatgtggattcatttgcgcatcttattataccaagtgggacagcagagactgaaaacaggcacagccaaccaattgcctcttgtcctttgaaatgagtatttttgggccctgattggaattttagcttctaaaatcctaatgattagatcaataattgaagc

SEQ ID NO: 60230 - DNA, 354 bp, Oryza sativa
  unsure (1)..(354): unsure at all n locations
agcttggctctntgnttcatactgttctgaaatntcttgcgaactggagcatgatatataggcttaagatgcatcaggaaagaagcttctactagtgtacatgcccaacaagctcttatttgttaaggcgctagaagattaaaacttactcggtctagtttcaaattaacagattggatgatctaaggatagtgtagaagctttttgttcaaaatcacaataaagatatatgatcaaaaccttaataatttgtctttgttattacaaatactggaacacagtcatcagttatagccaacactcatcactgtcggttcggcggatagttattgagtatagtaactatcggtctat

SEQ ID NO: 60231 - DNA, 414 bp, Oryza sativa
  unsure (1)..(414): unsure at all n locations
ggctgaaaaggtctaactcatttatatctcgttttttattttagcttttgattattaaataataaagtactgatttagcactgatatcgttatcctggaagtaatttaaagcattgagtactaattaagaagcactaagtataaaatgataacgtccatttttttttgccaactatgctcaaaatctaattgttaccctgaatccaaaaccggctgttttttatacccatcattcaaatctgaacgaataacatgctagaacatactgtatatattttcagtgttggtgtttgaaatcgaggcgttttttctagtttgtattcttattatacatactntgctaatgtaggtgttaattattcgatccacaacaatggaacttacctacttgaaactcatgttagctaaaaccac

SEQ ID NO: 60232 - DNA, 351 bp, Oryza sativa
  unsure (1)..(351): unsure at all n locations
agcttggagctacatcttctcccgtttaatgctgaatngctgatataaaactcagttcaactctgttattctatactagattagacatttttactgcagctggttatatctctgctaggtaagcaaaagggccaccggagacatcaacctatccaacggggaagcaaatggcctgcgtaactaatagcgttcttcgataatagactaatttttatgtgtcaacggctatcgatagaggaaaaggcagcggcggagcccacgcaggttcaggtggctctattgctgatcttacgcaagttatcactatagccgctccttttgaacagngaaattttatatgattttcacgtg

SEQ ID NO: 60233 - DNA, 417 bp, Oryza sativa
  unsure (1)..(417): unsure at all n locations
ctcaattatgtcatgtcataataaaaatattttattttatactaagaatgaaaagttgaaaacatcgggctcaatgaatgccttccaatgaaacaaggatgttagcatgacaccacaaaccttagcagaaaattatattagtctctttcaaattgaaaccaatcaacaatacaaagaagntgattttctctgtatatgtgttgcatgctcgaagttcagcttgatgaaatttaattgcttttggacaatcacccattcagctgccaatggacaattaaatcattgttttagccaccatgacctctctaatctagtatggttaaaggtgtggttgaatttgaaaccttttctttttgctactgatgtgcatttcagacaatctgtattaattgcatcggcccatgattaaaaataata

SEQ ID NO: 60234 - DNA, 349 bp, Oryza sativa
agcttgaacactagctttattcatatgttaaaaaaaaaatcactaatcataaaaaaatttaaactaaaaactacaaatcttttttagataatgaaaaaaaaccgagaaaactacagatctaggtcatacaaatcactaatctaaaccgagaataaaatctaaagcataagcactatcatgattttgaatcaaaaataaacacatcgaacataaaaaagcaccgaaataatcaccgaagaaactcaaaaataatcagccaaaaaaaaacctcaagctggatcccgtacagatttagattgaacaaaacttatcacacctactcagattcagaaactgtcaccacaaaaat

SEQ ID NO: 60235 - DNA, 119 bp, Oryza sativa
  unsure (1)..(119): unsure at all n locations
ggacactatnaatactcagcttgctcggcagctggaggaggaagaagacatatatatatgggtgggactttagtcccggttgtgagcatccaccggagctaaagaccaccgggatcttt

SEQ ID NO: 60236 - DNA, 348 bp, Oryza sativa
  unsure (1)..(348): unsure at all n locations
agcttgacgggccggataggcttcttctgcccttgcggnggtgaattggacatggcaaagccgtccttctttgagctagatgccagggcgaactggtcatggcgaagtcgtccttcttcggtaggtactcatgcgacccttcgcctcgcatcatccttggttcatagccatcgccacgagtttcggcagatttggtcgaagggcctcatgccatccgccaacaagcccctcacgggcaaaggtgagagtggagcttcggccgagaccatgcaaaccatgtggtatggtatatggcgccctctttcgaccgatgctcctgccgaaacctacactgttcctgcaaataag

SEQ ID NO: 60237 - DNA, 426 bp, Oryza sativa
  unsure (1)..(426): unsure at all n locations
catcaggacctataaaactcagctttgcaaaacgcattgaaagtacttatttgtccaaagctatnttgtaaacacgatcctagagctacacagtattattaatcaaggccgtgaacccgcacgaacctgccttaacccaaggtctacgatgattcagaccgaactggcaacccgacctgtgtcccagctcgtcccaagccaatccaggccaaccattccacattttagttgttaagtaggttttaagaagtaaaccactaacttgggtacattgctaggcttgcctataaccgagggcgcggctattcgaatagatttactctgatcagaggtgtacatctttacccacaagacacatctttactctgcattccacggccgtggaacccatcgtaaaggatgtgacataacccctttacccatcct

SEQ ID NO: 60238 - DNA, 347 bp, Oryza sativa
agcttgagtgtgtgcgtattttgatctgccactacctagtagttaataggaacgcgcatatttttgtgtatgtttcttgttttctactaacaatggcagggatacgcaagataattggggatagctgcgctcaacatcgacatcttcatcgagacatgaggagggatcaatatgaccattatgaggtaagtgatgatgttctatgtaagatcaaatctgcactgccttatttcgagggagactatgatcctcgtgcttacattaattgggagctagcggttgatagtgaatttcaaaagcatgtcttgtcggagaaacaaaaggttatgtgtgcctctagtgtttta

SEQ ID NO: 60239 - DNA, 411 bp, Oryza sativa
tgttagcttattagtcatagtcaaaattagttttgaaacataattttgaagttgattttgggtttttttaataataatctattttcagcatttgcttttaaaccaccaataatacatctataaaattttttctataaattattttttattgctttctttattttttccatcgcttagcagtcatagactcatagaccagacaatcaaacccccagtcattagccctaaactgtcgtcacaagtttgtcacatagtacatttgcaatctttgcccacgccggccatcagctttgctagtgactaagtgaggagttttagtggaaactggaaagtgatagattttgagttgaaattttggatccaagttcaattttccataacatattttccgatgaatacatttatttaaaa

SEQ ID NO: 60240 - DNA, 357 bp, Oryza sativa
  unsure (1)..(357): unsure at all n locations
agcttgcaaaaacagcataacgcctttctgtcggacacctttttaacttgcattgcaataattccaaagaattatatgaccgcataaaaaggatttcatcagcattgggcaacactgttgtgtgcataatattgccaaagcaaaatatgcctaagtccctaaggaacacaatgggccacgctgttaaaagtattgggctgaagtactgttcangcctaggcccattagcacctccgatacccttaactgaaaaatccgatatccaagcggcgcttcgtcttccccgccggaactctcgccattttccccactccctgctacagtgcaaagctgcgccggcgaactatggttcacaac

SEQ ID NO: 60241 - DNA, 441 bp, Oryza sativa
ggacctataaaactcagcttttctggaaagaaggctgcctcaatatctttcgtgcaagaagaatcggcctaccaacaaccaatgatttgataggcctcttctctcgccctgcagagaaaggatggtatgtatgaaaaaaggagatagatagggaattcttcacaaatagaactaagtcagactagagaagaggaaccaacagtttggaacagctccttcatatggatctgttgtgtcattacgaaatatcccattatgtcccatcacaagagctgcatttggggcctgtgcaagagcttcttccaatgctgttttccactcaaacaaatcttccgatgtctctgcctgtattgggaatagcaggcacttctagtgaactttgaagggcatttaaaagacttaaaaaacacaacacttataattcaacatcttgtattttct

SEQ ID NO: 60242 - DNA, 349 bp, Oryza sativa
  unsure (1)..(349): unsure at all n locations
agcttactacatgttcgnnattgatttgtcatttttactctgaaaatcatttgccactgttctgtgtcatagttggcactaaaatatttgatttttcttgcccagacatttgaattggataacaagtagttttggaagctgtttccctttacattttgatcactattttatgaatgccggagatatagtattacttaccgctatgcttctactatttttttcatacactgtagttctatattcaagcaacaatgcatgtttgattctgctgccatgcagcatactccctccatctcaaaaagcaaacctagtacagtagtacgggatgtgacacatnctanaacgctgt

SEQ ID NO: 60243 - DNA, 424 bp, Oryza sativa
  unsure (1)..(424): unsure at all n locations
ctgatttaacacatattntagagttcacttgaacattgtctttctctttcgtagaatgcagtggtgatctctctggatagtatggagaccagaagactcagcaatcatcggttcagaatattatataagattcagaaggtcaacatgaacaaatatttatatgaaatagtaaaattggtcaggtaaatgataactttgacttaatcctactacagttagacagtcaaaatggcatttcttgatgctacattttttttctacatggattaacaaaaacgaatgaacgaatcagagttatttgaccaatttatcaaattatgtcaagtggatgatcagagaataagatctgaatatcgcgataggaatgaaatctttggtcaagggtcaatgtgcagttcctgcatttccttccccaaatcaaacc

SEQ ID NO: 60244 - DNA, 382 bp, Oryza sativa
  unsure (1)..(382): unsure at all n locations
agcttcgtgttcttggccttaccagtatatcttgtttgtgctccataccgacncccgccgccggctgttctcctcaactattggcattgcgagggtttctccttgaaccgactatgnnntacttagccangggtgtcccaattctcaccttggtggttgcactcttgattaatgcttgatgaagtttcccacagggaatcggtccttatatgcgaatacgggacagcgccacgcaggcaccacccccgcatcgcgagttttcacaattcattttatttttaaacacaccgacaccacatgtcgggttttgaaggcttcacaaacccatttcccaatttttcgacaatcaacggtgtatgtgggacaattggtatacacgctc

SEQ ID NO: 60245 - DNA, 407 bp, Oryza sativa
actcagcttcgaatgagctcccgagaactgacgggcatgttctctctactttctccaatccgccatgctccattacttctttcaggttcgcaagagagctgaggaactccaggcacgccttcttcagcccgcggcaatggtgcttgtcggccagcaagaggatggtggtcgccgtgccgacgccgatgtggccgcacagcttctcctcgcatatcatcttcagcctcgggagatcgtacctgtccgccgcgacgagcaggtgctgccacatggcgaccttgccgtcttcgtcttcctccgtctccggcggcggggtgtcgttgtagatgaatgcaagcatggccttgaatgcttctggcaccatttcactgatatgtacgcttgctgtcgttgcgccctccttcatg

SEQ ID NO: 60246 - DNA, 359 bp, Oryza sativa
  unsure (1)..(359): unsure at all n locations
agcttccttctgattgctatttgaagcagagatatgtcttctgcttgngatcgccctcctgagattgattgccctttgctcggcctggagtaagtcggggagagacacaacttcttccatcgacaacaattctttgctgaagctgtcggtgcaaagaatggttggtgctgaaggtattattgctatgatttgttgcaaagtcaggcgcagcaggaggagcattggtgctgtggatgatatcgtcgatgttgctgttggagctgactagctgacgagacaatcgtagggttgttcgttggatttctgcagtcttgatcaacaacacactgagttggcaatccttgggcacatggtttgta

SEQ ID NO: 60247 - DNA, 421 bp, Oryza sativa
  unsure (1)..(421): unsure at all n locations
ntatgtcaagatgaattaatcaattaatcagccttcgagtttactctgggagtcatcaattttgtcttcgctttagagcagtaggtcaagattaaatttacatgtctgggagtttggagtcatcaaccaatcaacttagtttcgacaagttggacaacatcatctactttccttcaagtgaagcatctccaacagctacaacattaaattttattgccatcttcataaatcaagaagcgttgcatcagtcttctttatgcatacacgctcgcatcaaggaaactactcgagctttatatcttctcaacagtttgatggattattatcactgacttcatcatcagcacctctacttcatcggccctgacatctctgccgttgctaatggatgactacgtcttcgcctccagttgcttccgtc

SEQ ID NO: 60248 - DNA, 349 bp, Oryza sativa
agctttgcgagtctaggactatcggtttggctaggaagtctacttcctcaattctaaggttaacttccgggcatatttgagttgcccttatattacttacaggggaatgtactatcatcggtacacgcaaattttgggttttccaaccatttcttttcacaaaagcttgcgatatgaaagaatgagaagctcctgaatcaaacagaactattgcgggtacggagttgacagagaacatacccatcacaacgtctggagcatcctgagcggtttcagcttgaatgtgattcacacgttctcgaccaaagtggttggacgcacgagaaccttgtccacttgcctgagagct

SEQ ID NO: 60249 - DNA, 425 bp, Oryza sativa
tgtgctgtagagacccttgttcgtgcgaaaataattcatatggaaaccataatactttgccttgaagattgtagtgactggagcaatgcaactacaaggagagtggtgatgcaagtttgcactttaaaactagcttttcttatcaaaaggtgctcaatgacattctcatggtctcttgtgattccacattagttgtaccttatttactgggttactatgtttaaacaaaaggcgtgcttactatatcaagttcaaacttcaaacgttcaacacacaattattttgttaacctgtaagcagtgccagtaaagctatgtttgtgtttccctttttcatactgcaggttgatcctgatcttgcaaggactgttctagtctccacaaaactggacactaaaattttacagtttgcacgagcctctgatg

SEQ ID NO: 60250 - DNA, 354 bp, Oryza sativa
agcttattggtctattatgtctatgttcagacgcgtccgctttcttagggagcaaacaaatgtgggtacaattgagatcatctaactggttttggtttagtttcgtgaaggatctaacagcattaaagagatcatgtttgattaggtcccaacatttcttatagaatgcgctaatgaagccatcgggcccaggggcttttttagacggtaaggatttaatagtgagctcaagctcttccatggtgattgcttcttcctgatcagagaggtcaaaactgctcatgcctaggctctgccaattcaaggacagctctctggactgaaacttgcccaatctatccgagtagaaattga

SEQ ID NO: 60251 - DNA, 423 bp, Oryza sativa
  unsure (1)..(423): unsure at all n locations
nggctccaataaagactacaagaaagggcttatattctcctcaccacttgncaaaggccagaagcgtgaacgcggcaaggggaaggtcggggagttggcgccggagccaaaaaagggcaaggctgcgatgtctatgccgctgagcaaagcggggaaggtcatgagggcgccagcccaatttgagctaggcatgccattggtggaggacaatgtgttagctgtgatgggtattgcttgccgagagctacataagcaatacatggagctaaacaatgccaagcggaaaatgagggagtcatccatagttggacatcacgagcaccaaccgttcctatcgtcgcctgcctatataactataggctttgatgacctcttcgaccttttcaggatccggaagttggacactggtcttctaaaatgcta

SEQ ID NO: 60252 - DNA, 350 bp, Oryza sativa
  unsure (1)..(350): unsure at all n locations
gcttgcgagacnctttgggctttttgctatgcaaangnatttaaatataggtggatatgtgtatatgctgatcaccgttctctcttcaactctctatatatgctcgccagttctacttattttgctggctactttaagtttctagtctatctattaactctacaaagatgtaggtgtggctattaggcgcacgcgcaccagcaaagaaactagtgcgtgcgccatctgtccctcccccatgcgttcgctattttttttttgatttttccccatcctcttcactttttcttttttatctccccctcccctcacgcattttgcgcatttttatgttgttccaatatttttta

SEQ ID NO: 60253 - DNA, 419 bp, Oryza sativa
tggagttaacccctctctgcaccaatgacttaattgctacatgttgtcatgactgtggtagcatataccgagtactctctccgtgtgaaaaaaaaaagacaaaccctaggttttcgtgtttaacgtttgactgtctgtcttatatgaaatttttttataattagtattttcattgttgttagatgataaaacatgattaatactttatgcgtgacctatctttttaatttttttatatctttttcaaataagacggacggttaaatgttggacacggaaccccatgatttgttttttggaacggagggagtacgtataaaaggccattgcgtccatttatccatccacacacgcacaacgccttgccaccagttcgtcttatattcagctaattaattcagtttctaagtgcaatgata

SEQ ID NO: 60254 - DNA, 351 bp, Oryza sativa
caagctttgggaagggtcatgaattttgtgtgtctgctattgtcgatgagatcccatatttaacctcttttctttcggaccggcgttacgagaaagaattccagatgcttagccgcatatataagacgcctggatttggttttgtaagcctctcactctcactctattgcttccatttttttagataatgaaaatggattacatcttcggcttccatggattatttgcattgagaatgagtttatttgcttctgtcataagacacagccataagtttgataaaaaaaaagtgaagataaaaataaatgagaatgagacataaagtgatggggcaaatccccaactcccatt

SEQ ID NO: 60255 - DNA, 416 bp, Oryza sativa
  unsure (1)..(416): unsure at all n locations
ntaattngcacttcacgtacgtaaaccatataatcatatatctcaccatacagagagttaatcgcaaggacatagcattgtcgcataattcagaaaatctcgttggataagaaggttcagaaaataattaattctttcaaacgagattagcaacacatccatccagccggcgcatggagatgatgggcgcgcaggagaggatgaaatgaagcagcagaggctaaccataccggagggcaagacatggcacggcacaggggcgtacgtgatggaggcggcaggggcaggcaggtatggcgcgtcgtcgtccctccctccgccgcgcgccagcctccgtcgtccctccgcgacggacggccgagaccgtagccgtgcgccctctgcgcgccgcctccgccgaaagcgcgcttgcagct

SEQ ID NO: 60256 - DNA, 358 bp, Oryza sativa
tcaagcttgtgctccaagagacccactctgtcccaatcttggactccaagcaacttccctctgatgaagcttattgtaccaagcacccaccgagatgatgctttgcttccactattatctcttctcttatggaggcgatgtatataaccttcacaaacttctcctgggcacaccacactccacttggttgaccgcaggcttccccttctcttaaaaatgctcaagttctccaacttgaaacacaagcctctctttttctctagcagcacacaagctatagcaaactcttgatatggtgggagaacaactagcctaaatgtgtaagaactcactatcaaggctaaactatccttgaaag

SEQ ID NO: 60257 - DNA, 370 bp, Oryza sativa
atggatgacctcacggatgaatcccgctttcagaagtcgcgccacctcctcgcggatgaaggcttgacgttccggggcctgccgccgtactttctgccggaccggccttgcgcccggccgcacggcgagacggtgctcaatcacctccctggggaccccgggcatgtccgccggtctccaggcgaagacgtcggcgtttgcccgcaggaaggagacgagcgcgtcttcctatttgtcgttcagaagaccaccgattcatgtggtcttagacaggccgtcacccagggcaaccttcttgaccgggacctcgtcgcacgtgatcatccgttgccttcgggcggccgggacggaggcgctgagcctctcgtcg

SEQ ID NO: 60258 - DNA, 349 bp, Oryza sativa
agcttgtgcttctttgaccaccggctggaggtgcacgggcgcggcctgagaaccgtcgcttgctgctgcgagcacgtacacacccgtgtacatgccaacatctgcgtggtaaatttgccaccgtagtaccagcattgcagcgcgtacaccatgtttaataatttcagcgtggctcgatcgctgttaattgtatatatagtatctgctagctgcacgtactggttgttagtccttcctgggtacatgatcatatcacatagtcaaagccacgggctctctgataactaatcaaacagaggtactgctgattagttagctgtactctggaaaagggagatcggttgatcac

SEQ ID NO: 60259 - DNA, 379 bp, Oryza sativa
cttgccaacgtatcagactttcagtactgaactaatgattattgattaagtgattagtgatttcactagtactagtagctttgagcttatctgggctcaatttgagattttcctatcacacgatctcgcatagtcatttcaacatattcctagttacttcatgaattcgtttgaactatgagcaatcaaccactaaccagaccatgataagcccagtccagctctaaactaagaaagtaaacgaccagtctacacatatgtgatctggtgttaattttgtgattgctacttggttttttagcggtcactctctgctgagggatccacggcacaacaaggggctatcattcacggagaaagagcgagacgcccactacct

SEQ ID NO: 60260 - DNA, 343 bp, Oryza sativa
  unsure (1)..(343): unsure at all n locations
agctntgcttaccgctcttgaagcttctctttatcatagncagaagtgcttagctcaattgcagatctcagctgttggaaaaagaattttacagtggtgtcaccattagaaaaatttagtgagacacacgtggcttcatgtaaaagtaaactagcatagaatgaacctgctcagctctctcttcaatggccttcttatctccagctccatcaaggatgactgtgtcatccttagatactgtaacctgtattttgtacactcgtgttacagttcttttaagttaagaagactaacgcaacacgcaaccaactaagcacatatttaaggtgatgcttgtaattga

SEQ ID NO: 60261 - DNA, 358 bp, Oryza sativa
cgggataagccaaatcagtagcaagttcaaaggcttgtcatgctgcccaaataataccattccattttagaccttaaatgagtcggctttagtgtataaaaccaagtaccacatgcttctggcatcaaacagatgtggtcacagttcgttttttggatgaatatgtgggagaaatatctactgatcgattaatcaagaatttattccatggaatgccacaaaatcaaatatattacttttcctaatgtgataacaggatcttaataccttctatgaaacaactttttaaccattctaatgcattgaagatggtatttatagatactgactccgtttcatattataaaactttctacct

SEQ ID NO: 60262 - DNA, 362 bp, Oryza sativa
  unsure (1)..(362): unsure at all n locations
agctntagtagcctgaggagatgatcttgctacaataatatcatcaacataaactagtacaaacattgtataggtaccacggctatagaaaaatagtgatgtgttagctttggaaggtacaaagcctaaatcctgtaatttcttactcaggcgagaataccaagctcgcggagcttgttttaaaccatataatgccttgtccaatttacagagataatgtgggtgtaccttatcttcttatcctgngggttgcctcatgtagacttcttcttccaaataaccatgcaaaaaggcattctatacatctaattgtctgagactccaaccattagaaacagcaatagatagaataagtctgacag

SEQ ID NO: 60263 - DNA, 407 bp, Oryza sativa
tctcaaagaacaatggcagtattgcgcctccgccttcaccttctggtggtaatgctaaattgcctggtatgagggggcgtggacctgcacctccttcaagtccaatgtctaggagccttcaatctggtcaggctgcatccagaaggtccaacttgaagcccctacactgggttaaagtaacaagagcaatgcatggaagtctctgggaggagtcacagaaaactgacgaagcttcaaagtattgtaccaacacaaccacactcatagatggttatgtacattatgagttctatgttaatgcatcttttcgatgacttgtgcagacctccagtgtttgacatgtcagaactagaacatcttttctcagctgtcctgcccagttcagattggaagcgttcagataagtc

SEQ ID NO: 60264 - DNA, 360 bp, Oryza sativa
  unsure (1)..(360): unsure at all n locations
agcttgttgcaataatatcagaattttatcagttggngtttctctacatgctgatcgaagggcgaaaaatcaggtttattttcttccactgcccatcctttgtagtccaaaatggttatctactggaattttccttacaccgctcaactaaacatgacagaggagaagagtacacataacacttgaacttccttggagtgcagaccgtgcaattcagcagtttgggagaacccatcgttccaatcaaaattctgcacctgaatataggtatcattgaattaatgtaaatttgcacctaactcatttatactgtctatttgttgtttttagttgaaagtggctaatacaaggtcttaaaat

SEQ ID NO: 60265 - DNA, 425 bp, Oryza sativa
  unsure (1)..(425): unsure at all n locations
ntcccagtcaattntgcaatcctatggctaacgtttacatcttaattttaaggagaaattgatagcgtattgcacaaaacaagaactattttctgcagtacctctcttccattgaaagcacaggtggacccttgttcgccacaatctcctcatcactaacaactcccactacaagttgatctcccaacaacttggcctgccgtaatgcatttgcatggccataatgcatgaggtcaaagcatccatccatgtacactctcacaggccttttccgttccttcttctttggaagttgtgctagatatggccaaaaatatggggcaaaaggagcaccaattcctccaaagtagcctgtcgataaccaaagaatggcaacagtgaccataactccttcaatcccaaacaggtgggaataatatccacta

SEQ ID NO: 60266 - DNA, 357 bp, Oryza sativa
  unsure (1)..(357): unsure at all n locations
tgatgcatgcagcttccgaaaagtaccagaccttcttcgtttgttatacatnaacggatcatagccgattgatggaaagggcatctcattcaaccagctccaccagtatactacctgccctaatataagaaataacaatggtgtgacttgcgctgtgtgaccacttgccttattcaaaatatttatgtgatctctaaaataaaagagaatatttaaagccacttggataactaaataagtcacagctaaaacttagtgtactttcagtttttttaataaaatgaatggtcgaacaatataagtaaaatgtcagaatgcctttcttttctgcagtatcagctataggtcagaatgcct

SEQ ID NO: 60267 - DNA, 421 bp, Oryza sativa
  unsure (1)..(421): unsure at all n locations
ctaagcttgatgacggcagtcggctctcttagaaccnatatatatctttctgttatacatcactattgagagatcaaacttattactttgctattacttaatccatgtggttgcggccacgaataattggtataaactcagattcgtctatcattcataaacactttggaacacacaagccatggagcttaaggcagcactctaaatagattattcacaaagtccagccggaggagcataggaatcaagtagctgttatatattcatacaccttacagatagcttcaaaatagaatagagggtttttttttacaaattgatttttagaaacattgagcaatagtccatgataataactttggacgagctgaagaaagggttcacctgaacagggcttgcagtcacaaggaggccggcaact

SEQ ID NO: 60268 - DNA, 321 bp, Oryza sativa
ccaactttaggttacgactcatcatatgtttacataaacatgtcgggctatcacctccgatcatgttgattcaataaattctacaccgcgtatgctatgtattgatatcaagacacttggttgattacaattatgaaaaccactcgtttggggggataattaatccttgactatatgcttaggtgtggcaggttaccacataggcggcggcgacacctattaggtgcatctagtcgaagcccctgactatatttgttagccttgcacagccttcatatttaaaaggactttggagaccatggcgaagatgattgaagcact

SEQ ID NO: 60269 - DNA, 436 bp, Oryza sativa
ggacacaaaatactaagcttaataatatcctggtgttaacaagatattttttctttttgttgacatgcgaagaccccagagtcagcaattactggtttctttatctcccactcaaccatatgcagctagcatctcttcattgaacaaatcactatcaatatgatcaaccatagcatgtttccatgaatgctgttggacataaccagcttttatcattttcattccaatctactccagcattgcgtatatttcctcatactctggatgtgacctgacctccactataaagacttttaactcccctttcagcttaacccaactctttccaggtgatttcttaccgccgctaggtctcatcgacttcttcaatcttgcaactcattccaattgccagaagcagcatatattgtgcacaggaagacataagccgctgaat

SEQ ID NO: 60270 - DNA, 355 bp, Oryza sativa
  unsure (1)..(355): unsure at all n locations
agcttgtcaccaacggtttatttctttctctgccgcgagagnatcattcgtggcggcagaacatggcggagtaacgtgccgggagaagagaagaaagccaagcgatatgtaaagcagggtggtcatggcgaaaaaaatgggatggagaaagcagagaggaagtatacatatgtgttgggtgctgctcagctactcggagaaggaagagcaaggcatatatacaataaaacaagcatggtggtcagaacacacgcatgggcatagatgcaggttggattgacaaggaagaccatggcaacgagccaacgacacaggctagttgcaggtcaagttcagactgatgattcagacagga

SEQ ID NO: 60271 - DNA, 407 bp, Oryza sativa
ttatagagcctaatacccaaagaagctatttttatcttttagtcctcgcaaactaagtagaaaaaccaaacaaggcgatgataaaccaagtaagcaaactgaattgattaaaatcacactccattattatgaagatagcccccgactgacaactttcaagagaaaacttgatgtttgacagtcaaaatagggaaatacaatgataaagttaaacgtaaaaacgacgaagatgttcaatgttccaagagttgtcgacgagagtgccgtcttcgcgcttgagtcgatatgaacctggccgggtaacttcagagataataaaaggcccttcccatagaggagataacttgtgccgatcttgtgtggtttgaattttccgtaaaaccaggtcgccgactataaaggcacga

SEQ ID NO: 60272 - DNA, 355 bp, Oryza sativa
agcttcacaccgctgaatcatgtctttagcgtctttgagcgcggttggtgtcacgcccggaatttctatccaaaattccaaacgcttacatgtgtgttaagccctcgtccaggaatcaaccgaggcacacaatgacaatttgataatagagtacaaataaataactatttaatactcgcaaataataaaagattacagaggtagatagttcctctcaaaaaaaaataacattctacgcagcggaaaaataaaacgataacaatctacggaacagctatggcgactccactccacaggcatcttaaccaagaacaagcctaatcctccagatcatcaccttcactgagacactcct

SEQ ID NO: 60273 - DNA, 416 bp, Oryza sativa
tgtagctttgcttgtgtgcttcgcgtatcttctgtcgttccggaggttccagaagcgtggttcgcggtcgtcgccaaaggttcggaaggccgttctctctgagcaaggcaagtcacatcatccttgagcatattgaatcccagtttataaaattattttgatttaaattaatgcattatcgctttatttaaattcccgcgttatcactgttttatttagccatgcctatttacctttgttaagacattattattgctattgttattattaccttgttcaccctagaataaacaaaaccccaactactggacactctattcatggttccactagtatgaatttaggtagatgcttcgctgtttaattaggcaacattaggtggttttataactttagactttgggaattctcatatc

SEQ ID NO: 60274 - DNA, 351 bp, Oryza sativa
agcttcttcgctgcacttcctttgttttcgcgcttctataacgagcaacgagaggggtgactaccaactagccttctcctcctggttcccctccacattcctttccacgtgcccctactggtttccctccgcatccctcttcacgtttccttcctcgttcaagtactggtttggatcctcggtccctcttcttcattccagtactggctgcttccctccgcgattgtatcgtacaatatcttgtttctcatcgcggtcagccatctgatgatacaagaaacatctgctaagtcacgagacatttatgttttaacaatctaagtcatgtatgctaagtgtaaatgtcgtaca

SEQ ID NO: 60275 - DNA, 414 bp, Oryza sativa
  unsure (1)..(414): unsure at all n locations
ttctaaacaaatctttggggtttgtcgactgatcttgttcttctgtcttcctgctagatggcgacaacgccacatcagaagaattacctgagagacaagtttttggtaagttaaatccaccagttctaccaataaggcaataatgcttttcttattaatgtgtaaataaattagactgagttttaccagcctggtcttcttctttagcatggttgcgattttgaacagcatcttcaccactaataaccttattaccacttaatcttctagaagatggaggtgctcttctccccctctttntctttacaaccatattagaaataagtttaatctctgagatacatgagccatcatcatgacgacgttccaaactgtgcctctcttctgacccctttactgtagatgtacaaccat

SEQ ID NO: 60276 - DNA, 352 bp, Oryza sativa
  unsure (1)..(352): unsure at all n locations
agctttcaaaaaagattaactaatctatagaaaaacaaaaaaagaattccattgaattgtatttttattgatcaattagaactgccttctagaacgtataattgtctcaaaagggccaatatccatacactattggaccttttgagtaagacggaagaagatctgatgagaattgacagttttcgtatgcaagatggaaaacagatatgggacactctagagaagcatctcccaatggatttacctaagaataagttctagttttaaatccattgcaattttttcctcttcttctttttcgagttagaataaaaagaaaaaataaaacaattntgcatctttgggacaatct

SEQ ID NO: 60277 - DNA, 344 bp, Oryza sativa
  unsure (1)..(344): unsure at all n locations
agcttgcccctatgaagcgtanggctcctgcttcgtcggactctgatgctgatgacgaggaggatgccgaagaacataatggcaaagaggagggggggagaagaggaggtggagatcatggtcgagaagacaacgggcgaggcggtcgggggccgcgctgagactcccggctatacccctactctgagtcctggccataacgagaccggggtggagtcgaatagctccccccttctccagaaagacttagacggggcgaaggccctagttgcattctcttcgggtgcagcggcgaagggaggtcttgtcaaaaaggtggctaagaagaaaggactcgtcgatgt

SEQ ID NO: 60278 - DNA, 414 bp, Oryza sativa
tcaggaaggcataggttcctgaggggattgtggctcaaaaggagagttctgttctttgcaacaaggaaccagcatagttacagagtatttgcacgagttcaaccgcctcgggcgctacgctccttatgacgtgtacaccgatgccgagaagcatgagaagttcatgtcaggtcttgatgatgaattgaccaattagatgatctccagagactctgaggactttgagaagcttgtggacaaggctatccgtcaggaggagcagcacaacaaaatggaccgaaaaaggaagactagtcagttcagggtttccccggggaacaatcagaagcctcgcttcatgactggacagcaggttcgatcttccaccatgattatctgtcagcaccatccctacaacagcgtcaaccacaacag

SEQ ID NO: 60279 - DNA, 344 bp, Oryza sativa
agcttgtccccctctatggccgtggtaaggaccgtgttgacccaaggtcaaagaacgtccctggggctgacattcctaatcgcccagctggacagaggcctgccacggctccgcaggccaatcctaacacccacttccccaatgccaaccccaacccttggttcatgggtggaggcatcccactagccaatgcacggtgggggaattacaccttctcggcggcatttgggggtttgttccccctgctcagcttccaagtccatgggttcccagatgcaaccgcctatgggcagcctgctggttttccctacggatatggacacggccacggtcacggtcatggg

SEQ ID NO: 60280 - DNA, 412 bp, Oryza sativa
  unsure (1)..(412): unsure at all n locations
tcaacgaatntttggattgttcaccaagctgcttctttcatcttagttgccgcacattaatctgtttggcttcatctgtaatcctgtttctgcctttctgtttgacatgctgcttctgcgcgccttaaaagacatttttttccaaaagaagataatggcttttcgacgaactgaacgttctgagcatatcatttaactttattattactactttgcagttgtaactagtgcctataaggttgatcgttggattttactcaccagttatgtagattggatcaataagcctagataggtgtagttgcccagaagtttacacttagaatccccttttgttatacatatctagtattctgaatgagttcttcttcttcttcttcgtactggttagtacagctaaacaaaatacttt

SEQ ID NO: 60281 - DNA, 342 bp, Oryza sativa
gcttcgcaacaggcagtcaggcaccataacctgaattctatcataattatgaaaactgatgaaatatcgcaaactttccttgaaccgtaacacagcatatctatgtgacatgtttaatcaatcaagatctatagagcaaattatgagcgtgctatgggcatcaccgcgggagggtacgtgaagaggatggcgttcttctccttggtgtaggtaacgatctgcagcgccacgttgagcgccgcgtacagcgcgatgcatgcgaggaggacgtccctgttctcggggaacttgcgggggtagaactgcgcgaggagcgcgacggcgatcaccgtcgcgccgacc

SEQ ID NO: 60282 - DNA, 413 bp, Oryza sativa
tgtcgatcggctaattcgttggacaaaaagccatattattctgaatctgaatctgaatctgaataccggacgatgcgaatgcatgcaggtcatcgacgagtacgacgagcagtcagaggtggcagaccggcttcgcatcaaggtaaccgatcaaataatcatatctgactggaacaatcgatcgatcgatcgagtgagttcttgctgtggtggatcgatctgatcattgcgcaaatggtttgtgagttgatccgttgagcatgtacgcaggtggtgccgctgttccatttctacaagaacggggtgctgctggaggcgttcgcgacgcgggacaaggagaggatcatcgccgccatccaaaagtacaccgctccatcgtcgccgcctgctgagtaagctagctaccatcacat

SEQ ID NO: 60283 - DNA, 354 bp, Oryza sativa
agcttgcccccattaaatagacacgtttttcctttgatactttatatatctgcatgtttatttaaataatactatttcttagggcaaaatgagcttttgttagattaaagcaggatttgcaatatttgcttcgtatccgcatgctaccattcacatccaactctatatccatcaaatatctatctatgaactcttatcatatccttggttcaggaggattcgtcagttttgacccttactaacaactaaaaatgggctctgacaaaatctcagagaaatggtagctacattagcctgatgacacacgttcgtgtagaggcatagtttcaatgttcaatgatggcgcatgatatc

SEQ ID NO: 60284 - DNA, 425 bp, Oryza sativa
  unsure (1)..(425): unsure at all n locations
tctgctgctcagaagtccttcgtctccacatncatgtcctcttctctaacctgcacaccagcatgtcggagctgctctagggatatgtctctgtatggctccacctctacttgatttccttgtagatgaaaaggatcggcacctccattgataaactaaactcgattcgactgttggaaatagctagtgacttggatgtttggttggctttgtttggacctactataacaggcatacagctccatcacccggcgacggcggcgttggagctcatgccctgctagtggcgacgcaaaaaggtgcgagcgaaggcagtgaagtttcgagtcgtctgaatttaatgtttgtcttctggtgtatttaatatcggatcatttatatacttatatcgatggaccccaatactctcagaatatgatctatgt

SEQ ID NO: 60285 - DNA, 303 bp, Oryza sativa
  unsure (1)..(303): unsure at all n locations
gcagcttgccctgttctgcacacacattttctttgttttatataaagagcccaggacggcctgattcttgagaattgagaagttcttgcgctcccttttcttccagaaacatatttcagtntgctatcagggaaaataaagccttacccatgagctttttctagtctcaagcggatcgatcggatgcattccatcccggaatgagacatacatggattctgataggttcttacgaagtaaaccctggttgagcagaagcagatgtgctattattagtacggctattcaaaaccgggttaagtg

SEQ ID NO: 60286 - DNA, 322 bp, Oryza sativa
  unsure (1)..(322): unsure at all n locations
attgattctctatcatgnaatttccctagcaggcagctcccagactacaacaggagatgaccgtatatctccgcaagatacagatgcatcatggctctcagacttggacaccatcttaccagagcgagcgacaggacctcatacgtcaagagtttatcctattaagtatgatacggacaccgcaagtacaattctccggataagtattgtgttctaacctacgataaacgtttgcttccatctaataccgagcaaagctcggcagaaaatgaggcgaaaagcaatgaagagtcagcagatctatctcctgagcaccccattt

SEQ ID NO: 60287 - DNA, 353 bp, Oryza sativa
  unsure (1)..(353): unsure at all n locations
agcttgccgcacttaagactactgtttgntgcattcctctataccagaggctattgtagaggaaagaaagaattatgggaaatcaaaagctggtgatgctgacagtgacgaggaaggtgatacttcaggcgaggatgaatctaatgatgatgaggtttataacacagtaacacttttaaaatgagcagccatgacaatttaatgtatattagttttctgtctggtgattgtagagtgcttgctatgaaatcagtaaatgaactcaatgaacaatctataatatagatctcctaattaaattacttttttcaagtaccccttattaaaatactaaaacatgtcatgcatgttat

SEQ ID NO: 60288 - DNA, 308 bp, Oryza sativa
aaactcagctccggcctgccggccagacgggagcattatcttgtgttccgcggaaccggcgaggacgaggacagatcctttcgcgtggcacccgcggctgcagccgctgcggtaggagcgcgtcactgtctcggaggttgtgttctcggcgcgctctccgatggcatccacacaagtattcggcggtgcgtgtgtaaaaaacttataaaaccgtggcttttttgagggagtaagaaagggaatactatctttattatactagtatattctactccctccgatcccataatataagggattttgagctt

SEQ ID NO: 60289 - DNA, 349 bp, Oryza sativa
  unsure (1)..(349): unsure at all n locations
agcttgggtgtcaaaatatatccaatctaacattatttagcatacaagnaagatataatttatcaaccaagtatgtacatgcatgtgagctgtgacaataccagtaaatgcatattaaatgaacaacagaacttcatcatcgtctatccttcctttagaggacacacaatacatatttcttattgactgttcatttattttattacttacttctcaactatgactctaccaaatgaactgccaggacgagtcaaaacttaaaactctgccgcttggcatcaatacaatgtctgtccagccgttcaaacaaccctaactaatgcattcactacgatgaaattgatcaact

SEQ ID NO: 60290 - DNA, 424 bp, Oryza sativa
  unsure (1)..(424): unsure at all n locations
actaagcttataagtaccttatnatgcatgagatcgctctcatttatcattngtcaaatatggcaattctataagcatgttgagtgttaaccttttccgttactgattggagcatttcattcattttgtgttacttcattgactgttctgtatgtttggactgattatcaaaattttattcacacatggaagccacgttgcatgaactgggtattgaaacccggcaggctctcactattgttccacatcataaaaccattcgagcagcgaagcgccaatcatcatcatcaccccatgaaggggataacaatatggatgcagacagctcaggtggttcgggatatttcggctatctgagaactgccctatcggttgtgaatccactgtcctacttgagagcaaatgctgctccatcaaaccctga

SEQ ID NO: 60291 - DNA, 176 bp, Oryza sativa
ggggaggcggggccaggagaacaagcggcccgagagaaaaagaaagcgcagaagcaggagccccaccgggaggaagaagcccaagaacaaaaaaagacaaacaacacaacaccaacgacagaaaaaacccacgcaagaaagacctcagaaccgaagagggacaaaaaagaccgaaa

SEQ ID NO: 60292 - DNA, 350 bp, Oryza sativa
  unsure (1)..(350): unsure at all n locations
agcttcctattaggctgctagtttatcctgcttgttagaaagacctcagttttgtatatttcttccgtgctgatatattggtataaggtggtatcggagtactagnngaaacacgttaggtttgcttcatcgtctatgctgcgagcgtacataatcccaactttgaggcacatttagatattgagtgatttatattgtctcggcgtaacatccgatctatcccaatcattcggtctaagtgcgttccattggacggattacgtatcgttaacatctacagccgatcgagtagacctaataatctctaagttttatctgcctttgccgatctaatgtgagttatatcggct

SEQ ID NO: 60293 - DNA, 420 bp, Oryza sativa
  unsure (1)..(420): unsure at all n locations
tggttntccncttagccgagagttggctactgatttaattctccagtcgctccctcccagctttgagctgttcataatgaatttcaacatgaacaacctgaacaggaccttggcagaattgcatgggatgctaaagactgccgaggaaagcattaagaaaaactccaaccatgtgatggttatgcataagcgcaagcccaacaacaagaagagtggtcaaaagagaaagctaaactttgatgagatcacgagtactagcaactctaagaccaaggttcaaaagacagggcgcgctaaggatgcagagtgcttctttngcaaggagacaggtcattggaagagaaactgtaagaaatatctagagcagctcaagcagaagcagcaggatggaaagagttccaccttatgtattaatgttat

SEQ ID NO: 60294 - DNA, 354 bp, Oryza sativa
  unsure (1)..(354): unsure at all n locations
agcttaatgaactacatgaaaaactttctcagttgcagnctgatctacagaaaagtaaggaaagaaaagaagaaaaatcggcggagttaagcaagaacaaagagctattgaagagccaagatcagttgaaaagaaacattgatgacaaccttaactacaggagaacaaaggatgaagtggaacgacttactcatgaaatagaattacttgaggacaaaatactttccattggcagcctgtctactatagaagcggatcttaagcaacattcacaagaaaaagataggcttctttcagaggtattttatatctcatttgaaacaactgacagttgcatctaataagatggcgttc

SEQ ID NO: 60295 - DNA, 441 bp, Oryza sativa
  unsure (1)..(441): unsure at all n locations
ctatcaggacctatgaaactaagcttacaaacagttaacatctctgaagcctgaacttacaaaatatcctctatgatcgtattttcacaagctgccagttatataagcctgaacttgcggacacggaattgcccgataggcacgtgctcactcagcagatggcggagcaagaagccctcatcggagacgatcctgtcgaccagtgtaggaatgccgtcgccgcgggcgttcaggaggacacacgcacatggcacgttgccgtcctccttgtcatcctagtacgacagcttgagcaccgtgaagctgtcatggcaggcgataagctccgcatgaattgcactatggtggcggcgcccgtggcatactggtggcagcggcgcccgcgcgtggcatactgcaactgtcgcactgaggtgctgaaacggngttggggatggattt

SEQ ID NO: 60296 - DNA, 354 bp, Oryza sativa
  unsure (1)..(354): unsure at all n locations
agcttagccgaatctaaagtcttgtactgagattatagtacaattccacacaggcaaacaggaaaaaggaacaaaatgaaagcgcggaatggatggtacactcacttcttccaggaatcgttgagcgcgtgcacctccccctcgacgcgatccaacgcctgaaacagaaattgcaatcactcacaaaccaaaacgactagaaattacaaatttacaatcactcacaaaccaaaaacgactggctcacgatgcggtgggtagcaacgcgccagtagcgtagcgagcgcaaaccttgtgggcagggagggaggcgtcnaggaaatggcggttgatggtgaggccgcgctgctcgac

SEQ ID NO: 60297 - DNA, 418 bp, Oryza sativa
  unsure (1)..(418): unsure at all n locations
tgcataatgcatcaaaaatnttggtgaagtagatgatgaaatcccctcttaccacctacaataaagaaaagattaatgcagcaaagcaaacgcataattcatgtaccattacttgacaaaatgtttacctttgctatgttgtataatgcttcacacgcatagtagcgaactctactgtcttggtccaagaaggaggtaagcacaggaggcacaatttgctggaagaatagagcaaaaaagtttaatgcaaccaaaatgacacttgatagaacacaccattaatgaagacctgaaacgcagtccatcatagccctaacttaacaggatagatgtctcaagtaaatactataacatacaaaagtaaacaatttagacttagattaatccatggacaagattatatggtgtgttgaaaact

SEQ ID NO: 60298 - DNA, 258 bp, Oryza sativa
ttgcaggaaaacaaattatgtataaaaagacacatatgagctaagtcaatagctgcatttgcaactgatatatgtagcatctctgtgaattgaggtgtgggctgaattaagcagatactgtgctatacaataacatgggtaaattgtagagacattgagaggcacttaacgaacataagattaaaggatataagaagttgccctggtaaaaagttggtaaaagattatcattgacaccggtcaataattaaattaaga

SEQ ID NO: 60299 - DNA, 404 bp, Oryza sativa
tgcatatatgcatgctggaccatctcattatagatctagtgggagctcctttttaggtcagagccatacatatatatgcattttgcatccatccatctattcgttgtgcttgttacacatgcatatatatggtcctcttccatcctcctttttcacccaccaacgtagtcctacattcacctttgcacaggccatgcctaccatgtaattccctctcattatggactacttcctcatacagtacaacggtttcagtctaatttcgtcaagaattagtaaaattctcgtgctctttgatgaccttgtgataaaacggcgcggtcacagaaactccatctggtattaccttctatgatgaccttgcaacgaaattaattcgtcatagatatttccctgttcgttat

SEQ ID NO: 60300 - DNA, 348 bp, Oryza sativa
  unsure (1)..(348): unsure at all n locations
agctttaaaatgacctaactctgtttttttactatagacttaaaccatttaaattacctagacttgaagattaagttaaaagggaactaacttatgtgattgaactcccagcatcagcaagaactccaaatatactttgaaaaaggtggttgaagcaagggtgagtacaacgtactcagcaagctattatatcaaataatgaatgcatgaagtagtatttaagtagatctaggtttattggcagaaagctgagaataaagaggaagaaagcctgngatgtctttatgcaacagtatttagtaaaatcttgagttaagtttctagccaaataccatatgagtcccgata

SEQ ID NO: 60301 - DNA, 85 bp, Oryza sativa
tgtcacttcaaggagaattgctgagaagcatgagaacgtgatcaaagcaaattcacggtggagtttgaattacattcctactact

SEQ ID NO: 60302 - DNA, 354 bp, Oryza sativa
  unsure (1)..(354): unsure at all n locations
agcntttgtgaaaagaaatgggtggtaaacccataatttacgtgtaccaatgatagtacattcccctggaaggaatataagggcaactcaaatatgcccggaagttaaccttagaattgaggaaattgacttcctagccaaaccgatagtcctagactcgcaaagcttggacaacatcctaggaatggattggttggctaagcacaaaggacagatagattgtgccgaaaagtccatcaccttgcaaggacctggaggaaagcaagtccgctttacccctaacactcctaccgcaagtcggtctatcttaacctgtttacaagtcacctccttggagtcggtgcccatagtttg

SEQ ID NO: 60303 - DNA, 419 bp, Oryza sativa
cttgcgagtctaggactatcggtttggctaggaatttttctttcttatttctaaggataacttccgggcatatttgagttgcccttatattccttccaggggaatgtactatcattggtacacgcaaattttgggttttccaaccatttcttttcacaaaagctcgtgatatgaaagaatgggaagctcccgaatcaaccagaactattgcgggtatggagttgacagagaacatacccatcacaatgtctgaagcatcctgagcggtttcagcttgaatgtgattcacacggcctcgaccaaagtggttggaagcacgtgaaccttgtccacttgcctgagagctaggacgagactgagctgccgctgggtaggagttctggcagtgctgccattcgcatgccctgagctggtgttgg

SEQ ID NO: 60304 - DNA, 312 bp, Oryza sativa
  unsure (1)..(312): unsure at all n locations
agcttgagtgtgtgtganaanagatttatctctttctattttttgacaggaacgcgcatattcttgtgtgtgtttcttgtttgctactaaccatggcaggattgcgcaatggaatactagaacatcaacttctacaccttcgatgagatatgacgacttcttcacgtgatgcatatgaggtacatgactataattttgcacaagttgcatcaaagttaccattctatgatgggaaggatgattttgttgcatataatgattaggagctagcagtagacaatcgaattgatatatatgattcttctgatgctc

SEQ ID NO: 60305 - DNA, 407 bp, Oryza sativa
  unsure (1)..(407): unsure at all n locations
tatccaaaaattcagccgactgttttttttttttatatcaccataagntatttaaagatgccggtggtaaaagcactctacagatctgatatctattttggtgctttaaacagctgtcgatataaagaatccaagtgaatactcttaaatgagttatcaaccgctgaataaataacaacttccaagcttagacagcctatgccgtaacttgtgcctgtcatttaagaaattaagcatataacaagccaaaggaacgacaactttaaaaaactagttgtcttgtattaaccctaacagtcttgtgaccctataaagaggtcaacaaatatgatattttactgtagggcaccgttttgtttgcatagtagtaattccaaagaattatctaactgcatttaaaagatttt

SEQ ID NO: 60306 - DNA, 360 bp, Oryza sativa
agcttgaacatgtctataggaaaagtatcagcttctacaacacacaattagtttgattaaattcaccattgaatatattctatagtatattttgttttctattgaaaatattactatatttttatataaagttggttaaacttgaacaaatttgacttagaacaaacccaaaacaactgacaacatgaaacggagggagtgcattttattaatattcattatttatctactacttaaactctcatttaacattaagaaatgaaataattaacttatttttgtaactatgctattatcaactatacatgcgaagacttcatggatgtcttttgtcaagtctatattgagaatgttatttgt

SEQ ID NO: 60307 - DNA, 309 bp, Oryza sativa
  unsure (1)..(309): unsure at all n locations
aactatatagctatgatggttatggacttaatgacgatggtatgcatgtatactatggtggcccatgcaagtacatctaaatgatgtgatgtgctttgcaaattgtaataacatatagttatgtgttagaaataatggaatttaagggaacatacaacaacctaacaccatgtatgcatgcatgcatgcaccctctatttcctttttaataatcagaatcgggctcctatgatnagtagactgatgagatattcattgtcccaaaaagaaacaaattaatgtttgtgtgtggagggggctggagttttg

SEQ ID NO: 60308 - DNA, 345 bp, Oryza sativa
agcttccagcagagtagctacgcactatgtgtcttatcaatccaccatagaattccaagaacgagaacgaccttctctatcaatatattaaaaaaaaaatgggggcgagggccttctcttaggggggaaaaaaggaacgacgatttaacccaacactgtctttttcttatccagaccgagagtctggttaacctcgatttccacatataaattagatttctacaatacgatgggacctgaattatcaaaaacacactgcgctagttatattccttgaattggttcttgctaatcttattgcatgcaatgacaagggttcccggtcatcatatttcctgtatttac

SEQ ID NO: 60309 - DNA, 429 bp, Oryza sativa
  unsure (1)..(429): unsure at all n locations
ggaccataaatctaagctttcagcatgtagtatcgtattgcctctgactctaaccattacaattgcccggttttcgaatcttaaatattggatgaataaataccaattgatcgatacgctgtaaatcaattgctatcttggtttacttggttcaaaagacctctttcagcaaacttaaccatgaattttccaggaactggtttgtttttctctgaggccagttgattatcaactttttggcataatttaacatcaggaaataaatttctccggaacatacgacaggccacgttgtatgcctgaagtccgaggcctctattcagaaaactctccatcagaatgtggcatgttngagcatctctcactgaagcagttctcagtatcttgtagaggagactgtaagccttattaagtttaccgaaagcacat

SEQ ID NO: 60310 - DNA, 56 bp, Oryza sativa
gacctataaaactcatgctgctgaagaacagcaaactggactttttcttctctttt

SEQ ID NO: 60311 - DNA, 349 bp, Oryza sativa
  unsure (1)..(349): unsure at all n locations
agcttgccttaaagtttaaacgtcttctcctgtgtcnttccccaatggaagaccacccctttcttcgtcaactccttcaatggtgcagcaaaggtactgaaatctttgacaaaacggcgattgaatcctgcaatgccaaaaaagctcctcacctgtgtgatggttcggggaaccggccaactctttatggcttcaattttcaactcatccacctcaattccctgtggagtaacaacatatccaagaaaagagactcgttccatgcataagatgcgctttttaaggttagcaaacaaacgtgcatcgcatagagcattaaaaaccacacgtatatgatccatgtgttcat

SEQ ID NO: 60312 - DNA, 416 bp, Oryza sativa
  unsure (1)..(416): unsure at all n locations
tgaaacttgtgatgaatgcaaaatactgatgagttaaatgattgnngttncatactatagacgtgctctccttgagaaatgggaacatctaaaacaaggtgacaaaactgttagggagtacttttatgattttaaaatttgtatcacttatagtggtttacaagaatctaatgagaacacaatgaatagattttttagagagcttaatttcaatattcaggctgggcttgttaatgtgacatataatcatatatgccaattgttcatgcttgcttgcattgttgagcgcaaaattttggagaatccaatagagcaacaagatatgcttgtgcctcctatcactgatgttttgcaggaagttcagaaaagtctcccaaatgaaaagaacgatatgtttgagatgtcacttccatcac

SEQ ID NO: 60313 - DNA, 341 bp, Oryza sativa
agctggtttccataaggattattgttttgcatttaattagggaaaggctaagtggataaaatctcttgcttaactccttaacataaagtgttggttgcaagagtacatgtgctgacaatctttttcaaaatccaatatttactgtacctttcgaggcttcacttattcttctccacgacgaattgttcatcttcaagttatttgtcatacagagtatgcaactcctatacctgacctttaagtccgaaattaccttaaccaataggagttctcagcttcttggatttgtcgctccatatactgctcaatcataatgtggtatctataggtatatccacctc

SEQ ID NO: 60314 - DNA, 338 bp, Oryza sativa
aagaacggaatggaagaatatctgatcacaagttgaagggcgccgagcagctcgttggggatatcaacgagaatctcaaggtcaaggcggatggagactcctatcacaccacaaggctttaagtggatctccaatcgggccggcgatgcgacaaaaaaaaaagcactaacaaggcgcactacggttcaccagttcaaaaagcataaacctagggggaggggcggcgctggcaaaatttcacgaaatccgcttgccggagaagtgggagcaggggttccccttaccctggagagctcaaggagtaagggggcttggggcaccgcgagccccaccaagca

SEQ ID NO: 60315 - DNA, 347 bp, Oryza sativa
  unsure (1)..(347): unsure at all n locations
agctttattgctactattgatattgtttattgncattagcaagtaagcaatcaagtaatgagtagttgataggttgtagtgatctgtgaaggcatgtcatttcttaatgtaatatggatatctgaatggaatttaattttctgaatggaatgcaaatttatgagttgaatgcaaatgtgtcttccagtgagaaaatttggcagcaaatctatacattggaatgaaatgtgtgttgtaatgacaaattttggcagcaaatctgttgaaaatgttgtcccaaattgtagctgtacaataattagtgagaaaatttggtagcaactatgtacaattcctgaaggcatgcc

SEQ ID NO: 60316 - DNA, 405 bp, Oryza sativa
taagtctagtgcaacaacttcaaagaatgcatcatctacaaatgtgcaaaaggattctttagtcagtgagaataagaatatggttagtgatgatgatcttgatgaagatgttgtgaattatttgcgtcacagcacaacctctggaaaatccactaaaactgaattgcaagtgtacctagaacaaccattagtggaatggggcacaagggacaaaacatttagcattttgcattggtggtcactcaagcaacatgagcttcctgttctttcttgacttgctcgtgatgtattgtctattcaagtgtcacctgtagcttcagaatcagcatttagtgcaggcggacgtgttattgatccatttcacaatcgtctagatcctgaaatcgtgcaatctttggtttgcac

SEQ ID NO: 60317 - DNA, 346 bp, Oryza sativa
agcttaagctgaattataagaggctctattgtactatattgggtactagaataggaagagagtagagtagatggagttggaagaattccggagttgtcggtaatcttctcctatttcttttattctgtttattactctgaattcaatacaatattcttcttgagtaatttagatttattttgtgagaattacctcttggttagttcctaaatagcatacagaattattgttcactataatcaacttaaatatagtgattgttttggtgagttataaacactaaagtagatagtaattgcttagacgtggtgtttaggtaattgttatccagtaattgctgcgtatc

SEQ ID NO: 60318 - DNA, 409 bp, Oryza sativa
  unsure (1)..(409): unsure at all n locations
tgtggaaacttagttcgacaaactgagagtgtntggttctttccattgccacactttcttaagtagttggcacacttgccgcattatggctagcaaagtgtggatgctactaagagctacatatggagaatatttttgccttggtggaggcttcttcccagccatgaagccataatttaggggtagtgttcatgggtgtaagccttttcccatgcttttaaagatttgacatgcaataagatcgttattatgcaacctgatagtgtgtggaatgtggtcaatttggttttccacgaatgctaggaagcatagggatacccggtgaactgtactgtcaaccattggggaaattaaggggatatggttttgggttgtgtttgctaaattggcaacctccacaccccgagaa

SEQ ID NO: 60319 - DNA, 334 bp, Oryza sativa
agcttgcttctagtgtagcaattctcataagaggggcgttcgtgtactgatcaatcgggatcgttctgcagatcgagtgatgtgatccatcttaattagtaatccatctgatcataaatatacaacgcaattaattttagacatgacgttgaatctttttatcttatttaaaaaatttataaattattgtaaatatgaaaaaagtataagtagttatgctcaaaatatttgtaataataaagcatgtcgaacaaattgataataagtgcacatttctattaataaagtgaaatataaaatagcgtgtctaaagttaattgtgtcaaatatttgt

SEQ ID NO: 60320 - DNA, 413 bp, Oryza sativa
tcgcagaaccctcattgacggtggcagtgctctctacatcctcttcgccaagaccttggatgatatgcagattcctcgctccgagctgaaaccaagcaatgcgccttttcacggagtaattccaggattatccgcaactccactcggccagatcaccctcccggtcacttttggcactcgggaaaactttcgcacagagaatatcagctttgaagtcgccgatttcgagacagcataccatgccatactcggacgcccggcgttagccaagttcatggccgtcccgcactacacttacatgatgatgaagatgcctggtccccgaggagtcctatccctacggagtgacatcaagcaagccgtcacatgcgacaaggagagttgcgacatggcccaaacccgcgagatggcgt

SEQ ID NO: 60321 - DNA, 361 bp, Oryza sativa
agcttgtcgccgaactttcctatccctcgattgacttgggtctctcaaataattaactaaaggactcctccaatcacctaactcatctcctactgacccggttattccctgttgttggaccgaaccagtattaccttgttcggtcagatcgttaattgtgtccattgttacagtactgattacacctccaaccgaatcaactccaacagtaacaaacgccggcttatttgttacaaaaaacactcccctgttcacatgatagccagacgcctgctgtgctaagaaatttgctctaacattatcctctctagatatgtgacgaatagtaaaagtgtgaagcgatttaattatatccaaacat

SEQ ID NO: 60322 - DNA, 418 bp, Oryza sativa
tgaattactggattcacatgctcatatgtgagattcttatgttcagagtcactgtcaccaccacccatctcaatatcttcaccattgttggcgccaaggccaaaaaatgtcttgggtgtccgcacttccttatttgcaattgctagtcgagcaggaaaaaaattcagagaaacccaatattggagataatctcgtagcttgagatccacaaatactaatggaagagatccaaacctagcaattaaattttaaaatatccagggcatcagattgagttcaaacaatatgcaaccttccaggatcaaattgacaagctaaaatattgatgatgatacatttgtttgccatcaggtgattatccaaaatttgtaggccaaattttggagctgttaatttgatactgtaattgattaactag

SEQ ID NO: 60323 - DNA, 283 bp, Oryza sativa
tccaactttgcagcggaatatgatcctccgacgtaaattaacatgtgacaattgccacatgaccccacttgtcagtcacaaagttatggttatgttatgccaaaggatctgatttggcatgcggatccttgggctggttggtttgcatgatatattcgtaacaaaaactatatgtagttgagtccatggctctaaaattctcctaagggccaccattgatctccccatgcaaaagggaggcatgtctcagagaggcctgttacgactatcgaatgaacatggg

SEQ ID NO: 60324 - DNA, 400 bp, Oryza sativa
ctgcccttcgtcgatagtcgtgttgacattgttgtttatgggatccaacttttcattattaatacacatttaatgttttcatatcttttccaccttgagtgaagcatgccctttggtacgatagttcgttgttcgacaaaagtatgtatatcttcgacatgttcttagacaagtgtggtaattgtgctactgtgcatgtggcctgtcagtccagtatttccttcatatataacctagaataattgtacctttttatattgacatataattttatcatttagccaccataactaccaatgtatgtctcataccatgatacatcggaagtaaaatgagtaggttatcggcatcaatatgtaatctttaggttaatactcctactccctccatccataaatat

SEQ ID NO: 60325 - DNA, 355 bp, Oryza sativa
  unsure (1)..(355): unsure at all n locations
agcttggcttgactacacgtacacattcacacccttaccatattcagnggntaaatgattccggaagagcaaaggtaacacaggtttgtagggtttcgttttccattgtctcatatgcagattctgttgattgcgatgtggttcctatgcaaccttgttcacttttgctaagccgtccttgggaacatgataatgatgctacacaccattgtaggagcaataaatacacttttgtgcataatgggaatcaaattactttgctacctttgacccctgctgaaattgtagaagctgataaagagcgagctgctagtttgaaacttgatgaatctgaaaatcagcaagtggctaaatc

SEQ ID NO: 60326 - DNA, 356 bp, Oryza sativa
gcttgttaggtggaggaggccattggatttctgtttgagacggtgccggtgcaagcgtcgtacaacgctgtcgttcacgcgctttgtggagagttcatgatgtgggaagtgttctcggttgtcaacgagatggtgcagaggggattgcaaccaaatgtcgtcacttacaccactatagtcgacgcattttgcaaggccagggagctgaggatggcttgtgccattttggctaggatggtaagcatgggatgcactccaaatgttctcacatttactgcgttggtgaaagggttttttgaggatggaaaggtacatgatgcactttctatgtggcattggatggtggatgaaggatg

SEQ ID NO: 60327 - DNA, 417 bp, Oryza sativa
tgtaggtgctcttggaaatacgtgttacaacatatctctttctattgattctacttcaactgttccttcattctctaaagcatgggtcgctgctgagatcctttgctcttggaaatggataggggagagtgtatttggcagtcttaccttctctgattcagcactcaaacatggaatcactttgtggagcttaaaattataattatcaaaccgttttcaggaaaattaaaattgaatgaagcttcttgttacgctgattttggcgaaaagcattctgagttggctggatgtaaccatcttttgcctatcatccagcccaagggaagtagtacaacaaggtaatctgcaccataacatttttcaatcgtactagtacaacgctacattcatataatctgttatttttggcagatattt

SEQ ID NO: 60328 - DNA, 332 bp, Oryza sativa
  unsure (1)..(332): unsure at all n locations
agctntactgccttcatgtgaacatcactgatgcagagctgggcggaggagttcgtcaaaggtacgcctggaattattagcttgaatgccctttgtgtaccattggtaacactatactagatcctgtctggttgaacttggcttatgcttgcaaatgcaggattttttagttcatttaccaatagctgatttttttttgtcttgatcattgatgattctgaaacttggaaatgtaactaatctaaaggagatgtaagttctgttttgtgtgagctgacatgttttcaaagttaacttgtttatcgttctgttttgcagagttagttcctgtg

SEQ ID NO: 60329 - DNA, 406 bp, Oryza sativa
  unsure (1)..(406): unsure at all n locations
ntgattctcctcagcattacctttagcttcagcctcaaggtgctgctggtatctcctcaacatctccaacctctctgctacctctttcatcgttggtcgttcttcaccgttcatgcttaggcatcgcatgaggaggtctgcaatctctgttgccatttcgtcgttcatctctttcctcacttggctgtccataagctctcgatgacgaccagccttcactgctgtggtgaagcgtgacaccaagctcatgtcttcctctggcccgtctaggtacaatgccttcttcctggttagaagctccagcacgacaacaccaaaactgtagacatcgctcttatcggttaactggcatgtcattaggtactcagggtccaagtacccacaagttccctgcaccaacgtggca

SEQ ID NO: 60330 - DNA, 356 bp, Oryza sativa
agctttactgacacatatcataacttctaatttcaaagtgagataagaagaggaaacgagcgcataaagtgtactgtacaagaatgatcgatttcctttaaatatggcactgcttcggcgaatcaaaacttaaacaattgccaacagagaatgaagaacagaagaaaaaaagcaagaacaacctaacagtacagtacggcaccgaacgccatcacagagaagtgaaaaacaggttacagacaaaaaatgcacaatatctcggtaagggagaaggaagccaaatcaagattcaagagatggaagtttctttgataggtaaagaatcagaagatttacaagtaattcaatggagcgac

SEQ ID NO: 60331 - DNA, 428 bp, Oryza sativa
  unsure (1)..(428): unsure at all n locations
tattaatactcagcttgtcggcctgttgtaagctgcttcttcttgtttccgcatctgtgatattagtcttatggctcattgtcgggatcgtgggaagtgtcctaattggtgtggtgtatggttctctcgctccagtaatggccacatttgatgcagttggagaaggaaaagaaagaccactataccactgttttgtggtacattttccttttcgttgatttactctggcattgtccttgttcttacttctaaagatttattccttcgaaaaaataacttctcaagttctacatcggcatatgcaacttgaaatgcaggatggaacatggagtactataacaggaagctgtacagtanttagggacctgaaagatttattattgcattcatatttttcaataatggatgaccttcgttttcatgcacct

SEQ ID NO: 60332 - DNA, 409 bp, Oryza sativa
cttcccggaccatggctctgcttcccccaaatcctctgtgcaccgcagcgccaccgcacaactaactagcctggtgctataagacacggatgctcttacgagtgagacgtcgatggtggcaatgcacgatctcctaatcgtgtctgcagcagagtgtgaattcagaacacccaaatctccttaactcacagtcattcctcctcccaactcccaagaaacatttcattcctcctcccaacaaaaaaatggcttgtattcattcctcttcccaattattcttggcaaacaagccgtaaaagctatctctttgaactgggaagcactatgttggaagctcctcccaacaaaaaatggcttgtattcattcctcttcccaattattctttgccaagcaagccgtaaagcaatc

SEQ ID NO: 60333 - DNA, 426 bp, Oryza sativa
acaatactaagctaggattacatgctgaacagaactcttactgatatctaaacagagacttccgtagaaaaattaatgagtcgataacaatacaaaatgcacatattgcgaatgctgtaatacaaccattccgcatttacctttgtgcaaatactattttttctacagtatgcggcttaaggctggaagaggtttccagcatccttgactgatattacactgaatgttccaaccacttgttactgacaacctgcaatcttatgccatgtagataacgcctatcggcatgagggaggctgcataaaccagtatttatataagtattcaaatttccagctgtcacagtttgaagaaagaaattcttctatcatagaacataccacaaaaaaattaatcattaacctcttgtacagcatgtcataattg

SEQ ID NO: 60334 - DNA, 349 bp, Oryza sativa
  unsure (1)..(349): unsure at all n locations
cctgagcttctctggnccttcacgaacctgatctaatagtgctgaaatccaaaatgctaaaataggaataaggcttgctattattagaaatgcccaaaaaatatcatattcgtgaagcagaaacataaatgtactcccattaatgtggaataggcggaactgaattaatcaattcaagtcagcattgtcaatttatacagaatttctctcttttcctcggtgaaacaaggatcggtttttctcacaccaaagggcttagtttagcctttgtttcctctttgccacgtcttctttaaagattcatccaatggaatcccgaccccctttctttttgatttcctttctattt

SEQ ID NO: 60335 - DNA, 419 bp, Oryza sativa
  unsure (1)..(419): unsure at all n locations
tctccagaccatacaaatgcacggcgagcccatgcgaatggtttggttaagatatgccaaattccgccaaatacacaaatgaaacccaaccatacatgtcccccaattatatcttctaaatcatccacactaacaatccaaccctctcccccaaaaggggattttagtaaataaccaaatataacaccggggctaagggtcaaattggtaatttttcttacatctcctcccccaggagcccaggtatcatatataccgccaaaataaagagctttgagtactagaagaaaagcacctatacctaacaaaattaggtgaatacccaaaattgtagtcattntatttctatctttccacacataaccaaagaatggaaaagattcttcaagagtctccggtcccagaagcgcgtgataaat

SEQ ID NO: 60336 - DNA, 345 bp, Oryza sativa
agcttcctgatgttcttctgcagggtcttgcttgctacatcagcttgttgagcgattgacaggaactctgcactcccagatgcaaaaatagaagtcccaggcaaaaccccgctaaaggaaggctggtaacggggatcgattgagtatccggatggttgcggctggacctgcacaggagctggtccaccattcgctgctctctgagcagaagcatcatccaccctcctaccaagccccttcctgaactgctcctcctcccatttcctctcttcctcatcctcatcgtcatccttttcatcctcaacctccctgaaaccatcattgataacccccaaactggcagca

SEQ ID NO: 60337 - DNA, 417 bp, Oryza sativa
taatgccagcacgaaaaccaacatcaccatatggtaagagaagtgggtactgcagtgacataagagctggatgaatgggagaaagctgactcaattcacctgaatgcttctgcacaacgacatcaaacttcgatatctcagaagatgtaccaggaacaatgagcgcagccaacttagaagcagtgggaaggcagtaacgatcaccctgagaatgacctgacccaatgagtttgatagcaatttcaggagcacttggagagagcagcttgtctcgagcaatccggaactgttgcacaagaggattgcattggtcaagcatagagataagctcttgtacaatagcagggtcagggacatctgcagcactgtcagcatggtcaaaaatattaagtctgttttgcagctcattggtggtgt

SEQ ID NO: 60338 - DNA, 348 bp, Oryza sativa
  unsure (1)..(348): unsure at all n locations
agcttgtttatggcaaataataacttatctagtgngantaaatcacctatatgaaattaatcaacgacatatcccatataatagcatatagtgggagaggtgagcaacccttagttaaccaagcagtaaatagaaactattcaaataaatgattcaatatattaagatattgtgcacacatatattgtacatcccattatagatatatggtatcgtattaatttgcttgttgcatatattaatttagagggagtatgtgacgaacatgaatattagataaatactagttatacatcttgtcctcgtataattacagatcaactgtaaatttggattattcattgtaaa

SEQ ID NO: 60339 - DNA, 392 bp, Oryza sativa
  unsure (1)..(392): unsure at all n locations
tctcaattttttgctagacagtgtattcaggaaaatacaagaccgtatattaatctttcggcagcgatttggctatgatctatatggccggaattaataaggaatttcttcatcaaccatgatgagcgggaataagatcgacgaggtcacatgggaggatcttgacgcggagcaacacaagatgatggtggttacgcacgagctgttgatgaaatcatacatcaggaccaatcaaggcatcgtgaaggaaaacgtctcgcttcctcaagttgtagttttaccaaaggtaacctccgattcgcccaacccgtcctttgctaataatcactgtgtagatgtatatactacttctagttntactcctatacaatatgcttataatgctatggggg

SEQ ID NO: 60340 - DNA, 352 bp, Oryza sativa
  unsure (1)..(352): unsure at all n locations
tgcaagctttngcatctactgattgagttctgcgagtgtagttgcactgacctaaccttgacgttgagcagtttggtccatacatatggtatctttattactggaagttgtattgcaatttcatgatgtagataaggagaagcctggcaggttagaagaccaaattgaagttgaagttgtattccaatttcatgatgtgagtgcaattaggaattttggatgtaatctttaggactccaaggaaggagaccaatctttagcattgcactagaaaagaagatattcactagtaggtttttattaaaaaaaattaatgcatcgtgaaaactggggcattacagtttacagatga

SEQ ID NO: 60341 - DNA, 415 bp, Oryza sativa
tgaagacgacactgtagcagggaagtgaattaaactttcactgggcttctttttctccagcccgattgaaggagggacaataaatggacttcagaggaggaataaagccagctgaaaggaagggagtatgagccgaggacttaaggtgaacttttccagtttcagcacgaaaaggaaaaggggattttaattacttttccaattaaattaatcactgaaatgatctctgaattgttaaaaatacttccaatgctcaaataatttcaagaaaaatcctgaaaatacttggacacccaaagtacttaacaagattataataagaccatttaatgattaatttaatatgtggataattactgaaatgttctttgtatgattaaaattaggaattgagctccgaaaaatccgagaaaat

SEQ ID NO: 60342 - DNA, 315 bp, Oryza sativa
  unsure (1)..(315): unsure at all n locations
agcttctccgctggctcctcgcccgcctcaaggccctttagttctatgccaacaagcagtacgcctccgagatcctcgccatcctcctacaggacagccccgccaaccagaagcgcctgggcaacattaatggagtcgacgggctgctgcaagccgttgccatgttcaagtccaaggacccaaagacctctgatgaagaagagatgctcgagaacctcttccattgcctatgctgtgtgctcatgcccatggagaacaangaaagatttgtcaaggcggagggcgtcgagctcatgatcatcatcatgaagcaga

SEQ ID NO: 60343 - DNA, 186 bp, Oryza sativa
ctgagctaactgtgtagtaaaatctataacgatagttactaaagtgccgtgaattgttctagcctaagaataacattggcgtgaatcttaccgggaacatttggaaatacaagatctcctttttactgtctagaatgacactgagagcatcgggttttttgctggaatttaaatatctacacctgg

SEQ ID NO: 60344 - DNA, 320 bp, Oryza sativa
agcttgtgacttgatcgaagttcgtggcttgaaggatttatcaaaagacatcaactctaaggcccactttgcgatccgcccattttcttcgcgagtgtgaagtatatccctgatggaaatgatgtaaccaccgtaaccgagtgaccttggaagtagtgagataatttcctgacggtaattaaaacaccatataatagcttttgaacctgaggatatcttgtcttggagtcggccaaaacttcgctaacgaaataaatcggtcgttgtactttttgaatatggccttcctcctcacgctcaacaaccagaaccgtgctcac

SEQ ID NO: 60345 - DNA, 309 bp, Oryza sativa
agcttcatggatgacgttaatgtgctttgtttttctgcgaggaagaatagattgattggaggagctatgtgggtccctgtagcaacgaggtgaacgcaagggccattgtggtggggtctttggtgagtggagaggtgagtgcaacgagagctctggtgttctcgttactgctatcattgcccggcgagcaaagtggccggattttaaagaaaagcactggaaggataactcgagggcaagtttgcaaccatgggtactcaccgtcattttggaagtttcctcttccctaaacagccaaaaacatttaaa

SEQ ID NO: 60346 - DNA, 199 bp, Oryza sativa
agcttggagagagtggcgcaactctgtatggtaagaactaattcataccccgcgctttgctacagaatatgtgaatgaatatatattacattatagaaaataggtatatgtttaaataatatgaaatgatgagtaaacattacttacatattgatttctaaatatacaatacaatgataatcttatgtcacgtttgcat

SEQ ID NO: 60347 - DNA, 314 bp, Oryza sativa
  unsure (1)..(314): unsure at all n locations
agctntangtagactcctaatcatattctgtggcattggcatgacaaaaaagcgtcaacaaatatcacgaagcaagagatagagagcttataggttttcttgtgcaagtcaccaaacaagtgaacagccatcttcgatcgtcgtggggcatgccgccatgtgagatacttagccagctatgacgacggcgcggatgaatgacacaaaatagtttaaagtagtattccagtaacgtttggtaaaggtgcctcactatggtgctctctattggtattagaaatcaatctgaactgttgatttcatttgatcgaata

SEQ ID NO: 60348 - DNA, 316 bp, Oryza sativa
agcttcaaaatttctcatataaagatgttatgtcatgccaaaattttttgtgaaatttttttggtgattatttacaaatcggaggtgtctaaaaggatagtaacttcatcctccaatgtttttttttgttgatatattacttttggagctatgtttcacacttttttttgtcaccaaaactttgttgtaagttgatgagagagaaaatttgtgtggcgaagaagaatatataggaattttgtttgtttacttaaaaaagttttattctcatagtttaaaatataatgaaaattaatcttaaataatagaaaacaaa

SEQ ID NO: 60349 - DNA, 308 bp, Oryza sativa
agctttgccatgacaaggctaatgtgtttggcacgtcatggattgcgggtaaagcgtacatctattgcagtatgaatattattaaaactatttgaatagccgtgctcgcggttatcgggcattgggactcacaatggcatcttggttagaaacataattctaaactttattaaatactattgcatctaaagcatcacatggtttcttcctctatattctcagccttctgcaagtaaacctagctgtacacagatattaccatttcatgcattcattgttgattaatataatagcttgctcagtatgtt

SEQ ID NO: 60350 - DNA, 329 bp, Oryza sativa
atcttaaagtgactgccgcatgcaagcttccctaacaataatatatgctgaattaaatccttccttccacattgtcctccaagcaaaaaaacaatggataatttgttctcaaaatgcagacagcttgaaggtttccctaagcaatagtacatgctgaattaattccttccttccacattgccctccaagcaagaaaccttcttgtacatgtccagtttacgatcctgagactcatcagtaaaatttgaagctacaaggagagaggaacaaaacaatcttacatccctgtagtaaatacaagacaatgagctatattcctgaaatttgta

SEQ ID NO: 60351 - DNA, 277 bp, Oryza sativa
aaaaggggaggtaaggaaaggcgaaggtatataaaagagggatgactgtagtgagctgaaacacaaaaaaagaaaaaaaagcaaaacaaaaaaaatttttcaaaaagaggtaagaaggggaaaaaaaaaggcgggaaagaaataaaaaagcaaaaagatagaggaaaagaagaagagaaaaaagaagagaagaaggagggaaaaaagaaagaaaaggggggaaaaccaaagatgagagaataaagaagaaaataaataacaaataaaattccaagaa

SEQ ID NO: 60352 - DNA, 319 bp, Oryza sativa
agcttatatagtgtatagacgacagataggtatatatataaacatcatgttgaagggagaacaaggttatatgttaaccagaaaagattcgtgagatttggtcaaacaaatccatactatttttattgatgcaaccatcacagatcatcataatttaatgcattttcactggacatgttcccaactaatttatgctgagaaatgtttatacacccttgacagaagctctgattatcttatggagatataaatggtagaactgaccagccatatcaagtgaagtcataagtgtgccagtgtagactctgtcaacagcaat

SEQ ID NO: 60353 - DNA, 320 bp, Oryza sativa
agcttgctaatggcttgcacagggattatggcaacttgatcactattgtcatcagtatgaactttatatgaattccttcttcctgataagatttccaaaagtaccataccgaagctataaacatcaacttttggtgtaatagcaactccactaatccactctggagcaagatatcctactgtgcctctgaatgtagtcaaaactcggctaaagttccttcctacaaatgctgccatcccaaagtctgcaattttaggggcaaacgatgcatcgagaagtatgttttctggcttaatatcacaatgtatgatgcattcgtt

SEQ ID NO: 60354 - DNA, 314 bp, Oryza sativa
agcttctatatagtatgtttgctatgtgaactttcaatgatgttgtcaactttaggttgtacgcatcatattttgccaagcagtcggtatatcacttggatcaaattatttggggattcacaccgcatatgctatatattggtatcaagtcacttggttgactataattatcaaaaccactcgggtggttggattatttattccttgactatatgtttggtttgttcgattaaccacatagtcgggggttacacctattaggtgcatctagtcggtgcacctgactatattttttagcccctcacagtctttag

SEQ ID NO: 60355 - DNA, 320 bp, Oryza sativa
  unsure (1)..(320): unsure at all n locations
agcttgtcaagttatcattcttatgtttggcctgttgctttgnggncaaaatattgggtcgaatcatctattactactagcattaatgtggctccttaaatggtcccttagagagcgattgttgcaggcgagagaatttatatctgtccgtaacttaccgagagtctcctccaaaaaatcaaatctatagtactatctttgttttaaattataagtcgttttaattttgatcaaaataaactgcttcaaatttgtaaaaaaattgtaacattttcaatccaagacaaatatattatgaaaatatgttaaaataaaactaa

SEQ ID NO: 60356 - DNA, 317 bp, Oryza sativa
agcttcttagttggcccacgtttgatctgagcagcccaacatgccccaactagatagtacgtatgctattgcttcgaattctgtctcaaaataaattaatctcgtatgaaatgtgacatattctagtactaaattcgtagtactagatatatcacgtaccatattggattaacttaatttgggacatatgaagtagatcatgtcggtcatgttcaccttataatgattttcaaccattttaaattttgttaataccaaaattataaggtaacaactaaacatataattaccaacgcaactctaacaaaacttatact

SEQ ID NO: 60357 - DNA, 330 bp, Oryza sativa
ggaccttaagcacctgagctgcagcttctcgaccttttctggctattatcaaatcagcatggccgaggaggactaggagataacaacgttcatcaccccgttcggagtattttgctacgtctagatgcccttcggattgataacagctggcaacactttccaacgcatggttcaaggcacactcagcaatcaacttggcaacaatgtcgaggcgtacgtcgacgacatcgtcgtcataaccaagacaagcgattcattgatcgacgacctccgggaaacgttcgacaaccttcgacgatatcgtctcatgctcaatccagagaagtgcgc

SEQ ID NO: 60358 - DNA, 306 bp, Oryza sativa
agcttgtattagatatataccgtactcgtagatttatgattatcagtatatttgtgtaggtgtgttttgcatgtgcatcttctgtttagttcgaaaaagaaaaatagtatattcacaaataggaatcacaaaatcacagtatcgtactatcaataatcacacatttatcaacagggatgattaaaactgattctggtgaggaacaaattaacatacaagcaaagtggacttctgtttgatttggctatagaggtggaaagaattggggttggatgagattcagtatatggtagaggatccgatatg

SEQ ID NO: 60359 - DNA, 307 bp, Oryza sativa
  unsure (1)..(307): unsure at all n locations
agcttattgtgttaataaatataagattcgaaagggagccttactaaaggttttgaatggcttaaattcaagagtttctcccacggctgatatatggacatcaaatcaaaagctgggttatttgtgcattacttgtaatttcatagatgaaaagtgaaacttgaataaaaggataattaagttcagtttggttgaggcgccccacgacagcaaaactatgttgagtcaatacttaagggtattaaagattgacatattgaacagaagntgttttctatatcattggataatgtttcggtaaacgata

SEQ ID NO: 60360 - DNA, 311 bp, Oryza sativa
  unsure (1)..(311): unsure at all n locations
agctttgactgtggcttgatccatttagtncgtgaggaaacactcaaacaaaccggatggtccttttttttgttactggatgatatgatacaatggtccagtcacatacactactccacgagctatagccactcctcttcatctaattactcaagattttaccccctccatttacattgtacggtccttgctggtccacttgttattagtcgtcgtggtactgtagtactcgtagtaaattttgggtaaatttaatcagcgactgcagtgtgtgagtgagatgttactggcaatgaaaacctcggcagtca

SEQ ID NO: 60361 - DNA, 310 bp, Oryza sativa
  unsure (1)..(310): unsure at all n locations
agctnttctccacctctcttcccctttttctctcaattgtttttctctctctcggctacaaacaccgggtcgtttgatttgggctacgaagtggtggtactacttggtctagtactccactccactgctactgtggaagaaaacgaataggatcaagagaagaggaagaaagatgggggcgattttaccgttatgccctcgcggttgggggaattcgctgggcgcaacgggaggcgctccacccacgcggccgtatctgtgccacgtgggagtttacggaaatgcccctgtctgtgctggcttggggtgg

SEQ ID NO: 60362 - DNA, 324 bp, Oryza sativa
  unsure (1)..(324): unsure at all n locations
agctntttcattgtagtgcatgttggatggtggcgctatcccctccggcgcaaccaaaaaagagcattgttaggttaagttttttgggatctatttgtaaaataagattttgaaaagtacacaaatgtaaaaattcagcatcgaattcagatgcatcgatccgtctccacacctaacagagttaataagctagcaattaattaaggtgagtagcaaaagtatagctagctagctatctgccaaaggaacgtgacgaatgagatgaagtagccgacacagaaataacaagcggctacgagatgactttattagctagacttttgt

SEQ ID NO: 60363 - DNA, 325 bp, Oryza sativa
  unsure (1)..(325): unsure at all n locations
cagcatgcagcanttcgatgacctcacattggcagttctccctctatgaatcttagccctcatgcactctaggcggtagacttgtctagcagtgaaggagttctggcgctccccggaagggaaaaacacacacattcctacgatggttcttgtcagtgaacccattccatcatgagtgatctcttatggggatcctcatgtaaggattgccaagcacagactctgaccatccggaacgggcatgcgccatccacctggccatgcgaaccggtcattcgccaacaaactgcttgccgcattacacacctataagaagaccactact

SEQ ID NO: 60364 - DNA, 320 bp, Oryza sativa
  unsure (1)..(320): unsure at all n locations
agcttatatggcgttcttacaaaaccttgtatgcattttgttcacagtaatattntattttaattcttccttgcttgattcttgtataagatataagattaatgtgtataattactgcagcattgcaactgaagattgatgatctcatgttatatgtctcaaaaatgcatttaggggccctgataaatagtgtcatatcatgttatgtctagttgactccttttcgtgtttttacgaaagctcttatgtatttaattgatctgtagtgttttgtaattgtattcactttactctttctccatatttgtcaataaagttat

SEQ ID NO: 60365 - DNA, 308 bp, Oryza sativa
ccctattccttcctgactatctcataccctaaacagaggtgcattggacctcaaatcataataaaaaaaacactagactataagcgaaacaataaaaaagtagcatgcagtccaacagtcgccgatctcttcgtccaagtagtgccactacccaagttgccctaatcatttaagagaatctccatgaaacaggggacagtcctaaataacaagggaggcatccgggataactttttcttggtaacagggtgtatggacaatacaatcatgatccattattgtgctttaaaagagcgcgaggtagacaa

SEQ ID NO: 60366 - DNA, 301 bp, Oryza sativa
agcattgcgagtatgttgtgtgtcacttttctgttcggaagaaaataaattacaccgagtcttgaagacactttctggatctgaacgttgaatcatcttgttgaaacgactcatatggtatgtatataagagcaagagtctggcgtcaaggacgacttcacacaaaacgatcatagctcacatgatgctgcattatgatgcgaacccttatatatcttggaaggtttatgagtcaagactgcgggcaatgtgacgacatatactgctcgaaattcttcagctgttatattgtgactttgtt

SEQ ID NO: 60367 - DNA, 315 bp, Oryza sativa
agcttagatccttgttgaattccctatctcttcttctagcttaatggattggcatcctagcactggcatgaagaataatctaaaatctgatgatgaatcactgcatttcacactactaatgggcctataacaatttgaatacaactatattacaggacaaaataaaaggtaccttatacatcttggtcatgttctttccaccagctctaacctcgattattcagccttttggaaaccattcatgtgtcatctgcatatatgtcatggtgggactcacatataccgaattattctataaacaaccaaaatcatgaa

SEQ ID NO: 60368 - DNA, 321 bp, Oryza sativa
acctgcagcatgaatcttcatgacacgtttttccaattttttcacagggttaccatatgcctactagaggggtcccataccatctacaggttatgtcccagaccatactgtgccaggaatgccacgggttcttcccgacaccacctccgcgaaaccacaattctatcggcatcgatgctcccctgataagctagttacttagccaggggtgttccataccacccatgtggtcgtacttgtcttatgttcggatgacaaatcatggaaacaggccttaagagcaagagcggaaaaccgtactcctgggttatcccctgacct

SEQ ID NO: 60369 - DNA, 316 bp, Oryza sativa
  unsure (1)..(316): unsure at all n locations
aggcttgtatggatatatagagggtatggtgagctttancgacagcctccggtgccttttgtgtggatccaaagacaagcaataccatcattatgcaggggacaggaggcgctatacaacaagaaaacacaccacccaaaatcctattaaaagaacatactccttccgtcccaatatgtagcaacatagaatatgatcagaactaccctaaaagtatgaatccgatcttatatcctagcttgctacatattaggacggagggaccatattataatggagccaattagctatgcgtataaaactagaccatcacacc

SEQ ID NO: 60370 - DNA, 318 bp, Oryza sativa
cggcatgcaagcatcctgtgggctattttctatgacaaggaggcaagcacgatcacaacacctaaacgccttgcggtgattctagagacgccaatcacttctatctaacaaaaactataccaagataggggttgataactaaaccggctagcggagccgaatcctaaataactacccgtctcgggggtaaaacggaagggtttcaggacaaacctacaaagaagagtggcactctcacagcgggggcggatgagttacggcgcaaatcaaccgagatggacaaactaagagaaaactaaaagcgatatgaaaaacgat

SEQ ID NO: 60371 - DNA, 308 bp, Oryza sativa
agctttaatctatagcgaggggtgattttgcatgacgcttatcttcgtgtgctgcaaccccagctgcggtcacagatggagggagtacgtggcatgcaaaggcagtagagatttgcgttatgccatgaattggtctatgtttactttgtcaacaagagtatgagatgccatgatcctatgacagaggaaacaaaactgaagcatgtgtggccttccttctctatctgtttttttttctaattcaagggcgcagctagttgactagttccacatcatggaatcttgaagccaacagtaaagtaatcaca

SEQ ID NO: 60372 - DNA, 285 bp, Oryza sativa
cagaaaacccatggttcgcaacgccaccaacccgacgggagggagcgcgaacagaaacgccgccaatcgccgccggagacgcagtgaaacccacggacgtgccgcggcactgcactaaacacagcaagggcatggccttcgaaaagcaaagacgcccacgaagggattaacaacccgagcacgccacaacatacggggtcgagccaaacgcggaaataacataaaacacaaggcccatgccgaataaaactccggaacacctgctaggggcagagggatctataa

SEQ ID NO: 60373 - DNA, 320 bp, Oryza sativa
agcttctcatgcgcttcgagtttgaattacccaacacaccgacactttctttctttctcgccgcatcgcattgcactgtgcctgtgcttgtgcagcatccatcatttggtttggtttttcatgttcctgtgcatacgcatttgtgtctgtacataggctcggtcctgtatattgtttgtgagtaacatgtaataataaggcttcacgccatgttcattcctcctgtttgaacccctccaaatatattaataccgaaggtacaaaatatctcaacggcagacggttctgtttgcagggcaagagtaatttggcaagtgcgc

SEQ ID NO: 60374 - DNA, 320 bp, Oryza sativa
agcttgtctatgactattgtgaaatattccaattgctttttacggtaggtaaacagatactacccgtagaaagcctgttagtaagtatctattttgttgtttgtcgagcatctttgatttagtgtagagacgataaaacgtttcggtgagcttttttgtcaactggatatatgcgtcaaattaattgcgtcattttccaccatgatttcaggtcaagaagccgtatagagtatggaagtgagagatctacgaatagcttatagggctcatggttgtctccaacagtcgcttgcattaacattaacttcaaaaggatcacc

SEQ ID NO: 60375 - DNA, 322 bp, Oryza sativa
agcttgcataacctcggccagaggtatttctgtatgttctccatcattggataccttcaatagcagatgatcaaactcctatcactctccagcattagtgaagccaaccagtggatttaagatacttacatctccaacaggtgcaactgaagagactcgggtaggggctgaagtggcacccatccaagcctcacacatattctaccaacatttgtatccacctacatcatcaacagatacagataaaatctccacttctccagaaataaagaaacgaagattcttgaaaattatttgtgaaaggaaacatacaggaaaagcc

SEQ ID NO: 60376 - DNA, 321 bp, Oryza sativa
  unsure (1)..(321): unsure at all n locations
agcttataagcaaccgcatgagtgcaataaataacaaacggactttnttatcctacaccaatttactatgcatcgtccattgttccatgatcccatggctaatattggtcttatacctcataggagacataatttattgccatgcaaattttattaaagataattattacagcctaataaggaatatcttaatatttatttaactgaatataaaattcgaaataatattaaatataaaagacatgttccgatttcaaattgaaatttgagtatccaaattataatttgaaaaacaaagtttcagttgtttttttaaaaaac

SEQ ID NO: 60377 - DNA, 318 bp, Oryza sativa
  unsure (1)..(318): unsure at all n locations
agctntggatagctctcttgatctttcttccgttngcaagctggcggtctgcgtggaacacctgaatcaatggctatgatgtgaaagctggaaatcttaggctgactaggattgtccggcaacatgagatcagatgtatctgagccaatactgccacttattgaaactgctcttctcggcttccgattctgagggcttctgatgatctctggcttgtaacgaatgattgcagaatcataaacatcatctaatgaatcgaggtttgcataagcattcctgtcggcaacaagtaaatttgcgtaatttccccgccaacca

SEQ ID NO: 60378 - DNA, 329 bp, Oryza sativa
  unsure (1)..(329): unsure at all n locations
ggaaccctaagtcacctgcagcatcaacttggaaaagttttttcgctttttttacntcgcaagcgagagagaatgcaaaaattgctcaaatttgaaaaattgggtctcaatcattatggcctagccatactggcacccttagccggcctatttaaacatctctaatagtctctccatcctactctctaaaaataattatagccattctagccaaaaaaacgtgctccaacaacctttccaaccggatggctaaaccatatgggtggctaaaaacctttctccactaaccaaatttggccactctatttggctggccaatggtgggccct

SEQ ID NO: 60379 - DNA, 311 bp, Oryza sativa
  unsure (1)..(311): unsure at all n locations
agcttggcggcgaacctattgatctttatcgtcaggcttcngccaatggttggtagcgaaccccatggtcttcgccctacggcttcgcccaaaggacttatccgatgctttgatggattaggtagtttccgcaggttaaccaaaggccctcatgacattcctccaacaaccgcttttcctgcggtccaataaaactgttatatttgtgttttgtaattctctattttatactagttgtattcatgtcaaaatcctttgttttctcaatcctgtaattcaagaggccctattccactccgtattccaccacc

SEQ ID NO: 60380 - DNA, 314 bp, Oryza sativa
agcttcagatgtttattagctaacatttgcactgttagaaaccgagaacattacctacataataagagtaaattaacacatctgcaacaaggatatgtcatggtacatgttatgttgccggcacgcttacctccaaaagcaagcacaagatttgtatttcatgggtggacatgatctgcctaaactcacatccactctgatactgattgcgccgatccagaagatcaaacaataaagacttcacatcttctacatcaaacaagatgcttcctactcctttcagtattgacaaaatcatgaactgcaacatatat

SEQ ID NO: 60381 - DNA, 308 bp, Oryza sativa
agcttaatggaacaaatcatatcatcacagcctacgatttctgatatgcaggtaagaaaaacaatatttgaatatcatatataatttagttgtaatatttctgtttttattggaatttacaggaacaaaattcagcacactctacttttgttgcgagtccaagtgcatttcaggtatgaaatattaattatttaattgaatctaataattcaaattcaaaagcaaataagtattgatataaaaattttgttttgcagaattcaatgatattaacaacaaatcgtactaatgctaatattgaagaatgg

SEQ ID NO: 60382 - DNA, 310 bp, Oryza sativa
agctattaattcattttgtcgaggccttgccggatagttagcacaaagcacaagcatgcatccaaaggatcaagagagtacaaagcgattggacaaaaaccaaataaataaactcccaaaggagcgatcggaagatacgtatcaccgccctcggaaaaaaagttcagaacaggcatctatcacctgcgtccaactcgatcgatctaccaatcgaggattttttttttaaattctttaattgataaaattagaataccgtacccttaacattattttttaaagaaaataggcattttggccttggcagtgc

SEQ ID NO: 60383 - DNA, 321 bp, Oryza sativa
agcttattagaatgccaattgttaaactacatataagtgtatgacaccgaggactaaaaccattactaatacattgttagaggggtaatcctataatactatacaagtgatccccacttagtgtagttattagcaatttcctgagcgattgttaagccacgtcatccctttgattctcccatggctcccatgcgattgtgtgcagcagtactcccatggctctaccacacaatccccaccgcacgtcagctaggggaagcgacggtctggagtgccgcctcactcctcttcctctccctttgttgccacacctcctggaaa

SEQ ID NO: 60384 - DNA, 321 bp, Oryza sativa
  unsure (1)..(321): unsure at all n locations
agcttcgaataaatatgttgatgttattttttatgcactggcaggngaggaacttgaaggaccagcactntacagaactctatcatctgtacaataagatatctaggaagcaagaatatgtggatagccaaatgccatctcaaatgcctatagaacagtatggaaagatgaagaaatttaaagaaatgttggagcgcatactgcggttcctgcaaatttacaagggcgacattctgcctgctctcgcagaaaaaatccctaaatacaagaggcagattatcacactagtggagaaaccatctttcgtcggtcgggctattt

SEQ ID NO: 60385 - DNA, 322 bp, Oryza sativa
agcttgcgacggcgatgggaagaggtttttacgacgtctggtggagtgggcggaaaaggggacggcggcgggcggagctcgggatggcggcgtgaggaggagtggcgaagggggcactctggatgatggcgggcgaagctcggggccgaaggggtggcgggaggaaagggctacggagctcggggcggcaggaggagggggcggctgagctagcctaggatggcggcgggcggagctcggacggtggatgaagcgcctgcagccaccgccacgcatctcgtttaggcgacggaggggtcgtccgctgccgtcagtgcttaag

SEQ ID NO: 60386 - DNA, 322 bp, Oryza sativa
agcttcgggcaatttggcgaagaaaatactagtcggtttaataacagaattaaaacaaataccggttaaactaagtatattaggcataacaagcgtttcgttcttgtagagtaaataattggattttgattgagttatttttctaagggaaaaaggaaaaggaggattcaaaatccttttttcttcggactttcccaaacacaaaatacctccttgtattcgcactctcaaatgagagtggaagaaattcgactttcatataatatcttaatagaattccatgtaatgatcaatgcattttttggattctatattattcgca

SEQ ID NO: 60387 - DNA, 315 bp, Oryza sativa
agcttcacagcattcccaaacagagtatgttatggcttataaggaaaaatcacaatttgccctgaaagcaaatgcataaaagagcctatgtgtatattatcatgggttaacatatatgactattcagctgaacccgctgtgtgctggaactaattttgctgaaagatagtagtgttggttatgggacctggcattcttcactaaaatgccattttaggttttatatcagaataaaaaaaaactgatgttagacactatactgaaccgatcactgcatcctgcaagctgtgcacggagccaaccaaatgaaattat

SEQ ID NO: 60388 - DNA, 311 bp, Oryza sativa
agctttcccactcttttttattaaactacttttttattatgtgaagattaatatgctgataaaaagcttctccattcttattattaatcaaacgaaagtttccctgcaaattctgggttttttttccctgttgaaagaaacaaattctgaacaaaatttgtgtgtgtgtgtgaaactttgtttgctgattaatggtggcgcctataagaaattccttcccattgacgagttgactaatctgattaacccagaatcccaagattaaaaaaggggatggatgtcataatcacaattcacaatttcacaagtta

SEQ ID NO: 60389 - DNA, 254 bp, Oryza sativa
agctggtggaaaatgttatactgcatttattcaaatgcatctacgcaatggaggtgctgtacaatggtaatattgtaacagaattgcataatgtgccataatggacctactaactgtgtcaatgctaaccgtacataaatggaaaacgccccacagtattctaaaaggactttttttagattcgtcaaagattcttttatatgagacagatggatcttcaaatgccataacatattgaaattttaactgtggca

SEQ ID NO: 60390 - DNA, 309 bp, Oryza sativa
agcttctgtttctacgttactcactctcttgggagggttcttgtacttctctgttgacaagttatacattcttctcttcagaacagctgttgagccactaagctaccaacgataatgtgcgatatctctatctactgaaacaaaagtgtagattcgatgcaatttgtaattttgaactgaagttgtattagatgctcaacgagtagtaagcttgggtagaggtaaatggccacttctctacatgctaatgctaaattgtaagacagctaagcttatgtaactgccatgtaccacgtgagctcctgctgt

SEQ ID NO: 60391 - DNA, 307 bp, Oryza sativa
  unsure (1)..(307): unsure at all n locations
agctntgcttttggtctctacaaccttatttactttgccttgtatttggaggtgtgaagcatatatgaagacaaaagtttttgcttggcttatgtttttggacagaacaaatacaagggatctcgggatctcttagagagaaagcattgcaagcccccaaatgtaccctccttttgtgtcatgtgtaccttaggatcaagagagacaagagatcatttgttttttgaatgcccctttgctgcagcctgttggaatatgattgggttctcatgggatacttctcttgattttcatcaaatgattcaag

SEQ ID NO: 60392 - DNA, 326 bp, Oryza sativa
agcttctaaaacatctcgtgtctcttctctagcggcgattgagtaagaagagagaaataatatgagaaataaaagggaaactgtaaaaaacaaagaacacggcttatgtattctagtgaattttactccaagcctacatgtaaattagatttcgcgggtaaacgggcaaagcgggcatgggtagtgatgacccatacccatgcccatttacccatcgggcatagcttttgacccaataagatacccatgggtataaaatagagaacaaacccaaccctaatagggtttttacccacggataaacgggcaaacgggcacaattgcca

SEQ ID NO: 60393 - DNA, 317 bp, Oryza sativa
aactttatctcacacagaaatgtagtttttgtacgcgtttatttcatacagggaccgtgcagtataataataattaagagacagtgcggctttgtaaagaaagaatgtctcaattcacttgaaatggtggcacaataatcgcagtagtacagttatttacactggcgaattatttatggaaaattagaagaagaagaagaatgaataaaaatctccggtgctaaataattatcccggatttgacaagggaatggatgactagacttggccgcctcaaaatcctaagactttctcaatcatctcacttcaccgccacc

SEQ ID NO: 60394 - DNA, 317 bp, Oryza sativa
  unsure (1)..(317): unsure at all n locations
agcttctgttgtgggttttggaggttgttatttcggttcaaggcaggataataatagcttagcaactcttttttttttccgtggaatggtatgaatttaacatcagagaaaatgacgtgctgtacattgtatacaaccatatagaatagaaatattgtccttatttaggtcacaaatgttaatccctttctgggatgtaattttctgatggttctgtgtgaaatacccgcggaatattggaattggtctgttcaataagggcctgaactggacctagnttgaaacacaggtgttcctaacctccctccctcgttttc

SEQ ID NO: 60395 - DNA, 313 bp, Oryza sativa
  unsure (1)..(313): unsure at all n locations
agcttgttgatgtttcctagatttctttcttatcaggatangagcctcttcttcatgtgcttgttcagtggctgccttcacatgcgtaagagactcttgaattgtagcaatctccttgcgaagctgatcagccttttgcttgtttgtttcagctaagggcaatgattcctcttcctgctgtgctgcagccaacctcatatccaatgaagcttcaaaatccttcttgagctttctaagctcctgttttgctgcatcaagatctgccaaagcaacaacatactgttcccttgcaacatccaatttctgctataaa

SEQ ID NO: 60396 - DNA, 280 bp, Oryza sativa
  unsure (1)..(280): unsure at all n locations
ttcttgctngtttatgaatacatggaaaacaactgcctagcgcgtgctcttttcggtaatcttactttctaatttcctgggttcccctcttaacttatttcatgttagaactcatgtgcaatttctgtgattaggtacagtccaacaatacatgctgagcttggattggccgacgagacgtaagatttgcctgggaatagcacgggtgttagcatatctacatgaggagtctgctataaggattgtgcacagagatatcaaggctagcaatatactgctt

SEQ ID NO: 60397 - DNA, 299 bp, Oryza sativa
agcttgaacatgatcttacctgtcaattcgtttttctaatccacctggaaacttataggcatcctttcagtgttacccttcttttgcagtaacagtattcctgtgcaggtttactaacgaaggagttctcgtggaatgcctgttctggaaggatgttgagaggttgattgattactacaacactgagcgcaagggcaaatgaatgggtagtccatgtgactatgagacgttcattgtctagaaaagagaccctcttgtggaattacttgcttggaagaaatcttatcttaatcaaaata

SEQ ID NO: 60398 - DNA, 304 bp, Oryza sativa
agcttcaagttccatagccccaaagaagactaaggtgacttttaatatgcttttgtacaagtatgagaagcaaggtggtgagaaaaatcacaataagggcaaaagactaagatcacctcctagggagtgatttggtcattcaccaagacgagtggagtcacctttccctcatcatcctcaagccatgccttgtccaatgccgccgtcaggttatccttttctttacttcatgccatggggggcaccgccaccaatgtttaatcatatgcctccaatgcaattccatcaaggttggggaggaccg

SEQ ID NO: 60399 - DNA, 336 bp, Oryza sativa
gggattctcatagtcacacgcagcatgaagctagcttaaactttgagctttttagccgagctcgaatagctcgtcgagcctagagttctttccgtttcttttgagctggcattactctccctccagatcttttaaaatttccatgcaacagctagaagcagtgctagtctactagtagagtaatagtacttgattcatctcccaagaaaaagctgaagaaaagcagagcatggcgtggaggcaggccctagtctctgctagtactactaatacctagcctctactagtactagggtgtgttaaaaatagaagttttattgaaattagaatgatgtt

SEQ ID NO: 60400 - DNA, 311 bp, Oryza sativa
tagccgtgttcatcatttgatatcatttctgttgaaaccaaggagtgcatgcaagcgagtgggaaataatctacaattccacttgcatatattgccagaaatgtcaattattggtgaggagcaatcatccacctgatctttgagccaatcataagaggaggtgctgaatccaaaacacaaaattaatttcacaagggcacattgattgtatgtagtaaatagatcagaggtcaacttatgttcattcatggcaaggataacccacggatcatcgcgttaactgataaggcaggcaacctgtcagtgcctgc

SEQ ID NO: 60401 - DNA, 309 bp, Oryza sativa
agcttttcctgttcagcccaatggccgttcaagcaaaggcgcacaacctctctccgagtgttagcggtgacgacggggagccgaacccacgccgtcgagctcgtactccaccgccccctccacgccaaagtcctaggcgggaggagacgctcgagagggtcgaaggatccgcgacttcgacatccacgggtgatggggaagggcggcgagatggggagcgtcgcctcctcgtctacggcgacggcagcacgccccagggcgcgctccaagctacgggcgcgctcctacgtcacccgcccattgtccctg

SEQ ID NO: 60402 - DNA, 321 bp, Oryza sativa
agcttgcatctttgtcagctcctgagtatgtgctctccttcattttctcgccccttgctgctgaacaagcaaggaatagcggttccacttctggagatctctctgcacgacctccaggctttgagagcaataagaagcctaggcttgacaaccctattcatgtgagtgacatgggtgctcccccattctttgggcaagtaccacaggtgcaaccacagattggagcaacagctgctcttggaggcacacagccaccaacacaagcaaaccaagcaaccggttcatttccaccacctccacctccattaccacttatgccac

SEQ ID NO: 60403 - DNA, 319 bp, Oryza sativa
agcttcgcaccagatatgtcgacccattataacaatgttaaaagctaccaaacatataataccatgtcccgaaaaaaatatcccccgccagttccactaaaccaactcaatcccaacacttccccaactggctctccaaaccaaatggacgagacattgcatcaagccgaaccaaacattcttcttcactccaggaccggactttggaaacgctcaggtaggaagcatcttactgttgcttgcattctgcaggtcgctctccctgctgtcctttccctgcaggaactcgtccgcccttctgtttcaggaaggaaagcaa

SEQ ID NO: 60404 - DNA, 322 bp, Oryza sativa
agcttcccctgtgaatgatagcaatttgtctgtcctatttcatcatcacagaaccaatcaaggatgatgcagtctccagaacaatgccagctatatctctccagaatcagaataagtagccatgtttgtgattttcagttcgctacttatcactgtaatcggaagtttgcagcaatcatgtaataaataaatatattcatgattataaacaatgagtttgttatgtttatggaagattcatgttgaggatgcaatgtaccgatgctaagcacctttccttttaagcagagcttagtattcatgtaatgagggagaaatgtgt

SEQ ID NO: 60405 - DNA, 319 bp, Oryza sativa
agcttgacgatggcatcgacaacccctgctctctcctcttctgccgagaatgggcatcccacgaagttggcaatggcgacgacggcgctggcagtatcctccaacatgtcctcgtacctcaagaagagcactctggtgggcatctccacactggccctgaagtagccaagaacattgtcccaccaagggccaaacacggtgtccccctggcagaacgactcgtagaggtcgtggaactcggacacatgggcttcctcggggcgtatcttgcggtagtagtgccacagggagacgagcacgtccttggggtcgcgccaca

SEQ ID NO: 60406 - DNA, 336 bp, Oryza sativa
gatccttaagtcacctgcggcatgcaagcttgtggaaccttgtagaacctatagtacgttccattcaagcagatcacacatcctattttacctttaatttgacctgaaactgaaaacattgctggataatcgataatggtcacgaagatgatggcctttactgtgaagtattcccttaagtactcatcccacactttcaatccctctttccataaatcaaccatatcttccaacaatggttcaagaaatacgtcaatatcaataccaggctgacggggtccctgtatgaggatacagagtagtacgtattttcgcttttgacaaagccaggtagga

SEQ ID NO: 60407 - DNA, 316 bp, Oryza sativa
  unsure (1)..(316): unsure at all n locations
gacctgcaagcagcaagcnngcacaggaggaggagagcnctctaaagacacggtagcgacaaaaaagacgtgatctgcaggaaaaggagcagtggataggggtacaaacaaacaccaatctgaaagtagacaaggatcaatccccaagaatgaggcgaaccgagatcttgacacccctgaaaacacttatagctcgcgtaagaggaagtgcaaagcgcgaatacacgcctcaattaaaacggaccaggcgtgtggatacgcgccaagcatagaagcaaacattgccatatgacaccaaaagaaagcgacctttgcc

SEQ ID NO: 60408 - DNA, 341 bp, Oryza sativa
  unsure (1)..(341): unsure at all n locations
tcgacccggatccttaagcacctgcagctgcagctttaccgnagtatatactggcttccttcccctctctctcccgtgcccatagccgagacgacgtcatcactgcctcgccctctcatagccatgggtcattgacggactaccgctgccctgaccatccttccaaataggaaaacaccacagagttcgtggaagggagttcgatggagcttgttcagagttcgtcacatatcgagaaagagttcgtcacatatctctctcaactcttgtcatcgatcgagtcgcatcccttaaccaagggtaagagatgagggatatacccgcgtttatgggtgatggat

SEQ ID NO: 60409 - DNA, 306 bp, Oryza sativa
agcttctggcttcttctaatacatgttttggaattagtactggtttattcgtagcttggcttgaagagaagatgcatcatgcatgtaatgtaagatgtgtaagctggcaagtttcttgcaaatctgttcacgtcttagctcagtagttcctttcgttgggacttggttttgaacagaagaaacactcatgccatggtgtaaaatagccaatggtgtttcataaaaagacatgtgcaattacagaagttttatagaaaagtagccaattacttagtgcgttgacagtacggacgggcagtcagagag

SEQ ID NO: 60410 - DNA, 307 bp, Oryza sativa
agcttcctttatagcataccaacatgtcaaactgccaacataaagtaattaagatccaaactaacaaaaagaagctataatgaacatgcatgaaaattatatgcgtcagatcgatactacacctagcggattcaaatccccaaacaggagtagggtattacctcatcgagagggcctgaaactgtctaaatacttgtctctacatccatccacttttaggtctcgtgcgctaccccctttatattgctgaaatcttgtttcgacaattctaatcctatttgttataccagtgtttcggtggagactg

SEQ ID NO: 60411 - DNA, 322 bp, Oryza sativa
agcttgcctgattttcgtgtgcagaatattataagggaatgcaatagagtagcccatgatttagctaaatttgccatgcgtacgaaccattcagctgtttggcgtatgcaggctccttcttgtgtttttggggctctggcaaatgattgtaatcacattgatgagtaatcaataaagcgttcccttcccccgcaaaaaaaatgcatgaaatattaaatatatgctaaaaaataactaataatacagattgtgactaatttgcgagataaattttttaaatctaattgctccatgatctgataatatggtgttacagtaaaca

SEQ ID NO: 60412 - DNA, 321 bp, Oryza sativa
  unsure (1)..(321): unsure at all n locations
agcttgtagtatttatagatattagacttgtccattctgtaagntggtgcttacatatgttgattactaataaataacctctcaccatgtgaaggtggcatcgggcatggccatcccaacggaccgttcaggtacttaccactgcaggctgattccagcaggatactccaaggtcgaagatgagttggtggaaggcgcgtacgaagacctcgagttggattaccctggaggagacggtgagacgcatctactagacacaagccacgccattatactatggcgcaagtggtacatcatcctccctgggcgacaagcggtgtc

SEQ ID NO: 60413 - DNA, 319 bp, Oryza sativa
agcttcattggatgcctctgaatcaattaatggagctagcctattagtagcagaagccaaatctattggcagctcggatatgttggagaaactggccataaaattagcatttactctaccagcatcatcttatgctacaatggctattagggagttgatgaagacttcaacttcggtatttctccaattctctgatcatttctttgatttttccaaactaaaacttagttatgagcaaagttcatctgttttctgtgtcgataatatatttttatctttttggctgcacacaggttgctcatcatagaacattaaacat

SEQ ID NO: 60414 - DNA, 318 bp, Oryza sativa
agcttcttggatgaacagaactgtgacttgctatgtttctctgataatacttctgtactatccatatttgcaatttgcagatatcttatttagtagtgatcatgtgtgcccccttccagaggaaatggagaattttgtcaacaaaacacggtttttgtcgcggaaacgcggggctaaaaaaaaatcctaactcttctaagcacgttttgaattacagcaattacatcactggtttgatcagagaagacaaataatcttcgtagtattccaaaaatctgaccttgcatcggctaaaatagatgggtacctacctaccag

SEQ ID NO: 60415 - DNA, 306 bp, Oryza sativa
agcttatgcttttttggtggttatttcttgacattattttagctaactctgccgatactttagactgcgtaccgcaagaatattttttatattatagacaactactatggtcaaatcatttataacaaatgtcatagttatttcatactaaaattgcttactatgctattaaagcatggccctacctgtcatacacacattacgttttgaaagaccggctacaactagctatagatttgtagttcactgctcttctctcttatactttatctctttaaaatatgtctatagctagcttatagcatg

SEQ ID NO: 60416 - DNA, 310 bp, Oryza sativa
  unsure (1)..(310): unsure at all n locations
agcttggaggtctccttattggctgtttctcacgggttgngtgatccgggttagtaatgtcgtgtgggtaaagtgtaccccctctgtagaggttaacaaactgttcgaacagccgtgcccacggtcatgggcggatgtgaggtgattcctagcgtagatttgcttgactactgcttgtgaaattgctgttgtggaaaggggttcgatgattgaaaaatctgtagctgatggaattatctatgcccgggtggccgtttgaaagttgttggcccgggtggccgtatgaaaagctgttggccgggtgccaacc

SEQ ID NO: 60417 - DNA, 309 bp, Oryza sativa
agcctattacaatcttatggcattatagtggtatttccacactacacaaagattcaaccccacagagctcacctggtgggtctctgttgattcaacactgtattatgctaactacctgcagatattatcacagccatagcctcaactctacgctttcttctttttatgtgacgcttccttcggcttatccactgccatcttgattgctgcttgcattggtaccatccacaaaaggagcttcctttggttctccaccaactttattggcggttgtatccttcacatcaatgtatgccgattactttggct

SEQ ID NO: 60418 - DNA, 310 bp, Oryza sativa
  unsure (1)..(310): unsure at all n locations
agcttgccaggcattgtcatatcatctgtgctcatttgctttgcttcagcttactgcagctaaagtcggttctgcatgttgggacattgatttcgtcttggctctgagaatggcacaccactcatgtgtcatgattggcatattcaggaagtgatggtgttagctaattgccaaccatcagccataaatcaacttcattatttattacaaacaaggcgttacagattcttgtaaaaattcatgagtagggaagtgcagctaagactgangttttgaagcagttgaagtgttgccgaaatttaaacatgtg

SEQ ID NO: 60419 - DNA, 304 bp, Oryza sativa
  unsure (1)..(304): unsure at all n locations
gagcgattcactggaactcatctngaattttatttggctcctgtatgtaggaggtagttcattttattgagttccaattccttttattacaaatggtgctggctttatggagttgaagcatcaaatttacacaaattggccgtaaattaatctatttaactttatttccttggactatcaacttattcttatctaacattttttttcacctcccatctgtggggtgtggagacaaacgctggcctttatgataaacccactgcatcttatggggtcaaacctccaaaaggtttatcctgtattg

SEQ ID NO: 60420 - DNA, 305 bp, Oryza sativa
agcttattctatatctagtactttattttctcctttgacttctttggatattggtgcttcttcgtcgacttatactgctctttctactattaatgtcatgtttgatgatcaacttgagcaattcgaggaggaggacttggctttggctattaacaaggtgtctcgagctagaattgtgtcacgttcaggaaaagaggaggtcaagtttgttgctttgagtgtggagagcttgatcacatccgtttgcactgccgcaagcttaggagagccaagacccaagacccaagacccaagaaagaagacaa

SEQ ID NO: 60421 - DNA, 228 bp, Oryza sativa
tgcatgcaagctagcttataatacaactaattcctttattcatatgggccaaaggcgtcatgttatctaccactcacttgtcgaattttgtttgtccaaggatggctccgttaaacgtagaacccatgataaatcagttctaagattatttggtgacagaactatttatactgatttaaatgactcggattttgtgtgggagtaactcgcatgggtcatgacgtgtgt

SEQ ID NO: 60422 - DNA, 306 bp, Oryza sativa
agcttgggcgatcagagcaagttcattgttggcgaaccctagattctaaggtggggagaaccctgcagcactagctctcgatcgagctagtgctccggcttcaagaaacttgttgccgcctatacgttgcattgtggagaggtagaaaaagagtgttcttgagagggcacgtcgctctcttgacatgatggaagagctagattttattcttctatatacgcactatctaattgcaattaatcatgtacattagacatttgtacaacacatttcctgccaattgaatacgtccatgtgctacgatac

SEQ ID NO: 60423 - DNA, 418 bp, Oryza sativa
agcttggttgcgtgatagaaagtcatgttgggcctcggtcaaattctgagggcacctacttattagtttggatttgatgcccgacatatacggtcccgcctgttgctaattcctgatgatcatccgacgacctaaattttgcaccaagatgtatgtgtgccatgctttatataaaacaacctgagtttgttctgctcttcaggcgagaggcgtatgcttatatattgagcctccgtgacttatcatgtacctactttcttcgaaaaagatgcctggagtcaaattggtgaacctgctggtagcaagtgctataacatataaacaacacctgacccctgtcttaactattgcgatggtgcctccacatgagactttatgaatcgtatatcttgcgtcaactattcttatttcagagagt

SEQ ID NO: 60424 - DNA, 384 bp, Oryza sativa
  unsure (1)..(384): unsure at all n locations
tggctgaaggatatgcacaatccaagtctttcagggtgctcaatntcttaaggagggaacttctttcctgtttaaaaatagacaaagaaatattattgattaacaaaacacaatacggtttgacgagacatatatgatatatttaccacacagcaagtcaagtcttcatgacttggatctgaagcagctgccgtacttcgcaacgcgatgtcaacaagagactgcgaacatagaatggcaattcattcaaaagaacatataacgaagaaggaataacatatcactggagaaggatcagcttataccagagcagtcaaaaattagtttccgccatgagactatagcaagagacagacagacaatactgcacaacaggatacctga

SEQ ID NO: 60425 - DNA, 422 bp, Oryza sativa
tagcttcacatctatgcgtgtggaaatattgtaattctcgcatgtggttcgttacgaagtccaaactttgaaaactcatataaaattatgtttaagtccaattgacatgaaccaaatattcttacaatatgttctttgttatagtttttagtttctctgatgctaagttatataaggcgacttgacataactgaacaaacatatgaaaatattgtaggatcactgaaagaacttaggttcatatcaactaaacttataatgaattttctataatcgtttggtcatctaaaaaagaatttcacaagcgaactgactacacatatgcatgtgctatgttaatatttcaagcggcaggcggttctcctaacaatcctctcttaaaaatgtaaaaccattttaaagagtgcagattttgcttgggt

SEQ ID NO: 60426 - DNA, 434 bp, Oryza sativa
taaggctagtaatggctggtcggcaagagtttacataactctttgagctgttaaaggatctgttgccagaggggaacaatttacctcagacgacatatgaagcgaagcaagtattatgtccgttgggcctggaggtcagaagaattcatgcatgtccgaacgactgcattttgtattacaaggaatacgctgacttggatgtctgccctatctgtggggcatcaagatacaaacgagcaaagagtgaaggtgaaggaagtaagtcaaagaggggaggcccagcaaaggtggtgtggtatctcccaattgcggagcgcatgaagagaatgtttgcgaacaaagaacaagctaagcttgtgcgctggcatgccgaagaacggaaagtcgatactatgctgaggcacccagcagattcagtacagtggaggacaatc

SEQ ID NO: 60427 - DNA, 265 bp, Oryza sativa
cacctttttcctctattgccctaatcttgcagccttgcagctgcaggattgagactgttactggcaaaaccaccgcttctgtccagtgggacagcactgtcacatcattctagctggagtacatgtgagtcgacttgacactcgaaacaacgaaaaatctgcccaaattttctgcacgaaaaactaaatgtcacagccggtatataaagaaaggcttgtctcggcgtacagtaaatttggaactgcaattgaacactaacgcatt

SEQ ID NO: 60428 - DNA, 451 bp, Oryza sativa
  unsure (1)..(451): unsure at all n locations
tatacaattcaatcactcggacattaatggagagcatcttcaagagcacctcatatagcctcaccatccaaaaaatttagaaaaaaaataactaaaaaaaatgcccctccaaatctccaataataacccctcaatccgatatggcatctatctagcctagtgtttttcaaaaaaggtaaaagggttaagatattgagcactcgacctttcaaacgactaatggtgagataaataagagcaaataactatatcctactcaaacagttatcatcgaagaaatatcgatagttataaacagagatttaaaaccttggtctaacccctctaataaccagcatcaaaaagtcacaaaaaagtcatacgaagaggagcggcaaagcataatccctctattttaatagatgacgcattgacatttagatacatnattgaccatcttgtttattaaaat

SEQ ID NO: 60429 - DNA, 406 bp, Oryza sativa
agctagtctccctgtgtgagcctgttattcttttttgactgtaaacactatagcgagagcagagctctctgtaaaggggtttcttctgtccgctctaacgagaaatgaagttgaatgcttgtttaaatgaagttctaactctgagctttcatttctttaagattttaacttgtcacattctctgaaaatgggtctatcgtcttggcctcctataaacatagcgaatgcaattctactgtctataaattaatataaatatgtttcaatgcatttgagaaccattgttgtgaattcttattttctaataaatacttcacccttttaacaatacttcgatatggattggtttataaagcatgttcgcgcgaaaactaatggtggtggcttatcagtcatgtaataatct

SEQ ID NO: 60430 - DNA, 410 bp, Oryza sativa
  unsure (1)..(410): unsure at all n locations
agcttnctgcatatatgtgttattttattcctaagccaaaggttggttgaagtgccttaatagttgtggcttgatgaaaacatcagtaggagtaactgttagttcagaagatattcagcaccatgtctagaaagcagattgtaagtagactaataaaatacctaaatcttaaatgcgaatatttggtacagatgctcctttttgactgacattttgacctttcacaatcttcaagatgcagctttgaccattaattattataaacttacattaagatgtgataatgaaattataaaattgtgaaagcatctataatgacaaatctaatggcacacattttattaaaaaatctgaatagtttcaaacatgtcagtagtcagacattataaaggttgaccacatgtatttca

SEQ ID NO: 60431 - DNA, 428 bp, Oryza sativa
  unsure (1)..(428): unsure at all n locations
cgttaactggagacatcaccgncgatttattttattgtaatatcatggccgtacgtacaaatctaacgtggtgggctataatttgccttctatcttcatgggctctttcagcccatctattttttctctaccactcactgatcggcagtaatctagggagatacatatcgatctcatctctccgatatcaattaacgacagagatgtgggagagaggactccagcgaccacgagatactccgcacgatttgtgacaatattgaatctcaaaacctctctaactcagctactattttacctcagtctttgacagattggttttttattgattttgattcagactcatctgaaacatcatcatccacgcgactagatttgagaaagtcagatgccgatcgagaaatcgagcacatctgcaccggtcccaa

SEQ ID NO: 60432 - DNA, 133 bp, Oryza sativa
agaaaaacacgcgcgacaaccaaggcttttagcacccacacccgaaccgccgcaagcgcacaaaaaacgccggggacgaccaccagaaaagcggggccgaaaaagagccaaacgggggaaaaaacgagaaaag

SEQ ID NO: 60433 - DNA, 345 bp, Oryza sativa
  unsure (1)..(345): unsure at all n locations
aactcaagcttaaccttaaattaaagaaataaacacttacacccatcacatcttattagtatggtgctccccttcaacaactaaaagtctatctttgattgtcaattattccgaggtaataaacaatatctacgaagtcaatctcaaggaccatatgccacacttgttccacttagaatgaactttctgagtaactatgacgaaagcattttcctcanaaactgctctgaacatcaatagatcgtgaattttctatgaaactcaaacattccaaagtaaaggaattaaatccactcaataataaacaatgtgttgggtgcatttaattgaaaagaaataatcaaa

SEQ ID NO: 60434 - DNA, 409 bp, Oryza sativa
  unsure (1)..(409): unsure at all n locations
ctttatctccgaggggaatattgttatactaccaacatcatcagcgataccgtcttcataaaaagtaagcattctgtgagatgatctgatgaaaaaaatgagtgggtctcaaagcacttgctgacgtaaggtaaacatgaacagcatcttaagctctcttcttccgaacagaaggtccgagtgatgaaccatcagtaccacgcggagcagacgagcaaagtccacgcaaaattgcgatgacagcgaatacggcaaaaggaacatacatctgaagcaattttagtgtcgctttcttcgagcccacaatctcttcaagtattgctgactgaaatgattataaacaaacattatgaaacatgttcanacagtgatctagtacagtagatgacattacatcattcattaccag

SEQ ID NO: 60435 - DNA, 415 bp, Oryza sativa
ggctcgagctcagctcgctcgagtctctttctatctcgagcctaactcgtgtgccctcaaataaccaatacagatgaaaggaggctgcattgcatgctttgtctagtactactagtactttttcatacatgatatgacaactagtagtactattaaatcgagctgcatgcatgctagtacgtactaataggctactgctgcatagtgaagtattactattaagctaatgcctgcacggtgcagccctgcacgctctgtgtaactatacagcttttcattgggagtaggagtagtactatctggtgcacttaaaagttaagaacttgacatatggaaatctatgctctatgagctattctagctacgatcgtgaagctcacaagcatagaagctaggcttgagctcggctcgaatt

SEQ ID NO: 60436 - DNA, 363 bp, Oryza sativa
ctcaagcttaccctgtgatgtggcatgctctgacggctgatctttctgacgatgtcgagcgtggctattctgacatcatcttctggctggacgaaaggtcggattgtgcaagcagtgttcctgaaactttctgagagatgtcaatcatgtgccattgcagtttccctgtgcttgtccgctgtaaatttgtcctaccgaaaacgatatactgaaacttgttctgaataaataactcggtccgatcaggaatggcgcactatagaaatgcagaatgcagagagcttggaacagatcacattgctgacagaagatatttgtactcgtaatcggttaaactttatactgcatgatgattgtgtgatt

SEQ ID NO: 60437 - DNA, 211 bp, Oryza sativa
ggatcctataagacacctgcatgctgcaagcttgctggagcagcacggtgtgtatatgacatatatatatgggggtgggactttagttcctgatggtagcaccctccggggctaaagatcaccgggatcttttgcgtcgcttggtctctgtctcccgtgacatggtgacgccttgtaataccattcttttgatgatccttctgttgcttga

SEQ ID NO: 60438 - DNA, 374 bp, Oryza sativa
tgaaccgtaagaggaaggcagctcagttcataactccccaggggaaaaatcagaagcttcgccccacgatgcgacatcagggtggaccttccaccatgattatcaggcaacatcgtccctaccacccgggtaatttcaacaagaacaacaacagtggcagtcacagcagcctcaacccgactccaagtccattaatgattccagctcagtcagatcagccagctcagccagctctgccagaacagcccaagaggttgggagaaaagcccgaactctatttcaattgtaacatacccggacacacggtttgaaagtgcccgaagccaagacatgctgtgacccatgttgtgcaggcccgtgtcaatcatgcgtct

SEQ ID NO: 60439 - DNA, 352 bp, Oryza sativa
ccaatgctttattgtaaaaaacaccgacctatcattgtttgcaacagcaatgcatagcacggaggtgtgcattatgctatgttcagaaaagtggaggaaagttttggcgcggcacatcagatatacgtacagacacatatgtgaaaaattaaacgtggtctaataacaaaacaaattacagaatccgcttggtaaccgtgagacgaatttattaagcttaaataatatgtcatcagcagatgtttactgtagcatcacattgttaaagcatgacgcaaataggcttaaaagattcgcatttacgccaaaactgagcaaaatttataactcggcatatataacactccatata

SEQ ID NO: 60440 - DNA, 340 bp, Oryza sativa
ctcttatggatgctatttaattttctggtcaatcagctagccgatcgatcaacacagtgcatgatattcagtctaattatgaatgaaaatgtagtaggaagcttaattagaactctcaagtctcactcacctgcatgttatttcctagtatcaatcagctgatcaagttgcataatattcagtcgatcttaatatgaatgtggagacatgcatgctcctacatatacctgacgaagtaccaagcacagtgaacactactgctagtctagtctgggcaattggatcatgcctgcctgcttaaaagcccttggacatggctgctgcgaactgcgatgcatgc

SEQ ID NO: 60441 - DNA, 405 bp, Oryza sativa
ggaactctaagtcacctgcaggcttcatgcttgtttggaaagcaccctctacttttttgcgcacctggtaagaatatggtcaccgcaaacaaagacacatcatttacatctatcttgctatgggtatgaaaaaattgctgtctaatatttttagaatgtgcgcacgaaaacttgcctagcttttattactaagacaaacccgaccctattctgaataaactagaattgacaactgatgtatttctgtaatataatatcttcaagagtcttttaactaagatattaatacatgtcaacattcaaaatggcatatgcgcttgaacagtgggtttaatacttagtatattagcccactatactttcaaaacatcatattttgatctgatatatatcatatattgatgt

SEQ ID NO: 60442 - DNA, 458 bp, Oryza sativa
acctataaaactcagctcaatggtttataattggtagaaattcttatagtttatgatggaagaggtagtatataacaaatattcttcaaaaatggtatctcaaaacacaaaattggatctaaccttttaaatggttttcatttattttcctatttactgtttcttctgaaaatataggatattaatgttgtcatgtacttctctcctatttcgtatttatctttcgacttaacctacagtatgtcctacaaggatttaaaatacttcaacatttgtttaaatatatgacattgttgacttttaaatatagcatttgaacatttcttttatttataaaatcatgtgagtatcatttattatcattaaagacattttaatcattacttatatcttttataagacgaattataaaacattagataaaaaataacgtcatctatttataaacacacttttct

SEQ ID NO: 60443 - DNA, 443 bp, Oryza sativa
  unsure (1)..(443): unsure at all n locations
ttaagtcacctgcaggctgcaagcttgctgctatcgccatacccgatttttatcttcttattgctcttcagcgtgctgtccgttaaaaaggcgtcgtccacgtgttgacggtcaaagccctacattgggccggtattcagtcccagcgcccggcgggcgacgatcatatatgccgcctgcatggaactgttgcgaaacgctgtttcttcggcaagttgagggctggatgtaaacctactgcgggcatcaccgcggggaaacagtagtggtaaccgntcataaaattcactgtcccaggcgacgatagcggtgacgggcgcggtcaaggttttttgcagattgccgctggaaagtgccgggcgcagacgttcttttacttctgccgtgcgggtaacacgatccgtgccggagaacacttagctgatgtcggcccccatttcatc

SEQ ID NO: 60444 - DNA, 452 bp, Oryza sativa
  unsure (1)..(452): unsure at all n locations
tgctcgatcaacatccaagtcatactggtgctgggtttgtactacttaccacccataaccatcttttaaagaaattaaattcaaatagttttgttttaccatttgatgtatttttataaaatttaaacttctgggcgttgcctgtcggtattctctaagaaaataaatttgaatatccgtctgataaaaccagtaaaccacctggcggttgcgggactggcagtgtttgccaagatttatagcaaaatccatatagtaatgatgaaaacttataaattttcattaattaagggaaatggagaacgatatgctacttattctcggtgggaatagattatgatatatgctgtanaatataagaggaaaatgctcttatattacttcctgaatcacttacaaaagatatttagagttcaatctaatagcaccgaacaactagattgagttccaat

SEQ ID NO: 60445 - DNA, 383 bp, Oryza sativa
ttctgttccctctcccattctctttgcccattatcctgtcacataacaagatagttaactgtgatatcgatttatctgacgagagaggggaaaggtaatacgagggaaagagaaactgtatcacttttccaatgcctagctgtggcatcagtgctagcatggcataggatgtggcgctgaagtcttgttcatgcttgatcggataggggtgtaatttatctggtatagaaggatcactggtggtcttcatccaccttgagaatagaggtgtgaacccctaacctcttggaggaattgaggggcataaactaaaacatcttccttctatatcatatattcacataccacatggcacatctggtgtctaaacaaagtgaactata

SEQ ID NO: 60446 - DNA, 410 bp, Oryza sativa
agcttagtaaactatttatgggttagtcttacattctggtaggccggtgtgtatgagttcgtataattcagaggagcttcctatttaccccgacgtggtagtttaggtgactaagcgtgtccaatacaacggtattgtgccacgtggtgggttcccgttgtgtccgccaccacggcgttaagtttaaggcgtggacccgccacttaacggttctaggttatatatcgagtatggcttatgatggagtaacacgtatcgtgctggtgtaaggctaaatcatgaattttggaaaagctttgttgcgggtaataaatcgggtacttatgtatcgcgtgccatgctcttgcatgattattatttcgcatcatgtgggtaaagtgtacaaactctgcagagtctaaactaattga

SEQ ID NO: 60447 - DNA, 440 bp, Oryza sativa
  unsure (1)..(440): unsure at all n locations
tgaatatagtgggtctaattctctcttgctccaccganggaccagtagtaacagcacgttggaaactggtgaacacgatctcagggaaggacacaatggcggcttcgtacgatctcacatatgacaattctatcattgccttaaattttaccaaccaaaggttatatgcacctgcttggtaactgtgaatatagatgaaataaattcgaagcagtttctctgatataaactgatgtgattacctatcgagttattaaaaattatatttgatgaaatatttttccgagtgcatcatgcttattaattccttactgaatgtgtactctcttctttgattaggcagatgcaaggcgtactcattcttttgattttgccagatggacagcttcactccataacattctatctacactgtcaacgactcagttaataattaaact

SEQ ID NO: 60448 - DNA, 374 bp, Oryza sativa
  unsure (1)..(374): unsure at all n locations
ttgcgatgagcaggtgctttngttcaaataatggttcatactgcaatttccatcgggtgtcctttcagcagatatttcagtgctattgagtatgaatacctgttgttattttgctccgacgagtacaataaaatcgccgaggctgagagcctttatgaggcacaagcacaagtttagcaatcaacttatagtatcacccttatactatatggaaaaacaatacttgtacaccgtataaccccctcattttatctataaaccgcctgcttatattctaaaactcaatcttagatcacgcttactatgccaatgctgaaccagaaaagtggagtgaactgacatttgtaggcattgcctgtttacacactccatct

SEQ ID NO: 60449 - DNA, 450 bp, Oryza sativa
  unsure (1)..(450): unsure at all n locations
tactaattgtacatcttattaagaattcgcctcatataaattgtgcatttagaaacagtacatgtactccctccgtactgtaaaatacaacataatactgaatgcgggtcattctaatactacgaatctgaacatacatatgttcagatttattgtactggaatatgtcacatcaaattttagattcgtgtctttaggacggagtgaatactatttaatttttactaccacaaattcttttgttttattaaaaaagggatagcattcctaactttggaatacataaatatgaatctgtacccatcctagactcttaattaaatagtttattaagttaaaattcaaactcggacccacaattanctagttggacagcatgaatatttttaatataggcgctttaatcataaaaaacccatataccattatcagtaaagttaaattttaata

SEQ ID NO: 60450 - DNA, 404 bp, Oryza sativa
  unsure (1)..(404): unsure at all n locations
agctttatagttttatttagttccttctttgtaactnntgaaatattttttgagttatataaaattacactgctcggcaaagccctggcagtatttcaggtcaaaaaagatttcatatagattgaaacgacaaaccaatcgacgtcagagattggaatcatcgatctcattgagattgccctcgagcaaaaacaatgcctttgattccggaagttgtttccatcgcacttcttgatggataattcgacgcttcccctacctgtcgcaccaactgtttaaactggaattcggatacatgaaaaagggtatcgcacgagacataaaagtggatggatgcgaagacaagaatttatacaggttcacgccctctcgatgagaggtaaaccctacacctgtttggggat

SEQ ID NO: 60451 - DNA, 419 bp, Oryza sativa
ctattacttgttattgatatctccttataatggcgtatagatcatctttgatcatctgtcatttattcattgggttagtgctgcaatttttgtgcatgattgaccatgtacagtacaatatttggggcatatgcagccggcagctagaagctgcagcaagttcaggagcggctagcagcttaccagccatcccaggcgagccagtgctctatccatggacaggcgccggccggccagccatcccaggctagccaagcgaccagctagcagcgtgggagcacgtctattgaagccctgagggcaatacagtcacatcaatggaaaatacatgtattttagttggaaaaagtgattaaagggaccaatgttatgtaaaacagagtggccaacgttcaagtttcgtttaacatagtcgacga

SEQ ID NO: 60452 - DNA, 417 bp, Oryza sativa
  unsure (1)..(417): unsure at all n locations
agctntgagggagggaggtgctgtcttattttttagcgatttttnttggtgttaatatacaaatttgaggtctctaaaaggttaccaaccgggactaaagatgtagctttactcctgggtatttgaaccgggactaaagaccgccatctttagtcctggattctccctcccggttcgctacccacgagtaaagggggttgcgaactgggagagatgagcagttctccagtagtgcaaggtatagctatttgtattagagtttcgtgagacacttgtgagaggagtgctattattgtactttgtaaatataaatagaaacaataaagttcaacatactttcaagggtacttcgatttgggtttagtcaggaccggcggtataaccggagaccactatgcttagaccggctacacaaaa

SEQ ID NO: 60453 - DNA, 411 bp, Oryza sativa
gaatctagaaataatctatatcttagatttatatatcataagtgactctgtaggccgaaagttgtatcttccaatgtgagaggccgaaataccatactatatctttcgatcagaggtggagacggctccaggtcgaacgaccgtctaggcttcgctgtcggcgtctccactaccaatcaccgttgacgcgtgtaaaaatggattgatcactacaaaacactattagttattcgggctcgacgatgtcgctggcttcaccaccgctttagatacctccttaagcacagtaagatcacttcctcaaggaagatgataccagaggaggtataagcatgggagaaagcctcgtgatgctatccctattgacctattaggaccaggtattatctgacataatatttctcttttttt

SEQ ID NO: 60454 - DNA, 425 bp, Oryza sativa
  unsure (1)..(425): unsure at all n locations
agcttcagatcgaatcgagctacttatctcgtcccanggcaaagaaaggtaggcctttttcagttaaaatttcaaaagatttcttgatggaagttttggatctgtgttgtaatcatcaaccggcacttctgggctggcaaacttaaagttttattactcagtggggaggtgcacgggtgaactaaaaaactagagataaaactttcaactttttatatgtttgtcgttttgataaaatcgatgttgtttctgcgtgagctggaagtttgatgaaaaaaaatggagctaaaagttaaaaaagaaagaaattctgcttgaaaactcattatttatgtggtttgtgatgatgatgaaggagaggaagccttctcgatcgcaatcatggagctggtgatgggggcaatgggaaaacttgaccccaagtt

SEQ ID NO: 60455 - DNA, 421 bp, Oryza sativa
  unsure (1)..(421): unsure at all n locations
tgagagggtgatacaacagccctacggcatattactctttggattgngtcaccagcaacaagggacgtctaggctaacctagaagcgagagctcgcgctgcccaatgtcctgcattgccgtgtgtagttcaagttgctccatttgcttgaaaactctactatttctttctagccacatattccaccagcaagttagcagggaaccaagatccacctttctgacctgtttttataatgaaaagacctttttgacctgtttcgggcactactcttagatacctctggtcagatgatatgatggccacatttgaatattttttccaattgcacagatgttgactgtccttaaatgctagatctgatagttaacttccatataaaattaaatgaaatgaacaccaaatgtatggtattgcttata

SEQ ID NO: 60456 - DNA, 419 bp, Oryza sativa
  unsure (1)..(419): unsure at all n locations
agcttcactgacatgcggatcccatgttgttttttatgntntttttaatttttgctttaagagtgctacgtctgataaaaccggaagcaacattgccttactacctaggctgtgtttatattggaatttggttgaagttggagacgatgtgactgaaaagttaggtttgatgtgatgaaaagttgtaagtttggaaaaataaaactttagaactaaacacacctttagtgtgactcggttctgaaagataatggatgtattatatttagtattcccggttatgaacggtttgaagcttgatgacagatgaaggaactgaagtgaactctctccgctctatttatgcttattgcaaatgggcccaaaggcaccagcaaaattagccgccagctacagctaactaactgctgctggctgct

SEQ ID NO: 60457 - DNA, 417 bp, Oryza sativa
  unsure (1)..(417): unsure at all n locations
ggcctactgcactccaaatacgccatctnggagcatatgtgaggtcaactgcatcaagagacacattgacattgagttctatctggggaagctctacatggtcgacacccgcaatggagatctctttgcctttgagcttgaggcacatgatcacgactttccggtggtatctctcgtcgagcgctgtctgaaagagaagctgccctcacctgaagatggtgaccggcaaacttacaatcttgtgcagtctcttgagaagctgatgctacttgtcacatacttcagagagagctgtgaccaattctgtggagtcataatattcaaattgagcttcaactccaacccttggaaatggaaagaaaagaatagcctggatggcgagaagcttttcatcagctcatcctgaacaagtccttt

SEQ ID NO: 60458 - DNA, 404 bp, Oryza sativa
cgcttggcttggcttgagctgtttttttttagttcgccttaacctatgttggtggggcccatctcctcttagagagacttgtatttttaccctcgagtgtcctcttgtttaaggagaattagagagtcaagtctgaattctattcgagtagacaatgtggtgtccaactagaactctatttatcttttcttatccgaaaccattttgtatatgaggataaatctcgtattaagcttggtatatggtgcgtcccgctaagcttaatatattaggcattccttctcatgatactgacaattagtttatcaatcaataaattaaaccattgtaatcataaataaataatgctttctaacgtcgaaatcgatttatcatgggcctatggctatcctcgttccctgccc

SEQ ID NO: 60459 - DNA, 404 bp, Oryza sativa
actcagcttgtcatgccgcttgtgttctccggattagttcttctatctttatgatactctcatcttggttatgtaagctgtcgagttatcatatattctatataatctctggcaatattgttatttaaccttcaaccggctaacatctatcattacgaggcagccgattaggttaaacatcaatgttgacttagattatatagggtatctaccactctatgaaacatccaacggcttgattggctagatattggctttcttttcatacttatggctgcttcagctaagtgtgatctcattagtcgtgattagaactccaatatctagcctgctttttggttgccgaataaggtagtatcgtgggttcagccaatcttacctgattaactacttatatcctattg

SEQ ID NO: 60460 - DNA, 228 bp, Oryza sativa
tccatatgtcgcctgaagaaaatgttgattgtcgccactctggaaaactcataatgagataacccgaatcggttcagaagcatgatgtgcattcattaatatgatggcacatgagcgcctactaaattaactactggattgatgctaacaatgtcacatggaaatcctggctgcagggactgactgaaatccttattaatttccggtaactagcttttaaaaatttaa

SEQ ID NO: 60461 - DNA, 391 bp, Oryza sativa
agcatgtcagaaagatctatatgtttcttctctagctggtggcaaatatcacaagattgaatagcaattatgaactcaccatgagaataaagtctcgcaaatctttcagcattccttccctctaaaacataatcaatctcatcaaacatgtgcctgacctgttgaacagaagggtcaaaagctataagcccactatattgcaaaatatattaacggcccaaatattggaaacgtggtctttaatggaaaaacatattctatggcagctgccactaaattggctgaaacaaactatattacaggcgtcttaatgagaccatctaatattaggcctacaaaaccaaacttaaattatggattgcgatattgacatgggttctattaccttatt

SEQ ID NO: 60462 - DNA, 218 bp, Oryza sativa
acctatagaaactcaagcttggggcgacgatgacaagacgcctactatggacggttatgatgaggcggcgacttggcaccggctgtcggggggacgcggtgctggtgcccctgtggagccccaccccgagcggttccctcccgctatccttcatcgacaacgacgacaagaccactgccggtcgcgtcttcatcaacttcatccaagtattcccctct

SEQ ID NO: 60463 - DNA, 427 bp, Oryza sativa
atccttaagtcacctgcggcatgcaagctttcaatgagaaagcctacctttttatgtacatttgatgcctccatctaaagccaaaataatcccagcagagattgttcagtgaaaacctattcaactttgattaactagttccacatttgggcgtccaaatccgactccgaggaaatctataatctaatgaaatatcacgagcatttcagtaaaatgcatcgcacctgagggagctcttgggcggagtcgagggcagcctgcagccgctcgacgtcggagcgtgaaaggggccgcgagatgggcacgtcctgcacgacagcagagcgggctcccttggtctcgaaagtgaggaacggcgaggcagaccgggacccggccggcagcttgttgacgagcttcacctgtatcgcggctgaggcgtacccgg

SEQ ID NO: 60464 - DNA, 426 bp, Oryza sativa
  unsure (1)..(426): unsure at all n locations
taccggcaggggtttttctggcctactgcagtggccttttcctacaaaattgtgcgcacatgtgaaggttgccaattntttgccagacaaattcatctaccagctcaagagttgcagactatcccgctgtcttggccgtttgcggtttgggggctcgacatggttggcccatttaaaaaggcagtcggcggttacacgcacctcttcgtggccattgacaaattttccaagtggatcgaagctaagcctgttgtcacgattacagcagataatgctcgcgatttcttcatcaacattgtgcacagattcggagtacccattcggatcatcaccgataatggcacacaattcaccggcggagttntcaaagacttttgtgaagactttgggatcaagatttgctatgcctcagtagcacacccaatg

SEQ ID NO: 60465 - DNA, 429 bp, Oryza sativa
agctataattaatttctaaacgccatttgttaatatcatatatatatggtagctttcgcatgtgccagtgctttactagctaagaatggagcttgacaaacagaaactggcccaccttgatttttgaggcacctatcagaagaaattaattagagaacacaaataattaatcaacgccgtattgcaagaaaattgattaaaatagcgaatatgcagcatatatatgaatacggaggcataaatattcttcagaaaatacttatctaattcaacagctagaaactaaagatggaaaacaattggtacaggctcggaatttgacgtaaaaaataatgctgaaaagtgctgttacgtacatagaaagttgactacacatatttatatattgcagcgagaaataacgcattgtacgactactgtgccacgtct

SEQ ID NO: 60466 - DNA, 445 bp, Oryza sativa
  unsure (1)..(445): unsure at all n locations
cctataatactaagctgaccagcatatatagctgctcatttcggtcatggagtggagactgcgaggtgcgaacagtgagacagggcaaacgtgagaacccgtgtgaaacagtgaagttctgtcggagaaacacggcctcccccgggcaacgccttctccgctgcagagtccagcccaaacagcgatgaattaatcacacgaaaccaaacacgacaatgagctcgcgtgaggccggtgaggcggtgacacgctagtactcaactcanatatccacaaggatagatgcccactgcccccacggttctcatacattatccaggcagggccctagtttctggtattctgtagcagcaccacaagccgtcaaaaaagacgataattcagagcaacctcgcttagtatctcggcgttggcaattcgcagatcatctggattgtgggaccga

SEQ ID NO: 60467 - DNA, 240 bp, Oryza sativa
  unsure (1)..(240): unsure at all n locations
gatccntaagtcacctgcggcagcaagctttgttgatagcgctccgtttttttttttctagcgcgaatcatcagagataagatatccttgtgataatttccacttgtcatgccaagaaacctattcgaagcacaatgatcagtgcatgatatctctacctaacgatctaagtgatgaaatgttataagattgacactcaacaaacaaatcttggtatgacttgtataagcacatggtcct

SEQ ID NO: 60468 - DNA, 473 bp, Oryza sativa
  unsure (1)..(473): unsure at all n locations
ctaagcttttcgaaaggacctatgatatgcggagcaacgagctttataatgggagttatcatacttataataacgaaccaaacactaacctaacaaaatatgaaagtgtgacgcatctggcatgtaacatgacaaactgaaccaaacaataaaaaaaaattagtaatagtagcaagggagcatgccaccgtgtaataccaaaaaaaaaagttcgataagattcatgactgcttaaacattttttctcggattctagaaattctgttatccatacaaatgctactccctccatcccattttaagcgcagtcatgagttgatccgtatataangttgatcgtctgtcttatttgaaatttgtatataattaaatttctttgttattagatgataaaacatgaatagttctctatgcgtgattaatgttcttttattttttaaaacaaatatctttaaataacacgataaattaaa

SEQ ID NO: 60469 - DNA, 408 bp, Oryza sativa
agcttaacataaacttgttagtttttttttgaatgaataaacttgttagttcttacgtacatactacatacgaacgaaaataagggaggaccagatgtgcattcagtgatggtggcattcatgaacctgagcagtttaaaaatgaagaaatatacatcgcttcagaagcaccagaaaataagatagaatgaacctgagcagtttaaaagtaaacattgcacatggtacaaaagcagaaatcgattaatttccgggagatataatgagcattgcacaaagcaatggttgaaaggcattataatcatacagtccaatttgtcagatatttttaatacatacacatatttgtctatacgatatataaatctaatcatggaagtgtatatttcatcgtcgataattaactca

SEQ ID NO: 60470 - DNA, 460 bp, Oryza sativa
  unsure (1)..(460): unsure at all n locations
acttagatactcagcttaaatggcctacctatctcaagatcttttgttggctctccaggcctttgcatagcttatggcgtacttgaatttgttctcgatgtgcctaataattgattttggttcaaagccaatgttaccaacaacactgctgtacatctcacttgccacaaaagctgaagtgatgtttcggtgatacttctccaccccttgtaagtagcacttgtgctcggacacaatgctaacttttcaataatcattccatttacccttatatgcatggacacgccacggacaatcttccttcatgcacctcacttcatacacttaatttgttgacttgaccaccctatactctctctgcaaggaaactgcccaatagctcaccgcctccttcatcttatccttatgagcatatctngcacccttcattaccctcgtctcttatactcccagggacatg

SEQ ID NO: 60471 - DNA, 415 bp, Oryza sativa
agcttatatatatctctgaggcttatgtatctattgatggatttatttgtgtaatcttgtgagcattgctagtagtttccttttttgttttctgcatgtaactagctggctggcttgtctagcattcggtcagctcaactagtcgcttttcagtgagataagaccgagctagaaaccacgatgtgggatggcgcattaataagatctggcattttattcggtcacgttttgcatgtaatgaactccgttggatggaagagaataaatagagaaaaaccgataagctgaagaaggttgcactgcacaaatttcttgctttgttcctctgttttttctctaaaacttcagactactgtttctgtttgacaatcatcaaaatgagagagtgtgagcgaatctgtgagataaatcttgt

SEQ ID NO: 60472 - DNA, 450 bp, Oryza sativa
tgtcctcgggtcagtcactccgtcgagcacttggtgagtgcggagttttccgtgagctcgggttaagatcactggggatggcgggcaatgctgatcgtgctaacctctcagtgtttgttaaatgcaacacctcgtgccgaggctgatctggtggtattgcccatggcctcaatttggttcgtgtgaaatgtggactggaggcagtattgttgaatcggtgatcactatgtagtgctcttagcttgatttcatatgctagctatttcagtgactagctgcgcaatcctctccacttccacatcaagggttgatgcctgagttgatgatctcatcactcatgtatgatttgctagcttgtcttcttgcttaagtgttctgcttttatccctgagagtgggtgtataatcggtgcatatcaggccaatactggaatctagccatttttgttgc

SEQ ID NO: 60473 - DNA, 339 bp, Oryza sativa
cttatggcgaacgacgccgtctatgttcctaacaacatcatggggctgcagcatcgggaggccgagctctcctgtcgtccgatccgcccgccgatcgcatccggatgtgcctatcgtcggtcggcccgccgtcagcctgatgaatagaagacagaagtattttaatcagaagagaaggttaagaaaattgaagaaaaaatgtgtgcatccgacatgtgggtcccatgtgcttttttttaaacaattgttgctgactatgatgccacatcagcgaaaccacccatatatactgccttgggaccatgtatgcactgtgtgtgtgagtttaaggcttatatt

SEQ ID NO: 60474 - DNA, 401 bp, Oryza sativa
tcttgctcacacgttcttgctgctgctcgtgattgtggcatatctcccaatgtgtacgtctcaaattatctcaagaaagaagcaatctttcatacatggagtgaggagatatatgggttcgggatctcaggatcttacacaacgctgagtgcccaagttttttatattccagatccatctaagttaagggtgaaaaagggtcgacgccaaactagacgcatcataaatgatatggatgagtcagaagcaggtgggaggactttacgctgcagcaagtgtgatctgcgcggccatacttacaagaattgcccgaagaatgcagaagttccaagcggcgcagatgctagtccatctggacaggcaagtgatggtatgcgaccacctggtgaaggaacaacaag

SEQ ID NO: 60475 - DNA, 426 bp, Oryza sativa
agcttgaactatcaataacagtgattatgttttaaagaattcgtagaacctgaaatacatttctattatatggagtcaaacattataataaaacgaacatgtaacttgaccgcatctatatgaatttggtaagtactaaccgtacaattagattagatctttatctaaaataatgtgtatgatttagatccatcacatgtttttgatatcttattaacatgaataataaacatgatggaagcagttcaattccagagaagaacgaatattaatccacattacaggatttgtagctgtttataatttaaaaataaatagagagtagtatacttcgtttgttcacagggcataaggtcgctcttaaaaattcttttggatgaactcgcttatgtagttgagccaagcccatttagaattacccctaat

SEQ ID NO: 60476 - DNA, 314 bp, Oryza sativa
agcttctatagccatacacgatttctcttgaagactcgaggactaagaatactattctaattcctactccactagcactagaatactactaaacttgagaaagagctcttgatcttcttcttgagtgtgtgcttggaatgaaggaagtgagggggtattaatagctatgtggaggagctctggtagggtgaagatctttcatggcatccaaagagcatcttcatcctctcctggacaaatgttcttctgaggtcagtagttgcgcttgaaatggtcgtaacgacctcatgtagttatcaactgccagctcatga

SEQ ID NO: 60477 - DNA, 361 bp, Oryza sativa
  unsure (1)..(361): unsure at all n locations
ttccttcaataattggatctccacatttgcctttgctagggtttcctcaacctctntcctttgcttggcctcaattaagaacacatcctcagatttcctggcctgtaaccaggtccattagatctttgtgtaaaaaaacctgcaattttttatgctaacttagtgaagggtttaccttttggcgatatgaaatcaattcttcttctgtcttttgtcttctcagagactcatcatatgctcgcttcctatacttctcagcctctgcgaaggctttctcaagtttatcanatagtgtagcatttgaacctgcgtcacccttatacagcaccatgtaatggaataagaattctagctaatcatc

SEQ ID NO: 60478 - DNA, 341 bp, Oryza sativa
acaatctaagagtgtgcttttcacaaccagagcgagacaagtctcacctcggtcgggaggtgagaagtaacaaatttatttatctagatttgcacaactcccagagtcggcttccaatctgtgtttcccaaaccaaaccaattttccaaacttcccgatgatagtggtccccaaacgaccaatcacttccagggactcccggtcccactgtcccccggatagctaaatgcttcccaagcattatgtttcaaaacttaacaccgtttcataaaacagggtaaaaccaaaactacgctaaggaatcacctcacattcggccatgaccgtgggcacggctgttg

SEQ ID NO: 60479 - DNA, 335 bp, Oryza sativa
agcttcgcttcgcgcgtgatttttttattcagcagcctcagacagcctggaagagacgtggggcccaagggtgtaacggattattcacctcggaagaatgtaaaatactcgcgggtaaaaaaattaaaccgcgggcgcacgagttgtctgtgacaccgaaagacggtaattttccgtgtcttcaccggcaagccacatttcacctcgtccagcaaccttgtctataaatggcgttctcgtcttcatctacatacaaaccgccacacacacgcgcgcggaaaacactcccaaatccaaaccgtatcgagaaagagctcgagagggagagatcgatc

SEQ ID NO: 60480 - DNA, 440 bp, Oryza sativa
cttaacctcagcttgattggaaaacctatttctactccctaaatggcttacactttgtcctagttgttaatgcccgtttaaggctttaaccttgttttgttttgaactgcatatgctattgcttaacttggtccagtaatatttagaaataatgctttacaccattttaactattgtgttgcttgacttgcttattttcccacctgcagattgagcaagctcaattcctatagttgacgataatggcgctctccttgatgtctactcgctcaacgttgatacataaccatattcttttgccatattggtatgctgttttattctttcaaatcgatagaaccaatttaccttttgttcattggtgcggctcacatgatgccattaatttgactaatcattttggtgctcactggaatagaattcgaagctatttgttccac

SEQ ID NO: 60481 - DNA, 413 bp, Oryza sativa
agctttccacagtgaagaatgccgattttattgtagtggttgatgggggcactatagctgaaattggcacacacgatgaactgattaataagggtggcccatattcacgacttgtgaaactgcagaagatggtgagctacatcgatcaagaaggtggtgaccaatttatggcctcttcagtggcaaggaccagtaccagccgtctcagtatgtccagagcaagtccaatgccacttacaccaggtatttcaaaggaaaccgattcctctgtttctcccccggcaccatctttctccaggcttcttgcgatgaatgcaccatagtggagacaagcagtcataggaagtctctctgctttggtatatggttccttgcagcccatctatgctattaccatcggaggaatgattgct

SEQ ID NO: 60482 - DNA, 423 bp, Oryza sativa
agctttatttagtgtttaccaccattttttgatctcataacttcatttgattagtatcttaaatatcttaaaggaaatcggaggtcgcttatgggtaaacatagccataaaaaatcatttgctggctaatatcttaacttcgtgaaattttcacttaaaactaaacaacgccattaaaatctaagggaaagaatatttctaactcacgagacgttccaaactcccctaggtatgtgacataagcgacaatgacactatttcaatgacgccttactttcatcattatagaataattatcctcctcattcttatttaagcttagttcactaatgacgcagccgaatttaaaacatcatcaatgtttgatcatgtccacaaatggagttcttaagcctgaccctatatgtgacttgtctttccata

SEQ ID NO: 60483 - DNA, 436 bp, Oryza sativa
  unsure (1)..(436): unsure at all n locations
tncgctgcgccacctcccctaccctatgtctggtgagctgcaccactggatccgctgtcgccgcccccacctgagccgcctcctagacacatgacgtcctttgcctccaatgccgaatctgcccactgcccttctccatgctcacgacttcggcgccgctgttgtgcctcaccgcccacccgtcctcaccatcctctgctaacgtacattcgacaaaaaatcagatctgtttcatgatccatgctctattaagcttcttctcgagctccagtgaccttgatgaactacgtgccgatgaggtgatgatggtgaggactgactacgcgtcagggcacaacttgtttagcatcatcatcatcctcatggctgtctgcactggtgagaccggcctaacaagggtcatcttccatatcaatggctatatgagcaaagcgtt

SEQ ID NO: 60484 - DNA, 331 bp, Oryza sativa
  unsure (1)..(331): unsure at all n locations
tatatctcgcctgaatcttgggtttntttcttccaaatttttatgaatctggtcaaattttattcaaattcattcaaaatcagttaaaatttcaaataatttcggccaaaaaagttcaaaatttccgaaatttcggtctcgccccccccccaccccccgatagcagaaatagcaatgtcgagatttaaaaccctgcttgcaatgaaaagattttcgactggacatgcctacgttttcagctcttctgttgtgctctgatcttcccaggccaaacgatgcggcgctagaatcattccggatatttcctaaccctaaatttgatgatttgtct

SEQ ID NO: 60485 - DNA, 405 bp, Oryza sativa
  unsure (1)..(405): unsure at all n locations
atcttaaatgactattcaatctatgatccgatcgcaccgctatattcgtgaattaaatctttacaataagatatcgcttaattatattttcataatagaaaaacatatgcttcagtccattaatacttattgttttatatgtgatagcgacatgtntcaacgtgtatcttcaccatatttcataaaatatttaaatgcttcagttgctgattttttttcaccatatataacttaaagtttcacttgttggtcaactgcaatatttgaccgtctgattttctttttcaatttcacatgagttattgtaagttaaaatgtttcatctagtgtactcgtgatggtttactatatatggatcacatgttgcagtgaaatgaaacatcatttcgctattcgctgaaacat

SEQ ID NO: 60486 - DNA, 315 bp, Oryza sativa
tgcagctactttaatcgcctgattatatatattgtgcccttaatatcataatcttgtcttgtgcaatcatgcaaatccggtcatgcgcgagaatatgctaccaagtccttcctaattaaactcatgaaaggtaactatttctccggtcaaaaatatattattagctatatttagggagagaaagcccatctatgcatgccataatgtagaactgatctggcttgttggctcatctaatttattactagtccatcaagatgaaagctaaacaccaagggtactctgaatgatacagcataacttcctaaccaaagt

SEQ ID NO: 60487 - DNA, 401 bp, Oryza sativa
tctgcctccgcaagctccgggtcaagctatctttccatgtccaccaccggcaggctctaagcctcgtcatcggcatggccaacgaccatgccgccatggacctcatcatgtcggcaatacctctcggggatcacctcggattccgcgaacgcggcggcgacattttcggtgatggcatctctgttgaccggtatgttgatggatggatccatattacattcgtgcctactactaccctgcatgctcacgatcgatcatcgcgggcagcttattgatgccgagcggtagatcgtttggccccaacaaagggctcttactttatagacaggatgcaaactaactatacgtatatatagacaactagctagcctaccgttcggcaacatcccgatcattatatc

SEQ ID NO: 60488 - DNA, 350 bp, Oryza sativa
ttacggacctataaatctcagcttatggtgcgattgaaccagcttgcttgctgcagttaaccttgaaagtttggaggagaactaccatataggtgatagttggctggaggaccaaaagggttgaaggtttggaaattacgtggtgaggcttgggtaaaatgtggggattggggaaattgtgattgggagaaagttgaggggaattgagtatgaggggagttttggctagattggtggcttggagagccttggtttaacaagttcatgaaacctctcttggagggatccatctcaagctctcagctagctaagtttcacagaatgtgtttgtgttaattaaagaaattatg

SEQ ID NO: 60489 - DNA, 461 bp, Oryza sativa
ctggtattcttcattgcattgagaaacctcatttatattgctttctcatgttcaggtgcattgaggttgaacgctttctggcatgtgagaagctctacgagaacaactccgaagctatatacgtcactcttatctgttaattgacacaactgcatgtactctgggtcaagatatccacaagttccttgaaccagtgtgacaaactgtgactcatctgttggtgctagaatggaagcaccaaaatctgaaacctttgctatcaggtttctatcaaggaggatgttggatgatttgatgtcaccatgaaggattggtggtgaagcacatgaatggagataagtaagtgcctcagctgactcatgggcaatctgaagacgagtggccagggagatctgctgaccatgggtaccatggatgagatcaaaagcgtgccgttccggatgaactcgtatactaacata

SEQ ID NO: 60490 - DNA, 370 bp, Oryza sativa
  unsure (1)..(370): unsure at all n locations
ggatncttaagtcacctgcagcatgcaagcttgcattgacttctgcttgtgttattcttatgctcgtacttctgcgcgcctgccttggagtcatgaggactcgccagagtgatagaagaggaggtcgatatgctctctcaagctcccatcacgatgcttcgtttattaggccctatttaacctcactgacaggtgggtccaggggcagagccatgattttaggtcgatggtgtcattcgtcggctctaattgacgatcatggtttaagtgaaacagatatacatatgaaaaatacaaaaaattcctcgcagtagtggatgctcaacctatgtttcaccaaatgacttcagaatactcatgatgcaccaac

SEQ ID NO: 60491 - DNA, 418 bp, Oryza sativa
  unsure (1)..(418): unsure at all n locations
ggatctgtatatttacatggccgncgcgtaaacgcctcgctaattctatattggagcgtttcccgcataatctacaccccccttaattcgcagcatcgcaggtagtactagttagtactgcgaaactaacagaaacacttggtttatacgactaatcaatcggctgctttatcaattaactactgcagttaagcttaattctatctgtcgatgaattaaaaaacgagcatgtccaagtacctacgtgtattcagtgttaaattcatcttcagtagtcagtacctggccaccaacaactgctattccgtccaattaagtaaagggtgtgttttctgaaaaaagttggaagtttgaagaaagctgggagcttggtaaaaaaagttgaaagttatgtgtgtagaacagtttttgatgtgat

SEQ ID NO: 60492 - DNA, 384 bp, Oryza sativa
agcttgcgacctacaccaagatatttctttttcagctagatcttcaggtgaagtatggtttaaggcaatgatgtatggtacaatggatcttaatctgtcagcagtagttatacacatagcttgcctcctgaactgaataagtggacatgaatcaaacagggataccatatactgaacttttcttttgccgggtcggccgaaagatacaggcaaccaatttcattaagaaagaagagggggttcattacattctgaagcttacaacgacagtatgctgttgagatggattgggggaaagccccaaaccagtaagctattgacgcttacaacgacagtatgctatcgacagtatactgaacttttctgtcacagatggctgtagat

SEQ ID NO: 60493 - DNA, 357 bp, Oryza sativa
tagacctgctggccgccagctagactccattgtttctcttatttgcaaacagaaaataatttgcaaataaaacttttatatatgtgttcttagtgataaaatgcaaaggctgaaaaaactacgattaaaaaaaacctcaaaatcaacttaaggttgttcaattttggtttataagcatacgcataagtcaaaagatgaggctgttagtgttaatttcccagtggccaacaaactgtttttgatcagtgaagaaattaattcaaatgaatgaatgacggagtattggagcttgcacacttaagtatcttagttacattaatgtacgagcatctccctcacagctaaacaaaaacaacg

SEQ ID NO: 60494 - DNA, 389 bp, Oryza sativa
agcttaagctgtagcacttattcctttctatctgaatctctgaatatactcatgtacaggctcatcatgcttttgtttgatcgatgtcagatcagacaatttcatctcatgaaccccactataaaaatagctgtgaaactgtttttctagatcagcccaactgttaattgatccatatggtaaagaagaaaaccaagtaaaagccgatccagacaaagataaccggaacaacctaaccctcaaggcatccacagccgatgctcttccacactgggctaaaaatcagctaatgtgctcgtaagtcaatgtactatcttgccctgaaaattttgaaaagtctggtaccttaaaccgattaggtaggggaaccctctcaaaccattcaagat

SEQ ID NO: 60495 - DNA, 435 bp, Oryza sativa
tgagcgaacttccctatgtaggcttgagctcggaacatactcgagcctaatttgacatcgagcttggaattaagcatgggctcggttcgttcgagcctcgagccttttctcgagcttgctattggaaactcagccacgagcttgctccattcaagagaaaagtagaactgtgatgatttgatggagaaaagtagtactactagtactactttggaaagtaagataagaagtcaaacaaatgctatactctctgatggatttgacagtaccgtattggtttgttgatggaagaattcaatgaggaggggcatagaggggatggataaaggagagaaacaaagagaggtggagctcgtcgagctattcgagctccgctgagtaggctcgcgagttctaggtaagctcgagctcgatttgatatcagacgagccgagc

SEQ ID NO: 60496 - DNA, 389 bp, Oryza sativa
  unsure (1)..(389): unsure at all n locations
tctggaacttatgaaccagaattgctctattaatcaccatctactttagacatatcttctgaaacttttttcaaatccaaaagtccagtatcttcctacaaaataatgaattaagaggagctctttgtgcctaaaaaaaaagagcagggcaatatttcaaacttgcattcgaactgcgaaatatttatacaaaggaggagagatcaagataatgcagcacggttggttatctaattggctagtcaaacatgaggtggttcatagatctttgggcttcgatcatcgaggaatagagactnttgcaataaaagcagaggattgggattccattgctgtcattntatatgtatatgggtacaattatttacgttcccaatgtgcttatgacg

SEQ ID NO: 60497 - DNA, 398 bp, Oryza sativa
  unsure (1)..(398): unsure at all n locations
cagcttgtagagttatacatggccagattttgttgtttgcatggcgttcctaataagatagtgtcagatagaggtagccagtttacttcgaagatntggcagagattacaagtagagatgggtacccgtttgaatttcagtaccgcttatcaccctcaaacagatggtcacacggaaagagtaaaccacattttagaagatatgtgtggacccccgtttttataacaggaatcaatcgtgtaaacagtaccatttccctggatcaagtagtttggtacacacgaattcatagctggaataccaagtgcacatacacgagtgtctgattcgaattattacatcataggcccgcaggcatagccttaaatcatcggaccgagcggtccggaatacattca

SEQ ID NO: 60498 - DNA, 436 bp, Oryza sativa
  unsure (1)..(436): unsure at all n locations
ctggtttactttatntacttaccttatactntgattttctaactttattcaaattaatccaaaaacttgtgctattaattggataaatgtcttaactccctcctttcacttgtctttagatgccgcgctacaagcctgagtacttgtttggttttgagggatttgtccaggagttgcgtaccataggatttgggactgcccctttgtatgcccagattcctcatgatcgtcacgaagagaagtgccgagtcaaagtcaccttgaacagtaatagtgaagatatcccatcagtgatgttcgaagctggaggaggaaactacatccatgcatgtcatgaggtggcaaggatcgccatatgagagcttcgcgatcgctacagtgatcagttggctgacactgagtatcgctaccatccttgccaacccccaggaagtga

SEQ ID NO: 60499 - DNA, 407 bp, Oryza sativa
agcttgcattaaacacctaaattccattgtcttgctgagtacgaaagtactcacccttgctctatataaatatatatagttcctccgtcctgaagttgaagatgaagtaaagtgaagattaagggttttgtcctggttcccagccgtcgcctgtggtattgggtgttagaccgttggttccgctgctgctgctgttgttggtgtttgcctcgtccgtgtcgtcgggtgcattcttatgctgtctgagctgcaacctaagttaaggtaaataagtcctctatttattttaaggattgcaatgattcatatttgtcaccgtgggtaccagcgctatgttctgggactggtactgagatcgcggtttcgtaaggagcggtttgcaccgtttttcctacgacacgctccta

SEQ ID NO: 60500 - DNA, 444 bp, Oryza sativa
  unsure (1)..(444): unsure at all n locations
tcagntatntatatatctttatcactagagctgatcttaccctccaaactgataataacttcacagtatcaccacttgtcacaaggaagaacacaaaatgatgaaccgggggcacagcatagctgttcacatgggcttaaaagagcattacatttccatcttttattcaacttcaaattggaaccaaactggattcactggtctaaaaggcaacagccctagtctttacaatgcgaggttaggttttcatataaggaattaagattaaaacataaaaattgctgattcattgcagtacacgtccaatcatccatggatgaacggaataatagagatggattcctattgctcccatcaacctcgcctgctatcgaagaaatggataatcagtacaacgctctcatatgtacagttgcgcatcatgttgacctgcaatcttcccat

SEQ ID NO: 60501 - DNA, 435 bp, Oryza sativa
tcctctaagtcacctgctgcatgcaagctgcatacagaatctgtgttttttttgaggatagaagagttgacaaagcggattgagcaagaagatgagcatgcaggaaaggagcgagggagtgctcacagaagaacaagatacgcttgctggcctttgcgacgacttcgggtcatatcagcatcctctagtgccaggaaatggtgtgttgatcagaatggcatgttgccacctgggacagaagcactactgcgaataaggatctaacaaatattcaaagtttccttgtgctagagatataatgttgtccattatgttctgaatgtttgcacatgcatatctaaggtgttttgaaacatgtttatatggtcttgccactggatatggcttgttcaactatagtcgtcaacttctaattattttggatatattgatatt

SEQ ID NO: 60502 - DNA, 399 bp, Oryza sativa
  unsure (1)..(399): unsure at all n locations
actcaagcttttgcacatacatgtncaaaacatcaatntggtttgttattattatttgcatacaaggatggcacactgtgaaactataaaattgccatgaacagtacttttgagaaaaaaaacatattaattcgggtaagtctgttaaacattatacaggatatatgctaacgacagaatggaatatcatccttacgatatcccatcttgtatcccctataaaacattaccccatgaaatcttgtacggaacttgcataaaacactttttcgatagtagaagtcaatctagcctctacatccaggatatataggcatatagccaaaactctcatagaaattgattgaacttattanattaagactcactgaaacatgcatacgccttaacaaactatat

SEQ ID NO: 60503 - DNA, 412 bp, Oryza sativa
  unsure (1)..(412): unsure at all n locations
agcttgctcttgaggagctacgnctcttgttttgncctcttctactggacttctcatctcctttctttatcttgcctacctttttgctgtagctggatgagagtttggtgggtatctcatcttgttcgtccttagcatgttgatgtctgttaccaccattcatttgatgatctttctcttctttgccttcttgcatcttcactttagctggtccagtggaagcatcagaagccaatgagtcgtaatctccatcatcgtttgcatggcctttgttttctttccctctgcgcctctcattgctaaatccgctgccatcttctacggtacttccttcactgacaattgctctcacgtcatcactatgtgttggggatgccaggtacatcgtccaccccgatttattactgttgat

SEQ ID NO: 60504 - DNA, 199 bp, Oryza sativa
gggagctggctcagcaaaatccctaaaaacgcgccgcaagttccataacacgcaggtggaacaccaaacatgtccaggataagcgccactatatcgcccgtatacaacaccgtacgaccagcgagcggagtgacgacgggagctaacccacatccaggccaccaatgacgcctgccgcgcgaaagctcccagacaagca

SEQ ID NO: 60505 - DNA, 432 bp, Oryza sativa
  unsure (1)..(432): unsure at all n locations
tgggttgcgagttcaacaatgtgtcctattatctcaatagactagacagcccggcataccagatagtcctgtgttgatcagacaaactggcatgttttgttcaaccataccgtgtcttggtatgagccacagtatgtttatagactagacaattggatcgtgtgtcagactgctcattggacggaccgtctgtctggaccatgtgttggtctaaaccgtgttctgtacacggattggacaatccgactgtatgttggatcatccggcaaatagatcatgcggccggataaatgtgtctgtccagagtaagacattgtatgcagggccctccaatgaaattttgtggccctgtgcgaaatctgaaatggcctaagcataactgatgaaataaaatgattacaanttatacttccccgacctatgcaattatac

SEQ ID NO: 60506 - DNA, 348 bp, Oryza sativa
caactgcccgttgcaccgatccgatatattagcgatgtgggtcacgatgagaagtcgataaattcgacaagtacaccagacccatctaggaggcatcgcaaaacagacaaggcttctcgctgacaccgtgtttaccgacttcgcaaacaggtgtcaggtccccctgacccaaccgctggtgtaaacaggattatctcttcaatggacgagatcaaaaacgacgttagagccgaaatgggacaagaatagtcgaatgaaagcttgagtacagtcaatgaaagggatctcttttgcagccacggattagacctcatcgatcatatcaaaacatcaaaaccgaaagcctct

SEQ ID NO: 60507 - DNA, 420 bp, Oryza sativa
actgtagcttgtggagttacgacatgcattaatagattttggtccatgagagaacaaagcacattgatgtgagatatcactttattcgatgtgtgattgctgaaggtgatgtcaaagtatgcaagataagtactcatgataacccagctgatatgatgacaaaaccatgtcctgctactaagtttgagctttgctcaagcttggtgggtgttacagtatagtcctagagactatttggcgcgcggtgattttacctacatgaggtatcttttggtgattgccgttcttatgcaacaagaggaaattcgtcttcaggtggagattgtaaatatgtgaccgaattttggcccacatatattcggattagtttccctatatgagcgctattaagtgtccttctattatcccttatatatactc

SEQ ID NO: 60508 - DNA, 391 bp, Oryza sativa
ccgcagcatgcaacttgctgtagaaagaaggcttttttatcaactaacccagtgcgcttgctgcccacaaaaaatctggcgccaatgacggcccgcaaccaattcaacccttgaaaacaagtctaggaacactgcgaagcactttaagagggctccagcccgtatgtacaaaattgcgggagtgcgcaacactttctctatataaagttggaagagggctgtgtccttgatgataaaacaaggcggagttcaacccatcgaaagcataaagcacgctttgagtatagaaaagcctctgattattatgctgaaacagacaactacctatgagtggcgaccactaatattctgacggaatttgttcgaaaaaaatccacccaatcctggaaca

SEQ ID NO: 60509 - DNA, 359 bp, Oryza sativa
tctcccgctcagcccaatggccgaacgggcagtggcttacaacctctctccgagcgctagcggtgacgacggtgagcagaacccgcgccgtcgagctcgtactccaccacccccctctcgccgaagtcttaggcgggaggaggcgctcgagggggttgaaagatccgcgacttcgccacccacgagcgatgaagaaggacggcgagacggggagcgtcgcctcctcgtctacggcgatggcagcacgccccagggcgcgctccaagctgcgggcgcgctcttgcgtcacccgcccgtcgtccccgatccagagactccagcccgacgttggctggatgacgtggccgacttggtcatga

SEQ ID NO: 60510 - DNA, 393 bp, Oryza sativa
  unsure (1)..(393): unsure at all n locations
agcttgactactttcgctccaggttttactggcaaagtgatggtaaaaaaaaaagtatcgtcttgctaaatggaacatactgtgccaccccaaggaacaagggggattatgaattcatgatttggaaattaagaatatggctctacttagtaagaggttattcaagttgctctccacggaaggggtttggcaacagttgatgcgtaataagtatcttggtgataaacctctttctcaagctcaatggaaagcaggggactcacacttttggtctagcctcatgaaggtgaaacgggactttctccgttttggatcctttataattaaagatggctcctaaattatgttttgggaagacaaatggntgggcaattcaaccttgaaagaacaata

SEQ ID NO: 60511 - DNA, 148 bp, Oryza sativa
aagcgactgcagcagcagcttcgccacgtggacaacatattctagtaaaacaacggcaaaggggtagaggagataccgaacggaagaaataacggtcgaaggctactttgttcaacctaaacgtcgcgcactatattcatagcgacga

SEQ ID NO: 60512 - DNA, 269 bp, Oryza sativa
cgagcaatgtttgaacgccttggagggtggtccggctccccgagagcacggagacctcctgatggagaacgtgacgacagtgacattcaaacatggactaggcgttccggctgaaggtggccggcgacctgctcggcgagcctgaacgccggctggaacgcctttctcgacgcatcggaggggatggagaatgtcatcatgccgcgcgacgcgacgaccatgcgcgcggcgactaagaggtcggcgtcagcaagcagcatgtagcgcac

SEQ ID NO: 60513 - DNA, 438 bp, Oryza sativa
ctcagtccgttagcctggtgccttttagtagtgctcttctattgggagaatttcatcaacattttacatgaaacgtgatgtaatgaacctctgttaattgttaattgtcagagctctagttttttgtggtataaattttgttgcaagggggcaatgcactcaacttttgaatcatttgattggtatggaaatcattgcatttgtgcagagttcaggcagagttcagttcttgcatttgcacatcgtattactattacctggccttgtttggcacatctccagttccagctccacctctcctagagctggagctcatccaaacagtttcagctccaccgaaaatgggagcggagctaggtggagcactctaacaagatgaactagagaggtggagctaggttaagctgttccacaactccactttagatctaactccta

SEQ ID NO: 60514 - DNA, 416 bp, Oryza sativa
  unsure (1)..(416): unsure at all n locations
agctctnttttattataaaattgacttatggttcctgatggtattttccagaaccagaggtaactggtgtatcatcctggtaataagtttcaactgaaataattgtttgaatttttagtatggaactgccaaaattctcttggatggtggacctggtcagatcctatgactattgtaggcacttgctgtggatttatccgccatctttctgattttagatgacacgataacctccttttgttgtcatcgttacttgacctattttgcattttattactgtgcattatacacgtttctgcatcaggggggatgtggaagctcaaactaatgcagagaagtttctcgcaagtgggcaaataatgcgggaagaatctctgagattgggatcaatttcttgtcaaccacttgagaacacc

SEQ ID NO: 60515 - DNA, 443 bp, Oryza sativa
gcttcaaagaactatataagcttgttctttggctgtacagatagagcacagcaaccaagttcaagacataagcggttacaataaggtagcaacattactagctatgtaaattagttctagaataaagcacaggacaaaatgacaggtagatgaaatcaccacatcataatacacaactaccaatctaccatacatctaactgggtgtgataatacaaaacaataccagcaaaatggcttccagcaagatgaatagacaaaacagtgttggaagataaaacgcttatattctggaacccataatacctgcacatagatgtgtacacaaacacttttatcccattgtattacacgcacattggataaaattgctgtggctgaactaagaatcggttgagttgaaaaatatacaatccatctagccagcacaatacctggaacatg

SEQ ID NO: 60516 - DNA, 408 bp, Oryza sativa
  unsure (1)..(408): unsure at all n locations
ttaagtcacctgcggcatgcaagcttgacatgccatcctctgcctagttgtttctatatctctaggatctcatacttgatagatggatcatttcagaaaaggtttcatgtagcctaccatggactgtggttgtctctagctgctttacacactaatagagagaaacatttgcactcctttgtaatctaaacaactctaacatccaccactgtagcatatcatagacgtgttttccccttatttattgtcagagggttagtctttcttgcagacacatttgaattcataaatgctgcatgcggatatactaaagcgcattggactaggattacaacatangctattgacatggtccagataattacatgatcacgtgatggccggcacagatgctagccaaagaacctt

SEQ ID NO: 60517 - DNA, 469 bp, Oryza sativa
  unsure (1)..(469): unsure at all n locations
tagacactcaagcttatcatgtgacttcccagaagaatatntctgtacacttagtcatacacaatgcaaaccctgtgccatatgatcttgtcagttgattgcaaccactagcactagcaacagttcaaacatcaattctttcacagcaatttcaggcacacaattctcaggcctatatagctctcagaagaagaagattctctctcttatttcatacatattctcagctagtagaaaaataaaatcaaaatccccagaagaggaacaaatctatatggacataattgagcaatgtgactccaggatcctctgcctcttgctctgaaagtgactgctgccatataccaattcatgagaggcaaccttggctagtgcctgcctgacagcctcctttagagacttgaggctcacaccacctgcaatgcctttctccctgcacaatatgaacacatgctgcacncttccttcc

SEQ ID NO: 60518 - DNA, 423 bp, Oryza sativa
  unsure (1)..(423): unsure at all n locations
agcttcatcttgagtccatcgcggggtactgtttttatagtgacgaggaggcccctggaagagatgcgcccgtccatgcagaggagcgggttgacgtggccctgtaacggtgcggagactaggaggaggtgcggcagcgaacgccgcgccggcgtctcttggctcattatactgaattctgagctgaaggctgatcagtacggacggagctcgatntttcaagggccaaagtgtgggtcagtgtgtgggacaggatgccacgccatggttcttttcacgtcgttgaggtctcacttggataggcccatccgcccatgcataattatggcccaagatgttgtcatggaataagtagttttgcctccttcaactcatgcccccgggtgaatagcatctctcaaccgtagaatcgggtataaccta

SEQ ID NO: 60519 - DNA, 466 bp, Oryza sativa
  unsure (1)..(466): unsure at all n locations
taagcagagttagagagtataatatgtgggccagatttctttttataggtaaaatagagttgtggtataaatcaaatattgtctacaaaatagaggtatgataaatttagttgataaccaaacatgcccatcaggatacaatgcaatttttattgttagacaagtacagaacacatgtttcttattttttgtacggttaaattgatttcagcatgaaaacatagaacaacgacgtagaaaattgtaacccaatttaacatgaatcaagagagcacaattngggtatggtgagtgaatcttggatgaattactttatccaataaacttacagcatcttggttaatattcaccacaatgaggtgtgttttaatactttcttttttgagggtcaaagagcaatataatgctgcatgccatcaattcagtgcctggtatcattgattatatatttgatggtagagatttt

SEQ ID NO: 60520 - DNA, 422 bp, Oryza sativa
agcttgcatgacacataaaagcctatctttatgctttcacttggacaatcaagcaggacatcatccatgtaaggttcaagtgaatctgcatcttcatagaccacacgtgttccaaccaagcttaataaggaggaagctagcgtttgcctcatgttactacaaaatatccaaagccaaaaagttagaatatagcataaatatttcaaggacgtaaagtgcaactctgtgaacttaagatgtcacacaactaacaattaaagcaaaagtatcgcaaggaaagattaagataacttatttaagcatgcttaaactcatatttatcacatttctccagctattcatggcaatctagaggagccagaacccactcagctaactaatccagtcaagctcgtaatgcaagtgattcaattctctatcta

SEQ ID NO: 60521 - DNA, 433 bp, Oryza sativa
tcagctgccttctgtttttcttatctcttgggaggagttttttactaatctgttcatggttctgcttatcatccaatatcattatagcttactaataatttgatatcttctgtagcagccatcatttagtaatattgcaaactgtgctgcaggtcttgcgccaaaaggccacatctattcagcaagattacgccgaagtaaaatccaccaatgtaagatatagataattctgtttattctctagtaattattggccctcttagtagtgcagtcatatactactaagagggaacaactctttctgctatcttactgtcaaaatcatacaaatatcactttgtaaattgattctgaaaattagaattcatgattaattatttcgtccttctatgcagcattgttgaaaaagtttactgaatgctatagttaacat

SEQ ID NO: 60522 - DNA, 352 bp, Oryza sativa
acacatcgtattcaaaaggcatgatactttgtaaatatacagttactgcatggctactacatacttaagcttcataaccacccattatttcaagattgcaaagattgtggataatactgttaaggaggctggatctgaagactgaggtcatagcgaagtatataaagcaatgtattgatgacatcaaaccctgtttcttttatttgtacatggtaagttgggtcattgtcttgatatcactgcacatagcttagattatcactatcttctttataaaacgatcttatgattctttaatatcacatgtctattgtctacctgcctctttgcttgtatacctaaaatttcaata

SEQ ID NO: 60523 - DNA, 410 bp, Oryza sativa
agcttctcctcgtgcttacatcgtctttggtcaagcgaataatgaggtataatttgaatcatacacttaagtttggaatttggtattctacttcatcttctatatgctttagtggatattctgatgctgattttactggttgtagaattgataggaaaagtactagtggaacatgtcattttgttggtacatcattgattgcatggtcttctaggaaacaatctagtgtaactcaatcaactactgaatcagaatatgttgctgctgctagttgttgttcttagattctttggctaatattaactttgaaagattatggtcttacttttgaaaaagagctctcttttgtgataacacaagtgctattagcattgcttagaatcatatacaacatttcagcacaaagcaca

SEQ ID NO: 60524 - DNA, 354 bp, Oryza sativa
agcatagatgagcatgtttaacatcatcatgtttgtcaagtaattgttttaaaaaaccagcataatgtatgaagccctctttttcccattgactaaggtagtgagctcgtttgtttgtttttatcaagccatgatctatcatttatgtggtaactctctttctgtcatgttctttatctagtgtgttcttgcagctattgaagcattctttacaagtgaaaaggttcatgacattgtgcctatctccaaggattcagctcttatccttggcaaaggaatactcaatgaaattcttaatatcgacattctataatgccatgaatctggatagtgtgcttattctctctaaacctc

SEQ ID NO: 60525 - DNA, 422 bp, Oryza sativa
agctttgggttcctgcagccagttctttttcttaagagtaaagatgattttcgcgtgatggaattttactgactaatctggctaatcaaatcaattaatgtggcgcacccaatcaactgatcaagtaggaatattatgctggatcgcctgatctatgagactaggacggcatgattgtaacctcgacaaaaatatcgagggctattttgaaatgcagaaatggaaaactacaggaatatatgaaaaaaaaatgtaagaacatcataggaatgttaaggcctcatcgtttggcttttttccctacggaataaaaataaatttgtaggaaattatatatatatatatatattcttggggacttacatccaatgctaaaaaggaactactgtgaaaatatctcaaattaacgttgaaaattaaat

SEQ ID NO: 60526 - DNA, 456 bp, Oryza sativa
  unsure (1)..(456): unsure at all n locations
gaaactcaagctntagccgactttcgcgccgagtggactgattgtccttatgacatgcccgaggagaagatggagtatcggaccatgcattttgacgagacgaagaggctttcatgcactggagcgggggttgctcaaatttccccgactggagaaagattgagctacatattgtggatacanttttctgcgtcccacaacgtggcagaatacgaggcgcttcttcacggactaaggattgcaatctctttgggaattctgcgtctgatagttcgtggagagtctcagttggctgttaatcaagtcatgaaagagtggtcctaccctgatgataacatgaccgcctactggcatgaagtacgcaagttggaagactaatcgatggacttgagctcacccatgttcttcgacataataatgaggcagccgacagactggctaatnttggttcaaagc

SEQ ID NO: 60527 - DNA, 409 bp, Oryza sativa
ctggctaataagggcctctaaacaactctacttttcttatacaaaatgcacgggaacttacgttcactaactggatactaaaacggacaaaggaagtggagatcacgcgatgtatactctaaatgacagcttctcgcacggtttgcaaggccgaaacaacatgagttttactattatcgtcatcattagaagtatgttcctttacctgacgctgctagttgttctctatattaatgtaatctactgtatagcttatcgctcacatgtttagtacgtaatgctatgaaatgctggacagattgttgatattctcaagatggactcggaatcactatcaacaaaatactgctctggacccaacactgcagctgatgctggtctaaaaccagatgtggatgaacttaatcat

SEQ ID NO: 60528 - DNA, 437 bp, Oryza sativa
gatcttaagcaccgcggctgcagcttgatagttccctcaatttttttttcagttgcatatatacaagtgctttggtgaaactaaccggcggatgaaactcttgtcattccaaaccctcgctgagttagtccattcttgctccattgtgcagaatgaggaggagattgtctcgtctgttcaaggggtctggctcttcatcaaatcatcatgacgagtctagtactcgttcatcagctgatgtctcgatgaaagacatcgatgctccgcgacgactcctgaatgacactgacctcgaccttgtcagtgatcgggagagacaagcctaccacatgctgagcgaccgggagtatgctcacacacgagaatactctccgaagctgctgaaaaagatagatatggatgttgaattttgtctatttggaaagctgttggttgca

SEQ ID NO: 60529 - DNA, 376 bp, Oryza sativa
tgtcgcgttggtgttggtggcagatgcggtttaagtattctgactgatttccagtgctatattgttggtaccatgtgattattccgacttgaatgcagatgatcttactgatgacttatacttccttcgtccgagagaaggacaaacccatggtgttcgagagaaacgttagaccgtccgccttattcgacgaaattaggaggagagtcagagagagtagtcacgcatagagtagtaatcgtattttatcatatgaggccgagcactatgggactaaactaaggatccgaccaaacgaactaactgacggcaccatataagccttccaagtctgaactctggattggaagcagttagtggtagttcgcatgccatt

SEQ ID NO: 60530 - DNA, 422 bp, Oryza sativa
agcttgtgtgctcatttctcatttcttcttgctatgttatcattcacaatctcccctcagttaaatgaagccattagcccatgccatataaatataataaaatgtcaaggagcatgtgtccatgtcacgcccagaaaaacatttaattctcccattattccacttgattaaattgatttatcttttatttaatttctagaaaatgcattattaaatgttttttttttaatcccgaacgaaaatcggggcgttacagtccacactaaacttgagtggcaaataaatcaacatacttaaaagagacagaacaacagaggcaagaatatatgctacctccacatgttcaacaccgtcctcatctgtccaaaccttgttaggaatgcgctgccgagctgcacgatttctactctcattgccatatc

SEQ ID NO: 60531 - DNA, 375 bp, Oryza sativa
attgttggcatggcactctacattttgagcaagctggtcgctgcaccggatgaggctggtgagaaactcataaaagaaacatcaaaacatgtgcatttcctgaccaacactgggatgatcttggaccatgtccaggcaacaagagtcatatcatgcttagcagtggataaggaatgccgagaatatatcggcaagtttcctgagatcatcaagaaacttaaggattgtctactctccaagacaccatacgtaaatataactaaagtagctgccaagctgttggttctggagtgcactggtgactagcaattgttaaaccacatccagctttttattgaagaaaatcgtaccgtggaagatcaaagcttttcacta

SEQ ID NO: 60532 - DNA, 365 bp, Oryza sativa
atatccggtagtagacttgtcttatgattaattgatacttatgcagctgcatcaataatttatatgtaagttttctatcgcacaaaccacaattttcatattctatccagaattcaaatcaatgcatgatgcatcgtctgaaatgattggatgcaaccaaacactgcatattttagctgaacctactatgataaacactatgcatgtgtgctctgcagctaaacaagagtttatttaaccacgtgcaatataaaaatgaaatgaaagaattctgccaaatttctcaaaaggatgcattctatcctgcgatatgatgactagaattcagatgtgtttaatctgagaatgcgacagatggaacataa

SEQ ID NO: 60533 - DNA, 433 bp, Oryza sativa
  unsure (1)..(433): unsure at all n locations
cgcgacactatagaannactcagcttgactactntgctctagcgtcagtcttctttcctacatcaccgcctcactgctagaatcatttccagttcattgtccttaccaactccgataggattcttggctgactggcgaacacaacgaaggaccaaaaggcttggacatgtgcaacataacacgatgggggctaaggagactcgttgcacttagcaatgcgcgaggtgatctgctacaagcatggccacaggttatagcctgtgatgaaaacaatctgaaatgttaaaagaaaatatcacttctataaagatgattcatcgctcgggaagtttcacatttataccaatgtaactatttatattgcaatacgaagttgaaagagatattaaaagtagactttatacatagctagacacagatacggaaaaagaat

SEQ ID NO: 60534 - DNA, 377 bp, Oryza sativa
agcttgcatcaatgcaacctcaacctatcttgtttacatggagtttcttcctgggttctacttctaactgatatagatccctagctatgtgtgtagactctccatggatccttgatgggatccaatggaagaacatgcactactggagttcatttatgccaacaaaggagcatgacgatgcaccggcggatgatgtagagcctggctctatgctctttcagagctctggacatccttcctctctgcttgccttggatcacagactttatggcttcagatttgcttgatgaaacacaagctacaatggtgatgaatgtatgtgtctctgctctctgatgattacgattggagcttgctgctgtggtacaaaacttgga

SEQ ID NO: 60535 - DNA, 406 bp, Oryza sativa
  unsure (1)..(406): unsure at all n locations
tcagcaagcgaacaagctaagggctctttttaaccatttgaatgatanataaggagaaataggataaacataatattctgatatgaatgtaagggtaaaacagaggattacaaaatacagaaaaaacatagaaatgatcgctcgattggaccatagggaaacacaggaatcggataagagagatagactcaaaggatttttaccaagaggttggacctcttactaagtttcctccaatacctatacgcaaaaagtcattccatcagaattntgtaggatttggaaaactttaatcctttgaatcaaagggccgtatangagaattttctataggatttcaatcctatgaaatcctatgaaattccttcataatntctttgattgaaagggccctaaggtaatatgc

SEQ ID NO: 60536 - DNA, 405 bp, Oryza sativa
  unsure (1)..(405): unsure at all n locations
tgaaccaaagtgggaaggaccatacatcatcaaacatatgttcatgacgggatcttttcgcctaacgacactcaaaggcgaggagttcgaccattcctggaacgccgcctccctcaagcgcttctatgtctagaatgggtggcacccaaatcgccaacttgtaaaaatgtacatattatcatgtaagccttttggcactatgtaagcctttcggcaagataaacaaggaaaaaagagaaaaaaaactggatgtatggctattatccaccatggaggcccgaaccagtataaaatctctgtctcctccgccttctttttatgtcttttcgtgtgattgataatttgttgaanaaccccaaggcaacgcctgatcagcgaataaggccaggggggcgaaaccaatct

SEQ ID NO: 60537 - DNA, 294 bp, Oryza sativa
  unsure (1)..(294): unsure at all n locations
ctgcggcatgcaagcttttaatattgtggagtagcatatctattttttgaagatactaagcagtagtaatattgtgagacatagaanggacatatctgctgttgctgtccagaaatagaccaaccgcccccataacctatgagcccatctacttcccgagatcttctaacttcacttcgcacgatcctagaaaactgtggggtgccctctattagtcaactcgtccgagttatctcgacgtgaccggcgagggccgcaaggcgatcagataatcgctagggtgccggtttgact

SEQ ID NO: 60538 - DNA, 393 bp, Oryza sativa
agctatgtccgatagttgtttatcggatgaatgttcgattttgttcaccgagcaaccactaccctaaatagaatcatgttctgccgacgttctgggtagaccggttataaaatccattcctatttctttccacttccactctggaatctttaacggttgtaacagaccagctggtttctgatgttctgctttgacccgctgacatacatcacatagagccacatattctgctatctcacgtcgcatactagcccaccagaattgtagctctaagtcttggtacatcttagtgcgtacagtgtgaatggaataaaatgttcatgagcttctctcatgagaagattcttcaacttcttatttactgggaccacaatatcttttctccttaccaca

SEQ ID NO: 60539 - DNA, 373 bp, Oryza sativa
agcttctctttgatgagcgagttgtttttttttctaccacagacaccctctggcccggggatgtggtggatgggcacccgcttgatctcaaagctgaggactatctcagccatctcattcatgctgaccatttcatcactttcaatgtttacaggctcacggaaatcggactttgttaacctgaatgcatttggcaatgtaatgacctggtcgaccggcccccaaaaaaaatgtagacaaattgggtgtctctttaatcacatggatgctcggatgtatttaatcccagctctatgtgtactgactttatagcgttgaagatccttcagctgacagagggtaaaaggataatattcaaagcttcaaaacaaat

SEQ ID NO: 60540 - DNA, 351 bp, Oryza sativa
  unsure (1)..(351): unsure at all n locations
agacacttaaattgaanaacagtaaaagatctcatatataacattccatcgttataaagagaccccaggtttacaccctagtagcttaggttatcataatcaagttagtagcatgcacggctggtatttgaatctcctgaagatgaatataaagataaatattaaatgtttcacgtaaaatgagggtggaataacgtgtgattaattgagttttaattattataaacttgaaaaatggaataatctgatatttcagagaaactcttatataaaaagttttcagacgatatacacccgtttagtagttggaaaaacgtgccacgagtatttaaaatttatcctatgcttcta

SEQ ID NO: 60541 - DNA, 386 bp, Oryza sativa
agcttggtgatcaacatcaccagtgttttttcgatcctttcaaagaatgtatctagtactgactgccatcccaaccaggcccggctgttgctttcgcgccacgcggaggatggctcgccgcttctggggatgctcacaccgttggaggatgcccttgtgcacagttcacggctaccaatcgaggtcgttgacagatatggctgttcctatgacatgttcctgaagtatctcgactccaccacttcctacagacttattgtacagcggaggaatttcttggaaatgagccacatgatcccaagggatttggcgaagctgggtgcgtttcgcttcgaggggcagcttgccctgacattgttgcattatggaatgcccgttaagcgaaa

SEQ ID NO: 60542 - DNA, 389 bp, Oryza sativa
  unsure (1)..(389): unsure at all n locations
gttccggtcggtcttaatcctgacatgaaaaaagttttaagggacattctgattgatcttgacaagcaaaactatatgcattcaaatacaacgacgacattggatgaaaggcagctcatcaacggaatcaaggatctagtcgagaaaaagaggtgctgatatataattatatattcagttattcaatcaggtcgcacagattggtgtgattgttagttctggtagctatagtatgcttactttatgcctaactagtggtatgtacacttgtaataattctactccctccaatactaaattccacaggtaacctcgcaaaaataaaataaaataaaaatccatagatgaccttntgccaaaaatatgttatgctccttcccttcgattac

SEQ ID NO: 60543 - DNA, 350 bp, Oryza sativa
agcttggagtcttcagacgggttgttcccacggctggggatcccggtagaatgtctgtgggaaaggaccccttgcgaggtaaaaactgtttcaacaagcgtgcccaccgtcatgggcggatgtgaggggattcctagcataggtttgtttgactactgccttgtgaaaatgcccgtgagaaaaaggggatcgatgtttgagaaatctgcagctgatgggatcatctaggcccgggtggtcctttgaaagttgctggcccgagtggcccgttgaaaaatgttggccgggtgccaatcttggccaattctacagactgatacattgcacatactccgacccgacgagacgca

SEQ ID NO: 60544 - DNA, 253 bp, Oryza sativa
gctgtctgacaagatagtgtcgtgaggcacaaaaaatcaagactcggaataaacaactcccttacatcctataacagtagcagcacaccaggtactagctacaagtataagccagagcacgggggccggggctgaatcacttgaatgcacaaacggcgacgagagaaaactcgtgggcacctcccccacggattatagcggatgcacgagctgtaccaaagctaaggacaaaaccaatgcatcatgtgagcaa

SEQ ID NO: 60545 - DNA, 396 bp, Oryza sativa
tggtgctctcctccttggaggataccagtatcatggtgtcattccttgtgatagttgcctcaacaaccatatccacttcatagatccttccaataattggctctctggtgagatacaagttgcttatacagtgtttgctggtcagagctgccaatgaactctgaagatgacccatttggcaacatcacacagagaagacagacttatgtctaatttacgacgaaaggggagagcttgacatacatgggaatgcctttagagcttatgataggcatacatttgtcaatgaatcgagtatctggacccattcctacttctgttgggttcttgctgctgctcatatcgctcaacctatcacacaacaagcctggtggttcgatacctgacacgttcatg

SEQ ID NO: 60546 - DNA, 388 bp, Oryza sativa
  unsure (1)..(388): unsure at all n locations
tctatggaatcagcttgcatcacctaaatctatanttcatagtccacatcgccaatttcatccatgtttgtgaagccttcttgggaatttaaccccacttcgctctgtttcgccgaatcttctttctcaaacctcaaccgaacacgagtaagccatgtgaancggaggggccggatctcactgagggggactctgaccagaatacttctcgatgcccttcaagacttcaaacaaagggtggcatgcgaactggttttatgttcagaatcctgagcctgctcttcccgagactcttgtctttcctccgggtaccaagatactcggaactctcttccgatctgggatgaagctgcccaccccttggaattgatggatcgcatgctcaaac

SEQ ID NO: 60547 - DNA, 378 bp, Oryza sativa
agcttgaaggtctactcgtccactctttgtctgtgacttggtaggacaatgccggacagctttctgccgacttatcatgtaaaacgagttggtgtagtacacggcaatagtgcattactgtactatccagaccaaatggtagtccttattacttcttttatctcaggggtgtttgtcataaacaagttgtcgggctgacacaagtgattcagcatcgcggcatccacaacagaatgtactccatgtctccgttattgccataatctggtcccagcaaaactaatatgtgttacacggaacacggttatgctgtcaacgcgagtgttgatggagtcatggagatgttagacatacatgtggcgctagtcacacacaaga

SEQ ID NO: 60548 - DNA, 283 bp, Oryza sativa
  unsure (1)..(283): unsure at all n locations
gggaanngaagcgaccgagcagcaacnncgcaacacacttatatattaatgcccaaagcaccattaatggaactacaccagctatggccgaggaacgcgcagaccctacctttgttggaaataacggacaagaacaaatgcaacccagttcaagggaacaccacgcaggaccacattagcgcctctagtgagagcacaagggaaccatctgtgactaccccacctggaaatgatacccgacttgcgccacaaggggatggcaatactggcacaagaagtgggg

SEQ ID NO: 60549 - DNA, 339 bp, Oryza sativa
  unsure (1)..(339): unsure at all n locations
ntggagaagatgtcataggtggtattctggcttattccccagctgagcgcctgtgaagatggagccgtaggccgctagtccgctgctggttatttttgcttgtcaggcctgaagtgccttngtaataatgtaaatattatcgatataataaagatgtgtcttttatatcatgtttgtgtggtgtaccccggctcattctgggacggggattaatacactagcgttcgggaaaaggcaatnatcccggtcgcgacagtcgagaacaacatgaagatcctgtagctgcgtcaagagaacctgcagctcaaaaagacctagacgcggtggaggcgcagctgc

SEQ ID NO: 60550 - DNA, 345 bp, Oryza sativa
agcttagtttatgccccatactcttggtctctattcgaaactttttgaattctgaattttgaaccttgaaggcgagtagagttcaaattccaacgtagtactactagtagtatccgccgcggtacacagcacgaggacgaggggggggggggttaaagtccaattcaaagagcattcctagatccactccaggggggagcactttggtcgtgggtcctacctactcgctaccaggcctattgcccacccgaattcatcgcactctggcggggggacactccataactagtctacaccgtaccggtgtcccacctgtgactgaccaacatcttctgcttgggggga

SEQ ID NO: 60551 - DNA, 423 bp, Oryza sativa
tgataatagatatttgtaagagaatattacaagttttggggagacactcctgattcgactattaacttggttatagaatatgacccaaaaatataacttgttaacacatcctgatccaacattcactgttacgcccaaatatctaaaacagagatgtttaaagaaatggaccctatcagactaatgagaaactctgtgggtttacggatttatccatgaaggttcttacacatgcgctttcaatatatatggaaggtagcatttggcagcagcataaagagaaataactcgctcgtccttatcgtgcacgcatactgaattgctaaacaatgtgttttctaacagaaattgatagaaaagttggttttaaaaaagtatattaatatttcttaaagtttaaaaaagtaatactccatccgccta

SEQ ID NO: 60552 - DNA, 415 bp, Oryza sativa
  unsure (1)..(415): unsure at all n locations
agcttgtcgaggaacgcctgtattgtattaaaaaaagaagagaaaaaaaagtggaaagagagatgacgtgtatcacactgacatgtggggcccacatgggtcccacactgactcagccgccacgtaaaccaaaaccggggctaaaaccacccaaggatctcgggtgaccggttttgtatagttaagggaccccgcgtatctaattttgcggctcgaggatgtttttgtatcccgatgataagttgagggaccttcggtgcactttttccgccggtgaactaagcttttcaagttagtgggcttcatctactaagcccgtcatatagtacgtgggctctaggctgggccgttntagcaggctacgcacacttgccaaccaacgaaccaacaagatatgtnccgttttcagtttacc

SEQ ID NO: 60553 - DNA, 385 bp, Oryza sativa
agcttgacgcatatgctataccaaaatgttttcttgtcgtgacatattctcaccccgcgagtccacaatagattgatgtataacttactccctcagactaaaaaaaccatgacctggttcagtttgcaactgtttctttaaactatcaacttttctatctcatcaaaactctcctatacacataagatttcaacttttccgtcacatcgtttcaatttcaatctaacttctaattttgacgtagactaaacacaccccaacttatacttagaaggggtccctccttatacaacgaatctggataacctatggagaggcacgtgcctttctaggttggcttattttttttggacggagggagtacggagacccctcttaatgaata

SEQ ID NO: 60554 - DNA, 416 bp, Oryza sativa
  unsure (1)..(416): unsure at all n locations
ttgntatagtataaactactccactaattaaggatattgtattgtagcctttcattttgctatgctgcatcaccctgcatctctcaaatatataaacaaccaaccaattaatcacatcaccttttctgtcccaaattgagtacaaataattgatcatacaggtacctcaattagcattggacgctgtgcttttaagacctaacagtgccatcatactgtatctctcaagggaaaaaaaatagtgccatcacatcgggcataagcatatgaccgtcagaccgtgggattagacacggaggcgattcagctgcaaatgtcggaagatgatagagtgcttatgaaggttgcatgtggtaggcttaagacaacggtcatacaacctctttgcaactatggatggagattcacaaatagac

SEQ ID NO: 60555 - DNA, 442 bp, Oryza sativa
  unsure (1)..(442): unsure at all n locations
taataccaactatacagaataagaagactactaaaaccatttatccatattaacccaaacagcttntgcaacctataaaagcttacaaaaatagtataacactcttctgttgggtacctattatctgcatcgtaataattccaaagaattatctaaccgcattaaaaaggattttagcagcatcgggtcacatcattgtgagcacaaattgacaaagcataaagcgcctaagtccctagggatcacaacgggccacgctggtaataatattgtgctaaagtaccgtacaggcccaggcctgttagcactcccgataccctacaaaaacactgaagtccaagtgacactttcatcttcccgctgagactctcgccattatcacactccttgctacagtctaaaccgcacagaaaagctggggtcataaatccgctcaatccat

SEQ ID NO: 60556 - DNA, 411 bp, Oryza sativa
agcttgcccaagcgggggttgccggcttgccctcttgactccgaatccaacaccatgccattgatgatggacaacggcggtggggtgccgcatcaggatggggagttcttcgtgctagtcgagtcgatgattccgctcgaagggaacagtgcaccgcgccgttgttgctttggcagaggcaacagttcagcaacgggttgttcgatattcaggatcctggcagccgacgtacgacagagtttgatatggtgatggtggcttctacatcctcggtcaacagcaggaaccaacgatagatggagaagacgaaggcgttctttttgtcgatcctagggacaacattcctggggtcttgggttgaagcatatgggtagctgggggaaacgatgatgacgtgaggcggacagtgac

SEQ ID NO: 60557 - DNA, 344 bp, Oryza sativa
  unsure (1)..(344): unsure at all n locations
ccacgcaccggtgaaggtgtctcgcgatcatgacaaatatcttactgaatcccataagcttataggcatgcatgcatcaccagggtccaggtacactacactgtgtcctttntttgatctctgtgactgtgagtgtaccagttcactnttgttgccagctgtgtgtacaacagtacaagtacccgtgcttaactattcagttgaatttctcactatcattttattacttacaagtaaactatttaaagtagtgctactataaagtactacttcatcagtccaaaaatataagatttttactggatgtgacatatcctaatagcacagatctgaacagacttgta

SEQ ID NO: 60558 - DNA, 366 bp, Oryza sativa
agcttacccaagaacttgatagcagtttcatggatgcttctgccaacgccgagcgcccctgcattggcaacggatgtgagcaagcagggaaacgtgctctctgtcggcctgacgccttcccgacacatctccaggaacagattgactgcctcctcgttgagtcctgccttgctggatccgccgatcatggcgttccaagaaatcacattcctcttcggcatgcaccggaacagccgggctgcatccccagacattccattcttcagaaaccccgcaatgagcgcggtgtaagagacgacgttcggcttgcgggtgtcctgcagcgcgcactgggcttccctcacgagcccatcttggcgttatggt

SEQ ID NO: 60559 - DNA, 405 bp, Oryza sativa
agcttgaggtgtttagtgggcattttctctataaaaagaagagatcagatgttgcatctacttatttattgcttgggactagagttcttagagtccctgtacatctataagcctaataggaggtggagagaatatttgctttgtttttaatattctgatatatttttttaatgaatttggtcaaatctcaaagaattttgacttatcacacacccaaatatgtaattaagactcatagtttgccctatgacttataagacaataccaattttgaattttaaaactcgattttaaagttaattttgaatgctttttgatgtagttcctttttcagtttggcttttaaggcgctaagaacacatagacaaaatattttactcacaaacttatttttgatcacttatt

SEQ ID NO: 60560 - DNA, 435 bp, Oryza sativa
  unsure (1)..(435): unsure at all n locations
cgaaaagaatctgtattgtcttcatggctatnttataccacaattgtattctataaagtatccattgctttgcttataatagcgaatgtgggcaacattgaagttacatttccttctttttcccaaataggtaaggaagcgtgatgtcatcctgaagttccacggatcagatgctgcaaacctttttggttcatctatcaagatacaacagaccgagaacagttgtccatttggatcatgcatagggagatgtaacattgagaatgaggatcttgctgatttcttcatgaagaactttaattgggctgtttttgaaaatgaactgaagtggtaatggacacacgctgaacataggagactatattataaagattttgatgacttgcttgaatgttgccggaaacataacattcaaattcgtgggcactgcttatt

SEQ ID NO: 60561 - DNA, 414 bp, Oryza sativa
  unsure (1)..(414): unsure at all n locations
agcttttgagtccaagaagaagatattttgtggccgcaaaaaaacttatgtttgaccctagtgtcatccaagatgtgccgcttggacaacgccaacgctttgcatatgtcaaaaaccacattgtttaggagcctgaaggaaggattgtttaagtgccatacaaatgccgtaaatttcaccctgaccgaagataacatgaaggcacgtgtgcaattttgcatacaaatgcttgatagccaaagcataccgaatgacccaacttttaaatctctgtataacatcatatacatagatgagaagtctcaacatggagaggggtgagttgtttagtttttcttaattacttgaaatatgactactactcacaaccgtattaattcttggtactcgattgaatgtangaaccctggagtt

SEQ ID NO: 60562 - DNA, 360 bp, Oryza sativa
acgacctcgtcttcccacccgggcagacgtttcggttcggcagcctcgacttcgtcaccaacaacttccgcaagatttctctccttgactcggaatcggaccagtcgggagagaaccggatctcagtcccgcttggattcccaaacgcggctgaaacctacttcaagaccatctcaatcgagtcggcttcaaaccactcggccgagatcgtaccttctccaacgacaccagatcaagatgatggggcttacccaccagtcccgatgaagctccccgcgcgatttaacggccgtcttcaccacgacagcgtcttcatcccggaggcctaggcggaagtctgcttcaacaccgaattcgcct

SEQ ID NO: 60563 - DNA, 427 bp, Oryza sativa
agcttggctctcatatagaccacttgtatttctgatagctccccaccacttgtcaaaggcaagaagcgtgaacgcggcaaggggaaggtcggggagttggcgccggagccaaaaaggggcaaggctgcaacgtcgatgccgctgagcaaagcggggaaggccgtgagggcgccagcccaatttgagctatgcatgccattggtggaggacaatgtgttagccatgatgggtattgcttgccgagagctacataagcaatacatggagctaatcaatggcaagcggaaaatgagggagtcatccatagttggacatcacgaccaccagctcgtcctatcgtcggctgcctatataactataagctttgatgacctctttgaccttttcaggatcccaaagttggacactggtcttctaaaatgctaca

SEQ ID NO: 60564 - DNA, 395 bp, Oryza sativa
  unsure (1)..(395): unsure at all n locations
taatctcagctctgatctacaaccggactcnattgtctttattgatttacgctgcaaacacattataatagaatctgctgcattaaagagaggacagttcaaattgtcagctggcaataccttcaacctccttcaaggctgagtccctttccgcagccagttctaccttgtctcttttcaaggcttcaatttggttctccatctgagccatcctggtggcttgcgctgcttgaaatccatatgtttgaggatacacgtatgacagcatagatccatggagcagatctggaagattaccttttgatgaaccactcagctctgagtttgaatcctggagctgagcaattcgctcccttaattccttctccgttatctggcatgctccttgggctcgt

SEQ ID NO: 60565 - DNA, 376 bp, Oryza sativa
agcttgtacaaggtagagagcgccttgttctgcctccagaagcgccggcagagagctgatacaacggcaagcttcgcaaactggaaacattctttcattggtcaggagacttagcatattttataccataaatcatgtaaacctgactgagcagttcatcaaatttatatatagaatcactgcaaatgttcatcaaatttatatatagaatcactgcaaatttgcacatttaatcattctttttgtgcatttgctacttcacaataatctgaatagaatggagtgaatcctggatactaatcttgtattgtcaggaagctgccctccttcctcggcgtgcatctctcgttgaaccacgcgagaatgtcaacgccga

SEQ ID NO: 60566 - DNA, 377 bp, Oryza sativa
  unsure (1)..(377): unsure at all n locations
actcagctttacgccgacgatatcgacgacgagagggaatatgtatgcggtatttgctnggagacttgcaccaagatggtccttctcaattgcaaccatgccatgtgcatccactgttatcgagactggtaatttgctccctctcacccttgcttatccgtttgagtatttaagtagtatatatatgatacccgtgcaacgatattgatcaattataggccccatgtcacatgacaccatataaaatagcaagtcgctttgaagtttgaacattgcatatccactgtgcaaatatgttactatagggtcagttctttttttgttaaacctggcgctgaatgtgagctgctcctacccattctttgtgttggaatagt

SEQ ID NO: 60567 - DNA, 382 bp, Oryza sativa
  unsure (1)..(382): unsure at all n locations
agcttttttcctgagattttgtcgttcaataatatgctatgatttgttagaagatagttcttattagatacttcattttctgcaacagtaacagttcaaatgaggtggagcaagagccctatgattgactaaaagaacattaatttgctgttattattaattggtattagctagacaattaatttgcaaagtcctgaaccaaggatctgcaataaaacctcaaaatccccacttaactcctaaatgagtatttatttccacattccatccaaggtgtgccagttattccattgaatttgacncaatattttgtggatggcggttatgaggctcttttacctatgtntggtaaaaatttgtgatgcgtgcactttcatatgat

SEQ ID NO: 60568 - DNA, 264 bp, Oryza sativa
tcattcttagatgctattactactaatgctcacaagccgcggaccgtttgggggagcttctatcagatacatcttttgggataagctgtacctgtgacaagctcccctaatgagggccacagactgacacggcaggggaccaagaagattctagctggactctaattccgatgagtaatctcccgtagatacagcgaagggactccatgggattgcacacgtaatttagcatattacaatgcgacggcgaaatcaatttaccgg

SEQ ID NO: 60569 - DNA, 341 bp, Oryza sativa
  unsure (1)..(341): unsure at all n locations
ngtggtggatagcagacaaggactatcacatcagcttttagatcatgggagngatctgacagcgacacatcgccttgagcccttgacccctgtaacttactccctccgtactcagaaaataagtcggttaaaacagcgacacggactccagaacacaactttgactacttatttctataaaaatatttattgaaaagagagatatgtatactcttataaaagtatttttcaagaccaaaatattcatataaattttacatcttcaaactcaacaacttgagagttattcatgagtgatatctctaaaggttcaacttacataattgtcatgcataaaacat

SEQ ID NO: 60570 - DNA, 428 bp, Oryza sativa
ctaagcttatcttcgcaagcatcgtggatgaggaggcactgtatctttctggagcttatcaacgtgatcctgcaccagcgccggacaaccacaccctcgcccagctcgacccgttggcatcatcaacgagccatcactcgcacccttgttgtcaaatggtccacaagtgctactgctgctcctctccgctgcctcctcccagtcatgttgctcattctcgagttgtcaaagggttccgagtatctaagtcaccagagcatgacctccaactccccaccgggaactcgtcattagtgtcttccaaagagggcgataatgtcacgagaacgactaggagatgagtgggatgaggaacataggaagggggatgatgcgtgggcccacatgtcaatgaggtggggagaaagagttagcgggagcattttgat

SEQ ID NO: 60571 - DNA, 406 bp, Oryza sativa
tagccttgcatggctatatgaggaaacaatgcaattcatgatgattatcttcatctgaagcatcatatacgttatcatacctcgctttatgggaaaattgtctacaccatggtaatgttgtgggccatttttaaagtattcagtgacaactacacaaggttattggttaataagcatgctctataccttgcagtcgaccaaggtcattgtcatggttaaaaacacatgttctagtggaaccaacgtcttgttacatgtgtaacatagttatcgttccttgggttcacaatcatgttataaaactgaattgtatagtgtttccgaaacacatggatgctctttatttttgtatgcaactatttgcttgtaaaagactaacttcttgcataacataacaactgatccc

SEQ ID NO: 60572 - DNA, 439 bp, Oryza sativa
  unsure (1)..(439): unsure at all n locations
gaccttaaaactaagcttagggccgagtttagtttccaacttttttctttaaactttcaatattttcatcgcatcaaaactgttctacacatataaactntcaacttttttcttcaaacttttaattttagtcaaacttacaattttagcgtgaaactaaacgcagcctatatatccaccatacaaatggactgcactccagtccgtacttccgtttccttgcaagcaacaccatggctagctatgaaccaacgaccgaccaaggatatatattatccacagacgcaaaaaaaaaggttatttagtttgcaaaacgaatggattatattgcattctgcaagtggaaaacctcaccgacgatgcatgacgacgatggttacgacttttacttagcatttctgcctccacacgcaattagttagcatagtccccttgaaat

SEQ ID NO: 60573 - DNA, 427 bp, Oryza sativa
tctcgactctacagcagcagcaagcaagcggagattcatcgtttatatggatgagagcggtgtgatgtttgctacgcagctgcctgtatgctgctgtgtgcgcgtgcacgcagagagagaaagggggggttgcaccactgcgcctctctctcctatcacagtggagggcagcgacaaggccgagcttatgcagagatgacaaagcacatcgagcgctaccagcctcgccgtcactggcttatcagttgcatcgatcatcaccacgcatcaccaccccttcctcctcccctctcctccgccgcagtcacaactcccaccccgaagcttctcgactctacagcagcagcaagcaagcggagattcatcgttgatatggatgagagcggtgtgatgtttgctacgctgctgcctgtatgctgctgtgtgc

SEQ ID NO: 60574 - DNA, 427 bp, Oryza sativa
ctataaaactcaagcttgggtataggcggtactatgtctcgctatactgtttcatctgacgatgtcaaaacctggaccggcggcccgctgaattataaagaaggattcttcacccagttagccaccgatgagctggcaaaggggataaacgaagaagtggtgcgcgcaatttctgcgaagcgtaatgagccggagtggatgctggagtttcgtctaaacgcctatcgcgcatggctggagatggaagaaccgcactggttgaaagcgcactacgacaagctgaattatcaggattacagctactactcagcaccatcgtgcggtaattgtgacgacacttgcgcgtttgaacctggcgcggtgcagcaaactggcgcgaacgcctttttagtaaagaggtggaggcggcgtttgagcagttgggcgt

SEQ ID NO: 60575 - DNA, 421 bp, Oryza sativa
tgtaccggttgatttggaattacctggacatgtggtttattttacaaaaacaataaactgtagttgcacagatccaaatgaaccagtcacccctgaaatgataagacttacaggagacctgtgctcgatctggtgcatcaggatcatcatccttgtcgaagacccgtgtaattcggttcacaagtgcgctcttgccagcatctctagggcccaccaatagaaacgttgttatatcaggcaacacatagtctccagattttgtgccacacactccttcaaccaagtccccaggtttatacctgattatagaatgactaacattaaaaaaaaaactcgttgacaaaaagatcagatcttgacttatggtttatggccgaacttcttgctagttactgattcatcacagtgtagtcagcaatct

SEQ ID NO: 60576 - DNA, 415 bp, Oryza sativa
tgtgtaccaggaagattacagatctacgctacgtgcacacagaaagtacacctaggttttgcgtttttgcttggtttaccctaatttcttactagcaaattcatgattaattcccatggcaagtttgaagtatgatctaccgcttctggaccgagacacaagattctcactttggcaagtgaagatgcgagctgttcttgcacaacaagaccttgatgatgcgctttctagatttgacaagaggacacaggattggtccgtcaatgagaagaaaagggatcgtaaggctatgtcatatattcatcttcaactatctaacaatgttttgcaggagatgcttaacgaggagacagccgttgggctgtggttgaagctggaacagatatgcatgaccaaggatctgaccagtgagatg

SEQ ID NO: 60577 - DNA, 342 bp, Oryza sativa
tatgcgagggggcggtgagacaagagaggggagctctatgaagcattttataggcccgggaggcggcgaggaggtctggacgaggcggtaacggctggcaaattgaggctccaacgacgtggggatgtggcggcggttcagcgctgtttttcggggggcaagtatgggaaatggcgaaggacgtggagggaacccgggtcgacatgctcggatgcgcacgcgtgtgtgggagggcgatgatttggcgggacgtggggaggaagtaagcatacatgtcggtctggctcggataaggggaagaccccgataggtgggccccacctgttggtggctttagagatg

SEQ ID NO: 60578 - DNA, 419 bp, Oryza sativa
aactaggctttctaaaattaaacgtctgagcacatatcatgttttatgccacacatttgcggcctcccggacctattgacgatatgtgccttcaactcgatgcaaaatgatatcaccttggcagacactgatattacagaatttgacctataaaatccataacgatcatgtatatccatgtcaattatttgggtatatccataaaaaaaatccgttataaattttttccaggaaccatatgtatgaactgaagcaactcaactttaatataacaaagacgtaaacctttattcaagggcaacattgacattggacatctaaacttaaaagttcccaacaaatacaactgaggaaactaagctttctgggtgatatagcttcacagataaagatattttaatggacatgatgtacaaaat

SEQ ID NO: 60579 - DNA, 426 bp, Oryza sativa
aactaagctgagagtgtgaaagcccgccatgcaaccagcttattttcttagttcccttctcagggtgaacttggacatcaccaaagagcgtgtcttcatatgttgccataatgacattggcattctcaatgacacgggaaaaggtctgatacgccttctcaccttcgacttgaagctcaaggaagcacctgtccatcttgttcacagtaaggacaggcctaatcctctcaccaagagcttggcggagcacagtttcagtttgcacacagacaccctcaatacagtcaacaaccaccaaagcaccatcagtaatactaagagcagcagtgacctccgaagaaaaatcaacgtgcccaggtgaatcaataaggttgatcaggtactcatttccgtctctctcgcccttgtataacttgagtgattcat

SEQ ID NO: 60580 - DNA, 252 bp, Oryza sativa
aaaaaaacgacaaggacagcaaccaattgaacacacaagaaagcacccacccccaaaccaaaagaaaacccccgaaaaaccacacaagccaaaacccaaaaaacagcccgacacacccacccaccaaaaaaacaaacacaccaaacaaaagccaacccaacaacgccccacaaaaaaacaccccaccaacaaacaaccgagccaccccacacaaacaaaaaacccagcaaaaacagaacaacaaacaacaca

SEQ ID NO: 60581 - DNA, 419 bp, Oryza sativa
taaatatatccacccgcaaccacattatttcttttataatagttgtaccatgaagttacaacaaatatgtgggtttcacgataactattttgtaaattttcttatgattggcgtgaaaagggggaggaatatgtgtattttgcaaattaatttcagaatatttgcaataaagaagcataagaaattgtggatatgtggcaggcaaattggtgtgttataggtcaaatgctagaagcaaaaatagcccaaactattagcgaatcttatttgggataattatgaattattgtcacacaacgaagtgtgttatttattggccattgaaaattgcatattcatcgaggaagtatgaaattgcatatagctatttgaaagctattggtttacttgtagtaaataatatcctaaataaataatga

SEQ ID NO: 60582 - DNA, 413 bp, Oryza sativa
  unsure (1)..(413): unsure at all n locations
ttcttttatggatagcctgcttggattgtatttttgtgggatgcaacttgcgaagatacatgaccgatataacgtaattntagcataaaagacttttatcctctccagacaaagaaacccctccatttataatattatctttatctatatactacttaaaacattgatagtgtttttgtctaccataaatccaacaatcatgaccctttatccaatagatctaatggccagattcctacccctcgccttctgcctccacccctgcttcccgaatcgaactcggagttgatgagcaggactgatcggctccttcccctcgcctttcacctccgccctcgctttcgagtcggagtcagagttgatgagtaggatagatccaacagccatatccctactcctcagttgcccctcaa

SEQ ID NO: 60583 - DNA, 436 bp, Oryza sativa
gaccttaaaactaagctagttgtgatatcgcatttattagaaaaatgtatattgtatcatgtactgaaaattacactgttgaaggaaactttgcatatcagttcggcttattctaagttcttgaccagagaaaagcgtttgaacatatagagtgtgcaagcatacatcatcaagctttacacatgattcctttggattaatatatcactaaggacaataataatgcagtacagaaattcacgtgaaattgagagctgtagataggtaccttcatcaaattgcacttagctccatatatcaactctggcatgaatgactgtgcagtttgtgacaggggctcaccccagacagtgcacatgcataggacattaaccataaccttcacagcatagatgtatttgtatgttatccacagaagaaagtacatattagcact

SEQ ID NO: 60584 - DNA, 421 bp, Oryza sativa
  unsure (1)..(421): unsure at all n locations
tgactttacacataaagtttcagtcagtacttattttttattccctaccacatcaatgttatgcatatttcgcaatctattgtcttaacaatatagacataagataccatgtttgatgtttcattccatggtcataatgtgagaaggatgatagaaacaaaaaaaaggaagcacaaagaagatgcaagttgacagtatgaagaaaacaagcctaaaatcaacatggttatctcaaaaagctgccagcataggagaaatgaggctactcaacatctcaagaatgaagcatattgcatacacctccatttatgaatgatgcaagaaacctcatggttcatgaccatcatcagaaatcatatttctcattcactatctgaaggtaacgaanattcgactccaagaatcgataaccactaaaaag

SEQ ID NO: 60585 - DNA, 362 bp, Oryza sativa
ggtattaaacctgctcctgctttacgccgtatggtagtagtacaggactttgtctgctgccggtttttgcctccaccttctaaattccttttggtcatcttgaatttttatggtctctccttgcatctcaaccccaaatctatcgcctttctgaacatttttttttcatctccgtgaggcctacattggggtagtgcccttccttgacctcttccgttattattataaactccggtggatggaatccaatagaatctctggatgctgtggattccacctccgtgatggcatgaaagccaaatacattcctttccagtgtccttcttctctgagcggttggagggtaaagaggttctatcttg

SEQ ID NO: 60586 - DNA, 418 bp, Oryza sativa
tatgataaagtaaaatggtcctctgtacaacaaatgtttatgatgaagggtttctctcctaaatggtgtgagtggatagcttcttttattcaaggtggtcatgttggtataaaagtaaatgatcaaattggcaacaattttcaaacatacaaaggtcttaggcaaggggatccgctatcaccaattctttttaacatagtagctgatatgcttgctttgttaattaagagagctaaagaagtgggtctcttaaaaggggttattcctcatctagtggatgatgatttgtctatattacaatatgcagatgataccattatctttctggaacatgatttgcagcaggcaaagaatcttaaattgattttaactgtttttgaaaagctatctggcttataaataatatttcacaaaagtg

SEQ ID NO: 60587 - DNA, 418 bp, Oryza sativa
ttcctctgttgacattcttttgctctcctgagtcttattataactattccgatcgactgagaagttagaaccttttgatttgacattgtcatatgagaatgccactctgctgccaccagattctccaaatgccaatgcaagtaggatcaacacctcaaacgaggcagtacgctggagacaattttctcagtttagcttgcaaaccgtgagttggttcctcatagtgtactatcaggtcttatcacttttagctggcaaaccttttgcggttccccttggagttaatcagacctaatcactgtgatcacaggtgtcaggtgatggagtgaaactgataaatttattcagattagtaaactgaataatcatcagtgttgacatcaatccaacttaatttgtgtagggagttacttccccc

SEQ ID NO: 60588 - DNA, 399 bp, Oryza sativa
tttcttttgtatggtccaccaggaactggtaagttttatttggctgaagctgttgcaaccgaggttgattcaacattcttcaggtcacagcagcatccattatactatctccgtcctaaatgtttgacgccgctgacttttataaatatgtttaatcgtttgttttattcataaacttttgcaaaatatgtaaaactatatgtataaataaaaatatatttaacaatgaatcaaatgataggaaaagaattaatgattacttgaattttttaaataagacgaacggtccaacatatttaaaaaagtcaacggcgtcaaataaatatttagggatggagagagtagtttaccatatgtatttctctttcttttctttgctgctactgctagtactagtgc

SEQ ID NO: 60589 - DNA, 407 bp, Oryza sativa
tatagtaggcttatagctcactattatacttgctcttagttattgcactcactctcaggtgatcgagttccacgccaagaactgcgagccccattgcctccctcctccaaagcctcactccagagaataaaaagatcccaaccgccaacttccttcccgtctctatggctgtcctatatatgcctgccgctcctacctccatcacatcctggaggggtactacggcaacgcgctcacctactctatcgccgacgccagcgccagtgatctgtgcggcggcacgctggggcagatggtggagctctctatctgcgacgccagcgccagtgatctgtgcggcggcacgctggggcagatggtggagctcgtctgcgaggcgaggctactaatgatggaagagtatgtga

SEQ ID NO: 60590 - DNA, 90 bp, Oryza sativa
ggaggccgacaaatctgctgccgattgacaaccctgactggctgactcaaatggctcaaaagttagaggctgagatcaaaatcggctgaa

SEQ ID NO: 60591 - DNA, 411 bp, Oryza sativa
  unsure (1)..(411): unsure at all n locations
ggatctccggcgtgcccctaccgcaggccttcttaatattattcatccatcgacgtcggtgagcctgaaacggctgtatattaagggagggaagcttcgtacactggggcaagacggcggctggaacgttgagacactgcgtgctagatgtctcaatgatttggagtgtgagtggagtgagctccatggtttgttccgagaactccgttttgtggagatgtggaggtgtgcccgccttagtttctggccttgcgatgggcggggcgtatgggacaaaggatctccttctctgggtaagtgtcttacatctccatgcatattactacctctgtttcaaaataagttcattnttcatccatcccacataccaatacaaactcaaaaatactattataccatattttatcaaat

SEQ ID NO: 60592 - DNA, 244 bp, Oryza sativa
tgttcggcttaactagctgattggttacggtgtacgttgtgttagctaggcaaaattttgactgggcatacagtaagataatatgtaatgcctttgagaggcgtgcaataacactattttagtcacaagaattatgtaggtgatgatgaggacattaaagattctgtggataagggagactttatgataagtggggagctaattgtagggattcgtgggaccgcataaataacgtatttgttaa

SEQ ID NO: 60593 - DNA, 395 bp, Oryza sativa
  unsure (1)..(395): unsure at all n locations
ttntaaacggtttagatgctaatattttgtttattttatataactcgatatttcactcgttagtcaactggaacatttgacggaccaatttttttttggtcatgctgcatacgcaggtggtgtgatgacacgcaaacatcatgcgtccgatatttgatggaatatcggatgtccgacgcagagtcatctccaaacaagacagaaattatgcaactaattttgaactgtcgctaattggtacagtagttaccaattcataatggacggcggtgatgaacctggcagccactatatataaaccacactcaaccaagatactctgatcaactggtgaagttggagtagggcatagattcttggagaactgggcacattttgcatggattctggcgctg

SEQ ID NO: 60594 - DNA, 417 bp, Oryza sativa
tatggaatggaatttgtaattagtatatgtttaattctctaaattagtatccaaacatccgatgtgacagagacttggaataagtcctggaaaccaaacagagtcttactcctacatggctaacagatcaatattgtgaacctaagatggtaggacatggacagccgcgtaggccatcgtatgtatttatgcgtggacacagctagtaagtgtatctgtgtataatccaaggacagctttgaggcgcattttgacaactccgtacaaagatcacggatcagcccctgcattgcatgctgttcttcactttcatctgctcaaaatttcaaaaaaaaaaagtttcacctgcgcgtgtatgcatccaatggatacaaacgtacaattgcaatataatccttctaagagcgagagagttga

SEQ ID NO: 60595 - DNA, 410 bp, Oryza sativa
  unsure (1)..(410): unsure at all n locations
tntgaccggtaagaaaaggttcaaaaagcacctttcttgttttttggacatattggagtgtattgggggcgttcgtggcaaaaacttacttcttgattcgcgcggcgaacatttgtccattaaagccaatattgccccacacgggtgcgatgtttttgaccggaaagaaaatgttcaaaaagcaccaaaacatgatttttggacatattggagtgtattgggtgcgttcgtggcaaaaacttacttcttgattcgcgtggcgaacttttgtcaattaatgccaatattggcatatattggcgcacacgggtgcgatgcttttgaacggaaagaaaaggttcaaaaagcaccaaaacatgatttttggacatattggagggaattgggtccgttcgtggcaaaaacacact

SEQ ID NO: 60596 - DNA, 426 bp, Oryza sativa
  unsure (1)..(426): unsure at all n locations
tcttgacggcaatttatgtccctgctctttttactctctgtntgtgatatatatctaatagattagtatcatatatactcttggacaacttttgttacactttcttactttgtgccacctaagtttatccaatgactaaagccctgtttagatcccaccctaaaattttacaccctgtcacatcgaacgtttgaacacctgcataaattattaaatatacgctaaaaaaacaaattgcacggattgtgactaatttacgagacgaatcttttaagcctaattgttccatgatttaataatatggtgctacattaaacatttgctaataacggattaattaggatcaataaattcgtctcgtggtttactgacggattctgtaattagttatttttattaatgcccgaataccccatgcgacaccca

SEQ ID NO: 60597 - DNA, 413 bp, Oryza sativa
tcattgggttgtctcccaagatgtaattattctgttatgcaacagaatatatgttagaaacttactgcacaacaccttcctggtcagatgctaccaacacagcagagcagaaatagtgtgtaggtcatgagtcatgacaaccaaagttatcatagaatgtagttaagccacaaaggcaagcagtgtgtcacaatgtgccgatggctcgtgacaaaaaaaggtaggcatgtaaatacaaggaatgttttatggtgtttcttggtgaacttcaacatggcaaactggaatttcagtatcttgcaaggttttctgtagttcacctgtgatatagcaaaaatgcgtatatctgtatgactgtaagactttccactgcattgcactgctgctgtttgcgatgtgagcatgtagtcact

SEQ ID NO: 60598 - DNA, 435 bp, Oryza sativa
  unsure (1)..(435): unsure at all n locations
gacattaaaactaagcttattatataatccgcacatctccatgtaacagtattaatcttcggatgatcatatcctggtcatacgagctccgaatcgacccgttcaagtctcttaatgtttgctataacctaaagaaccctgtgctttctttttatgtattgatattgcttctttataggcttgtagctntgcttgtgtgcttcgcgtagctttcgtcggtccggaggttcccgaagcgtggttcgtggtcgtcgccgaaggttcggaaggccgttctttctgagcaaggcaagtcacatcatccttgagcatattgaatcccagtttataaaattattttgatttaaattaatgcattaccgctttatttaaattcccgcgttatcactgttttatttagccatgcctatttacctttgatatgaccatattatt

SEQ ID NO: 60599 - DNA, 408 bp, Oryza sativa
tctcctgtgaatgatagcaatatgcaggcctattttattatctcagaaccaatcaaggatgatgcagtcactagaacaatgccagctatatctcttcagaatcaaaatgagcagccacgcttgtggttatcaggtcgctacttatcattgggtaatcaaaagcctgcacccatcacgtagtacataaaaatactcatgtctataaacagtgagcttgctatgtatatggatgactcatgctgaggatacaatgtaccgatgataaccacctttcctttttgtttaaggcagtgccttgtattcgtgtaataagggagaaatgtgtaatacagacaagttctaagaggattctattggaagatgcggatatgtgaacatgtgtataatggtttactgacaaacgagacc

SEQ ID NO: 60600 - DNA, 237 bp, Oryza sativa
tctcttcgaccttaactacttgtcctaccgatatcttgtctcgccgcccgcctagccctaactttacaggctgtttttccaattgggacggattttctccactttgctgctacgtttggtagttcatgcgtccacttcattcatcgtagctggcaaactgccccagacgttagtatataagatcgtccttctagaccaaaccacgacttagcgacgacctttggcacataatatcca

SEQ ID NO: 60601 - DNA, 419 bp, Oryza sativa
  unsure (1)..(419): unsure at all n locations
ntactttacatgctctgctacttggttcactntgtgattatagaaaaagaaaaaaaaagagtccaatttactcccccaaactatctcactgaatcacttaaccccctaaactattttgcagctaattttacccttgaactattaaaatagttcactttactggttacttacatttcacttctttactgatctttttataccagcaatattttaagctttaattgtgtagagccatatggtctcattttttttgcttatgcttttatgcttatcagccaaaatttaaattttcaaccttaaatttggagctgattttgaggtttttttcattgaagcttatttttagccattgcttttagatcgctaagaacacatctataaaagttntatttacaaattacttttcattcgcagatatg

SEQ ID NO: 60602 - DNA, 371 bp, Oryza sativa
  unsure (1)..(371): unsure at all n locations
ggatgggacaaggtcacaggccttaaccgtcagattatttcttggaaaaactcaattgacccagctaccggttcctattgcaaagagttagacccttctggtgttgatcagtacttgcttttgccattgaattcctccacaccgtattggtctaccggtgcatggaacggcgattacttctcctcaatcctggagatgaaaagccatactatttttaattcatcatttgttgaatatgatcaagagaagaactttagatatgatttgctagatgaaaggactgttagtcgtcagatattatacatcggaggtcaagaaaagatgttcctttggcttcaggactcanaagattgacactgatctatgccaac

SEQ ID NO: 60603 - DNA, 413 bp, Oryza sativa
  unsure (1)..(413): unsure at all n locations
ttgcagtatgatttcttcaacctatgaatattactctatgcagttgagccttgcctagtctgtattttgaaacacatgggtgatatagatcaatgtgctgcttatatatcccctgatggttctctgttatttttcgtactcattttcatattatagcctttcttctatagaagagaacgtactgtaacatttgattgatgcctgtaccattactgaatgatttgcagcttaactcaccacgatggtacataagaaacttttctgatcgtgaagctaccagtatgattcatttgtaagttaatgtgtgttctgctgttttaaactaatatgctaatactggcagtaaaaggacatacattctcatgttcctttgttntgattccaatatagatcgtatcatcagggtgagcact

SEQ ID NO: 60604 - DNA, 410 bp, Oryza sativa
  unsure (1)..(410): unsure at all n locations
taaagcccatgaatccctttatgcatatctggatctggatcctgcagaacaaacatataggatgagtagtatctgatataaatataatactcgagaaaaaatcaagtattttaaaatatttataaatatgtatttctcctcttgtcaattttgatttccccgagcagatgactctgtacgtttaaacactctgcccgactagtcataaccaccaagcatcgggagtcggcctaggcatttcccaaacatgcatatgagtgacatgagttcgtcattaatggaacaaagtttcacggatcagaatttactacttaggtacttttgcaattattaagagcagaaaataaatttatctcatctctatgctnttgatttattccgaataatacttagcaccttgcgttactcgg

SEQ ID NO: 60605 - DNA, 415 bp, Oryza sativa
ttagagttagcgggttgtaactttataaaaagtatagatgtatgtactttgtattattaggcctagtttagttcctaattttttttttccaaaaacgtcacattgaatctttgcacacatgtatagaacattaaatatagataaaaacaaaaactaattgcacagtttgcatgaaaaatcacgagataaatcttttaagcataattagtctataattaaccataagtgctacagtaaccaatatgtgctaataacggattaattaggctcaaaagattcatctcgcggtttccaagcaagttatgaaattagttttttcattcatgtccaaaaaaacccttccgacatccggtcaagcatccgatgtgataaaaaaaattcttttggggaactaaacatggtcttactttgcgtt

SEQ ID NO: 60606 - DNA, 418 bp, Oryza sativa
tcttcagcgacgcgctggtggaggaagattttctctgatccatcgccgactgcagatcgctggagaaagggttgagattgacgagctagggttttttgtgggaacggagaagacgaaaaacgcttacaggctggaggttttcttcacaacaggcagacttcaaaatggatccccaaaattcccttaaatagacacacttccgatggtgcgaattccaaggaaaggagggacatagccgccgaaaatttctgggtccgttatgcgcggcagttttttagacttcagtttaaattcactcatgaccgttgggcttcacagggtattctcgactatgtcctgtctctacggttcttacaccgggaacgacaacagcctcgacacctgaagtcactaatggttacacgagttcatttaagca

SEQ ID NO: 60607 - DNA, 404 bp, Oryza sativa
taagataccaatgcgagtgcatactcctggaggtggtattaccacaactcactactgcccatctgtgacagttgaaattcaagggtcgatttttccagccaacctcattcttctcgaatccaaggacctagacgtcatacttggaatggattggttgacaaggcacagaggagtgattgattgcgccagccgcaccatcaagttgaccaatgcaaaaggagaggtggtaactttccagtctccagtgccgcggaagccacggattagtttaaaccaggctgctggtgaagaacaagaggtagcagtggagaaaaccactaagaagttggaggatattcccatagtcagagagtatccagaggttttttcggatgatctgacaacaatgccaccaaaaagggata

SEQ ID NO: 60608 - DNA, 413 bp, Oryza sativa
tgtgtgtttgcactgtgctgctgaattcttcattctgcggactgttatatgcattcagtgaacaatcagtgaagttgcctgctgagattaaccctgcacgttttactgaactatatttttaactatgcatttgagttaaagcagtgataacgtattaacatgattataacaaatgaaccatccttcaaattctgaccttgtaacaatatgagaattcaagagttggttactcgttttaagcctactactaatatgcacatattaactagatttaacacaaaagcactatataatttagagactgaaatacccaaaagtttagcaacatatagatgtgaaataggcaaacaaaatttccatcatactgcagctgtgtgtcctttgggtgaatgacttatgaattatgatcactt

SEQ ID NO: 60609 - DNA, 406 bp, Oryza sativa
  unsure (1)..(406): unsure at all n locations
ttaggaattagtgattgttagtggatgatgatgtatcatctttacatgttaagctttagtaattagtgggttataactttgtagtaagagaggattatgttttaaagaaaaggtaggatgaacttactcactactattgatgaatagtagaaggcatttgtgagttacagaattatatagatttctatcatatttgtgaggctcactttttttcattggctcctcgttttaaccttaggattggaggaaaaggaaaaatatgaccacaaactggatcaactagatttgtacaacgaatgcgcacaccaacataaacaagagaacacattntatagtgtttgaattttgatatttaattttatatttgggtttaggaatattttgatgtaggataattttaacgctg

SEQ ID NO: 60610 - DNA, 418 bp, Oryza sativa
tgtcccaccacattcttcctcgagctataaaatcaatattgtgtaacaaaaagtccttcaaaaaatattgtgtaaaataattttaggttgaataattgtgtaaaagcacctttaaaatatgaatcatttgctatgattttatttttaattttctgaaataaaaatgcgcaaagaagatgagtacgctcggagttctacttggttatagtgagccttgaaaaaaaaaactaagacagtttatttcacacgtttgggtcttctatttttctgtcatatatggctaggtgggaaagcaacttctctaatgtgaaataagagaaacgtgagtcccatcggtatagatggccaaaaggcccgaggcccgatggcccggcccacggcacaacattttggcccggtccaagcacggtacggtccg

SEQ ID NO: 60611 - DNA, 423 bp, Oryza sativa
tctagaatgtaccttggctggccttaacattgaattcatcatagttgtctttccatgatcgacatgagcaacaattgctatattcctcacatctcttctagttgcttgaccactcttcccagctgaataattcagtgaaaagatggtacatagattagcatcatataacagaaaagacaggaagctgatatgtatagatagataaatgcatgaaaaataccagtcgttctgatggcactaggtcaagccagtgcacatataatgtggaaggaagatatagtgtatttgtgaaactaaaatgtaggcaaggtagctttcacacaataaacacattcaacaaacttcaacgattaaatatgcaagagtagccagcaaatcacaaaatacattccatgaagtgtttgagaccttgaaccctccatc

SEQ ID NO: 60612 - DNA, 417 bp, Oryza sativa
ctgcaccatcaccgatgaacatctggaccaatttttatatacattaatatgtatctagcagcaagcagaagaaccaataaaggaagaaaatagaccaacactggaccaaagcaatattcttctagattgcagtattataggctacagaggtaactggaaaaccaaagttccaacattccatctgatccttgtgccaagagataaggtgatatgagagtactagtcctaggctcatagcacatgaagtatgaaaagttctcaataattgaaacagaaggcttaaggaccctagcatcatttgagctttcatatatttgaattagcaggagcagggatatcacatagctttcaacagccttatcacagaaagtaagctacctggacaagctgtggaccagcaagtttcagaaatgtggc

SEQ ID NO: 60613 - DNA, 416 bp, Oryza sativa
ctttttttttcttgaacacgcaagagagctgcgcatcattatattgaggagggaaagattcaaaaggactcaaaaaaaccccaataggacagggtttagaaaaggacgtcagcaagctgacctgagcaatgagtcggtggttcgagctgagtagctgacctcagttgaactttgaataacttcatcaatgcaattatataatatttttttatgcaatataatatattgtaggcttgaataggtaataggtttgatcttggctcaataaggcaatactgtgctgtgtgagtatagaataggctcagataagcttgcacgtaacccgataaggctcactttacaaacacatatgtatttgagcctaatcaagccaagctggggcttggttcactaagagtacaagccatcaagtatat

SEQ ID NO: 60614 - DNA, 419 bp, Oryza sativa
  unsure (1)..(419): unsure at all n locations
ggtagtgtgcggatctatgaatagattntgatatttgcacttcgtttgttatttagttcgggaattgtgaaatcagtacctgtagcttatgtcgatttatatctgatgcaaatgtgagatttattacccaatttataatcgagtgttcatttccctaatagatactgtattattcatatccatgcgattgagtcatgttaattgttagtagtaacaactgtattattaagaaataaaaccaaataactcaaaaaaaatgtagggctaaaactactaaacttttgatgttactatgttctctaaaccgcaattttagtgcctactctgaattgctcataagagctggtctttcaaacaagcagggacaatcaatccatcatagttatnttggcanatattgttttgttaggaatcttttg

SEQ ID NO: 60615 - DNA, 421 bp, Oryza sativa
  unsure (1)..(421): unsure at all n locations
tgttacttgtttgtaagaggcaacaatgcatatatatatgttntgttaaggtaatcttattgttttaccttctctatattttagttttttaaaaatattttttatatactcaccgtatcgtcatgttgatgtttttcaaaattcccgtatcaccgtaccaatatcacgtatccatgcatcatgactggtaacacatgcaattaactacatcaagcactccgctctgagagctgtcctctcctttgagaacccccaaatagcatgaatcccaggataactctaacgataaaaaaattgactgaaacaaaataaaatttaccgccatatctgatcacaaaacgattacaaataacaacaatgacacaactcaaaagatcggacacatattcaaatggttccctctaataccattttattatat

SEQ ID NO: 60616 - DNA, 421 bp, Oryza sativa
  unsure (1)..(421): unsure at all n locations
tgatcacttccgctctagattntgttgtcacagtgacggtcacaaaaagaagtatcggcatgcaaagtgggacatcatgtgtcaacctaaagatcaagagggattaggaattcatgatttggaagtaaaaattgttgccttacttaacaaatggttgcataagttgcttacaacggttggtatgtggtaacaaatgatacgcaacaaatatttgggatcacaacctctatcacaagttcaatggaaagctaaggattcgtatttttgggttagtcttatgaaggctaagcatgattttctctgttatgggtccttcaaaattaaggatatggctcccaaattttattttaggaagacanaatgttgggtaatgcaactttacagtaccagcatccctgcctatacaacattgttaggtaca

SEQ ID NO: 60617 - DNA, 401 bp, Oryza sativa
tggttatttgaagacaatgatgagttcactactattctgcagttttgaaaaaaattcaaaccacagtgtgtttgtattgtaatataattcctaagtggatggttcgaacttctcacacaagagtgttctgaatagatcccgtcatatctataaaaaaaatcatgattcaaagcataatcgccgaatcatctctagttatattcctatactaatataaaaaggaggagttcatctgtagcaatcctacaggccaaatcacagattaattctctactatccatccgcatccgcacataccgactaccgcagcatcaaaacagcggcataaaccacgccaccccctccgcctgcgtcctcctaatgatgaccccttgatcccgctttcatccttgcgaccccac

SEQ ID NO: 60618 - DNA, 416 bp, Oryza sativa
  unsure (1)..(416): unsure at all n locations
ntatgcagtcattntgcccttgtttatggaagaatcaaaacttactagaggcaccaatattattctacttccctctctgtagtcaacagcaaaatacaatatgatctatagtatgatattacaataggaaatctcaagagtatagcaaatgttttctttaaaacaatcttgatcacatttgatttcattttaattttaatggcactggttcatgtacttagacagccccaaaactagtgagccaaaccaaagtataaactgtattttggtgaagggtacactaacgtgggacagcccaactggatattacataggtacacaatgttgttgtgttcgtgtatagtgtctatgtacttccatccctcttttcatgctccttccattgctgtggttgncaccataattttgtactttga

SEQ ID NO: 60619 - DNA, 418 bp, Oryza sativa
tgcctccatctcctcccacttcggcattgttaacagtgaaattttggaatcggcaaagacgtcgtcggcttagaatcattatcggctgcagtatctcggaatcagccgatgggagttatcaagtcgccaatagtcggattcctgctatattcagttaaggaaatcaatctattaaaggaagcttatccctaagtgaccgagtttaaagaggatgcggcatggcattttatctattaattaggaatagtttgttagtttccttttatttttaggaaagtgtgtttagtgtccgataaggactttatatttttccttttatctttaggttagtttctttcttgtccaacaaggacttgtatcaacccatgggtataaatatgtacacccggcgtctatgtaatctatcctcacgatcaat

SEQ ID NO: 60620 - DNA, 419 bp, Oryza sativa
tgtatgttgtgaataaataaatttccaaagtattgggcatacaccatgcgcacactgctttaacagatgtgcttgagcccctaaaagacacatggtttcaccacacctggaaatatatagcatatgtggtataaaatccgagtaaatgaactcataaggatttatcaatcgtctggaaaatgaccaaaatatataatcagcctaagccataatattggtcaataaaaatgcacacttacgtggcaaaaagcaatgatattgtatccaatcaattgctttatgaacccaaacagcgccttgacttatataaaaagtcagcggggagctatataaagcattactgtttggcaccttttaaaatgtattgtaccaactcctaaaaagttgagtaactgcggtataaaaggattttaaggtat

SEQ ID NO: 60621 - DNA, 421 bp, Oryza sativa
  unsure (1)..(421): unsure at all n locations
ntttatcattctggcatcgagctattatgccgcatgaccttctctacagtatcgtcaccgcagtagagtttaaccaccaaattcgggatggattggtgtggttcctctacgcctaggacaccagaatatcgaaccatgaacgaggaaaggcatgagagaaatattggctagtaattgtgaagccccaattcttgactggaagggacaccaaaggcctctgccctccctctctatctatccaagagatggaagggcagagcttttttttggttttttcatcttttcatcaaagagttgaacaatgaagatagatggcaagtgcctgatcgatttgatcaggtcgtgtatgaacaaggttcaaatcgttcgttcgttaggatgcctcagctgcatacatcactgcacttccacttgacaccta

SEQ ID NO: 60622 - DNA, 423 bp, Oryza sativa
  unsure (1)..(423): unsure at all n locations
taccgganagcagctgtgccagatggttgttgagcgctcttacattttcggaaatcgacatttcattgtcgttgagaatcaccagcatatcaggacggatatcgcccgcgtgattcatcgcttcaaacgccatgcctgcggtaatcgcgccatcgccaatgacacagacggtgcggcgatttttgccttctttttcggcagcaaccgcaataccaattccggcactgatggaggttgatgaatgcccgacgcttaatacgtcatattcgctttcgccgcgccacgggaacgggtgcagaccgcctttctgacggatggtgccgattttgtcgcggcgtccggtcaaaattttatgcggataagcctgatgccccacatcccaaatcaattggtcaaacggtgtgttgtagacatagtgcagcg

SEQ ID NO: 60623 - DNA, 408 bp, Oryza sativa
agcttaactaacacatacctttgctccatcttttccaatctctatgtccaaatcaccaatgaccagaagggactccaaggtctgtaactctgctttagcctttgccttctcagcaagaatttccatcttctctgcagtgaaaggaaacccttcccatgcatcttgaccatgctcatcaattatgtcagcaacattgttgttcagtgtcttcccatcaggaccaatcaagacaagtgtaggcaggcctctaagctcaaaataacgagccagcttctcacccatcttgtcttcctgagggatggcaagccaaggcatgcctgcaaaactctcattggataattcctcatcactgtccaagatacagctacaacttcaaattttctccctacttctttgaggttctcataa

SEQ ID NO: 60624 - DNA, 412 bp, Oryza sativa
  unsure (1)..(412): unsure at all n locations
ntagatgtatagaaatagtatatataaaatatatttgttttctaattcaaatttgaatcggatatataaatatttgacttataaactttggatctctaaattttagatgtgtaaacttaaggtgtacaaactttaggtgcataaatttactaaaatagaaaagtgatacggtgctaaaaaaaaagaaaatcatctggggagagggactgatcgctcctagcgaccgatcgctccttatgactatcggtcgagagtcgtagtctcgtatagtcgagaggatggagcgagacggccgaggaggtcctgtgattggcccagtgccgactttacggcccaataattacatagcccaagtggactattttgggggttggagatttgttcgccgacccctccaccgtactctatacac

SEQ ID NO: 60625 - DNA, 414 bp, Oryza sativa
ttctcctgctattgttgttgtttagtgctgtcgatgtgcatgctaaaggccgattttcttatatttccgtgttgaggtcttggttgttgaagttcttcggggggattagttcactcgtagtagtagtatttagtatttgatagactcgtgaggtgaatctcataatgcgattgtattgtgctgtcggatttaaggtatggttacttcaagcgtatagtacgtagttggggagtcgaaagatatgcagttatctgctgtacaattgttcgatttgtggcaggccgtgaattgatgggagcagtagtggattttttgcatcatatactatatccactatgcaaaccatgagtccaggattgaacaggatcgtccttgctgttgattagcttcgtgcttctctagttctcttaatta

SEQ ID NO: 60626 - DNA, 425 bp, Oryza sativa
tcggattatatgatagaaaaaacagtatgcaatttgtattccttattgattcatcactgtattatcctttggtttccacaaatatgtcatagcaattctgaaggaaaaaaaatcattttctacctataccatgcaagaaacacgcaaaaaaaaattaagtacattaaacatcatgctgaatgctcctaaaccgctacatggaactttaataaataagaaaaaaaatcatatagaaattataagaaaaatacttagctatccattctaatttaaatcggtagacccattatttctaaccattaaatcaatccttcaaaacacaaatcccttccacctcccactccctcccgtacataatcactcctccctctccagaattcatatgtacatagcacatatcttatgtacaacagaattttaaataa

SEQ ID NO: 60627 - DNA, 424 bp, Oryza sativa
taacatgcaagtatagtatttattagcactcttaatatctatatgtaagcatgccacatcaacccattaaacacacaaaactcaacatgcaagtatatagtaattaagcctacaatttatttcattttaaactaaacatacacatgctaaatcatcattcttaaatcatttccatgatatttcaatccaaattatttcattatttctccaatatctaatatatatcccgcagcaaagcgcggggcatcatctagtaatggcataaattttgcaaacatattatccaacattatcacaattttccctacaatttcaatctatctataggatatggtttttttcctcctcatttattgcacctcatcaacaacactctatgtgatttttcataggagatcacatacctcatgtcataactttagca

SEQ ID NO: 60628 - DNA, 403 bp, Oryza sativa
tatttatttctcttcatttctatcacaatattatggactttacccacgatgagaatggatcagttattaaatcttggatggaaatttcttttacctatttccctgggcaatctcttattaacaacttcttcccaacttgtttcactataaaataagataatacaataacagttagaatattttcaacacaaaagtcctctcaaacaagagaaagaaacatacctttttcatagatatttcgaatatgttccctatggtaactgggttcatgagttatggtcaacaaacaatacgcgcagcaaggtacattggtcaaagtttcataattaccttatcccacacaaatcgtttacctataacgattcactacccctatgaaaaatcaattacatcggagcgtttc

SEQ ID NO: 60629 - DNA, 410 bp, Oryza sativa
tacaacgttagcgcctcccttcggaggtaggcccgttcggaaatcgcgagacgtttatttcagcttagttatcgaattatgaactattattgttaccacggttctcaaactacaatttctctgtcaaaattttctgcaacagcgttgcttatataacctgttctaaactacccctattattctaaactagaaatgtagctcacacattctcacggacaccttattgaaattgtcataattttttgctattggcattttgaccattatgatattgtattattttgaatatttttttgataattttaatatttgtattaaaattattttgaataatttggataatatttgaatattatatatttttaataatattgtaaacgtgcgcacagtcatctttatgaacgcacaac

SEQ ID NO: 60630 - DNA, 403 bp, Oryza sativa
tctggcttcttagttcatttttcagattctataactacaaattctcagaagccgtggactgtttgggggagcttctatcagaagcagcttttgggaaaagctgtacctgggacaagctcccctaatgagggccacagtcggacacggcaggggacgaagaggattcgatttggactcaaaatcggatgattaatctcccgaaaatacagcaaagggactccatgggattgcaacacgtaatcgagcaaatcacaaggcaagggcgaaatcaatttcgtgggcagcgtggtttgttggcgacgaactctggcggtggtgtacggcttcggtgagcagcagtacaggtcgtggaggagctcgacgcgggccggctctagaaggaggcggcggacaccagcgtcag

SEQ ID NO: 60631 - DNA, 407 bp, Oryza sativa
tcccaagttcttttcttgctgtaattctgcgtgagtatgtttttacatagcggtcatcaagattcagagcttcagtgcaatcattctctgcctcttcaaacctagtgaatatcacataaaaaaatataagactacaccaagagcaaatgtaaaagcacatcgaaattgtatatcatcagaaatatgaaacgcatcacaagtagcataaaagcatatctacagtctgaaattgttggtagctagtacttattaaataatggttccagaatagagatccaactaaggtttttaagtatctgtaatcatattaatgaacaccatagtctatcgaatgcaaacacagcgttgcagctacttgccttcttagtttaagagatgccatagctctatttgaaaagcaactgctg

SEQ ID NO: 60632 - DNA, 423 bp, Oryza sativa
  unsure (1)..(423): unsure at all n locations
agcttgaatnttntgtcattnttcttaaaaaacatagtattattgtaacatttcttacaggattattaaaatatattcaatgttagatttacttaagctgatttaatattttatagatgttgttaagtttttctataaattttgtcaaagttagtttgatcgattttttttaaaaaaatagtaaatagtaacatttctaataatactattaaaatatagatgttggtaagggtttctataaattttgtcaatgttattttgatcattttttttaaaaaaacatagtaaatagtaacatttctaacaatattatattagaatatattcaatgctagattttcttaaactaatttagtattatagatgttgctaagtttttctataaattttgttaaagttgaaaaacttgaagcttcttggtgt

SEQ ID NO: 60633 - DNA, 413 bp, Oryza sativa
  unsure (1)..(413): unsure at all n locations
tttgttcctaganaaattctcatctttttgaaaagttctttataaaattacgcgttttatagcagaatttgccatcaaattattggcaatcactaattacactcctacttttgttcttctcattcttccgggacaaacataaaattaaattccattcttctaggacaaacacaaaattaaattccattaaccttttgaaagattttttatgggtgttagagtaactcatgtaaaaatatattacttcatcagttccaaattaccggtcattctcacattataattgccctatctccacctttcatcaatgccacatatatctggcaatcaaagttaacattacttttcaaaactattagaatgtagtaaatgagcataacaatgtaatttgccgcatcttcttatttgatatg

SEQ ID NO: 60634 - DNA, 433 bp, Oryza sativa
  unsure (1)..(433): unsure at all n locations
cgcgacacaatacataagctggacgcttgactngacttccgtacagacacgangttgtctgtttatcctccacggataaacgactataagaattggagggacagggaggagaattttgcaaaactgcttcgcaaagaaaagccgaagggcgatgggagacattnttcacatttggttttcagaaagcttgtccttagggtttgaccatttggctcaacctacagtcgacatggctctgataccactctgtcacgcccagaaatttagcccagaatttccagactattttgtgtattaaatccctgtccaagaccaaccagggtacacaaaacgacatgtaataaacagttccaaacgttaataaggcgtagaatacttacacgagaggcacttattcctcacaccgaaacaaaagcctcagctgcggaaaaag

SEQ ID NO: 60635 - DNA, 416 bp, Oryza sativa
tcgagactgtctaggccacacactagacaacatctatatgagtgtagatcataaaactatcgtttaaactatggtaggcaatgagctaatgcattttttatgtgaccggagttgaaattttctatcccacccaaagctcatatggcttaaggttttgaccccattccaaacccctccccctgctctaagtcactcgctaccctataatcatgtcgcctctcctctactagtcaccatcttggatcttgctgagttgcttcgatgacctctcttcgacccatggctctacataagtgactacaccgtacctatcaccttgttattaaattttcttaggaagtatacttatatgtgccaaaaaaatacgtataatatggagtattgtacagtatataatatattgtacgagtttacaa

SEQ ID NO: 60636 - DNA, 424 bp, Oryza sativa
  unsure (1)..(424): unsure at all n locations
tcaatatcaatattattgcatctcacacatgttttattgcttgggacaattttggaacaagacggctcactagggagagagacactattctttaaggtttcgaacttttcttcaagagagaggtatgctntgtccaagccatccactctctcttgaagttgagcgttcgccacctcaagattagcatgagactctttggtttgcttgtagagccgtaccaaagcctcatttttctctctctccttagcaagctcactcttgagttcatgagatcgctttttctcacgaatgagcaaagcctcttgcctctcaagagttgcatattggtcctcaagtctcccaagcaactcactcaagtgtggtatagattccttggatatggatttgaacaactcgtcatccataacctcatcctcaacatctg

SEQ ID NO: 60637 - DNA, 428 bp, Oryza sativa
tgacttagcacaggggaataaagatgggctctcacaggtttaagattgctttcaggcagttcctaaaacaaaaactgctggaccacactgccttggacaaagtccgcttatgtcaatgatccagacaaagttagattatagcacgggatgcaaatacctggttcttccaaataaaagctagtgcaacgaaaagaaaaaaaacttcattcagcatcttctgaccgacaatggcttggttcataaacaagaggacaaagaaaaggaaccactcaacttctaccgacagcatttatgtgaacatagggagcacacctctacgattaacttcggcttcttacaggaactagtacaggacctttcagaactcgatgaacctttcacaaaggatgaaaacaaaatagcagtcttccaatctaggtcagacaatg

SEQ ID NO: 60638 - DNA, 419 bp, Oryza sativa
  unsure (1)..(419): unsure at all n locations
tagatcaggttggttatggtgaagttgttgctgctttttatacaaaagctccagagcaactgcctcatgagtttcaggaggagtgtggaggtgtatacaaaattggtggtgattctacgggaagtgagaatgatgcgaatatctatgatgtgcatgtggttgatgatatatgcttcccaactgaaggtatgagattgtggataaataaatctcaattggttgattcttatatcaagtatatggcttgtggaatcgtaaacctgttaaattcatttttgggatgtcttcactcttcatagatggcatgcagtatttacgaattactattggtacatgataggtttatttaaacctttctttgcttagtttggataaacgttccctgttatctgatgagaaattcngtactttatttacca

SEQ ID NO: 60639 - DNA, 399 bp, Oryza sativa
acctatgaatctcaagctaaggtctgctctaactggattgtatttttatttttacattcagtctataaatcttactcatttatcttgtttttctgaatttcttcttgtagcaattggatcacaattctgattcatattctgaggatgagatggttgagggtttattgaccatctccgatgcaaaggaaaattataaaattccgtcgcaagctgatcttatacgccaggcttttgctggtgatgatgttgaggctgaatttgagaaggacaaactgtatgttttaaatgaagagaatcctgaacctgaaaaacctgctcttgttcctggttggggacagaggactgacattcaacataaaaaaggacttccttcttggatggtgaaagaacatgaatatg

SEQ ID NO: 60640 - DNA, 417 bp, Oryza sativa
tggaagtgagtcaataccgtaattattattctatattgtggtataaagatatttcataataaacatctacgttatactcccttcgttcttaaatatttgatgccgttgatttttttaaacatgtttgaaaaatttaagtaatcgctaattttttttcctatcatttgattcactgtaaaaaaatacttttacttttatgtatacatatagttttacatattttacaaaagtttttaataagatgaacggtcaaacatgttttaaaaagtcaacggcgtcaaataattagggacgaagggagtattaataaatggggataaccttccttcacatctctctctccccatggcggcaacaacctcccaaaggctgactcccttctaatgccactattgggatggttattatttttggggg

SEQ ID NO: 60641 - DNA, 415 bp, Oryza sativa
  unsure (1)..(415): unsure at all n locations
ttgaattnttttgtcattatttttaaaaaacatagttttttgtaacatttcttacaggattattaaaatatattcaatgttagatttacttaagctgatttaatattatatagatgttgttaagtttttctataaattctgtcaaagttagtttgatcgattttttttaaaaaaatagtaaatagtaacatttctaataatactattaaaatatagatgttggtaagggtttctataaattttgtcaatgttattttgatcattatttttaaaaaaacatagtaaatagtaacatttctaacaatattatattagaatatattcaatgctagattttcttaaactaatttagtattatagatgttgctaagattttctataaattttgttaaagttgaaaaacttgaagcttctt

SEQ ID NO: 60642 - DNA, 424 bp, Oryza sativa
tggtttagaattgaggagtcatggaagtggtaaactattcagttccgacgcatatgtaaatctacagtacaagagaggggattcttcttcctctcctgtcccctgatggcatgatgtaatgtcctcaactgcttaatactgtttgcatttgctgatgttgagtacaaagtttgtaatacggaggagataaattggagaacaactgtttttgagattggatatgcaggattagtcatgatcaaagtagttcaccttggaagtattatttacttctgtgggggtttgtctgtgcgatatatattaaaatcaagaatcacatgagctgtgatggttgagcagcataattacactaagaaggttgcacaagctacaacgtgcatttttataccataaccttgtggaaatatcactttgtggtttgtgc

SEQ ID NO: 60643 - DNA, 417 bp, Oryza sativa
tctttctggtgtcaaagatgtcaaatggtgctcccttggttacaaacaggatggccttgaactcaagctgacccttcacagagaagtgcttgacagccagatgttcctcccagtcgtttgtcaagctcttttagaaggctgcttccttggtgatcacctctgatttcctcatccaaatggcttcctgcttgttgatcaagttgcactcatgacagacttccttgaacttcttcccttgttttttcttctcttccttctcctcatcaacatcctcaacctttccctctttagcttcctcgttctcactagtaatctcctttgaatctgagagaaggttctgcttgttcgaggaatgccactcatgagagacttcattgatcttctcccctttcttttccttctcctcatcaacatcct

SEQ ID NO: 60644 - DNA, 415 bp, Oryza sativa
tgttgagcctaaaacccacagaagctattataaactttcagtcctcgcaaactaagtagaaaaatcgaacaaggcaatgataaaccaagtaagcaaattgaattgataaaaaatcacactacgttattatgatgatagcccccgactgacaacttcaaggagaaaacttgatgttgacagtcaagatagggaagtacaatgataagcctaagcgtagaaacgacgaagatgttcaatgttccaagagttgtcgacgagagtaccgtcttcgcgcttgagtcgataggaacctggccgggtgacttcagagatgataaatggcccctcccatagaggagataacttgtgccgatcccgtgtagtttgaattatcctcaaaaccaggtcgccgactaaaacggcacgggatcgaaca

SEQ ID NO: 60645 - DNA, 407 bp, Oryza sativa
  unsure (1)..(407): unsure at all n locations
ttccctgcataaacctgctcatacacactcttcttggaagcggtgtgaaaacggngatccggggtgttccgaggcctcaaaaactgatcatggtgcctcaagatggtatactgcgatggattcctcatgttcacaacaaattggatggagggatcaatgtgcatatcatcacttccttcatcctcatcctctccacttccacagtcatcatctccactagcctcctcactagccctttcaacattggccttaacctcttcatcactttgagcgtactcatctccgctcgattcctcaggctcactcacgggatccggagtgggtgcacgaagaccatggcgagtgcggngaggcatcactgtcaaagagcaaaggatgatagatattagcaataattctagaaacaa

SEQ ID NO: 60646 - DNA, 320 bp, Oryza sativa
tgacgatcgtatctttgagcctagcatcgttagggcaattgacccccgtttgccttcgctgtatgctgagtcagacgggcttgttggtattgagacgcctagagctgtgcttgtcaagttgataatggagggagacgatgcatcgtttcagcagctgaaggtgatatccatcgtgggtcctggtggtctgggtaaaactacacttgcgaatgaagtgtaccgtatactggaaggccagctccagtgtcgagcttttgtttctctgtcccagcagcctgacgtaaaaaggattctgagaaacatattctgtccagtagtca

SEQ ID NO: 60647 - DNA, 298 bp, Oryza sativa
aaaaattatcctgctggtatacggaaaaccctctttttttttttctataacgggatccgggtgtgcgttgcctctaaattgcgcatgtgcctcacaaaggcgtctgtgatggtcctctgattaccactaatagcaggacggatcaatgtgctttaataacttccttataccttcctctcactccgctgtattatgtacactacctagtgattagcgttcaatagggccttaaccttcaatactttgacgtactcattacgtcgattctatgctcatcactgaacctgacgggtgcata

SEQ ID NO: 60648 - DNA, 401 bp, Oryza sativa
tttcgccgatcagtgcaatgggtcctttcttcggtatcgacgacctcgtcttcccacccgggcagacgtttcggttcggcagcctcgacttcgtcaccaacaacttcggcaagatttctctccttgactcggaatcggaccagtcgggagagaaccggatctcagtcccgtttggattcccaaacgcggctgaaacctacttcaagaccatctcaatcgagtcggcttcaaaccactcggccgagatcgtaccttctccaacgacaccagatcaagatgatggggcttacccaccagtcctgatgaagctccccgacgatttagcggccgtcttcaccacgacagcgtcttcatcccgtaggcctaggcggaaagtcgcttcaacaccgattttcgctagc

SEQ ID NO: 60649 - DNA, 372 bp, Oryza sativa
atcttcaccaccccgctcagagagatgttatatctatgctttacaaatcctagagggggtgtcgaagcactaatcccgaataattcaccaatccacaggcgtggttttcacggggaaaacaaaaggtttcttcgatttttctaaatctagtatgcactctttcgcaatctagtatgtgtacctttgttttgcttaaaaacatgccctgggtagtacaattttttttcagcagtgcatacttagctagctcttctggcatatgactaaccaaaactggaaatgatcagagaagtatgctcgatctactcatatatttttattcaggagaaaaatagagcagatctgatatgtgtgtgtgtgtgtgtgtgtctg

SEQ ID NO: 60650 - DNA, 399 bp, Oryza sativa
tctcaaactgcatgtgagatcaacaaggatttattaattaattaattgacgaccgactttcacttttgtgatcgatcagtcctttataaatttctcccacagaggatgaacgacaaaacaacaaaaatctccagcaatacatcaggcgatcgattagtactgatactactttaatcaattccaaaccgaagaaaacaacaacaacatagaacgattcgatcgatctcaactaaactttattaattctctgcatgcgaaagtgataggaaagatcgatcgatcaactgatcagcattagcactagagcaactgatcgatcatcatcgtcgtcgtcgccgtcttcgatcgtcgccatctgatacgtttacacgtgcctgcatgtgctaatgctctctcttg

SEQ ID NO: 60651 - DNA, 393 bp, Oryza sativa
agcttgtctttcgctcaaggtccttggttttgattgaacccatgaaagcgaaagtatacttgcaggtcatcgtgctgttgttgcatcatgttgttgatgttggcgaactgagcatcagcagtctggtgccattcttgtatctatgctatgtgatccgagagggtgtattggatctctcccgtatgcttatcaagggtatccattctcatggtggtttcacccaagtcccaacgagaggaacttgagcgccatttacctggagatggaggcataccactcgatctgggggttgattgcttatgtcctcccactgtgtgtcatgaggtgcacgccaccggtctttcctgatacttgcctaacttgagactcccattcagtggcgtggagcttggg

SEQ ID NO: 60652 - DNA, 414 bp, Oryza sativa
  unsure (1)..(414): unsure at all n locations
atttaaccgagctcttacaagttcttaccaaagcaagcggaatggtgacatacaccgactcaaccaagcaccccaatggaggtatcgttcaaagtcaagtaccgtgctggtcctatgctagaacgtactaaagacgcgagcctagacacaaacgataccacaagatagcacaactcaagcacaactatgatacatgaaagcggtctcaaaaataacaagtgattttctttttttttattattctttctttctttctttatttactttttcttttcttttntttggtgcggctattttttttttgcttttgtatgcacctttctgccttttctcacttttctttatattttttctgcaaaaacgactcaaggacttcaatgccagaatacatggactcaaatgtaaatactaaaa

SEQ ID NO: 60653 - DNA, 335 bp, Oryza sativa
agtagaagatgaatgagttgagagaattttgaggaataaaaaggtaaaggggagaatttatatttagggaatgtttttaaaggaatgaaaagaagggaaggatagaggaatcatagaagttagttgtaaaaatagaaagaaaattgtctgggataagagataatataaatggggaaatttataaaaaagttggggatggggaaaaaaggaagaggggtggaggaaaagaaagatatagtgagaaatttaattggaaggagtgagataataattagagaaaataaataaagtgaagaggtttagagcattattaaaataaaaaaggggtgaggtaa

SEQ ID NO: 60654 - DNA, 324 bp, Oryza sativa
ctcaagcctgagggcaacatctccaacaacctgcatacaaaggctgactattataaaacggtcacagaaatcatcgacattgtgactatctcagcgaatactaaacttctatactagcacacgaacggtccccattcagcattagatagctagcaaaagattaagaaactgttgcaacctacaaatagatttccacgtctcgcacggcccaggtgaaaataaaacggcccaagtgtactatgtatcccaccaacgcatttatctaaactaactcccccatctattctttttttcgggggggggagaactaaagcacgacctcaa

SEQ ID NO: 60655 - DNA, 371 bp, Oryza sativa
  unsure (1)..(371): unsure at all n locations
tccacaattttctaaataaagttgttgctgagatgttagctgatagctgctaagaccaagttgggggaggtcaccttcattatgctngaggctttgatgtggttcaagaccaataaatacctcatatgatattatgtttgtaaatatttgaacttggcgaaccgttgctatcactcgatggcaggttccttcccttttgtttccatgtccatagaaggttcaaaaactcatatccactgtcgtatccatttacatagctcacattactgtcatatttcattgggagttgtacaaggagccattatttagtacttgaagatggaacactagtcgagagcttggggcaatagctccttcccactcttcgttct

SEQ ID NO: 60656 - DNA, 400 bp, Oryza sativa
tactaccaaatcatcaattcattatgaactacggatacatctgtaatagacatctttctatggatcgacctcactacctcagtaactagatgctctcttttgcactgaccttgccattcatgaagcatgctagcctatcaatactctaattcaagatttatttgcccaaacttttgtttcttttcagtactccagacaacagaacaataatatatgtgttatattataatatcaatgaatgatgagagttgaatgtgtgatagtcaacatagatatatttagataccaggcaaatatctgaaacatgaaattacctgcgattcccatgaagaatatccattcttaatagaaattgctggaagctcatgatcaagaggtggattgggcagaagtaatctct

SEQ ID NO: 60657 - DNA, 406 bp, Oryza sativa
  unsure (1)..(406): unsure at all n locations
tgagctgcagctctgntcacgtgcatcttcatgactatatccattgcctatgcctcgctgaacagtactacctagctgggaaatacaactatcttggttgatctaaatgcttatgtctatattatatgactttctttttttctttaacttgtgtctgtaggtgatgcatgatgcttttggagatcgcttacatgctgggaagcatgcagagggttgtctttctcatcctgaaaggtttcagccttctgtttgaacaggatataatagaatgaaagggtttttcatggcagcttatgattgtatcttcatggactaataaacagaattcgattatctatagctggcattttaatttttgacatgcactgttgtttgctgggctaatatgtcagctttaatattcttg

SEQ ID NO: 60658 - DNA, 381 bp, Oryza sativa
tgaatgcattcttaatttctcatcaagcttccatttattgtcatcgtactggggatcccacgtgttatgaggcaattaaaaaggggtgactgatcaggcgcacatgcgctgatgccctgcgctgttggcggcgtccaatattatgggatcttcaccaccagactctcgatcaacgtctgcgctgcatgtgtcttgcgagaaacatcgcccggtcacccgatgagcgttagcggctgaaatggggatctatctgatacacaatgcagctcgatcgacattgacggggtgagcatgaatgttcgagttttcgagtaatgcgggcgttgaataattacagcgagcccccagccttctgttcaaaccaatcatacctgccttgca

SEQ ID NO: 60659 - DNA, 429 bp, Oryza sativa
accagggatctataaatctaccgctgcatgctagcttatttaacaaaatacaaatgatatctgtctttgttagcttacacatgggcagttcaacagctctaaccaaacccaagggagcaagtggtcatctcccggtcaaatccaccttatcactttcccccacgcctatcaatagtagtaacaggataaccatcatgcagtatcatgactaatttcttacagtaacatcgttagaacatcgtcaaaataaagacatgactgatctagttttgtagagctcctttttaaatcattatagtggaaatggttcacaaatataatatatgtttttagagatatgattgtttaaagattaaaatttcaaaaaatccacttgtacttagcttgctaccatgtatcttttgtgtgtgtgcaaagtgaagtactttt

SEQ ID NO: 60660 - DNA, 387 bp, Oryza sativa
tcacatcccctataatattagaaacaatcttcattcatcctcgaccaacagaaccccgctctcctaagcaaccaattgatcttgtgggccgattgatgagttcctcttattccttcatgcacttttaccatagccactttagattgatcttcatctaaacacttcaataagacttcatcaagcaatgtgtatttgaacgcctgccgccgaactttccgattaaccttacgtgtaggaacgttcatatatctaatcaaaggaattctccaatcttcctctggcgcctgggcataaatgccctcatgtacaattaattccgcctttgaatcaattacagcgtgcccacagcgctctgtccagaaccagtcaaaccgggcgtgcaagctg

SEQ ID NO: 60661 - DNA, 123 bp, Oryza sativa
aaacaaatactgaagcggtgctccagcctggggcggcgggagcaggagcagaagcaggtctccgagtgggaagaggaagaggatgcgtcctgcttgccgttcgaccagccgaggggccacttc

SEQ ID NO: 60662 - DNA, 387 bp, Oryza sativa
  unsure (1)..(387): unsure at all n locations
cgggatctctaaacgactgcagcctgcaagcttgctnattaccggcacattatatattataattgagaaccactttggggcttcacctggccaccagctatttatgatttgggatgttacattcaacgccatcgaatatgttaaaactggcacattgaaagttaatatgtaggtgtgcacatggaaccaacattgctagaaaaaatgtgagcgtaaaaactgctgctgaaacaaagagatatgcaggatttacccccagattaaatttccactctgcaagaatatgattgtttaaaggcattagcttttgcaatagcgtgcaacatctatgtcctgaaggaaaaaaaaacctccaccacctagtgtatattctcgcacattaaatat

SEQ ID NO: 60663 - DNA, 382 bp, Oryza sativa
agcttgattcaaaaattggtttgggttaatgatgcataattactctatgttattcaattgtttgtaacaaaacaaaactcacatcttatacaataacttgagttgcactaaataaaggagataagtttgcattatcttggaagacttgggaggagaaaacatagtattatgtgcagaatggataacaatgtcacgcgtgattatgatctaaagggaggtgacaggatgagtaatcaatgattaattagatggatgagtagcttcttgatccaacgactgataactatgtactaatgcgatccgatggcttatagttattgatgatgtggcttcttgcatgccttgttttatagcagtaaattcttcttgggggtaccaacta

SEQ ID NO: 60664 - DNA, 362 bp, Oryza sativa
ggatacacccagagagtcaaattctcatgcgctttctcctggaagggtaggatcttatgttaccactacatattaccaacaagactctcgacatgctcctaatgctagactcttaaaatccttttatgaccatacggctaatggaatatctgacttggttgtatgtacccaaaaagccactattcggcaggccagcttgaatgggctagcgattccttaatgccatgcttcttctatgctttatttaacataaccagttgcaccttaactattagcatattctttatctatatgcatattccgaagagatgctcttattttcaagtcccagcagcattcgatgctacagctattggatcttc

SEQ ID NO: 60665 - DNA, 408 bp, Oryza sativa
cgggatcataagcatctgagaaacaacttacacaatagaagttttgctccaggagcaacagaatggcggatgaatataaacgcgtctgtgtatggaaggaacctaaatcaaaaacatgacaggccggggtatatatacaaagaaaataatcctacattggtcacataagacctcgaaaagtaaatctcatgcatgcttacgatgcgcttgcatcctctcttgtctcagagcaataagttcttcctaaatgaagaagcgagataattccatactttgcacgtgcacccttcttcgatcaaagatatgggtgcagcattggccggattactgcccacccactaaattactacagccagcttcccaatgtgccaagtaccattttgagccccactctgtccccactggaaa

SEQ ID NO: 60666 - DNA, 399 bp, Oryza sativa
agcttgtagttgcacaaaatcaacatgttggagtcttaaggacgcatatactttgtgttgcttagagtgttagaccgatttccaaattgttgctatcaggtatttcttttgaaaagctcaattgtttattcctactctgaattctgattgttatgtaacacagttcctaactctatgttgctatgcaacaacttttgcaggacctatattaaattctggaatgtgcagtgaggtatttcagtttgacatttcgacggcttctaacaatcctggtggcattatacctgcatctcctgtcgtgaactcgtcaagtgtcaatgctaccgagaaaatcccagcacattctgctgcttatcatggcaagctgaacaacagaagaggcatgttcaatgaagcgat

SEQ ID NO: 60667 - DNA, 405 bp, Oryza sativa
tgaatgaatgaatggataataggaaatgagagggtgagattgagattgcgaaacgaatgaatggttaggattaaatgaaagaaggagaatgaattattaggatttaaatatgtcttttagtgggtgagatcgaaatcattttcctaacccattagctaaacaaggcctacgtactcactctgttttataataaactagctgggtggcccgcgcaattgcgcggttagcacccaaacaaaattatatatttttttagtatgattttacttaaaatttattaaataactatatcattgtcttaagactttgaaagatcaaaccttatcatccccatgtttctaattatatagcgttttaaaagtcacaacagttgctaccccttatgtaatctccttctttatttgc

SEQ ID NO: 60668 - DNA, 408 bp, Oryza sativa
ttatgtgggaaaacatcgaactggctgagtgtatctttctatgaattctaggatttaggtgtgttcgattcacatcccaatgcactacttaataagtaccatgactaattatttctttgaaaacacagcacagatacaagtgctcacatacacgcttaaactccccttatccacacgcaaatcctaccgctatatataagcaccttaaaagactgagtcgacatgttttgagatagatgaagtcaccacaatcatcttattattatcaatatcacttaaaaataactagccattaatacgaccacctgtattaagcttatgacttgaaattgggtgggcaaggttcaccacaagagacagacacatttatgcgctcatatggatttaatctctactattataaacatt

SEQ ID NO: 60669 - DNA, 222 bp, Oryza sativa
cacctgtcactctatgtaccttcaaatctggcacctctatcggtgtgggctgtccatacgtcagaagaggattcctaccactgtggcaaaaataaatcgatttcttattagcaaataagtcctgacgattcctggctagtctgctgcaagtattaaaaactgctgaagctgctaacagcacctcaagcgttgatagaattgtagatgagtgtaccggaatct

SEQ ID NO: 60670 - DNA, 404 bp, Oryza sativa
tctacattggaagatggcaccttaccacccatttttattatcactgaacaaaatattcgatgaatgaatctctccattcaatttatgccttcttctcctaagaaaaatccttgcacaagaaaaagaaaaggagggaaaggctatgctatgaaaaaaaatatattgctctttcaaaaatatggagcaacatgaaaaaaaagatagtgggaaaaagaaaatggcaatgccccctctacaattatgaaggataaaactggagaagaaagtgtaacagaggacaaacatttcctttcccattgttccgcatatatcatacactttccagccaaaaatgtacaatccttgattctagagtacgataaattatcttcttgagttcacaaatttggtgttgcatatatatg

SEQ ID NO: 60671 - DNA, 147 bp, Oryza sativa
aattttttaatatggttgtgattaggagataaataagattttgggggaaattatgattatgtagaaattgaatgattaaattatagaattaatttaaagttggaatgaataatttaaagtttataaatttaagaggtataaatggaa

SEQ ID NO: 60672 - DNA, 365 bp, Oryza sativa
catatagcataacttgagatgcaaagtttttttttctaacgcggccatgcacataaaatgaggtgcagtgatacatgggccaggaaaactcacatccgaggacaaccttactcctctctggcaaaaataattttcatgttatgcgacacaaaagaaaggactaaaatctcctatggtgagcacagatactacaaggcttgctccttgcaataggcggttgagacgagccctgaagcatatggatacagatcctggtatgaattactgatgggaccatctgccacaccaggcgtcaagaatatgtctgcaacaaatttaccgtgctattagcgagttaaactagagcaagttaaacatacaacagg

SEQ ID NO: 60673 - DNA, 397 bp, Oryza sativa
agctttataaaagttatttggctcttatgaaaaaaaaaacagcatccatgtaccttggctcaaagcctcaaactcaaagtgaagcacagattgctgattgctcaacccccccccccccccaaaaaaaaaaaaccggacaactgaacatgatttcgtcacacattgaggctttgtgaaataatttgcatcctacacatcagaatcagacgagcaatccatcgacacccccacaagtgttggttttgctctacctatccgctgggatgagctttgccaaaaacatggcttctgtgatctcgtgcaaaacgtggcgttcctaccgagtccaagatcatcaaggaaaaaaaaaaggaaacgaaaaaaaatcacgtctcctcaaaaaagaaagaaaaaaact

SEQ ID NO: 60674 - DNA, 316 bp, Oryza sativa
cgaaaaaaacaggatttttgttctttcgggtgcaaacaaatactgaggcatccaccatagccccatcatggcgttctggaaattatgcaagacgtgccttcattaaaggctatgagctctataaccttgtgcttacgctaccctgcaacgtaacctggcaaccaaattgccaaggtagaaggcctcccacaagttcggctcgatctgaactttggctgagactgcgaagaccaaataaaaaactgtgaccagggtaatgaatagacatttcaacaatcagccacaagcactgtgagatggtttactaatatctctc

SEQ ID NO: 60675 - DNA, 347 bp, Oryza sativa
taaagggtcctgttgtacaggtaatctttgacgtccaatatgtaaccataaggagttttgaattcattagagaacataccgttgtccttaaacacccgtattactctcctacagagattccattcatcattaatgaagtgggctcgtaggtacacagtattcaccattggcagttcgagctcggtctattgacaaacttaccagcccagacgtacgtgcaatagcatacttcaagctgctcgtttcttggttgaagagcgcatcacacctctcctacacaatatctcgcgaatgcatcttaaagtcagggcagagcattccaaccaattttattaactggttgtctt

SEQ ID NO: 60676 - DNA, 417 bp, Oryza sativa
  unsure (1)..(417): unsure at all n locations
aactaaagaaactcaagcctaggatctgtccagaactcacggtgtttcttaatattttcgaacaaagtttcctttcaatactcagcagcacgtggncctccatgacctaatgcaccacatcttcaaaagaataacatggtgggcacggaatctcgaatgttaacaggaaagaaggataccttaccatcaaatacaccaaataggctaacagcctgtccatctatttcacggaactttacatcatagaaatcctccatgggggctctcttccctctaaaacttgaatattcacatttcagtttaccatcttctctgtactctatttttcggacattacgttaatcaatggagcatgtctcataatgagttccaagagaatgattgattcttgtaaagagatggaaatttaaacattgg

SEQ ID NO: 60677 - DNA, 397 bp, Oryza sativa
tcacttactgactggattcgatggattgctcttttcgttcctcgagtctcaccatgtgttcttctcgcatattgctggtttcttcattgtcaaagaccgcgtgtttcggacagggggtgggctcacgtctcggtctgatgtagatgcattgtgggattctgctgttgcatagatggtctctgtaatggaggacaacttctttcgcatgcagacaggaaatcacctgcttctgataactgattatgctgctttactttctgccacgatgaggcggtatggttatccagttgggatgctgctcgatgtgctggctaggcaccgggacaagaaccatgacttgctacttgctgattgccgtaagcaggtggtataagcactggctgtaataaatttgatc

SEQ ID NO: 60678 - DNA, 399 bp, Oryza sativa
aacttgctcctcaacgtattgtcattcatgcatcccgaagcagttcgatagcccgcgttgcaacagctccaacttcaatgagtgcactaccacaaggtgtcaatgctcaatttcagccccagccaccagctgacaagacagaggccagtatctgcgttgtacctttggaagtttcaatacagcagctgagaaatcaagtacaagatgaagaacccgagtgtaagaaagttattgtttgttacaactgcaatgaagaaaggcattacttctaaaactgttcccaaccaaggcaaaatcgaccttcacattaccggcaatttacacgaagcagacatttcaatcttattgtggtcactggagcacacgctggacccgtgatggctcgtgttaatagtaccc

SEQ ID NO: 60679 - DNA, 289 bp, Oryza sativa
tctgagatgtttgacctgcacagtgtcatcatatctatacctcttcctgcacttcgggaggctccacgtgttagacagatagacggaaagtggaagtaatattcctgttcctctaccgttctcttatgaatttgtaactactgcaaaatattgttgggaattttttttatatttttggtgaaagatttcctttgcatgtccaagccaaagcataatgtctgctgttcttgcatcatgttgcctttttggcagatatttaaaggggggggggggcggtccactataattt

SEQ ID NO: 60680 - DNA, 300 bp, Oryza sativa
agcatgcaaacttgtttcatacaaatatattaacattataatcatgctcgacactctcctggtggaacacgctaacaatgagcataccaattcaatggagctgacctgttcaggtactacacctttcagaaggagacgagatccgcggggctcatcttgtacataaagcagcttgtcaacactgtacaaacccctacacatcgctcaccgtatcatcagcgtccatatctaaataccaatgaactctttaatcacaaacacacagaagacattatctcacgcgagcatggggggcatgct

SEQ ID NO: 60681 - DNA, 293 bp, Oryza sativa
atgcttacctataagcgcccctgacagagaaaattcctgccatatctatacgccatgctggaaagcccgacatatgccttgcacgttttaagacttggagaacttcagatgcatcactttactggactatgccacaccctgaaaagcacaaatgattaaccgccgtaaaaaaggaattgtacaatggatgtaatagctaagacaagcgtttgactgaaatatatgtaaagattcaacattaaatcgatatacacaaaactctattaaatattttcagagtccaataaaatctg

SEQ ID NO: 60682 - DNA, 331 bp, Oryza sativa
agcttaactacctgggattcctttattggccctggtcacgctatgtgcgagaggagccgaccctagtattcttccactgtcccagtacagcggaggtgggatagcattcgcgtagtattcttggaacgcaccggtggtccaaaacgaacgttgacgaaattggcgaagcgcgaccacgttaggacgccctcagcgcattgagttggtgataccattcacgtgctgcaccggtcatgtgatatgaagccagccacaccttttctgctcttcttcctccaacatctcctgatcctgaaaaaactgctcaatgattgagccagtttaacgggtc

SEQ ID NO: 60683 - DNA, 406 bp, Oryza sativa
taagtaaccttgcagcatgcaagctttgctaaatgattacttcaacctattaataacacgctacgcagacgaaccttgcctagtctgtattttgaaacacatgggtgatatagatcaatgtgctgcttatatatcccctgatggttctctgttatatttcgtactcattttcatattatagcctttcttctatagaatagaacgtactgatacatatgattgatgcctgtaccattactgaatgatttgcagcttaactcactacgatggttacataagaaacttttctgatcgtgaagctaccagtatgattcatttgtaagttaatgtgtgttctgctgtttaaaactaatatgctaatactggcagtaaaaggacatacattctcatgttactttgggttgat

SEQ ID NO: 60684 - DNA, 415 bp, Oryza sativa
tgctggtcatgtacccgcgcgcgaaccggagcttgtccgtgccgccgacgatgctccgctgcgacgggcccgtcgtgatgaagtggccctgcgtggccagcgtgctgccgctgtacgcgccgtagtcggagaagacgaagttgatggccgtgaggccgcccgtctcgtccagcgacgcgtgcaccgcgaggccgtgcgccctcccgatcagccgcgacgccgggtccggcccctcccgcagcgcgttgtccaacacgttcacgtcgccgaacgtcgacgagttcctgcagtacatgttgtacgtatgccatcacgcaggtggtacatactctaattaagagctattcagattatagccaaaataaccctttacaatgtgaaaattgtaacaagcttataatattattaaaatttt

SEQ ID NO: 60685 - DNA, 315 bp, Oryza sativa
agcttatggaatgggtatagaaatttttgtttgtataatactctaaattagaatccaaacatccgatgtgaataagtccctgtaaaccaaacagcccctaattgggctttattatgggcgtgggccaacaagccaatgtgaatagacttgctctgatagctgaacctgggcattcccttggatgtgaagtcagcctctgactttgctctggcacgttagagaatatacgccgacttcccaggaaaggtgatggccgccctctctctaaattctttttttattgggaaacatattttttcttttttttttggaaaa

SEQ ID NO: 60686 - DNA, 418 bp, Oryza sativa
tgcagcatgccagcttagagtcgagaagtgtatgctatttattcagcatgaatcatcatgagacacaaagagtgattaaacaaactaacaaagtatatgagttctaaattctaatgcttttgattagtgtgactgggacagccttagttttgcggttacgcgagccccatgtttttgacatcaccatcacatggtagtatggtaaaacacactaaactactcgtagggctactctttttttagtctctcctgataagtcccatctttttctttaacttctctaatgacaagtcatgatcagtcataattcaagacgagaggaaattcctcgattgatatggagtgtttgtcgcatcccttatatgccacccagtgaccgtgagataaatctccaaatattaagtgaaaaataatcatt

SEQ ID NO: 60687 - DNA, 409 bp, Oryza sativa
tgggaaagctgagcttggatgcaaaaaaaaaaatttgattaaaagctgagctatgttgacacatgatccaagaggagcaagaaaaactaagtacgacctaacctaagatgaaactaagatgttgactgttaacatgttgttacgaaaatatacttattcatgatctgtatagaaaaaaatcttgatatctttcataccacaataacacaatattgaattcagctcaaaagtaaagattttggggagaatattgatttcatactaacactattgctcatgaatctatatctagatgatgataaattcatggatcataaaattcatgcttagtgagtctggtgtaactgaatcttactgacctctatcagagagaactaaaatagtgtagccctcatgaatagctacacgt

SEQ ID NO: 60688 - DNA, 428 bp, Oryza sativa
cggatcttaagtcacgcggctgcagcttgtgtttttaatagatcattaaaatatctatatgattttacctataaatgtgttcttatctcttttacttattaaatatatagttagtttggataatctaataatgtatgtggataaaatattagctatatgatttagagcatataattgttcggaatttattatcacaaaatatgttttctatctaatataaaatgagggaggaggtatggcgtacgtacgtgtgctggtgcacgtgcacgacacggacggcccgtgtggatcctttttttttaactctttttattaactagcaaaatacccgtgctttgttacgggtaaaagacaaaataattttttattatgctaagtattgatcacaaatttaaatgattattacggatggtgaaaaccagtattgc

SEQ ID NO: 60689 - DNA, 374 bp, Oryza sativa
tctttgcttcctccactctaatctagagcctatcttgtgagattgagagattagattatagtgtaggagtgttttggagatggcttgaagattacgtttgattgagcactttggataccttgtgggctgtcacttgggcttattactcttggagatcttctcctacacggttaggtgtcgaccgtgagcttccaaagatcttgtggatgtcccgggaaagtttgtgaagattttcctcacctccgcaaggaaacgaggtaagtgagtaaagattcttgtgctgagttttcacaggttatcctatgtagagcaacttgcacttggggtcttttctagaaggaaatgtgagttggatcttggcggtcactcaattc

SEQ ID NO: 60690 - DNA, 380 bp, Oryza sativa
tctattttccagacgctgtatatggaaacagaaagttttcgtctcgcattttttttaggagagtttggaaacataaacaaattcggagctttttttctaagaaacgaaatgagtatggcagggctactatctggcagaaattggaatccttcataaactttccggaaacgaattcagattttttttctcagaatcagcatcaaattactttcatatacaatctgattagctttagccttttctactctaaatggttaaatttggactgaggattgagatgggtagttaaatggatattcttttctactccagtgctatagatttggtttcttgtgcaactaactattttcattactttatgcctaacgtttattctgttt

SEQ ID NO: 60691 - DNA, 349 bp, Oryza sativa
cggtgctactgcccaaattgcaagtatacgtgcaaatgcatcaaagtttatgtaatgatgccatcaaacaatccaaactttcatcacaggacatgccaaattggtacacttcctaaattccaatcactcacaaataatacaatctttcatttcacaacaaacacagacaacagaactgcttaattaatttctggcatgccatcccaaaaacccagggcaacaccgttaaaccccaggtcagcgcatatgccaattctcctcactggagaacctctaaatctgctgctcgatacagttacatgccaacccaaccaaactcatgattccaaatagaatcgaatcagattcc

SEQ ID NO: 60692 - DNA, 262 bp, Oryza sativa
tcaactataggggccaaccgtattcttgcaaactcctttacaaattcctggggtctctcggcacttcgtaatatctgtaaccgggtaacacatctcaattaagcaatttataattttgaacaaaaaactgtcttaatgtaccaaataaaatattggccacatgattctttttatcacactagaatgattaatattataaaaacattggcgacttatgtatgtttgatattcagataatttccatgaggaactctatgctttg

SEQ ID NO: 60693 - DNA, 87 bp, Oryza sativa
tatcgattactgtgtaattatttagcttttggcgcatgaagcatcaaaacggatatgacctgaatcgcagcggattactacttgtac

SEQ ID NO: 60694 - DNA, 354 bp, Oryza sativa
cctgcacgcatgcttactaatattcatagtactcagcttctattatccacatatctctatggtatactattctacagagaatacgatctaggggacccataggtaacggcatgcttagatctctaccactataatccattaatagtgctaatatctacgtaatctttggcactgttaatgaattagaatgaattagtaacgtagtattatcacatcatgcttggattgggattaatataaagccaaaattcgcgataggatttaattcaactggttcgatctattgtggtggaaccaacccaccggtgttcacatcatatatatgacaccagtgcttacatttacagataatta

SEQ ID NO: 60695 - DNA, 403 bp, Oryza sativa
  unsure (1)..(403): unsure at all n locations
cttataagatcttgcggctaactttattttaatatatatcagggcaatattngnatatttattaagttgccgccagctgttcgaattggcttcattattgatgtgggtagaaaacaatattcaagactagaaaacagtattcatgttacggacataccgtacaaccattgctacatatgaatgttcatcttttcttgttgaacacaaacttcatgtacctaaatttcattttgtatttattttccgtgttaagataaatctgtaaaacaacgccacaagtttttcagtatccttgtgtatgtctaacgataattttggaaagctctacaccatagctttccgagcactttatcatatgcgcttacctttgacatatatttgcacgtttaagaaattaagagct

SEQ ID NO: 60696 - DNA, 364 bp, Oryza sativa
gcagcatgcagctttatatatatggagccctttgaagaacacccctgtttttcgcgaattcgcggtaactctcagctttgcaagcgccatactggaaaaatccgccgagaagaggaagactaagacgccaagactgtggaatatgatattttttatgcgaagagagatcaaaaataacaagtgggacgatgagcgcgtggttcggcttcatcgtgaagtcggtaattcaaggcggatgacatggggggccgctcttggggggccataggtgaaccgcagccttgtcaagggtaatgggctgcccccccacatgtgttattgactagccactagccaagatgcccactatccaggcccattttgt

SEQ ID NO: 60697 - DNA, 369 bp, Oryza sativa
aacttgctcctcaacgaattgttattcatgcataccgaagcatgaccgatagcccgcgttgcaacagctccaactccaatgagtgcactaccacaaggtgtcaatgctcaatttcagccccagccaccagctgacaagacagaggccagtatctgcgttgtacctctggaagttccaatacagcagctgagaaatcaagtacaagatgaagaacccgagtgtaagaaagttattgtttggtacaactgcaatgaagaagggcattactccaaaaactgtccccaaccaaagcaaaatcgacctccacattaccgcccatttacacgaaacagacattccaatcgtattgtggtcactggagcaaacgct

SEQ ID NO: 60698 - DNA, 332 bp, Oryza sativa
agctattatataagctgttttgttatgtgaattttcaaagatgttaccaactttaggtaacactcatcataatttacaaagcaggcggtatattactcggatcaagttattcagggattcacaccgcatatgctacatattaatatcacgtctcttggttgactataattattaaaaccactcggatggtcggattataatttcttgactataagcttgagttgttcaattaatcaaatagtggggggctacacctattaagtgcattcagtcgatgcacctgactttatttttcagccctccacagtcatcttatatggtaaaagtacttg

SEQ ID NO: 60699 - DNA, 406 bp, Oryza sativa
ttgtatagatgatgcgaatatcccttgcagaattgctctcaacagggcgatttggaccaaatcctgcagagaacaaacaacatttcagcgttagacaccaaagcaagcatcaaaattgatcaaatcaatgacagcaaagcggggattgatgtaaacactaagaaacttttacaacgcaagtgcacgcgcacctacatgctgagacgccatttggatattttattgattagtttcattaaatccacaataaaatatatcctgacagtgcacttatgatattttatttattagcttcattaaattcacaataaaaaattggtgacagtgcatttatttgttatttaaaatgtgctggattcttctataaaatacaacaaagccggagaaatttgacttaagacaaaac

SEQ ID NO: 60700 - DNA, 212 bp, Oryza sativa
cgacgtcgccgctagacacagatgcttgctctgagatagtttcatgatgtgctcgatgcgtgcccagccggcgaacgtgcgacaactggacccgtgacaacctgattcgaaattctcggccggccgtcatgcaactgccgcggcgaccccgcgatgacggtgtcaccctggacctgtcccgggcggattgcgggccgcctctggacctggac

SEQ ID NO: 60701 - DNA, 362 bp, Oryza sativa
  unsure (1)..(362): unsure at all n locations
ctgctttggccagtgccggccctgatcttatacagacgaggcgagcgccgggggcccacgatggtggggggcccaaacacaatgctaatattaaacaatgtgatccgatgctatgatcaatgagttctattcggaattaatggcgtcacttagagaatatgccctattctttgatgaacacacctgacattttcgaagttgctatggatgcacacttccatccacgattttcaatngcctttcaaagtatggtaactccatacatgtgacgtgatcgtcaagtgacaaacacttttcataattgaggtagatgaagaactactggtgatcacctattggcccatgaaaggctaaatggcgtg

SEQ ID NO: 60702 - DNA, 404 bp, Oryza sativa
tgcagcatgcagctttatctaatagaaatattatgtattcatgcgagagatctgattgtagctaacccgcacgggcacctcctccgcgtctaacggtcggttggagtaggaacacacgaactcccacatctttcacggcgtcttgatcgctatctctttttataactttggcgtcggcatgctactcatcgtattcatgaaatgtgaggcatgccttgaatccaatcaacatgtttattatgagggcgacatggacggtcctattcttaggagacaacttccaaaaacccaaatgacccggcgcttccgctatgcattatgcctttggtgtatttcccggttctaggtgaaaacatgtccaaatttccttcgcggatgggacccaccttacttcgttgaacaaa

SEQ ID NO: 60703 - DNA, 407 bp, Oryza sativa
agcttgcatagagtcaatcatcaccttcttccatatttgtcagacacaaaaccccaaccagaagcttctattagcataccagcaaacactacacttgagagcagactctcattttcagcagaaatgttccattcctcccgcaccagtggcccaacaaatgacaatagcataatttccatggactctacgacccaacccatgcctgcatatgcaagcacaagtagttggaatttcccaaaccccatgaattcaagcgcttcatccgtagtgtatgtttccatgttgacagcgtctgctttgtaaaggcgagtctgtaagaaaaactgttagtacaaacttttggtaaagtaactaattgatcgatcggcttttcagctgcagtctgcagacagtatgcaccacacggt

SEQ ID NO: 60704 - DNA, 398 bp, Oryza sativa
ttgcggtgattctagagtcgcctaccatcctaatctagttagcactagatcaagttgggttttgataaactaaaccagctagcggatccgatctagatagaacgatggataactacccgcctagtgggcaaaatggatggttttcaggataaacctacaaagaggtgtcgcactctcgcagtggcggcgaacgatttacagtgtaaatagacaaagatggacaaactaagagaaaactataagctatatgaaaaacgattcgattgattgattgatttatttactttttacaatgaaccggccttattccttatataggggttggtcttgctctctacaggctttcctccacgtccaactcgtcggatagaaaccaaaggaaacccgatacatgcctt

SEQ ID NO: 60705 - DNA, 332 bp, Oryza sativa
agctttccaatgatatataaatcactatttgattaaatatatttataaatattaaataattaatatcaagatgaagcataatagtcaacttaaaaatatgctaataaattaaattagtattggacagtagagtggatgtaattatatttgtctctacatgtcttgccactgtaacaaccacacaaactaattttatgtgatgtctcaaatgaatggatgtatacgaaaatactagtacttatttaatattcgatggccatataaataaatccatggcttataggttattaaaataagtatagccttatgattatgtaactcaaatattaaca

SEQ ID NO: 60706 - DNA, 235 bp, Oryza sativa
tctgaatttgttagcacacaagtaaacataagagcgcatatcgctactcggcaaaaatctcccaactagtataacaatgaagtgaatcgtaacacccaacgaaccacgacctaatgtgccaacaaaacactcaccactaacttccaaatattagaaatatcggtaaagactcccctataaaactgacatccacacctacaatcacacgcaaaccaataccacattactcccaaaa

SEQ ID NO: 60707 - DNA, 391 bp, Oryza sativa
aaacactgagctgaactgactactaatcatttttctgtctaatcagcctttacgagttacgatcaatcaatcgatccaacattgaagtgtcgccagccgcgccgccgagccatatcagttccagctgcagctccacctcgccggactcgacgccggcgaagcctcagcaaccaggcccctgcgcctgtctttccctacgacgccgaccacacaacggagctcccgctccttggaccacggcggtgccgtccttttactgcaacgccggaaggggacagcggcggctgctcccgcgccgcctccaccaacggcggagctgaaaaaccgcggcccatgggtcgtcacgaacgggcacggtcgttacctcctgtaacaagcaacggagataatt

SEQ ID NO: 60708 - DNA, 393 bp, Oryza sativa
catgctagcttcatcatatgctcgaagttaatacccttaccctggaagatgaataaagttgacatttaacaatcctgactgaaacttacacattgggttcgaagtaagccctattttcctttatcaagaaaatattaagcaagtatatacaccgaaagatgaaagtaatgtcatatgaaaaataacttatatttattcaacttgctttcaaaacagcggtattatcaaaatgcacaactatatctacatttcagcagacagaatagaactagtaatgagtttaacaatgcagcacagagcataagtaggcaagtttttacaacagaaatatatatttagttaccttatgctagtttatacgaatttgaatatttcccggcattcattgtatga

SEQ ID NO: 60709 - DNA, 406 bp, Oryza sativa
tgcaatattctacccagatctcttgtacttctctgagcaccttgcttcgtcccttcgtaccctccatatcagcaaaatgaacaggtatgttgggtaaaagtatgggatcaccgaactgcactaaaagggtttaagattcagggtttatgagaatcaaattgaataagagagttgtttccaaagatcatcatcacctggttccacagggtaagctaaatgaaagagctagcagtatatccccaagataattacagtgccttgcgattcccctgtattgcgtgaaaaggggatttcattacttcacattgtaaagagtatttaagaagcatgactattataaaggaagatagggacatgcgaagctcaaataaccaaacataactattcaagctttttttacaactac

SEQ ID NO: 60710 - DNA, 243 bp, Oryza sativa
gatacccccagggaggcagtaaccacttagaaacccagatctcccacccagcgcggtgacgcgtaaacagcttgcctatactatacaaccaaaacatcgacgaacatccctgctgggttctgatccggactgatcgagggacatcactgctaatataagactgaaccttcttctaaacgtcaataaggcgaataacaaagcaccgcagtatatagacaaaaaacagatatctgggcaccctcc

SEQ ID NO: 60711 - DNA, 255 bp, Oryza sativa
tattattaactttttaatactcgcacataataaaagattcagaagtagacagttcctttttaaaaaaaataacattctacgcagccggaaaaattaaacgataacaatctacggtacagctatggcgaatccactccacatgcatcttaacccagaacaagcctaatcctccagatcatcgccttcactgagacactccttcttttgatgaatgaatattgcaagaatgagcatattacatactctacgaggcct

SEQ ID NO: 60712 - DNA, 363 bp, Oryza sativa
atcgttcttggggcagtcacatgcatctcacacctacatgcaatcaccgatatactgtgttcggtgattgacgttcacggacggtacaatctaaagatatcaattgggtgctacgtctgcaacgacaatgatatccaggaaatgctatgccgatgttatttgggcaaattacggccagctaactgaataacgacactaatattataggaccactgatgagttattgatgggtctacatatattctctacaaacgcatgaggcacttattcttactcaatcttaaataaaagacccgtaccacaccacactcacccataacgtatagagctttactacaccacaaacaacactacgtgacccaa

SEQ ID NO: 60713 - DNA, 274 bp, Oryza sativa
tcctgaacttctccaaaagtaattttcgcccttcttatcatgatgtcagctttatcatgaacattcggtctactatatattagagagaagtatgcgtgtaggtgcgaaattgctgcgtgagccctttatcatcaaaaacgcatttctagaagatcctgactccatgttgaatgagctatggggagaacatatggaaaatttggaaattaaaatattggcgtggaggaaggtggcaaacgtaattgatgatggccgggatccatcgatcacaact

SEQ ID NO: 60714 - DNA, 248 bp, Oryza sativa
catatgatacttatataattgggaaacaccgcactccgagaatggtatcactcaggttgggcactaggaacatccttgcaattacactgcttttggaggagagaaaggaacctgtgctaacctgcttgtgcgttaagacggtccatgcctttagaccccttataaactcggtgcactacgtggtctcatggtcaactggtgtccaaccaacacttcccgaacttgcgtagccagcgattcaccatgaa

SEQ ID NO: 60715 - DNA, 308 bp, Oryza sativa
acaattactgattcccaactttgctgaacaccctgcggatgcaaccgcaagggtaccgaagaatttaccgaaaccgaggcagagatttgacaatcacaaatgcttcaagaaccaccaatccggcaatctctgaatccggtcaatcttccgacaaacctggaataaaccacgaaggcggctcgccgagaagggccatctccagccagtagaggcggactccgagcttcttggagcccggtgctccaagctgaacaccacaccctgtacttcaccgtggtggaaccccaacattacccccttggggtaac

SEQ ID NO: 60716 - DNA, 403 bp, Oryza sativa
agcttcgaggatgacatgcatctgattgattgatagagagctggacttgagctcgtggctctcttgagcagattaccaatcttaatagccaacgccattgttccaactacatgcagggggaaacaaaggaaacataaatatagccctctaaaaaacacaattacagctggagcaaggtctttgttttgtcctaggagaaaaccttaccggcagaagaaaccccataaccagaggggttgattgaaatccgagctgaatggaatggtgcaaaccccaatttactaataaaagcaaggcctacctattaaaacctaatccagacttttcttttagcaataaacttcaaaataatctccattaatatctacaaaacgatggaatggtcttaaaaattgcaccactt

SEQ ID NO: 60717 - DNA, 408 bp, Oryza sativa
tcgaagctgtgtcggtagctgagattttggactaaattcttgctggcttttatctctttgagagtatgcaaagatctgagaccataaacattgcctgaaaatgatgtgccatataggtctgtacttacagacaggtggcggaggcatgcgagcaatgtaatctcacatggcaactcactcactgatgtacgcctgagatgcagcgtctgcaagtttttgagccttgccactgattttggtattttgttcacttttgtccgtgacaaatcaagatagtgtagattgaatagaccaactatggcttttgggaaatctttcagtagcgaatatcttaggcacaggacccttaatagcctgaaatttgatgaagcattgcagatccatgaaatagatacgtgcttatcaaat

SEQ ID NO: 60718 - DNA, 375 bp, Oryza sativa
agcttagggagaagagtatttgacatttatattcaggccgaaactctgcgcacactatataatgacattctactgaatcataccaatattcaactaaaagtattactgatactcacagagggtgctctaaaacaaaaggattccgatataacgaaaacagcaggtggaaaatctttcaccgtaattaatacgagattcatggtaactgtgtctaaaaatctacttgagatccatttattctgggctggcaagggcactgtcgacatacctactaaagataattacctatgggccaatgaactcagcattgagcgttactccaagtaaccaccacactataacaacactaggaagcgtcacatgcgctgccgataa

SEQ ID NO: 60719 - DNA, 402 bp, Oryza sativa
tagcatgggtgagtcctggttggcacgaagacaaatttcttagggcacgcgatatctgctaaaggagttgctgaggaccccgaaacagcgaccgccggaaccgaatggaaacaacccaagacagttactcagtccgttgttacttaggtatggcacgatactaccggagattcactcgagaacttctccaaattcactctgacccatgacacacttgctgaataaagaaaacaaacttgtgtggagcctgcattgcgagaatgccttccaaactctcaaggaaaagctggattcctcgccggggccgctctaaccggatactcacaaagactctctggcgtatgtgacgccacccgccaagatagccgtgcgagctcatgcaagacgtcacggggagcctat

SEQ ID NO: 60720 - DNA, 398 bp, Oryza sativa
agctaggatcctagtacctcctaaccctacaagagctcacttaaaccgactgctctctggttctacctgtcgctgcagcggtggagccagtggtgccgttgaacccgagcgactaacaacgtttttcggtggtcggccaattttttgtttttagacatgttgacatttatctgtagtggagaaatcaaaggcggagttcgggcagccacccaatcagcctaggagctggctccgccgctgtgttattgtgagtatctgcatatatgtgcgctaaaaagaggatgattcccgagcactgtggtgtccacgtgtatatatggatatggacaccttaagatcattgactgcccttaatgtcagctcagtctatgtgggttaatttctaaaaaaaaaaaaac

SEQ ID NO: 60721 - DNA, 402 bp, Oryza sativa
tgttggaacccgggagatacctataggacgttccattcaagcagatcacacatcctgttttacctttaatttgacctgaaactaaaaacattgctggataatcgttaatggtcacgaagatgattgccttcactgtgaagtattcccttaagtactcgtcccacactttcaatccctctttccataaatcggccatatcttccaacaatggtccaagaaatacgtctatatcaataccaggctaacggggtccctgtatgaggatacagagtagtacgtattttcgcttttgacaaagccagcgtggaagattatacatggtgagaagcactggccaagtactatgtgaactgctcatgtctccaaaaggattaactccatcagtactcagggcaaatctaa

SEQ ID NO: 60722 - DNA, 406 bp, Oryza sativa
ccttgatgacatgccctcaggcacgagcgtatttaaatgatgttgatgagttgtagttatgcgcttgtttgggttaaagctaattctgtcatttaccttatcaatattttgggaaatacccaaaccttggaaaaatttgccgctactaaaggactactatcaatttgtaactgcgtgatcaaaattagcttccatctaaacaagcactatatattagctccaatgggaagtatcgagccctaacagttgggggctaatagatttcctccagttttctaaatagggcaataacactataatcctctctaatagctttcacttgtgcgcttggaatagttggatcatatgacacaactgaactaatacgagtatagaagttaaacaggctcaagttttatttgactac

SEQ ID NO: 60723 - DNA, 338 bp, Oryza sativa
gatcaagagttgctactatgctgtatatctcaaaggtacaggtgcaagatatatgtactctatctcaaaataaataatctttggcacggtggcttacccttatccctgattcccacgagaaattgcttctccttgccttgaacaattgaaaaacagaacaacaattagagcatgaatcacccaatctttattcaacttttattccagaagttttcaaatgattttgtaaaagataagccaagttcctcaaatgattcactcaatctctctaagtgtatcaatatgaattcctcaccatttttgcctttttgatttctactctaacgtttgaaattggg

SEQ ID NO: 60724 - DNA, 410 bp, Oryza sativa
gacactataaaaaactccagcttacattggattttgacgctttacatggtaattgagctgcccttttatccccttcaaataataatcctctctttcctatcatacaaatatcaatgctattgtataataaagttaatgtaaaataactttacctgtcccaaggcgtatggcaaaggtgaatacatgtgagctgctcgttccctgtagaacacagtgcgttcaacagacacaactggctgaacggaagaagaattctgcactcccataaataaaactgacgcatacatggagcccatggcattgaacaagtcctgttgattgctcctgcaagagtggagtatcctcagtgaattgtgacagatataatctcaaggtagcctctctaaattagtggagaatgttgcatatac

SEQ ID NO: 60725 - DNA, 403 bp, Oryza sativa
tagctttctcccgcgacgaccccctctatcttcccccaaccgccctcgtagtctccgcgcgcatgcagtagagtcgccttcccctcctccggtcgatgcgacggagctgaatccgccaggatcccgaggaggaggaggagcggacggcccgcatgagcctcgctggctccgccctggaggcggccctgcaggcggtggggcgcggcctcgacgccgccggtgaccaccggctgctctactgcaagggcactgggaggctcctgatgctggacgagtcccgcgcgcgggacctgaccatcaacggcggcgtcctacgcggggtgccccccgacgtcatggtggaggagggccacggcttcctcgagcgcatccgcctggtcccgggaccctcaaccgatgagcc

SEQ ID NO: 60726 - DNA, 408 bp, Oryza sativa
tgtaggtattccaagtcggaaaaatgccctttcatataactatctcttgaacagactcttcattaatacatactccctttgtcatataatataagggattttaggttgtttatattcttaaaatctcttatgttataagacagaggaaatagaaaggagtattaattaaatcgctgcatgtgtcgttaactctcgttgaacgcttggtgttatctagtcttggatgtacaatgctaggtgctatctagtctcttcacttttttttttttgctaagagtcattgttgagcaattgttaacttaaacaacgatgtttccgtcttctctcctctcccttaagagactaaggtaactattatttcaattttcaaagggattaattagctgcctcaagtcacttaccttacct

SEQ ID NO: 60727 - DNA, 265 bp, Oryza sativa
tcattctcttatttagtgtaacacctcaagatcactttttataacctagcttaatattatgggatgcgctgatggccaccattaagctatgcgtgattaactgaaggccataatcatttgaatatcatgagataacccccttatactgacgcaggcgtcaccataccagaggagtcctcttaacggacattggacaatgcaacgatatgaatattaaaatactctgaagatcatttgaaattagcaccctgaagaagatccatta

SEQ ID NO: 60728 - DNA, 396 bp, Oryza sativa
  unsure (1)..(396): unsure at all n locations
acactcttgcatacctacatcagttgcttgtgcctgaggtggacataaaaatttgttacatgcgaccctcctgccactgatggaaacgggacagaggatgtggagaaacgccgtgcagccattcttgaggggacctatggagcatgcatgttacaggatgagctgatccggtgctcctatggctcaatataacctgtgccggactctcgagtacttactgaatacaagaggtccacacatgaggctcccgcccgtgattcaaggtatacagatgcactactgatacccggatgtgggccaccatgataattcaccggcagaagagacgagtactaattatgctcaatgaataatgtcaaaaatctcatactatcataagagcccccggnagaaata

SEQ ID NO: 60729 - DNA, 339 bp, Oryza sativa
tcacctgctagcatgcaagctagctctcgccataatctttttactttgttcctaataacaaacacaggttcacatgcgtattttagggaagccacagcgctgcaccgaccaataaccaaccatattctggctcaagacactatctttggaacaaaagaatccggcgatctgtccatggatgggaaatgtttaaactcttatcagtgtagcctaccaaccccccaaaaaacattaacctttccctgtatctgttataagaagataggtgcaagtgctttaataaatgccaccctctgctttataagtcaacacactcatcaaccttatgccaaccgggca

SEQ ID NO: 60730 - DNA, 409 bp, Oryza sativa
taaagaaggaatcaaaaggagcaaaacagctgaatgtttgtggaaaggggagaaagccactgtcccccttgtcctcctatccctacagccaccaccacactctctgtaaaaacaagtaaccactttggcaagtaacagccagaggcaccaatgcttcctctgctgaactcggtttgcatcatggcgccgcgcaagatgcacagtccaagtgtccaacacaatacaactaatactactaagaaatgcagtgtattgagttgatcagtttgggaacagttcgatcaaattcagagcagattaggattgtttatttgtttggataattctgacagtagtttccgtttgatacggcagtgaaatggggaagaatgatgagagcgatgcatgcttggcagcaatccacaagcta

SEQ ID NO: 60731 - DNA, 405 bp, Oryza sativa
aagctgcaactttggtgacatatcttgaacttaagcttagatggcacatatatgagatcaataattaactcttgacctatacattacaaaccatgcaccaacagcatatttcttcaattgctctaacctatatggatcgctagtagtccaaaagaacaagtgctgccataaaataaaggtttcaacctaagcactaaagcagggaagacgtggccttctatgcaatcagtgacgctagaaaaatgcaaaagcccgatcaataggatattatcatcactaacccacatatagtgtggcagtctgaatgatatgatgatgctaaaatctatcccgttgtttcttttcgacgacaaccttatatcgtaaaaatcatatttatttgacgccaaaccaatatcaagttca

SEQ ID NO: 60732 - DNA, 411 bp, Oryza sativa
tctaagacacctgctgcatgcagcttgatcgatgttatcgaccaaatttataatatactctcttcgctaaaaaaccaaatctcatatgtgatgaaatatattctacctagtgttataaatcagatagatgtatatcacaatgtttaggagtataatatgttacatctcatttcaagtttaagtttgttcttcaagaaacgaggagaaggagagtagttgatcattacaggataccactcaattaggtagggctttccaagaccttccgctggggtgtcgttgtcttccctgctccttacttaaaaggtgggccaacgaaacacttgtctgcgctttttgctaacggaactaattacccctacttcccttaattattagcactaggtagatttttataagaaaaatatcact

SEQ ID NO: 60733 - DNA, 403 bp, Oryza sativa
ttagaacttggaagcgatggatttgacaacatattacttaagattctgttctaaaaaaaagacgatttaaagattctgcctgaatgtagaattttcctaattttgagtggaaattattgagctgctttgcgtaaattcattacgaatcctactacgacaaggtgacctttcagtaataatcaaatgggccacgaaatataatcttgatctgggcctaaatttctattgtatcaccctcttaaagcccaatttaccaatgttgacgagcccaacaagccataaattaaccatcggaaagctccccaattaagaaattgcggaaaaaaaggcccatcccagttagcccattctgaaccgcactggtgcccactatataatccccagccacacacttctttcacac

SEQ ID NO: 60734 - DNA, 410 bp, Oryza sativa
tgcagcatgcaagcttaattagactcagctaatatattttttgatacaatcaaactgagtcacccccggcctctgcataaaatgcacacagtctaaaagcgctggagccaatatagacagtgtacttgataggcgcttgctgcgaatcaaacttgatcgggtaatttgaactagagatcaaaaacttgatatatttgtaaaaatcaaattaaaaccagtctggatttttgcactatatggggcttgcttccatggttccggagtgttaaatagtaacatacatgatgatacagtttataggaaacttatgcttgtgtggaatagttggctaattgtttcgaatttaccttttacagacaaccctactgaatcacattttaactttacagcatgggaagagaatcgctgta

SEQ ID NO: 60735 - DNA, 402 bp, Oryza sativa
tctaagggagggaataactttgttggatcattattctgttggacgggcacacttatcttcatgtggatgccagttgcgcagaaggtattaaaatttcacacttgtagcacttagaatcacctaacgccaagacactaaaaatatgtttcgggggtttgtgcagtggacaaattacctcaacccaagtaacatcaaagggttggcagctttcactatgttgcttgcaatgattggaaatggacttatgattcctcgtgctgtatttataagagatctcatgtggtatgctgattatcttaaatcttggatactccttttttaaaaactattatggcggcccgcacaaattgcgcggctagcatcattataatttctctcatataataccatatatgctctctc

SEQ ID NO: 60736 - DNA, 399 bp, Oryza sativa
agcttcccagttgagcttagccttgtttgatgatgcgcgatatctgctgaaagaatacaggacacatggccctgctgaataatatgacctccttcatccagcccatagcaatcctgtccagggtgcccaacgacgagtactgatatgaccattcaccgccaccaggttggtctacccatgtcagggtgaaactgttacctacaacagtttaaaaaattcagttagaaaagtaattcgttccttacacttgattatgatctttacaaatcaaatgttctaacattggtgacatgatcctcaggttctgcacccaacatgtaactacactgtctgctggtatacaaattctgctacaaactggttagctccaaagagatgtgtccatgcttgacaaaaata

SEQ ID NO: 60737 - DNA, 413 bp, Oryza sativa
cttgacccgaggggcattcctcgactttctgaatattctctctatcaacatgaactgaaagtgtcccgcaccaaatcattgttctctaagtgcccttcaatcgagacatattcttacgatatttaccagcacattacaccaattctaagtgtcttatagcaaatttcactaaaataataaagcatgacaatctgcacagtgacatctcatgaagagttaaaatcccttaaacactgtatcatcactagatcgactgtaccacgtacaagtccacaacaaaattatatgcatggctccatatagcccagattagtactacaccttcgccccaaaattgtggcccataattgaagcgatggcacctcacctgtctgcgtaataccgatcatgaatagcatttgatacacaccatt

SEQ ID NO: 60738 - DNA, 304 bp, Oryza sativa
  unsure (1)..(304): unsure at all n locations
agctattgtgttaattatactggcatgggcttagctaanaaaaattaacaaaaatgggttaattgggttataactgttgatgaccaatactagcaataatggctgctaaatctgtgttgacatgtgtctgcttgccttccttgaacgaatggttgcaacctatacccaatactgtacccggaagccatgagattggcttgtattaatgtggacttggttcctgaataaggtatggtttccaaggggcctggcggcagtaggtgtgtctgagccctatttaccccctgctgtgtttggcccctgt

SEQ ID NO: 60739 - DNA, 404 bp, Oryza sativa
tgatcaatcttcctgttctgcataagagccatgactgatgaagtgggtaagaaaaacaaaaattctcatatagattggccattaaatcagcacttggttgcgcaagttaataaatgatgacaggggcaccattaatattcaaaattcgagacaaatttcaaaaatcctacacaccctcttgttcagaaatcgatagtcgtctccagaatctccactcacaagtgaaaagcatcgctttccactaatgatctcgagaaccaatgcttccaagccatacacatcagacttcgttgagaaaagaccctcttcccgacattcgggagcaatagaaccactaaaatgtggaaacaaaaattaagagcttaaacaataagaacgataaaagagcccgctgggatatcaaa

SEQ ID NO: 60740 - DNA, 332 bp, Oryza sativa
catgcatctccaaatttaaatcggtcattttttctttgcctaacgactcaactgtagtggctagagtggacactcgatacttccacggtagctgtattatgaaacggaatatctttgtacgaagacagtttctgaaggacaatgtctgaaaagaatgtgcctgtattcgattcgaactacacataagacgtgctagcctacaaataaagcagaggcaagaacctgtgctataactaaatcactggatggacgccagcgcaaaaatcgctatgctaaaaccacaagcaatttcagagccattttcctgtccactggaccggaactagcgtgtg

SEQ ID NO: 60741 - DNA, 421 bp, Oryza sativa
tctgctcgccggatctctaagcgactgatgcatgcaagcttggcggtggcaagctgttatgtttaatggcgcatgcatcgaggatgatgcgaccacaacgtggagtatatggagttgacctctaagacgatgcggtcgagccgcgcgttctcttttgcgaagaaagcaataactcgggaccccttaacacatcggttttgaacccgttcgatggggcgaattataacttgggggaataggagttggccttcgggacaaggcggaatcccgggataggagcttggccagcgtgatgaggcggaatccccatccctcacgcgtgccggtgaagactatattgcatttgtagttgggacccgcgccacaccctgcacgtgcgcaagtccatgacgtgagcgcttccggtcatcgtgagccacgt

SEQ ID NO: 60742 - DNA, 396 bp, Oryza sativa
tgccactgccacctgatcgtcgggcaaatttttttctacctatgtccaccatgctgaagtccccagtagatggtggaggccgaaaaaagcgcatttgttcgaactgtcatctgaaggggcactatataactggatgccccacatatccggagaacacatcgaagaacaaagtgatcaaggtgtgcacgaaatgcaagttagctggtcactatgcatcaacgtgtggtgttggtgtatagaagcaagtctatcgttgtttttaaatacaatcttgtaaaaatattcccatatcttgcgtgctgcacttggacaactttttaattaaattcggatatgtttcctatttcataattatgtcattcatctcgtgggatatacatgtatacctgatctctc

SEQ ID NO: 60743 - DNA, 398 bp, Oryza sativa
agcttctgtgatgcatggagatgtgcctgaattttcttgcatgcacactggccgttcctttagcttgcacaagatgagctctgaagacagcaacgccgagcgtcccgacggcggatcgccgccgttgagctctgcggaggaagtagtcgacgtaggagaagggagtgacggcctgcatccttcatttgagggtgctcaagaccagcagctccatcctctggatcgtcttcgcctcgaacacgtaccgttctttcccgacctggcagacggtaacacgcgcgacccggaaacgatcagaacgtgatcatcccacagtaaaacggacgcatggtgcaacgcaaatttgcatcgttcaatgcaaaacctatgcgtttcaattcacaatttaagtctcacct

SEQ ID NO: 60744 - DNA, 405 bp, Oryza sativa
ccaaccctagcttgtatatcggggatttatggactttctaagcacagaagaatcatcatacacacaggagtagggtattacgcttcatagcggcccgaacctgtataagcctcttttgtctcatcggcttggaggggcctaaccccctcaagatcacatagcttcgctcaccgagccctcgaatctcacccgctgcccctgaccgaactcacaaagggaggcctcacgattccctggtggaggagttcattctctgacaaaaatactctagaattttgtcaaagcaacagtattacatgttaacctgtccaaaagctcagtaacaccaatcaactcccaagatattgatgtggttgttgttttaaaaaatttcacatggcaacgagaaaccctcccatgtatcta

SEQ ID NO: 60745 - DNA, 315 bp, Oryza sativa
atgcagctcacaatgatcgagtacgcagtcttataaagaagataatgcgccttgatgttattgaaacggtaaaagaagctcccagatcttagatttgccttttcacccggacaatgcagaattaacgccctctttgagtacgcctataacccaacatataagccaaaagtcgaagactaaacaaacaagcggcttttcgctcggctttctgagccatatgccactctacactattagccaaaagctaggttgaaaaaactttttggctatgggaggaaaagatgactccccattaaccttagacattaacccacc

SEQ ID NO: 60746 - DNA, 185 bp, Oryza sativa
ggatcttaaatcgactgcagcatgcacttgaacctctgtgtttttttgctacttcaaaagggctttgatcaacataataacccctgtgcttgcccaactagcagctctcttgctggcgaggttctcttgtatcttccttgggggacccggcagctttctgcctggcattgtttttctacactccc

SEQ ID NO: 60747 - DNA, 402 bp, Oryza sativa
  unsure (1)..(402): unsure at all n locations
tacaattntntatggaacttagttcatgagctgcttttacacgttgctttattgacacttgttcacaaaacaagaggcacttgctgttttatagcatcgaattttatttcttaaaaagatcaggaatagtaattgcattagtttgtcatgggcacatcatgccactgtaattaaacacttccctatttcgtgttctactgccaatgggtttggtttctttgtgtgcttgtgttggcgtgtctagcaaggcctatttgcgatgcaaatgcaaaatgtcagctatgctaactaatttattttttttcaggtatgccatcacaaaagccttttgtgttgcttttctgatgacattcttctctgtattcgacgttcctgtcttctggccaatacttctctgctatt

SEQ ID NO: 60748 - DNA, 295 bp, Oryza sativa
aatacaaaatggatttttttaaaccacattccaattatcgtgtctttaagacaaaaccttttgggtgcgccatgtatactttttcctccaaatctccatttagaaatgccggatttacatccatctgatgtaatttcaaatcataatgcgctactagtgccattataatcctgaaggaatctttacaagagactggagaaaatggctcattgtaatcaatcccttctcgctgggtgaagccttttgccacaagtcgcgctttaaacttttctatattccctctggaatcatattt

SEQ ID NO: 60749 - DNA, 390 bp, Oryza sativa
gcaacttcaccccatgatctgtgagctgggacatcattggccgaacaacacatattcgggattcacgcactgcctaaacttgatccgagaaagacaccatcagcaacggttgcatttgaatgacatacctgcaagacaaggatcacaaatgaaatcgttttggtatcaaaacaaagcgccatcaataaatgggatctcactttacggttcaaatagtttgccaagcttttcacactagcactcaaaatctagtaaagctccttcgcgagattttgcaaaagctctggaaaggacagatttagttatagtttcttgccaaaaggacagaaaaatcccataagaagagagaccatgcaaagtttttccttgtcttgaaagatgcacgagcga

SEQ ID NO: 60750 - DNA, 389 bp, Oryza sativa
tgtcagacgagtgatcaagatggagatcattatttaacatgccatgatgggcactccggggatttgacaaatcttattatcattagcactcaagatagattaactaaaggcaaaaaagcttctcagaaaaggacaaactgtgaagatggcacggcacgtttagacggtatgaatgaaccaaccagctcctgatttatgaagtcttttgttgttctccctcaataatagtctaacaatgcgctgcaaaaagtattaaatatacaccaacctttgcaaatgcacacttcaatatagaagcttgccagagtttgctcgcgtcggatattaatatattatttcacaatccgggctatatcgctgcgtaagaagacataatatttgaatccata

SEQ ID NO: 60751 - DNA, 263 bp, Oryza sativa
ctgcagctacaaccttctatggtgatgaatgaactatgaatgtcttcagctaggatacgcctcctgatgcgtaatcccacggctctagtctgtagtatgtactggataaacacatcttctttatcgacgacaatcccttgtggacgctgttggtacaaagaaaggtcatctgctgtaagaattatagccaccatttattgtaacattaagtggagcaagaggaacattggcgctgtggttgatatcattaatgttgctgttag

SEQ ID NO: 60752 - DNA, 390 bp, Oryza sativa
actagctttatctactgacaaccaggttgattcatcttttattacacagaatcggttctggtcaccatctattggctacccaaagatcgctctctcttactggccgcaaaggatatctggtgtttacatcttctcctctctcgaaggatgatccgccactacaaaatcattatgcatagtcccatcccactcaatttaagaatctagagtctaacccagtgtcaaacatgtcccgaatctcaatatccacaagcaccggctttccataagaatgtggttactcacaactgcgtggatgaccctttacccggtctaccggacttgcgcaacacatgagcctatgtcccagcgaattgagactcgccacggcatatactttcaataacccta

SEQ ID NO: 60753 - DNA, 241 bp, Oryza sativa
ctgcagcctgctagcgtctccaggactctgtgtcaaaggaacatctacaatgagaccgtgtctaatgatcgatgctgcctaatcctgtcatctcactcctcgctataatactggacggtgttcatatctggctagcctgtgtcatggaggatcacttggcctaaacattaatggtgggtgcgcgactccgcattcttaggcgatcgatgctcgacacccacgggagcggggttattttccc

SEQ ID NO: 60754 - DNA, 267 bp, Oryza sativa
gccccccaagaaacgcggctgcaccacctacatgagcgcctttatttcaaacccacgcaaggggcgaggactctccggcgcagtatccacaagtaaaatgaaacaccaccactaccccacatacatgacacttagtcttaacatcagacaaggcagcgcataggccaaccaacaacgcaccgggaatcaacaaccccccgcgcgtgaacgccactactacaacctcctaagcaaacctagagggacctaccgacgggcaccataggt

SEQ ID NO: 60755 - DNA, 124 bp, Oryza sativa
aactttcaagggtccaagttaattgggaagaaatgatggagccaaaagaagcacttgaaatttccaaatagcaggacctgcacacaattgatgggcgagctcctgcggagagggatacctatca

SEQ ID NO: 60756 - DNA, 388 bp, Oryza sativa
cttaatgaagctcatgaccaccttttttccactactcaacatgaagctttcatcgatgttggcatatcttgtgaactgctagaagacagtgctacttgccatatcgctcatgtcgcatcatctagcatttctacctcttgcgatgatcttgcggatatgtcctacactagaactaacctctgaggttctatatgcgatgtctcacttgtcgctgacaacaatgagcttaaagagcaagtggttaagctcaacaagagcttggagaggtgctacaagggctagaacactcttgacaacatattgagtgagcaatggtgcattcttaactaggacggactcggattcattccaaagaacggtaagaaaccttctcactgtgcccctcgtt

SEQ ID NO: 60757 - DNA, 397 bp, Oryza sativa
ctgctcagaacccattcttcttggttaaaagaggctgagatcacccgctgacaacttgtgcacagtttgcgggagacctatgtaagacattggccagtcttcacgcttgcacatgtagcagttccgacaaagtctcttctttcagcagatcatcatgaagagagatcataattgctatttctcaatagttgataagcaataccaagtgctttggagaaactgatgatggaagattttatggctcggacatcatcttcttctgctctataaataatcaccgtgtcatcttgctattgaatagatgcgtacgggcgatcatggtatattgcatgttctaagcttgcttttctttaagcagtcgctggagcacttttgctatccagataaaagtgtttga

SEQ ID NO: 60758 - DNA, 357 bp, Oryza sativa
acggcccgggaaaggtggtccatttatttttagacagcttgcctgagatcttgaagctataaaatgttgcccttctccccttgatataatccgttaggtatgagattgcaacaatgctgcaacttgagtgtaaacattagtatattctacagtatgcaattctggacacccgattgaatgttacttattcgcgaatgaaacatatacttctcgtctgtcaattaatggttcagacaacatcatgtgaaaaactactgcgaggtcaggatggccgagtggtctaaggcgccagactcaagttatggtcctctaacgagggcgtgggtacaaataccacttttgacattatataatatt

SEQ ID NO: 60759 - DNA, 394 bp, Oryza sativa
agcttatcttcataggtatgtttacactctataaatgcatctaaattattataaggattaattatgtttggtcttctcctaacctgaggtgatgttatttgtcttcattttcatgcccctataattattacacatgaatgtctttaggtttgcttagttaagttatcttttattcatgttcatgaacctaacatgaaatgaaaaccataatccaaattacataaaaaaaactcaagtcaaactaacgcacttatgtatatgcatgcacacatttatgtttgcactcttgtcttaagttataattgaaaagggtttaatttgttctcaatttttattcatgcaagagttcgatcaacttcatctaggtttaaaataaaaatatttggttcacaaa

SEQ ID NO: 60760 - DNA, 290 bp, Oryza sativa
ccttccgctcggactcgccgctagcgcaactccggtcaccaacgaccgagaaaagtagaggaatggaatcgcagtaacattctcttcattttgtcttttggtcgcacccccaaccaagtcaccgtttgtcgccggcgccggcgagcagaggtgccgctcatggcggctctactgctggatcgatcgagaaagaatcacgacttcactttgaaaatttaacaaattatagggtctgtaatgcaaagatacaatacacacaacactgtagcaggacctactcgtaattatat

SEQ ID NO: 60761 - DNA, 327 bp, Oryza sativa
  unsure (1)..(327): unsure at all n locations
aaatccattctttgcccgtcttgaaagctactaaagtcactctgatctgtccttgaatgtcacatattttgttgcgccagataccactcacctttgcgaacccactttttttgcactggctgtgccacattgttttcacacacaagacttcatctgcatccatagatgatacaattccaagggcacccttcacgcccggcgcccttacctttcccttcattcctaggcaatagataaaacactgcccttcagactatatcgngattgctttctcacacctcaacaaaggaataccatccaaccctgaacactggatgtgatgtcctc

SEQ ID NO: 60762 - DNA, 400 bp, Oryza sativa
tgagctgaatataggaggctctattgcactattttgtataatagaacagaatgagagtattgttgaagaagtcggaagaattccggagttgtcggtaatcttctctcattccttttattatggttattactatgatttcaatataattatcttcctgagtaatttagatgtatcttatgagaattatctcttggttagttcctaaataacatatgtgattattgttcactataattaactaaaatatagtgattgcttggtgagtgataaacactacagtagatattaatcgcttagacggggtgcttagacttgggattataacactccagtaattgctgcgtatcccacagtacgtttgagatacgtgtagaggtggtgatggccctctagatcactt

SEQ ID NO: 60763 - DNA, 463 bp, Oryza sativa
acccgggatcataaaacgactgcagcatcaagcctatatcttgttatctgattacacaccagcgaaaagtaatgcattcatccaacgtctctgtaggaaaaaaagaagtgttatggctctgttccacatggttgcttctcgtacgatcgaatggtcatgtcgttaattaccaaaggcgactctttttactttacaaagagctttcgtgtgccgcaccagatataataaaacaacatacttacctcttggcttttaaatatgcgcgctgatttatttaagataccgttcgatcatttgtcctataaaaaatatggaaatattatttattttattgtgactatatttgtaccaaaatttacaacaattcaaatgggtaaaattattaacacttaaaagaaggggagggtagactatatatcgttacgcttcatatgatttacttgatcgatcaagcgcttgaaaa

SEQ ID NO: 60764 - DNA, 381 bp, Oryza sativa
tctcaggaccaggcgagaggagagaatggctatttttccggcgccgccgaccgccagacacgctgccgtcttcctcaaccgagctgtgccacctctccccaccatacgcgccgccttgcatgccatccatttgcccccaattccacgccgccggttacccccccccccaccatctgagccagactaaggagctgcagttgctgaaactggagggggcgctgcagctagaggaggcacaacacgcagaggaggaggcgctagcgctcgccgagatggagaagaccaagttccgaggtgcccacccgccaggagggcgacaagaaggtgcgcgcccgccgggaggctgacgggaaggtgcgcgcccgcaagtatgcccatgag

SEQ ID NO: 60765 - DNA, 400 bp, Oryza sativa
ccgggatcctaagagactgagctgcagcctatccggagattactggtccatttcccctatctctcccgagcccaatagcgaaacaacgacatcactgcctacccctctcatatgccatgggtcattgaccgactaccgctgccctgaccatccttccaaataggaaaacaccacagagttcgtggaatggagtttcatggagcttgttcagagttcggcacatatcgagaaagaggtcgtcacatatctctctcaactcttgtcatcgaacgagtcgcatcccttaaccaagggtaagagatgaaggatttaccccgttttatggttgaaggatatgattcgacccatggtaagaaaaaagggaggccaagtttacttatttctttaaagggggaggaag

SEQ ID NO: 60766 - DNA, 400 bp, Oryza sativa
tgcacagaaacttgtcgcagaacctacttctttatcggagctgactgcagcagcgtcttttgctgcgttatttactgtgcctgcgggctatattgcagaaggagaggatgctggcgtcccggtattatcagaggtgccagcattcatgtcattcatggaattcaatgctctagcattggggttctccatatcagcaacaatgctgcttctgttaactaatctacccgacagctctcaaaggtatcgcaggtataacattcgctattccatcgcactcgtggaaacggggattttggccttggttagcaccgttgtttacgtggtaaggctgacaccccttccagcgggtgattggtatgagtttcttcatttgaacggagatctccatttcttcttgcga

SEQ ID NO: 60767 - DNA, 396 bp, Oryza sativa
acatacaaacttatcgccttaaacacaacttccaaacaactttgttgtttacatttcgcccaacctggcaaagaggggagaatcggatgtaacctttatctgtaaagacccggcaaatattatttacctgatttcgagaccagatgaaaaagttacgcctattttaacaaaagacacccatatataacagaaaaaaaacacaaactctaacccttatctttataggatggcaaacttgtaaaaaaaaagactaagagcgttcaaaacctaatctacttttttgggactaatggaaaaatcaatacaacccttaccacgataagaacgccttcagggagcctttccgcagagctttggaaaatctacagccacatattagctattcgagatttttgc

SEQ ID NO: 60768 - DNA, 369 bp, Oryza sativa
taccaaaaaagacaacatgttgggtcgctaatatttatggacggctggggaccacctgaccacccattatatccgccgctggataacccgcgatatttgtgaaaatgacaatataacccacaatctcgatgcaccaacaaagtgataaatgtggcgagaacggaaagtgggaaagacgctcttcgggatcatatctacattaggaagaactaatgtgtacttaacggggacagctcattctgatgggggtaacctaagatgattaggcagcaatgtgcaccccatggctatgaggccaaacgccttgccatgtgctttatatattagccatcaaccttgctgaatcatataagatctatagcttttgcc

SEQ ID NO: 60769 - DNA, 389 bp, Oryza sativa
tgagctgcaacttttctgacacccaaggctgaacatcttatgcgcacaacctctcttcgagtgttagcggtgaccaccgggagcttaacccacaccgtcgagctcgttctccaccgtccccttcacgccaaagttctaggcgggaggaggcgctccatagggtcgaaggatccgcgacttctacatccactggtgatggggaaaggcggcgagatggggagcgtctcctcctcgtctacggcgacggcagcacgccccaaggcgcgctccaagctgcgggcgcgctcctacattacccgcccattgtccctgacccggagtctccagcccaacgttggctggacgacagtgccaacttggtcatgacggcaccgcagcgcctatgtgct

SEQ ID NO: 60770 - DNA, 398 bp, Oryza sativa
aattgctcatggattcacatcttcacaccatgacacccgaactaattcatgggaacgaacaaaaatgggaacacccaatgcaaaccgagaggacgaccgacgggtgtttggcgaccaatcaacggccactcctcagcatgcatgagtgcacaaacgacgggccaaccgtgccgggtcatccttcaatgaacccggtcatccgcatcacgcgagttgcgcaaggaggctgaggtcgcggcgcgccctcccggtcctcgtccgcagcgagaacgcctgatccccctcctccgtcgaccgcctccgcgacaccatcaactggggcggcaccatcgtccccccgccgcagtcgttgccctggtcgccggcgatccaccgctgcgcggtcctgggaatgtccc

SEQ ID NO: 60771 - DNA, 406 bp, Oryza sativa
ctgcagtctgcagcttgacaaacctcctctttgcctggcttggtgctgggctctattcaatataaaggaaactataattctcctggggaaacttatttccttctaactaatactaataactgtccatgggaaaactccaaagttatgtttacatattttcactcaatgcctacctattttggaagttatcctatgaagaaatggccctgggtccacatacactgtttcagcaaaggatctcgattatattgctctagccttcataaagcaaaactgccatttttagaaccctactagttacccatatgatgattactgtaaagtaccatgtttaatatattataagaaatttgcttgcatgtatggccaacaatttgtatctgtaccctaacctgcatggttaatg

SEQ ID NO: 60772 - DNA, 402 bp, Oryza sativa
agcttgtttattgatattctatatgtgttgttaatttaaattggcgggtgtttaatgcgtattattcatgatggtctctggtacctaagtgggattggctggtgggatgttttggttgcgatcgggaccatagcgtaatgtgatgaagagatggtaatgtgtttatggttgcccgttggatgtatgaggaggattaggttgggatttaattctgattaaaaacaaatcctattccgatccccctcaatcgattaatcgaactggctcaacgcaatcaaaagttatgcaaggcatcttaggttcatgcatatgtgcaactattcactcggactccctgaacaggcatggtcgcatcatttcattttatgatgctgttaaaagaggagaaaagcttctggagct

SEQ ID NO: 60773 - DNA, 201 bp, Oryza sativa
cgacagtacaaaccaccactcacttgagaaaaagaggcctaaccacaagagggaggggaataacggtcgatccacagacactatagaagcagcgaaattgcgtgaacgtaccccccatacaaccacaccaaccaaacccaacgttggagggctcacgcacgccattgagcacaatcaaccaaccaccgctaacctgagcta

SEQ ID NO: 60774 - DNA, 405 bp, Oryza sativa
cgccaatgaatttttcctatatgaatacaatccttttaatttcctatgtcaaccctcctaatcaaattcaaaggggggcgattactaaagaattgtttcgagggttcttgaaagacctttgtgatgtttcactatttgaggtatctgacagctcgtttggctgatgatattaccgggcggcccatttttttatgacatggagcaataacttttcattactccagaagattcgaagcccatagagttttatattcacaaatagaaaaaagatattgcccctaaaaattttacattaaaaaattgtgatacacatccccttgcaacaacaggagaaggcatatattaagttcttaaaaaagggcccaaaatcaagcattatattccctgaaaagacttgttgaggag

SEQ ID NO: 60775 - DNA, 314 bp, Oryza sativa
ttgacaaacagcatttagaaacttattgcggtaacattcctagaaaagaaggctcttccgtgatgaccacctcctcctcttggttgccattgggctccctctgcgtcttggctggagcacactcacggtcgtttgggcgaagaaacatattctaaaggtcgttggaaagaatcgcactccatggaggaaccatgtcctacggcaggatgacacggtcaaagacgagaggaccttattgccgcgcctcttaagcgccgaccatgtacaccattgcataggcctcggtggcatgaaactaagacatcatttcctgg

SEQ ID NO: 60776 - DNA, 310 bp, Oryza sativa
ccacaaggagcccacattgatgctggcataccttgtgacttgtccgatgatactgctattcgccatgtggctcatgtcgcgttatctaacattcctacctcttgagatgagctcatggatatgcctagctctagcgctaactcttgcgttcctatttgagatgcctcactcgatgtacaaacaactaacttaaggagcaagtggccaagctgaacattagaacggagagatgcttcacaggtaacaaccctattgacaagaattgtatgagcaactgggcatcctgacaaggatggactattattcatcc

SEQ ID NO: 60777 - DNA, 304 bp, Oryza sativa
catgtggcacttggcgaagtctgccatccatctccctcattgatgtcgccttgcttttgctagctgccatctgttgtaaagaccgtggggaattctatctgcttctcctaactgccgcataagggaggagtggagaaataaacacagaatagccgaagatgaaaaggaagggacaactggcgggccttacatgccgacttaatcggttagactaggttaatgtgccacatgagaaaaactactctcaaaaccaagtgaaaatactccaattttaatagctggggtgttaagatatctaatatta

SEQ ID NO: 60778 - DNA, 406 bp, Oryza sativa
  unsure (1)..(406): unsure at all n locations
tcattaaataaactcagtgaactgaattaatatattaccgcnaggagagcacctatcagtcgaaacacacccacgagctagatataaaaatctatgaagaataagaaatattgagtaagactatcaatccatgaaatagattgccatctttaaaataactcccgtagacacatagcagtcaattcaacttaaggggcctcttatgcaacaacatacgaaaatcgattttcacatacagcctcttaaggatccgcccaaagtctgagttaccttctcatttctctcctcaacactctaaaatgtttcatccctatcctttctcactttctctcctcattatttcaaccttatactctactctcttatcactctcacctcctatgctctctaacttactggcaagcgg

SEQ ID NO: 60779 - DNA, 386 bp, Oryza sativa
  unsure (1)..(386): unsure at all n locations
agcttagcaggtgtgttatgtgaaatgctctattaatattaattgaagccgggctctcagaatgaaacctcggaacctatttgccatgcctgaaggggaagacggtgataataatgttgaccatgctgatgctgactcacttgtcgtacgagtggatcagatgaatgtacaataccgacctgacgatttcacaaactggagaagatctgacattaaaagcattagtggtgatgctactgtaattgaggaggcgcgcgctgtatccatgcctgaacctgatgacgatgacatacctgaccaagaagacgaatccgatgacacctacattgctgatggagtngttgctccagtcgaatcccatggaggagacgacgacgatgatcttt

SEQ ID NO: 60780 - DNA, 382 bp, Oryza sativa
agctcgagctgctgcaggccctacccacacatttgtacaagttccatcagctggacatggagatgagcgccaccggcagagagatgatcggagcgaggaacaatgacacggacctgttgcaaggagacggcactctctggatcaattccaagggaatctacgaactacaccagctggatgccctcgacgtctctattatgagtggccgggttgtgaaagaacatcggccacgcagacttcctactagggctccgccaataaactacggccctgcggaaaccacactatatataagatataccccccttcatcgctgtagaatggagattcaaacgccccgaccgcgggggggcttcgaaactagatctatcgacccccggaa

SEQ ID NO: 60781 - DNA, 259 bp, Oryza sativa
ccccgcgaggcacccgcctaatggcaggcttgaagggctctccagcaaaccaaagggctgagaagcacaaagaaccgcacattcagctccagaccgcttcagcagagtaaccagctcagaaagcaactcccctacagaaacaacagcaaaacatcagggcacagtcggaaactcgaggagaaaacaccaacccagcagccgtgacccaaccatcggaagatgtgtgacccttgaaaccaccatcacagaagaccaacag

SEQ ID NO: 60782 - DNA, 420 bp, Oryza sativa
  unsure (1)..(420): unsure at all n locations
agcttcaatatatggtttatgttcatgtcttaaccttgctttatttagtggtaacccattacatcgtccgtttacaaactttgatgccagaaccatcttgctattaaacggctagtatatattgggcctgcccgataggcctaaatgtggcggcaatacagccagccgctaccaatctctacagcatcgacaacagctgcagcagtacgacaaccgaacaggcccatttcttgccgggcactgccgtgcagaaaccacatgaagcaacaggttcacccgctctatgacatggtgtttcgccatccttcattaatcagcaatcaacgtattatccttctgagaagattgaattntagtgctgtggctggttaatctcctagattataacacccagattttccaaaaagagattaaaagaac

SEQ ID NO: 60783 - DNA, 361 bp, Oryza sativa
  unsure (1)..(361): unsure at all n locations
cagcacgcagctcgaacaccaaacacaatctatggaattaacacaaccaagacagccgccaagaaacgcaaagaaggcccacacacggaagcccgcagccggccggccgaacacacaccacaccaaggatgagccaacctgtgcacccacctaccagaccacaacaaggaaggccaccaaatcncacagaaacagacggacacaacacacacacagacaacaaacacacatgacacacggcgacacacgacagaaacacagacgcacaaagagcagcatgcacaaccagggaggacagggccgccgcctccgctgccaagcacagcaccgccgctaagcccggcacgagccaggccacaac

SEQ ID NO: 60784 - DNA, 367 bp, Oryza sativa
gggactatcaagaaagtggggcttcaagagaacgcccaggacaactgcacctacttcaaacttaagaacggcagactcacttcccgaaatccggacgtggacgacaccccaccatccaggagtgatgtcaggccactgcacgaaacaaagaaatccctgtcctgaaactctgacatgaaagacctcggtgaggcgccatatgtcccgggcatacacattcaccgagagagaacaaaggatgcatcgggactctatcaaaagacatatacagagaaggtggtgacagaaaataacacggacagatgcagtgcctcacctgctcctacagtcacagccgaaaacgaggggcagacaatgcccccaacca

SEQ ID NO: 60785 - DNA, 388 bp, Oryza sativa
gcaagcatgcaaacctgatacacaaactatgcttcattctcaaccccagcccaaggaatcagacctaaaaggactatctcacatcttgccagcggtgagccctgataatcctggtgtatagcattattagaggtgactagcaagctcgatcatttgcacatctgggacccgttagctatcgccaaaaatcatctctcccctccttttcttttggaaaaagtgacacctatttactacatcctccgcgtcatatcataagactttctaggtaaagaatcatctatataaatatgggcaatgctagaaaagcctataacctgaaacggagatagtactaaactatataacgatactacagtctgtccactatgttatcatgcacaagaca

SEQ ID NO: 60786 - DNA, 429 bp, Oryza sativa
agctttcggatggggtccacctgcacatgatgtttgtgagatagcatggtggtgcatcataatcttagatctattcttttagttataactagcaaaataccggtgcgttgcaacgaaaagcgtacatatcagaaaaatatacaattaattaaaatacaaataagtaggtatgtgtataattaaataaatttacaagtaaagcaagtgtgagaaataaaatgacatagtcaaatttaattttattaaattctccatgcttagttacgctctttggaattttattggaattttcagagcttaattgctagttctaataatagaaacatcatttaataattatttaattggaaaaagaaagaaaatccttcttttaggtttgcttagaaataaacacattcaataactataaatgtaaatgcatctgaaaaa

SEQ ID NO: 60787 - DNA, 200 bp, Oryza sativa
agctttgcattaattagctcggctacttatcatctatctcccctcgaggcccaagagcatggcatttgtcaaggctatagataccacatacctaattgagccgaccaaatctcggcaggacccacaacataccatggcttatacggaaacgaccctcggaaataggaggagttccgcataaggcaagatgaacacactcc

SEQ ID NO: 60788 - DNA, 405 bp, Oryza sativa
agcttcttaaacatgtttatactgattgttcacgtacttaaaacctataagttattattggatagagcaaatccgactgtctagttaagaggaagaaaaatattcttgatctatgcttaaaactccatcaatattgtcgtgtggctatgaaaaggtgaagacaacttccaaccaccgttttgggagtcgttaatcaagatattatacccaatcatgaaaggcgaagtggacatgataacctaattaatcgagtgggttttgttcgcttgtgcagaacaatctttgtcaaagtggttatttaacgacctgattgaaccccgatcaatttatagcttatcacaaatctttgagagccatggtataattagaggtataaagactgcaccaccaaacagtattttttaa

SEQ ID NO: 60789 - DNA, 422 bp, Oryza sativa
agcttggaagtgtgtgtgaagtgaatatttgatttctatttatagggtagttataatggttgtgagaaggggaaatgtttgaactgccctacaaccgtcattaggagagcatttggagcatccacgccaaaccccaggatcaacagtgatcagggaggttcgggctgggccctctcggcttggacttcggcctgtggactcccctgactctcctctatccgtttctcggaattttgggcttagtctttggtattttgatgaagttcacaacccatccttctatggatacttgtttctcctcactttagtctgattttcctcctaacttcagggtttatcacctgtatacaaatatacaccaacacttgtgagattaagctcctatcactatgttggatgttttattatctgaactttatgta

SEQ ID NO: 60790 - DNA, 391 bp, Oryza sativa
agcttagatgatcagaatatcttccctgtttacttaatggactactactatagtaaagtaagattcttcaagataacacatatttggataggggtcgcttgatatgactaaatcgagagtgctctccacttacattttacgaattataatgggactggtattctagcccctactttcagatgcaattgtgatattacccctattttctaaacgttgtaaatatacccctacttttttcaaacgaagttgtttagctctactttggatgaccgcttggtcaacctacgataaagggggggggggggtgaaatacattatgaaataactgagacaatttgatggaccttatacctcacattccaataacacccacctgattgttctttcattg

SEQ ID NO: 60791 - DNA, 407 bp, Oryza sativa
  unsure (1)..(407): unsure at all n locations
cttaagcaccgcggctgcagcttactccttggcctataatgtttattaatggagaagacagnggcctacctttttgagagtactgccactgcacatgctcaccgggatgtggcatacaagcattatgtcaatgagatggactgcttgcagcctcaacatgtaagtacttccaatatcacttctagttagacatttacttctttaattgagatactaaccaacgacatctcttcaacttttgcagattgagtagttaccataccacacaaatgaggcttcaagcctgaccctgaactcgatgtgcaatcgagactctgactatttcatgtaccagtgcccattgatttgtttctgggcagttgagtaccaccttccgcaccgtgtcatgcgacagttcgggaagaaac

SEQ ID NO: 60792 - DNA, 430 bp, Oryza sativa
agcttgtatagttggtggagactacatttgtttaccatgacaaggggaaggcattgaaaggtcattctgatggaaacgagtttgcagttacttaatctgacacttggcattaggtttactaagacacttaacctaccatttatatacatatgcaattaattatgtatcctaaaaaagcaagggtggcctctattattcaagggagagatcatgaatatattagaaccttttatttattaaatttactcccccacccacaaatataagagattctcactatacacctttataaatatccataatcccttatatttatggacggaagtagtagataaatagatgttatataaaacaaagaacttcgtgatagcaaatactttgtataaaataagggaaataatggaaagttcacccagagctggacgtatac

SEQ ID NO: 60793 - DNA, 401 bp, Oryza sativa
agctaattctaaacagaacatatatatatatttatgcgaacgacatgatagaagctaacccgcatgggctcctcctccgcgacgaacggccggttggagatggaacacacgaactcccacaccttccacggcgtctcgaacgcggtctctatcttcaactttggcgacggcatgctctcatcgtatccgtgataggggaggcatgccttgtatccaatcaacatgttaatcgctgagggcgtcaaggacggcctcgctcctgcgagccgacattcaaaaacccaactgaccgcggctccgctacgccctctgcctctgttgtatttcccgtcccaggcgaaaacatgtaccagtttccctcgcggctcggacccagcttactcgccagaccaaaaaaaaaa

SEQ ID NO: 60794 - DNA, 433 bp, Oryza sativa
  unsure (1)..(433): unsure at all n locations
aagcgacgcagctgcagctatgngatgtgagtcgcattacttttcttaatgatgacctgattgcggatttagaagaaacttttgaaagcattcgtgctttcaggatgaaactaaaccctgaaaagtgcatcttcggagtaccgtcagggaagctgctcggatttatggtatctcaaagaggcatacaggccaacccggagaaaatcaacgccatcctcaacatgaaaccgccgagttcccagaaagatgtccaaaagctgactgtgtgcatggcggcgctcagccggttcgtttcgcgactcggcgaacggnggatgccctttntcaagttgctgaagaaaactgacaatttccagtggggacccgaagcacanatagcctttcaagacttcaagaaacttctcactaccccaccagttttggcctcgccacg

SEQ ID NO: 60795 - DNA, 392 bp, Oryza sativa
agcttccagacagtagttcttgtagtttgttgggacaataaagaaatttgggtttcaagagaatgtcgaggacaactgtatttattcaaagtttaagaatgggagatttattttcctaattctgtatgtggatgacattctactggctagtagtgatgtcagtctactgcaggaaacaaagaaattcttgtcctcaaactttgacatgaaagaccttggtgaggcttcatatgttttgggcatagagattcaccgagatagaacaaagtatgcattgggactttctcaaaagacatatatagaaaaggtgttgaaaaaattcaacatgtacagatgcagtgctacacctgctcctataatgaaaggcgaaaagtatggtgcatcgcaatgtc

SEQ ID NO: 60796 - DNA, 414 bp, Oryza sativa
agcttcggcttcatacaactgctttgttattctccattcgccttcaagacacattcctgcacggcttgcttgcgatagataccacgcctgctcctatcaacacacattatttcataccgatgcacttgtgtgccttgagcaacaactcgatgtgtccgtgcctttttgattctatcttccatgtactttgtcactacgttgccaaacactatgttgttatcggccatggacggaccaattttcttgatcgatccctaaagtacacttgcgtgccgcgaaggatgaatacaacaatagcaaccaatggaagtacccgaactcctcgcattacccaagtgtacacctctgccaaattgggtgtcattatgccataccgagaaccatcggtgtcgaacaatagagaccacttcttct

SEQ ID NO: 60797 - DNA, 411 bp, Oryza sativa
agcttacatgggcctcctcctcctcctcctatttgtagctcacacgcctccacactcaatgaagcttccttaggatcaaaaacaatctcgtgttttgcaacaatctcatccttcttgttggcggagtcattgtcaactacctgctgctgggaattgaaagccagcactcgaactatgagttggccagccagttctaccgaaacaacacgccttgaaagctgaatgaagccgccatcatcgataggcattcttccatcttgtcgctcttgagaaacaagtagcacgacttcttgatgaattgcactggccgtacgggaaacaagctttccttggagatgatccggccatgacgagccaccaacaagctggacgctgatgatagaggcctcaaatgatcgatcaagcactgag

SEQ ID NO: 60798 - DNA, 297 bp, Oryza sativa
  unsure (1)..(297): unsure at all n locations
agcttaacctcttgccaccttactttatactttctatacttttcagtcatcttttcaatgttgagcttggntgactcatgcactttcaaaataaattcagcgcgtgccttaacatcatgatgaaccctctcacctagtaggtaaagggcaaaatataaatgggagcacgaggattgaaaccatacactaactgaaaaggacttaccttggtagtagaatgtgttgcccgaatggatgcaactccacatgggcaaacatccttccacatcttcatattttcttcaaaaagccctcaac

SEQ ID NO: 60799 - DNA, 427 bp, Oryza sativa
agcttcagcctatccagtgcatacctgtttgccgttgctataagcggctcaagcagggcggatgtacctaacaatggtggcaaaacgtccgtgtacacgaagtgtagcagagctttgaacgtcgccggctcgatgtcgtgcagcgtgacgcacggcatggtggcctcggccatggagccgaggagctgcgccctgaacaccggcgagcgcgcggcgagcacggcccggtgcgcgtggaacgtctcgccgccaacggcgaacgacgcgtccgagccgtcggcgctgccccccatagctccgagttgggcacccagattggggggcggcacggggataggattgccgtggacgtcgttgcgcacaaccatgaacccacacacgaatgtgaccgtgcctttgtcgctgacatgatccggctgtagatcac

SEQ ID NO: 60800 - DNA, 406 bp, Oryza sativa
agcttatgtcgattggtaatgtatggttatattaaggcgcgccaataaattatgtgatcaaatcctcacgcaaacaggaagttctataaattttgtgtaagttttaaacagcagaatttcagcgtttactctcagatcatcataatttgaatattcattaggaaataagaaatgtatgcatgttcttatacaaaagaccaacactacttaaatgtgtacttgtatcaatcaaccggtagttctcccaaaaaaaaaaaagaattagtatattcccggtaaaaatatccaacgcacaatgcgaccatctttatttccagcaagacaaggctttatacgcaatgtatcaagaagccacgcactagtaccataccacgaaaatgacatcaagtgtgcttacgacaagctt

SEQ ID NO: 60801 - DNA, 425 bp, Oryza sativa
agcttgcattatacttcacaactttgtttgttgaggatgagaaagatatgggaagctcttgttctgactcggatgaaatcttacggacactggctgttcttttatcaaatatcaacactgtgcctgctggctgttatgctgaagtggtacggagaaatgcttctgtttgtgctcaaccaacacatgcacaacttaaaagggacttaatggagcatatttggcagccgtttggtccatttggcaacaagtaaaacaatcaatcctcctgtatggcgagtcacattgtcatgttcgttttcctgcaattatatcctacaatatttgttctccctctacttttgttataaatttttgatatattcgtctttgtctctaatactttaggattggcatccactgacattctgaatatattacataattat

SEQ ID NO: 60802 - DNA, 194 bp, Oryza sativa
  unsure (1)..(194): unsure at all n locations
agcccggctcgaagaggaaccgactgtttgcttgccgacgaaggagaccacancggcggggacagcagacgcacacgacgggcccaccacgcgcgcccaaagcacgccgaagcgaaaaacacacaccgcgccggaaaacctgcccaacccagcgcaggcccagaaggagccacaggcccaggagcgcgccgccg

SEQ ID NO: 60803 - DNA, 88 bp, Oryza sativa
gaaaaaaacaccgaacccgcccaaaaaagccgtttttatgaacgacccaccggagggggaatctaggaaaaaaaaccaaaaaacggca

SEQ ID NO: 60804 - DNA, 334 bp, Oryza sativa
  unsure (1)..(334): unsure at all n locations
agctnaagcacaanatgagagaacgcactattgggctaaccaagagaggagacgcgtgaggtgtctcccgaagaggggaaccacggcacccacgcccctgccgaggagccaccagggccgggcctaattcaaccctcttctcacgaggtagcacaaaggcaccccacaggctcactctcaaacacctccctggaggaggcaaaatcgaagccggcacaaactatgctgaatccctcccgtgcggatacgaaagcgaaggccccacaaactcgtcggggacaccacaaccttggggctcaccgggacgccaaccggaaggagacccagtcccaga

SEQ ID NO: 60805 - DNA, 403 bp, Oryza sativa
agctccacgcggggctaaggctacattcgtttctctggcttgggaacacactccctccgcacggaaaacggagcggtccatcagcacgcgactaattaagcatcagctaatctctctccaaaaagggaccacaacgatcgtctaagcaactctcatatagaaactctcccgcaaaaaaaaagcaaagctcagcaccttgaaaagcgcgcacgtggaacaccagggagaggggttgggaacaaagagcaacgaacacagcctagagcagattgaacaccgaattgcataccacagactgacgacaagtctatccccccagtctatgctgctatgacaacaccatacgacaaagtattcacaaagataccagcactcacgacaacagctggaaagcagcaccggc

SEQ ID NO: 60806 - DNA, 280 bp, Oryza sativa
ctttaaattttgcagaatattaaccaatggatacaacccatttcttctaaattaaataacctatcgatcggcggctgtccctccaccgtgtgcctcgacatcgtgctattgctggtgtacgacagcccaagttttttttcggccgcttcgtttcctattttggcccacgtattttcggcccattaagaaaaactgtcttatttttgtaaattttacagcaaaccgaaaacgattttgctatatatttgtcgacaaattttctcccaaaaatttgacagat

SEQ ID NO: 60807 - DNA, 261 bp, Oryza sativa
  unsure (1)..(261): unsure at all n locations
accttaagcacctgcagctgcagnctgtatcgatcgacantgtacaatananttcctatcactatatngaatattatcatcaaaccatggccgntccaagggtgggctttggatttcattggtcaaaattattcctcctcatcaaaagggcattgggtccggccaattggcatggggtacttcactaagtgagcccgagccctgccgctcgaaataatactacggaggtaattggctttattttgaaacatatcgctcata

SEQ ID NO: 60808 - DNA, 422 bp, Oryza sativa
  unsure (1)..(422): unsure at all n locations
agctngaaagaacatggtagcttgcatgctttttttttattaatctcaagttatcttgctactttagaaactacaatgctaagctgaagaaactgagggtgtttgtgatttgagtcgacttgaggtactgtaggttcagttttgtccttacataatactccctccatctacttttggtagtcatatttccaaatctgaaaaatttatttttgataggcatatttcaattcaacaacctttcatcttaaggactttctcgaatttaatgcatgactctccattcttccacacaagattggctacatgggcgtcgagaaatgtaaatattgatgaatcgcttgtttacgaggaatgagtagtagcatgtttaaatggatgataagtagaattacttatccttggtctgtgtgccaagatgaaat

SEQ ID NO: 60809 - DNA, 389 bp, Oryza sativa
agcttgtggctggtagtaaatctatttatttttcttttgagatagagctcgatcctcaactatttctcgcgatatcttcttacgaagatttgttagggcatctataacagcctttggtttatgtgggcaacccggcacgtagacgctcacaggaattaacttatcaactccccgaacagtactataggaatccgtactgaacattccaccagtaatagtacaagctcccatagcaatgaccgcatttgggtcaggcatttgctcatataatctcactaaagagggagccattttcattgctactgtaccggctgttaaaattatgtccgcttgcctaggacttgatcttggaccaatccataacgatcaaagttaatcttgagcctatt

SEQ ID NO: 60810 - DNA, 404 bp, Oryza sativa
agctttaatttgtgctaagattgggtactctggatttgcttaatttgtccgctgcaactgcaactccatgcctagcttgaccgtcgctgaacgccggcactggatccagtgtgactgattccgctgatcctcccctttgccgtcggggctgccttggggaactcttgctcattgggcacctgctgcgcccgatcatcccgccgccattgatcgattgcctgaacggatccccacggcggtacccacgccaccttcgttcgtttagtatccggcagagcagtcctcgcagcaggttcatttccttttactgacacagtttcatactccatcattgcactgtttatttcgaataacatattatcaatgaccctatattcttgcttagtggagtacatacatatgtg

SEQ ID NO: 60811 - DNA, 422 bp, Oryza sativa
agcttatcgcatcgcgttactcgtgttctgtacgggcgagatgcaagcagcgcatgacgtgggcggtggagtcccggggatacgtgtagcgtcgtggcggagactctgattccgccaaatccggccgagatttggatgaacaatggcagtatatatacacggcgacgtgtacgacagccgtaggccattcccaaccctatatatagttttcataaattctacatcatactagacactacttttttcaatacaaacatcactatacatatttaaatttaatgttagttcaaacatcactatacatacttaaatttaatgttagttatctcacgtaatatcttggatgcagtggcggaggaaaaaaaaagagatatgtctcatggacacatactaatcgcactatactgtacgtcacaacattg

SEQ ID NO: 60812 - DNA, 255 bp, Oryza sativa
aaggaccgaggtaagagaatgacctgaaagccactcccaccgcgcacatcacggacacctctggaaccctcagggggcgggccgcgccgaaaaacactgctgggagagcggactacctcacaatgccggatagacccaccgcccgccaacaacagaaaacacaaacctgctcgcggagacgcacggaaaccacccatacccactccgggcaggcgacacttgagacggacaccaacagataccaccgacccccta

SEQ ID NO: 60813 - DNA, 97 bp, Oryza sativa
  unsure (1)..(97): unsure at all n locations
agcttgaagattaacagtattcggngattaaatgttacttttggctggctgagaggggggaggccggcggcttggactgggccagcatgggccccac

SEQ ID NO: 60814 - DNA, 425 bp, Oryza sativa
agcttgcaaggctaaagctcaaggtattctctttttttctttagctgatggctctatggttttgcatcctactgagtatgatcatgatcacactaaacttttgattgcccttatgataattcaacatgattacccatttagaattgctgagcataaagggtttaatgccttgatgaagtggatgaatcctcgctatgaattcactagtcgcaaggccataaaaatgaatgcatgaaattgtatgaatctgaaaaggaacatctcacgaaaagtcttagggaggctgagaccataagtttaactacagatatatgtggacattaaatcaaaaccttcagtatatgtgtttggtggctcattacatagatgttcattgggttttgctatgccgcgtcctaaactttgttgaggtggagcctcctcac

SEQ ID NO: 60815 - DNA, 393 bp, Oryza sativa
gaccctaagcacctgagctgcagcttatatatatcgaaacggagggtttattatttttctgttatctcagcgattaaaaacgaaaagtttaaagaaaacattgaatgcaattagatctgcccacgttctcaaaatttctttaggtccgccactgcttgaatcgatatgtcatatgctgcaaattaagcggattggagatatacatgcgctcgaatgttctcggttatattgtaattgtggagtagcaactttataatgggtataaccatggaacaagggtgacgatgaatcaaactatttgctgtcatttgaagagctccagcatacatatttcactatatcagtttcttatttttgggtaactgaagactgagggggatgaaattgtactaa

SEQ ID NO: 60816 - DNA, 381 bp, Oryza sativa
agctcgcctgcaagaccttctttgctatttttattgtcatttccttgaaccattattgttaccactactgtctaatacaccagtagaccagcaactaagggcaagtgacttgggatttttattcagcattactatctgtcattggattgtgtaccactcatatacatatatttggccttcctagctccacatatttacttctggacagcacaggttcttgatccctgcattgctgactacgccttccaggtatcctttgctttgctactaagaaccttataagagcttggttaggtactccatattgctgagaatcgttgagaagcaccactacacctgcgcagtagattattagggataaccttcaccgtttgcttctgt

SEQ ID NO: 60817 - DNA, 423 bp, Oryza sativa
  unsure (1)..(423): unsure at all n locations
ctgcagcttagtcgactactatgggtgatcntattctaaccctgacacacgtagcatagttgataaaactggaccagtcaagcggttcaaccgaaaaaaatgggaaccagctcggttccctccaaggatcattcacgcaatcgacccggtgtaaccgggcggtttgcgccaaaccgcagctccttgaccggctcagttccctccaatagttcacgcaatcaacccggtgtgagccggttgaaccggatggttttacgcggaaccgccaaaccgggtgaccctgaaccggctagctcaagctagctagccacttgatagcatatttttatgggccatgttagacctgagggctcaagctagctgggccacttgatagtatctttcttatgggccatgttagacctgaggcacaacttaatttta

SEQ ID NO: 60818 - DNA, 425 bp, Oryza sativa
agcttgcataagttcaactgaaagctttttgcttttttcagaagcaattcaatatgcatttcagttgctccaaacgagatgctcgttgggcgtacataataaaaaaaccctatgaatcatgcaacgatagttggttgcttggtgttatgttattcaagtaagagcaagtatatcatgctttccatgagggcatggactatcataatgccctacaatattcgatttcgagccatatccttaagggccaaatcggcaagaggcccaaagatcctctcaagtctcaaatatagacccgtgttacccaaagagctcagaacaacataggtgcaaacgtgcaagggcaaaaattgaccagccacaaaatgccacaaattatgctcagtgaggccacatttctttagaaaacagaaacacgattcaagtgc

SEQ ID NO: 60819 - DNA, 402 bp, Oryza sativa
agctatatagcaacatctattgttttatgctaacgacctacagaataccaatggttcgttaaccacatatgcctaccactagattgtgcatccaatagcaaaacacacttactgttaatgatcccatagaagagcagatgcccagatatatcatgatatttgtctgaccatatcgaggttcaaagaagagaactagtgctgccacgactactaaggttgctaccgcatatgttagaaatcctggaggtgttgaaaccacaatatgttcagagaaagcatgttagttatatagctgtgacctatacagtgctgcagaaatgtgtgtcagtgactaaccaggctgaatggctaaattccaaaattcctctacagaattaagcatatgttcttgacgagcatgta

SEQ ID NO: 60820 - DNA, 413 bp, Oryza sativa
  unsure (1)..(413): unsure at all n locations
agcttcaaatactctatgatggtttgttcttaagtgccccggcgatatccttgatccatctacgatccgntagtgcctcagccaccgtccggtgccggcgcatgcaaagcgaaacgcgatcgtagatgttaggagcaatggaccggatgcagccctcttgcagccagctattctcccagaagaggatcgtttgtccatctcccagctgacagactgtggatgcagccacgaagctcttctctttttgcgaccccgggatgtctaggcctttccatggtttacctagtgaagtccgctgtagccaagtccatctggagcgaagtgcaatacccatcaactccagattcggcaagcctaaaccgccatagttcttaggagcacacactctcgaccaagcgatccgacagcaacct

SEQ ID NO: 60821 - DNA, 404 bp, Oryza sativa
  unsure (1)..(404): unsure at all n locations
agctttcccttgaggacttttcttttttatctatcgaggaatcattccttctatagacggtcacaccaacatcggtaaaaagacaattgtaacccatagaacataattgagaaacggacaaaagattgtagtttagagattntaccaagagaacattggcaatggaaagatcattagagattgcaatcttacccaatcccataacctttccctttccatcgtccccgaaaactatgttatcttgtgaagtgccatttggatcaagagttgaaaacattgattcttctccggtcatgtgatttgtgcatccactatcaatcacccaacttcttccaccggagacatattcctacaagagatcaatttttaattttaggtacccatacttgcttgtgtcctctcat

SEQ ID NO: 60822 - DNA, 64 bp, Oryza sativa
gcaagcttgatcttcgcaccctctctgcggggtgcgttctgtgggcggcggaggaggaggagat

SEQ ID NO: 60823 - DNA, 420 bp, Oryza sativa
agcttcttgaccaaatcagaactcaatttttttttgcagctacctccatcaatgatcacacgtgcacgatggttgttgatgacgaagaaaatctgaaacaaattatagcgctgcaacttgtcatgctgctgtacatacgtgctgagcacccgctgcacaataatggtcctgtagtccgttgtgtcatcacgaccaaagacttcgccatcctcatcctcaacttcttcttccctctcttcctcttccacgtcggaggtggtgatgtaaccatcttctgtagcaacatatgcccattgactagggcaatatttctgcacattcccaaacccttggcaacggtggcactgaatgcgtcccgtcgaggcgacagatgaggcactcttggcgggtacctgcgaggaacctttacctgactctcct

SEQ ID NO: 60824 - DNA, 385 bp, Oryza sativa
agcttcacattacagagatgatattttctcatgaagaaaaaaactattaacatgatgcacaaaataaaagatggaaacagtaactattacaccattctcataattcatattagtgctctacacaattccaattagtgttctatacaatggtatgaaatattgtgaaagaaatacaccaacaccattttaatgacttaaggatcacaagagatcaacaaaagccacaagaataagttatcctcatagcacatctctgtctaatatgatagcggaagccgatttctacaccattcatcatcatttaaaccacaaaaaaaaagagcatatgccctcacaaatttcctacagcaagtcagcaacaccaacctaaatcaattcttagcat

SEQ ID NO: 60825 - DNA, 412 bp, Oryza sativa
  unsure (1)..(412): unsure at all n locations
agctttgcgttatgtgcaaggctttattagtctcatgctaacgtacataagaactgattccctagagatagaatggtattcagatgcagattntgcgggagatgtagatgatagaaagtccacatcatgctacatattcactctcgcaaaggggctatttcgtggaaaagcttcaagcaaaccgacatagcatcattgacgatgtatgctgagtttgtagctagttatgaggccacggggtacgcaaaatggttaaagaagtttgtacccgggttgaaagtggtcgacagcattgaaagaccactcaagatgcattgtgacaatgagccagcagtgttctatgctcacaacaataagtcaagtggtgctgccaaacacactgacattaagatttatgttgtgaaagagaaaa

SEQ ID NO: 60826 - DNA, 420 bp, Oryza sativa
agcttctaaaccgccacgtgactctcttataatatctgagaaaaaaagaagaaatcctaccgctttattttaagctaaaacagttgacccggtaatactaaccattacattaaatccaccgatccgatcaccctcttctcttggagctacaggtatgtataatacatactaaccaccacatctgctcctccccctcagggggctctttcttttttattcttttattaaggttatgcaccataatttgctactataaaaattattacatctatttttacgtggaactttaatttataagaatgatcttggtgacataaataaacaactacctttttaagccaatctacacattcaatctatgacacgcttaagcgaagccatccatgacaaatcatttatgataggtctcatactaacccc

SEQ ID NO: 60827 - DNA, 448 bp, Oryza sativa
  unsure (1)..(448): unsure at all n locations
ctgcaagcttgtttaagcatatactacaggttactctattatcttggcttgagtaatagatacaaaaagcacatttaatgttataatctccttttcctctaatccaatcatgttcacaatttaactgatccatcaattctatctttaaaccggctagttcgtcaattaaatctaactcttcatcagatgattcatactcttcattggtgctttcaatttcatctgtttctatgatagaatatattgactcgtcatcttttatttcatcatcacatactaatatattgtcatttacgctatctataattaaaactctctcttgttcttcatatctactagaatatcttttttgatctttatttgggcaagttctacttaaatgatctggcgaattacatatgaaacatctgcatgtcttatcataagatntctttggatatatcttctt

SEQ ID NO: 60828 - DNA, 426 bp, Oryza sativa
  unsure (1)..(426): unsure at all n locations
ctgcacgcgtgcgagcgcatacagagtatggcacacattcaacacatagtggcggcaagcttgctgagataagccttcaatgcaccaatgtgcagtatctgtactccgtatactctgcatagcacataccgtaccagattagttgtcacattctaactccctgcatttgtatacgatgatcatgataaaaatatcacttttgcatctgtatttttctccgaagtactttgtagacaaaaattaaggatccaaccaatatctggctaatttttgatggcatataagaaaaccaatgaacttacaatagcctatatgaattttttctctatatacatgctgaaggaacgtcttcacaatgacgtcccaagttacaccaacactttagcattagtaaaacaacanacaaattgattttttcatcctcgt

SEQ ID NO: 60829 - DNA, 174 bp, Oryza sativa
tatgaattccaagctatatttatttctcttactctttgcgcgtgttttcgatgaactgctgaaccatggaacctcaaggcacttctgtcacagagaaaccgacaaatattagcattggaagtaacttctgtcgctctgaattgactttcatgtctttactactaacacttttgg

SEQ ID NO: 60830 - DNA, 436 bp, Oryza sativa
  unsure (1)..(436): unsure at all n locations
agcttgctgngattgggtgtatagtgacaagtacaaaagtatcatcangaatcagactgcagaaaagaggcaacatttgactgtacattgatactataattgaagaataataaacgattcactctacagggatttagagtacgtaggggctgtaattaacaaatggaatggctgattatccctgtttctttcctatatatatacatttccaaagcaggctctcgcagtaacactcagcgagcaattaccagctacaatgcatgcacctattgtcacttccagagttccagtcaggcgcaccaaaaataccatggctagaaaatgactaaatgggtaaattgagtcatctcacccgaatgacaaagcactttggtgttagtgattctctgcttgtgtaattttattccttcattcatggcgagttacttctgcaact

SEQ ID NO: 60831 - DNA, 390 bp, Oryza sativa
agcttaatggctagcggagtgaaatatttaacgacattaatattataagaatagtctattatctcttgttctccccccccctccctaacagactaaaactattgttttctcatgttttactagtataattcaatgtattgttatccttcattctgattttctttttaaaataacttatgccgattttgtttgacactccaatgtggaccacctatgtacaatatctcagatatatctattaaactatatagaagctatgtagtacacaattagtatctattagtggggacatttgagcattatcgtattactataaaccaaggttccaaattcgttgggcatcagctattagcgtctaccaacaagctatattatcgtccaatcaacgca

SEQ ID NO: 60832 - DNA, 402 bp, Oryza sativa
  unsure (1)..(402): unsure at all n locations
acagcatctggatgaggtccacccatgggtgttgntgacacaatgattctgctatcattcataatattagatctatttgtccttcctttgtaggtcaaaagccaaaatgtaaaaggcttaattttagaaatccatatttcaactcgagagcgaactactcaaaagaatgcatcgggctgataggccaaatctgttcatccaatatattaagatgtcaatgcgcttgttttgatctgcgcatgggattatgtctattaccgctaagcaatgaatatatattagtccaatcgttccctctcagttcgtgacgctcttacattataaagttctgactttgcaacgaagctgactggtgagttaaacatatggattgaaatgaacaattcctactggcatcttttc

SEQ ID NO: 60833 - DNA, 405 bp, Oryza sativa
agcttcaagccctcatgcacagctcaacacttaatttataaaaagagaacaccataaagtgtaatgatacatgtttcagcatataaaagacacatgaacatggtcatcgctgcagtaaagtccaggctgctgagtgtatccttgcttagccagcaatgaccgtgctttcatcacaaggtccttgtttgacacatttccgcgcttgtctgcaagaatggtctggatagcattgctgagggcaccatatgaagaaccctgcggtgtgtgtgcatcggctgatgtttgattactttggcacccactgatcagatatgccgtgttaggtgcccatgtcttattcccagcatacacctcgtcaacactgtgaacctcttgttctatagctggcttgaaagcttcttcctc

SEQ ID NO: 60834 - DNA, 433 bp, Oryza sativa
tgtcgaagaagccgcatctacgccgagtcggagatcccacccgagctcgctatccctcgctaccacgccaccgagctcccacctttccccactactgtgccggctagcgccaaaccccgccgatgctccgcctggcctccctgaccctgtcttcgctcggactgcttgttcgcacggccgtcccgtcacggtagaaggagaggagagcggcgttgggtcgccgcccgagcgtgagaggagagagagggggagaagaaaagaagcgtcggtctcgaggaaagggggagagggggaaaagtggacaaaaaatgaaaaaaaaatctgaccccacgtgatgtcgctacattgtgaaccttgtgtatatcactttccttagcccatgtgacatctaagctctgtgcaatacatatgatgcattgctattgtccttact

SEQ ID NO: 60835 - DNA, 395 bp, Oryza sativa
  unsure (1)..(395): unsure at all n locations
agcttgatcagcatgtcatcagatgatgacagcacanaaggctgggttgggtgaacagccacacacctgatgtaatccgtatgagcttcaaaaaccttgaccttatccatcgtattgtaattgtacacacgtatgaacatatcgtcggcaccagcaactacccattgtttccgtgtgataaatttagatgaccgaactgaaatggggatgattatattagcaagatggtatatcaaacagaagtaagcgatgaggtgggaaagcatacctggtaactctgtgacttcaaatgatttcaccatcgtctgaggatagatgaatatattataatcagnttaactntaagagtaactatgctgaaaatatgtatgtttctttttccgccatcgatttct

SEQ ID NO: 60836 - DNA, 458 bp, Oryza sativa
  unsure (1)..(458): unsure at all n locations
tactaagctttctctaccctctctctaaagttgtttntttttgtgggtgctggccaagatcaggccggccaaatttcattaagattagtagtatatacaaataaacaggttttagacttcgacgagaggctgtcggagctactatgagaatgcttaataaacatcctcccaaaagaaaggggcaaaaatcagcttacaacttggatgctactctcctgaacaattgaagactcctgcttctatccaaattgtgatctcctgaatggtgccaaacaaggtgtcgatctactgatcgcgcttgatcctctctctacagctgtagagtgacatttttgaaagcgacatatattacatatgcagatgccatataaatacatattcgaattgttcgatcaccacatatatcttgaggggaagggagttctcacatgtgatatacctgaacggaatgatatgca

SEQ ID NO: 60837 - DNA, 423 bp, Oryza sativa
  unsure (1)..(423): unsure at all n locations
agctntcaacttcaccagagaaaaatntattatatggaaacaaatacaagtaatttaaggaggaaattaatccatccttttaagtgtgctatgaatgatangcatcatgaatcacctgatttcttgattgacttcacgcagcttccttgttgcaccacgatgttccttctcaagaagtggaataattaatggaacactctcaatgtaccttggccatattagtatgcattacttcanagcaatgatacgaagaataattaanaaacatacacatgccagctctataatgagcaaggatacctcttcctcagcaattcttccaaanatagtctcaagttactcactcctattctgttttctcctnctttgtagtccncttccaacttgtctcagagatgnacatcttcaactctctaatgagat

SEQ ID NO: 60838 - DNA, 439 bp, Oryza sativa
  unsure (1)..(439): unsure at all n locations
acttggtggtaggctaaacgattaattgtgctccaaatagtacattatnnttttgtgataatagacgattcttcatgttagttagctagcttgttcatgtaactggaaccttttatttacttgtggaactcgaaagcatccacgcgtaaattgcctaattgcattccctaactagtgtctagctaccttgctcgattgaatttcggttggtgcttatctcggttctgtgttcctcagtaattaaaagttccaatggaattaatgaatgatgggagagaatttcaatcatacatgcctatatgaacgttatttatggccaaattgggtaactatattttagaacggtgagtatcaacaaacctgtaaaacatcactttttgtttataatattcccttatgatgaactcaatatattctacgtgcatgctgttcttcgaat

SEQ ID NO: 60839 - DNA, 387 bp, Oryza sativa
  unsure (1)..(387): unsure at all n locations
agctntggtactgaagtggaaggattaattatatgaattgcataattgatggcctttcataatagcattgcataatttatggcctttcatatttaaaagttacatttttcatattaaatttacattttaatactcatgttgactaggtctttttagaaaaatatcatatgggtgccccatatcatagacagatgttatgcaatagatgtatattttctttgtctttattgacttacatgcaaatatgtaacaagttatatgcatttgaattagaggtaaggatagcttgatacacatacaatatattcattatataatttttagtatttcataagaaaagagcgagacaatgaacattcaattataaagaatggaagaacatcttac

SEQ ID NO: 60840 - DNA, 443 bp, Oryza sativa
tgctcaatccgctgccatcgtgctgacgagcgattttcttttatccggtgactcgacgccatcctgcttctccatggctaactggaactttatataggccggcgcatgcgctgatgaccttgactggcttttctgaagaagacctctcatcatgcattcatgcctgcggcacatggagcctcccacatgccacagctgtgtttaccccacagtaatgcaacgattggaagctgggcttgatgcttggctccaacgcacaagaatcaccattacaaaaacgattttactggaggaggaggagctatgtatatcgtagacggaccattttcacgtgcgtatgtaaatatcgcgctcccattttcgagtcatgtgctaagatgccttttaaggcctactacaagtctatcgtcatcacttccccaacacttaaaatttatccctat

SEQ ID NO: 60841 - DNA, 429 bp, Oryza sativa
  unsure (1)..(429): unsure at all n locations
agcttatctaataagagaatgatatgtgcgataatactctncaagaaaaaaaattgtatgcatacaattaaataacgctaattcccatcccccataaaaaagctagtactctcatacctcataaaaccacatcttaattgatcacctttaggatcatttatatagaataaattatttctaacgttttgatcacatcacctcaattttttagcattgcatctcattgatctatgatctctcttatgctaatgcaccatcttaacatttctattatcgtagaatgtatgcaagatgtaattatgtaaagcacgtgaagctaaatcgtttatgtacattctcaacaaaataatcggttaggtacaaaatcgattattatcataccactgtgtcgcagcaacgcaagatgtcaactactttntttaacactac

SEQ ID NO: 60842 - DNA, 428 bp, Oryza sativa
  unsure (1)..(428): unsure at all n locations
nggcctacccgaccgacaatcagtcactctgcctctatgatcggaagagcatgagatcaggtgctgacgtcgatataataatgttggagcactactactgtatttcctaatttccggccggtgttataattaaagagcagctcatttaatttgcaccttaatataatgtacaaatggattggagaataacctgtatattctctgattttactaactcctaattttctatatcaacctgtccttttgatccttgtggtgaaaaatatttacattaaggataaagtttgatcagactctaatttttataccctaactattaatcttacagtaattaatggaagtgctcttggattcgtacgtacactattgtttggacagcatagaacccttcttatataagtatatttttcaacataactcatttcctt

SEQ ID NO: 60843 - DNA, 450 bp, Oryza sativa
  unsure (1)..(450): unsure at all n locations
agcttggaagtgcgtgtgagagtgaatgagtgaagcttcttanatagggtaggtatgacggttattgaaaggggaattgtccgaaatgccccgcaaccccatcatgagcacatctggaccgtccttgccaaaccccatgatcaacagtgttgatcaagcccatctggccctcagtttcggcctatggactcctcctattctgccttattcattcctgcgagttttaagctgattcgttgatattttgatgaagtctacagcccaccttttgcatggatatactccttccttactttagtctgattntcctcccaactttggtggtttatgtcctatatnggatattcaccaacactcgtggcatatgttagaaataatccctatcactatgttggatggtttattatctgtactttatacagatgtggtggtatatattttgcacttcac

SEQ ID NO: 60844 - DNA, 398 bp, Oryza sativa
  unsure (1)..(398): unsure at all n locations
ntatgatcatccgcgcaatttagtataaataaatctggtcattctaaaagacagaataatgtgagcctagtatggtgctttctacttgtagtagaaaacaatttataaactgttgatctcatttgatcgaagggtttgtatctatttatattatcaccttagatagtggcagtagaaatgtcgaggatcattattgtcaaaaaaaaaaaaagtgtgaagggacataatcgtcatttaatagtgggtaaacctttatttttcttctttttttaactctttagatagaatatgagcaataccaacacaatgaatgaccacatatcgatttatccggggataaccataaataacaaagttacccgtataactgtatttgtaaataccgatttactcttggt

SEQ ID NO: 60845 - DNA, 306 bp, Oryza sativa
agcttcgcagcgcagcttcgcggagacatcgtgagaaagaaagaaacgagacgaacgcgaggtggtggaggtggacgccatggccgccgccggcagcagcagcaagttcgccgtcacgtgcggcctcctcagccagtacatgcgggagcgccagcagccgcagccgccggtgacggttcttgatgcggtggcggaggaggaggaggaggaggacgcgcggactatgcagctcttccccccgcgcgccgccgccgccgactgcgtctcgacgccgtctgcggggacggccccgctgaccatcttcta

SEQ ID NO: 60846 - DNA, 402 bp, Oryza sativa
  unsure (1)..(402): unsure at all n locations
tagtgcagtaggttattntctgaaatgtttcagatcttgtagaaacangttatgcttggttgtgtgtatatagagtatgtagatcgatctccattgctgctgctttctctggaataaggattatgctgtgtttangtaggattaggaggagacaaagaggggcgtgatgctgatctatctggtcagctcctggcttccaattgataaagagatcatgtaatatattctgcttggatgatcgttcagcttaatgttagttccaacttccaagttgatcagattcctggtgtcgtgtcgaaccaagctgctgggagttcgtttgcctgtcaatttgttgcttgataagaaattctctgaaagttaattaaagagttgcttcataagaattgaagttctttttct

SEQ ID NO: 60847 - DNA, 450 bp, Oryza sativa
  unsure (1)..(450): unsure at all n locations
agcttattctcagggtgttntgactattccaatcccaactcctgataatgactntccagttgtacagtatgcagacgatactctacttatcttgatagcttcctcaaaagagcttttctgtttgaaggctattctcaacacttatgcagattctaccggtttgaagattaactacagtaaatcatgcatgattcctctgaatgtggacatagaaaaggtgcagcatttgtccaagatgtttggttgctcagtaggcactttacctttcacctatttaggtctgcctttgggaacaactaggccaaagataattgattntgcccccttagttgatagggttgagagaagattgtctactacttctgctcttctgtcttatggagatagattatactatggtcaattcagtttatcctcccctccaacttactatatgtgctctctttccct

SEQ ID NO: 60848 - DNA, 462 bp, Oryza sativa
  unsure (1)..(462): unsure at all n locations
tctcaaataccgctagcttgctccgctcgagcctaccttcgtctgcaacaatagcagggccgagcccatcgtcgtctggccaatgtagccgtacccgcatccgtcgttctcttgccgctgccggccagtgagaaggaggagaagaaaaaaagtgtgagatagacgtgaggagtataatgaggagaggtgagagagataagaggataaggatgatacttgaaaacctttgaagtttgggaaggaaaaagatgatgtaagttagacttctagatagatccttaataaacccgcatgcggctccttaagaggtccacctacgaaaataggctcatttttcgcatgcggctactcaagagatctgcctgcgaaaattcattttttgcatgcggacctcataagatagtatgctaaaataccgatcgattnttgcagacgtgaccaattatggtggcttcgtctaca

SEQ ID NO: 60849 - DNA, 435 bp, Oryza sativa
agcttcagcaccggctagatcgacgtcgccgcggttcctccgtggagaccaggtacgcctcgcctctactcctaaagatcgatctgcgcgccgcgcttcggctcttactgaatccatccggcaattagttttgtaccatatcgccgattttgagagcgcgcgacctctttattaactcggattgattctattcgatcgccacctccacgaggcatacccaccgattgctaacagcaaaaatatcccctccgtgggcacgcccctaccgcgttcggctgtaaaaaaaaaaggcagtgaaaagatccccttaaccccggggcacgggaggcgaccccctgccggccgctgcaagaaaataaaaagcagtgaaaagatccccttacttttggggcacggcatgcgaccccctggccgccagctgcatgcatgaaaaaa

SEQ ID NO: 60850 - DNA, 362 bp, Oryza sativa
aattgtcctaattgctccttaaccgccttcaggaaatgatctggagcgttcacaccaaaccccacatccgactgtggagagaccaacatgggttgtgccccaaatgactggtttttggcccatcaactttcctggtcctgctttatctatttctcagaattttatgatgattctctggtactttgatcaagttcacaacccatccttggatggatacacgtttctcctcattttaatctagatttctcccaactttgtggtttaacacatgcataccaatattcaccatcacttgtggaatatgcgagggttaacacctatcactatgttggatatttattatttggactttatgacatgtt

SEQ ID NO: 60851 - DNA, 407 bp, Oryza sativa
  unsure (1)..(407): unsure at all n locations
agctntgaaaagggttatggaggctcttctgtcttggagtaaggggaagtttaagaacattggtagagagctagaaaaggcaaggaaacatctggcaatgttaatggaatgaaatgctgacagtagagagatccgtcaggccttataccgcatgaatgaactgttgtatagagaggagatgctttggctgcaaagatcaaggattatttggttgaaagagggggatcgcaacacaaagttctttcatagtaaagcggtgtggagggcaaaaaagaataggatctctatgctcanggctagtgatggtactattcataatacggcaacaactatggaaaagttggctactgattacttcaaggagatttacaaagcagacccatatctcgatcaggcaagtgtgtccc

SEQ ID NO: 60852 - DNA, 436 bp, Oryza sativa
agcttctattgagaggcaaatggttaaaccaccaactattgtgtgtcagatgttgtaaatagcagttaggatggcctgagacctccccattcggccactcctcttcttctccccctccctcccaggcaaatagttgagttttccagttttaaatagcagttagtatcccaccctccttccctctcaatataagtagatttacaagcaactaggaagatgtaccttcttcagtgacaccctttaaagcccataaatcacccattatgggcccagctccacctattgaaaaaaatatatgaaataatcagaaatatatgttgatgggccaaaagtatgcattgattcattaataattaaaaatcatcagcaaatacaagtcaagtcaagaaatgtaaagtacccctgccaccatatacaagcaacctcttctcgatca

SEQ ID NO: 60853 - DNA, 414 bp, Oryza sativa
acctatgtctccatcaagaacaaacatatgttaactgtagatgcaaactggcaaagtaccttgaggaatcactgaataagttcaaaccttcttacctgaaattcaattttgttgaaaaaggagcaacaattggtctcacacataatatcttgcaataatgatgaacacttgttgcaaatggtccggcccacataaggtgacccgcagtgatataaaagaatggtgagaataaccaaatttcgatgtaaaatatggataatagaacttgaaaagcactgcgctaactaatcatttcggcttaccattatgcatgaaatctatctgatgccgttccatttcatttacccatccatatgcccaaaacttgcccgtggaactattcagaagacttatccagtatgagctcatattatc

SEQ ID NO: 60854 - DNA, 332 bp, Oryza sativa
agcttagcttaattaaatatgtggaaattaaagcggaaatgaccccttgatcatgagagtatgaaaaatatcttatcacaagtcacacaaatttgacgaagctcaatataatgtcaagcagtcgtatgcataataaggtttatcaatgatatactttgcatatggccttggtgggtataaaataaagtcaattggaggaatcaactctttaaaacattttttttctttctttgaaaacaaattcccataagtcgtgataatagttgcaagaattcctttcaaatttaatcatctcacacatagcaatcacttagatcactaatagaatccta

SEQ ID NO: 60855 - DNA, 453 bp, Oryza sativa
tatgccatctatgtatcttacatattatatttacttgtaactatcataccaaactcttgcaacaatgcgtcacctattaagcataataaggatgtaatagcgagggtagtcatgtaatctgtaaacaaatgacatttatgacatccgcaatgtaagcattaaatagacttcaactgcccaccaagaaacatcgtgaaagtgataaacaacaactaggtcatattggtactaccagcaacaaggaatatatgagcataatgccacatgaagctgggagtagatgattttcttttaagtgatcctaccttatttcctgtggacaattgcaaatttctcactgacttgaattgttattgcaagaccgccactacataattgcaaaaataccactagaactatcattcgaatggcatcctaacgaaagtgaataaaccagtggcaagtttcctacta

SEQ ID NO: 60856 - DNA, 453 bp, Oryza sativa
  unsure (1)..(453): unsure at all n locations
agcttatgtagaagctcaagttgttaaaaattcttgganaactttggtgaaaataaggtacactttntggctcaatcaattgctgtacctgagactcaccttggacaaagctgtattggctgctgttggttgtatggcccaaatgcaattagcacattccatttactaatagccatgctgcatattgtgagaccacttcccatgtagcaaagaaatgggctacagacttgaaaggccaaaccaagttggaagatgccaagtttgattggaatacactgngtacattggttcaagaggtcaattacatttaattgatctgtgacagggtttcttatggttgtagtgttcagaagtgctatcctcagtctattctattcatgcacaatgagtggtggtttggtggattgctcgatggaactctaaacatacangaacagatgctactgtgaacca

SEQ ID NO: 60857 - DNA, 380 bp, Oryza sativa
tctcacctcgataacacaatcttacaagcggaatttggttgttttaatttcgccgaacccggcagagtaggggagaatcggatgtaacttttttctgtagatgttcgtggatatattatttgcctgattccgagttcgtatgagaaagttacgcctattttaagaaatgacatccgaatgacacctattttcgatagagatttagaaaattctacaagtcacatatttcgttcatttgagtttattttttccatgattccttcttatgttctcataagtgtgagagaaggggagggagccgaatgaagaaggaggggctgcgcgcggtgtgctttctccgtcttcgcccctcccatccaccggatctgggatgggaggga

SEQ ID NO: 60858 - DNA, 435 bp, Oryza sativa
  unsure (1)..(435): unsure at all n locations
atgcttggctaccaggccttgaggcaagtcttctgaatgtccgatggcccccataagttccggcccagcctcactgagaagtatgacgacggcgtcaacccctccgagtccctccagatccgcacgacgatcatagaggcggcggngggtgatgatcaggtcatggcgagcttcttccccatggccctcatgggccaagcgcggngttaactcatgaacctgctgcctacctcggtctactcctgggaggactcttatagttgatctctgggtgccgtcgaagcccgggaccccctgtgctggctcttccgcagtggctagctntggtctcgtcggctggctacggtgcctggcccggctcaactaatagtcctttcaagtttcaagtattttcaattttcaattcatcagcttaatacagcttggagtcttata

SEQ ID NO: 60859 - DNA, 423 bp, Oryza sativa
  unsure (1)..(423): unsure at all n locations
ngatgatgcgatgcgggtgtttgacggtgtgcctcataatagtgtcgtatcgtggaactccatgctcgcgtcgtattcgcttcatggatgcagtgaggaggcattggatttgtatcacagcatgtgcgagggtggtgttgacatataccagttcacgttctccacgatgctcanggttttttctatgctgggcttgctggagcatgcaaagcaagctcatgctggcctgattcatacagggttacctctggacattgtcgggaacacggcactggtggatctatattgcaaatggggtctgatggaagatgcaaggaatgtttttgagaggatgcctatcangaatttgatctcttggaatgctctaatagcaggctacggctatcatggcatggggcaaaaggctattgagatgttcgagga

SEQ ID NO: 60860 - DNA, 368 bp, Oryza sativa
  unsure (1)..(368): unsure at all n locations
agcttttcatgaaaccgagcttgttccggtggaggggagtcgttctgcggaagaagtgtgaaagggtatcattaacatcaggccggatcacatccggcctggtgtgctaatgcctgcaatgaatgatagtcgcgtcttatcatgccaccattataaaattatcgctgttttgcggtacgctatcgccaggttatgccagaatcataaaaaagcaggttgggagtcgtcagggtgcagcacgagacaaaaatggaaaaccagagctggttgaaaaaactcgcacgccgcctggggcctggtcatgtcgttaatctctgctttatcgnggtattgcttttctccaccttgctcacctggcgtgaagtggt

SEQ ID NO: 60861 - DNA, 388 bp, Oryza sativa
  unsure (1)..(388): unsure at all n locations
gcattacggacacttaaaactcaagctgtaatntcagcagtacagatgtataattattgttctgaatcttctagtttcagtattttctacaataaagctctctaccacctatttgtacctatgttaagcttatacagtatgtcactatgctgaatcacattcaaaacaaaatatgagtctgaagcacagttgacagaagcttattcatagaatcaccagttgatgaggcagacagtgattaatcaaaatccagtgcaaaatatgcaccattgagctatgcatattataacggccaaccaaaagtgtctcgcttaaatgaagaatgaataaggttgacagttacagacatatcctcatgtgaaattatgtaccttcaagcattctatga

SEQ ID NO: 60862 - DNA, 440 bp, Oryza sativa
  unsure (1)..(440): unsure at all n locations
agcttcttccanaaatttgaagtaaactgactgcctcgatcagacactattttctttgggacgccatgcaaacacacaattcttgccatatacaattccgccaaccgacttccggaataggttgtctttaccggaatgaaatgagccactttggtaagtctgtcgactatcacccaaatagagtcatggcctgatgacgttctgggtagaccagtgatgaaatccataccaatttcctcccatttccattcaggaatcttcaaaggctgcaacaaaccggcgggtttctgatgttctgccttgactcgctgacaaacatcacatactgctacgtactctgcgatttcacgcttcatacttgcccaccaaaatccttccttgagatccttgtacatcttagtactaccagggtgaatggagtataaggatcatgggcttct

SEQ ID NO: 60863 - DNA, 417 bp, Oryza sativa
taattatataatccgcatatctccatataacagcattatactttggatgatcatatcttggtcatacgaactctgaatcgacccgttcaagtctcctaatgtttgttataacctaaagaaccctgtgctttctttttatgtattggtattgcttctttataggcttgtagctttgcttgtgtgcttcgcgtatcttctgtcgttccggatgttcccgaagcgtggttcgtggtcgtcaccgaatgttcggaatgccgttctctctgagcaaggcaagtcacatcatccttgagcatattgaatcccaatttataaaattattgtgatttaaattaatgcattaccgctttatttaaattcccgcgttatcatctgtttatttatccatgcctatttatcattgttaagacattatta

SEQ ID NO: 60864 - DNA, 409 bp, Oryza sativa
agcttggcttttgctgacctatggtttctttctccatatgctcttgcaggacgggtgagtttatgtattgcaaacaccagaatatgatagatcaatggcgattgaagtggtggtgttgtagtgctaaagaactaattcacatatgcaggcactttgttcctaatcttactattggagctccagtgattcagagcttgaggaagcacaccaagtatggtggtgctcttttactcaccttgttaactcttgttcctatatgtacctataatgctcaccattctgaaattttctagggcatatttggactgccatcttatggtgaccaatccttcggattatgtagaaccattagcaaaagctggtgcctcagggttcacattccatatagaagtatccagagggtaatata

SEQ ID NO: 60865 - DNA, 412 bp, Oryza sativa
tgttgcggcgttacatggtaaaaatgttgtccgggaatgttaatatatgatggcaacaacgtaatgccgcccaaactcttctgcttgtatacacctccatgagaacctacttctcattcaacttcacatgtatgacatgaatggaggcttggaaaatatataccctgccagaagatacaatccaaagctcttgttatacgataacgttggaaataggtatgaatgcaataaagacaacaactcttaaaagcatgatagtgatgataatagtgatatacgcatgatactgtttacagtcagtaggaccaagaaaggaattgcactgatatcatatttgaacttatttgggttgaatagctgatctcgatggtgaacttaatacatccgcattaatttaccacagaaaattgat

SEQ ID NO: 60866 - DNA, 366 bp, Oryza sativa
  unsure (1)..(366): unsure at all n locations
agctntgatgggccggagttacaaataagaccttgttgctagtcatccgaaaaacacagatgggcacaatttgagtttaatttatttgttttgttacaacttgtaaaaaaaaacaatggcgtatttgtgttttaccccgtcgttactagaggtgaagacaacgaaggccgcatcctctcgctctcgctttctatgtgaagttcctgtggtttcgaattttgatacggccggcctgacaagagacattgcttagctattcgtgaataataataactcaactcaatataagggactgaacgttcgatccanatacgacttcaactccgactcctcaccacaaaacaatactcttaagaatacgagtac

SEQ ID NO: 60867 - DNA, 354 bp, Oryza sativa
acttgcagaacaagctgtgcagatatgtcggacactagtttcttgggagggttctcaccatacaggtgcagacttgcgcccttttctggagcttgtaagttattaactttacaagagatatgtgctgcttttaatgaaattattatatagtccaacttacgataccatttgtaccgtggtgcttgcattgtgttgtggcttaaaacaaaattaataaggcatggatttgcaacaatgaattattttttgtgtgtccacgggctctgtatgtcaaaaaaaaaaaaacttgtttgcccttgccttcttgctatgaaatattgtactgtcatgtaactaatgaatcgtcatttacat

SEQ ID NO: 60868 - DNA, 466 bp, Oryza sativa
  unsure (1)..(466): unsure at all n locations
agcttcggtgagcttcccaccactccttgataccacatgcacgcatcgttttggtcaaatgaagctaataacttgaattgctttggcagcctcaaaaccgtcgccgctcgcactgctgccggcgtcgattccgtccatccccggcgacgaaactaccttcggcgggttcgcaagaaattcctctacaattcttcttttggttgcgtcggccgaggaggcgccgttcgccgtcgggatcgccgaaaagtagcgccggccagtgagctcgcctctgctgctgctctccttcccaagcctatgactggtggaccccacttaattaagcctaagaactgttattaggagtagtttaaaacttataaggttaaatctgaaaaagcacttagtatgacatgtgggcccagaacctatattngtaaataagaaaaacaatgagaacacttaataataagtgtattaacacgtg

SEQ ID NO: 60869 - DNA, 442 bp, Oryza sativa
  unsure (1)..(442): unsure at all n locations
cgtgcatgtcctcgttgccatattagctgatcacgcctactcgctgcacgttgntggcatgctgggtggagaatgatgatggcggaaagagtgtgctggcgccaaaattattcgtgcgccagaaagcgttcaactttggcacggatcttgtttgctcgtgccttggcaccggtgaccaaactatctgcggatccttcggcctcgctcgcgcaccggtgaatccgcttactcacacggtcacaatcgagcttgattgtgcccgatcgtcccccgtcgctctatggcggtagatttggcttatatctggaggagagaaagacatggaagagattgagggaagagagaagacggcgcaatttggtaacaacactaatggggtaagtagtggaatatctcctattgccataaattataatgtcttattccattagatgaattgaat

SEQ ID NO: 60870 - DNA, 460 bp, Oryza sativa
  unsure (1)..(460): unsure at all n locations
agctngaagctgtatcctaagtattaggtatctccgtggagtccattctgcatacctttgtgttttgttttatttttgaatcaagctgaacttatacatgctgatttccgagaaaagaacttttacatgctggagtcagttacaaaagttttggtaaaacagatctggcttggttggctctgtgtgttactcacccgttgattcatgctgtctctatttttttagggacatttaactattttatcacttcgaagatgtggcaattaaggattgccactcactgtctatgacatgtgggttctcatgtatctataacacgtggacccttatgtgtctataatatgtgggttcagtggcaaatcctttatcactactcgtaaaagtggtaaatagttgattattccatttttggaaactactccctccgtacttgtaaggaagtcgttttgacagcaacacc

SEQ ID NO: 60871 - DNA, 404 bp, Oryza sativa
ctgaccaagtctgggacaacgtgagtcatgtgccttcgaggcacaattattttgtgaacaattgatatgcaaatctggttctaagcccgcattatgggtggctatttaaataagaaagagcactgtgtttatttttaaatgtcaattgttgcgcaaaatttatgacatactgttgcatgcatcacatgcgcatggttttgattgtcatgtactagcttttttcccaatgtattatgtcactattcagtactacctccgtcccaatataagtacaattgtgggtttgcgtatacaacatttaaccgttcgtgttatttaataaaattatgaaaataatgcaaacttttactctcacatcacctcatgttctatcatgtgatagcaacaaaatactgatcataata

SEQ ID NO: 60872 - DNA, 442 bp, Oryza sativa
  unsure (1)..(442): unsure at all n locations
agcttacattaatctgacagtggcagctgtgtttcttgttttttttttttcatgctctgaagaaacagggcaaatattctggtttgttcaacaactctgttctgcagtgtggcaatggcaacttctctcggcagattgccctgttttttcagaagcagagttatgcaggagccaggagacgtttctccaggtgtcataccatcctaaatactgaaagttttcctagaagaagcatctaaacagtcacacccactattcagatctatggaagttattgaggaacaatttttgttggttcattttctaatagtaaggcctctcctttggaacaaaagaaaagtgaaataaattatgaggttttgtattcgtatgggaaaatttctattagagccctttggagaaaggaccggtctctacaaatntctatagaatggggcaatct

SEQ ID NO: 60873 - DNA, 436 bp, Oryza sativa
taagcttctcagcctgagctcctgagctcagggactctactcttgccttctctgcaacgcgagggaaccggtgccggtgcgcaccccgaacggcgcgggggccacggcggcgagcttcatgactgctggggccaccaacttggcttggcgcatgtacttgcccattggtggcgctgcactcatacttggtgacggtcggtatcgatcatgttcaaccgtcaatattactataataggagagaactagtgatgcttgcaatgcataagtatgttagaataataatattccactagtattaggtttactaaccttttgcagagaatgatcataaagtagaggagaatcgacatcaactcagacgatatatcaatcggacgatatcgagaaccagacttgacttgtgtgtgaataggccaagaactcataattgacacg

SEQ ID NO: 60874 - DNA, 402 bp, Oryza sativa
  unsure (1)..(402): unsure at all n locations
agcttcgggaagaaagctaanaaatatgctcgcctgacgactgctagtttttcggtgggccttgctactgctggttttcctccgaaacatcagctacgataaaccctatataggtgaaatcaaaagctcaacatgctttgaaccatatctataaaataatagcatttgaaaccctcacatgctttaatcataaccatctagtatatattatgtgcatttatatatttacagaattcctgtgtttttcaatcctctgttttacacatgcattcctatcatattcctgtgattntatcatattcctgtgatttttctattcctaagtttttacaatcccgttgtcggtgatatgggcccgggggtatcatggttagagggagcatgctgcccccctatgccacg

SEQ ID NO: 60875 - DNA, 367 bp, Oryza sativa
actcagcttaaggacatgaagaatgttcttgagccagagatcacgagtgggagtgcaaatagcagtatgaccaacataatcaatgtccatacctgagccgctggcagcgtggacctggtcgttgccatggtacttgtcctttatcgccagcttctccatctcgctggtaatgtgatcagtggcggcactgtcaatataccagtttgtgtcaatgctatatgagttgttggttgcagcagtgctcgcaaccttctcttctcctgtgaaagagggatcaaacctcttccaacacttggccaccacgtgaccaattttgccgcatagctggcaagtgggcttgggtttgccgtcaccacggtcgcgcctg

SEQ ID NO: 60876 - DNA, 453 bp, Oryza sativa
  unsure (1)..(453): unsure at all n locations
agcttactgcnaggttcaattttctgaactgcatatgaggtcttttgatctactactacttttggctgtccacaatgacaataaactctgaagaaccagaatcagaaattcagaaccagcactttttgcacttcatttctccaggtcaaggcttgatccggagtccgaacggagccgcttgggctctcggtcacccagatggagcgacatggcgagttcttcctcggaggggttgttcaggttggtgatgctcctcggagcgtcttggtcgtcgcgcacgggcgacataccgacgaagtttgagatgaactggtgctcttccacattgaccaccgtgttggatgcctcctccccttcagttccagaagccgccacgtcatggcgaggcagttgctggatttggatccncaatggctcgaagatctcttcgatcttctcttcccggatggcgac

SEQ ID NO: 60877 - DNA, 422 bp, Oryza sativa
aacacacaatatccgttcagcttggagttggaaaagcgactttccagacggaagtccgatacctaaagggcagaaataagaggttaaaaataagccatgatatatacatagacagagttggaccaagaattatcgaatagagcaactgagcaattccacactaatatggatggatagagataaactagaatatgtcatttcctttgattaaatggcattaaggtgatgtagactacatttatcattattattacactctaaaataaacaatctgagagctatgaacaaaaaagattgtgtaaaacagaaataattcagagcacctcacttctttttttggctcaacaaatatccatacatttgtgcgtacaaactcaagtactaatatacaaagatggaagtggaatcaacttactgaaaca

SEQ ID NO: 60878 - DNA, 355 bp, Oryza sativa
agcttctaggtttaacgttgaaatgcacacaggaaggttaaaaaataactgttgcagtttggaaatgtttttgtgcagatcgaacgcagggatatatgtagagtattctaagtagcattgtggttgtcatggtcaatccaagatattctagtctatgcagttaatagcagtgatcaaaaaggagggcgaacttttctttcctgctgatcaatacactgagaaaaaactacctgtgtctgcgtctcttggcattttcttctgtgaaggattcccatgcactatggtcaagcttgctcaaatcttctagctctgcaatggtaagcaggtattgtgtaagcttcaccagctcttgatc

SEQ ID NO: 60879 - DNA, 447 bp, Oryza sativa
  unsure (1)..(447): unsure at all n locations
tatttagcccatacttgttgacgttttatacaggattacacataccaatgagtgattaattagtatgcctacttcctgttttactcctaataaatatggttttgaggcataccaaatcataacctgctcttggtttgagtggccatctcatgcaaaagtgaagctaccagtcctgagttcgattcttggtggccacatttttttgcatggcactgtggacgcgtgactgttggcatgcatgcactttttttcatgcgttcatgcgcgcagtcgccgggaaagatttttcactcgcgcgctgctaacaaaaattttgccaagtgcgtttgccgccaataactcaaattttggcgctggtttgcagcataatcccctttgccatctccatctatntatgctgtgcaatactagctagtttgacgctccaactccctacatactccatct

SEQ ID NO: 60880 - DNA, 407 bp, Oryza sativa
  unsure (1)..(407): unsure at all n locations
agctntactgccttcatgagaacaacactgatgcatagctgggcggaggagttcgtcaaaggtacgcctggaattattagcttgaatgccctttgtgtaccattggtaacactatactagatcctgtctggttgaacttggcttatgcttgcaaatgcaggattttttagttcatttaccaatagctgatttttttttgtcttgatcattgatgattctgaaacttggaaatgtaactaatctaaaggagatgtaagttctgttttgtgtgagctgacatgttttcaaagttaaacttgttatcgntctgttttgcagagttagttcctgtgaggtggagggaaatgatggtgtttttagcacacaagaaagtgttaatgtatttgactttcgtgtacctgctggca

SEQ ID NO: 60881 - DNA, 290 bp, Oryza sativa
  unsure (1)..(290): unsure at all n locations
ntattagttattactaccgactcatgatttaacaatgaaatttatttgagcaaaattaaaatgagatacgcatctccccagatggatattatctactaaaaaaaatctccccaagatggatgaagtgtattatgttgtcttactcctaataatgtctttcttttaaagtttggagatttgtatttatttgttgaagggattataaaacgggagcaatggacgggttgggtttggttgtttgggcaggccaatggatgttttttgttctaattttttgggataaacaagtg

SEQ ID NO: 60882 - DNA, 381 bp, Oryza sativa
agcttagacgtctccatcatggtgggaccctatcagatgcacatctttgtctggccatgatcggacccaacctttctggcattaatggagatgatggtacttgcaacgccgtgggtcagtcgagttgggcttggatcttctgctcggaattcttttatcgattgagattccatttttcccagcttgggagaaaagagatgataaattattggaaggatttcttgagaaaacctctcttgtagtaatatataggtgggatgcgtatcacgattcgtgatgttgtcgctgggcctgtttgtcggcgactgtttgtgctatgttctataaggaattttgattgcgagtaagcgggtggctttttttctttttttcttaacatat

SEQ ID NO: 60883 - DNA, 454 bp, Oryza sativa
  unsure (1)..(454): unsure at all n locations
gcattacggacactttaaactctgctgtcgtctgtcatttggatcaactcgggttttttctatttgcacgttgggatatcgattctcctgatcctattgttcatctcacggccgatgacgacagtcctcgggaagatgccatactcgacgaacttcaggaggatggacctttacaccgtggctaatgccgtgccgggattgctcgtgcttctcatcgactcacctatctacttcgccaattcaggctacctgcgagagaggtgtgtaaaaagagagtatatgctacagtgcatttgcactgtacaatatctgacaaacatatattgactggagaatctcatgtgtgacagcaaatatgtggtgtggtgttcatgatcatgccgtggatcgancaccatgatgaccggatcaacggcgttggtctggaaagcttgaaatgtgtaatcttggacat

SEQ ID NO: 60884 - DNA, 415 bp, Oryza sativa
  unsure (1)..(415): unsure at all n locations
agctntatcctggagaagatagacaatcaattaagtgtgagcttttaaaagtattacatgctacagttgtgtcaaggacaccataacaaaaggaaatgtggtaaactcaagcatcaatacaactcattccattatactccctctggtcaaaaatatttgtcgttttaggaccagatttggacaaacttttaaaattccgaatacaattttatgtgaataaatttataaagtctaataagttcatgatattatgaaagtactttttgaggcaaatctatgtatatcatttgttttcttttttaaactaagcatttaagaaattattgatggtcagaattttaaaagtttgaccaaatcttgtcctaaatgacanatatnttttttagaacacgcaggagatctgcatatcatttca

SEQ ID NO: 60885 - DNA, 419 bp, Oryza sativa
tcatcaccttccttgctcacacgttcttgctgctgcctgtgattgtggcatatctcccaatgtgtacgtctcatattatttcaggaaagaagcaatctttcacacatggagtgaggagatatatgggttcaggatctcatgatcttacacaacgctgagtgcccaagtttttatgttccaaatccatctaagttaatggtgaaaaagggtcgacgccaaactagacgcatcataaatgatatggatgagtcagaatcacgtgggatgactctacgctgcagcaagtgtgatctgctctgccatacttacaagaaatgcccgaataatgcattagttcctagcggcgcatatgctatttcatcttgacatgcaagtgatggtttgcgaacacctgttaatgaacaacatgcatgcgcgca

SEQ ID NO: 60886 - DNA, 431 bp, Oryza sativa
  unsure (1)..(431): unsure at all n locations
agcttgagattgagcggaacgagcagaatgtgatgtggtttgttaaggagtttgataaccaacatacgctcgaacttgcaaatcctgaccatgatgcttttttaggagttcatcgtgtgatgactgattctaagaaagcccaagcgatcgagcttcgcatgagtggccttaggccctttcaaatcatggaggttatggagaataaccacgatgagtcggaagaggttagttttgtgatgaaggacctttataatttctttactcggtacgagatgaagaatatcaagggtcgtgatgctgaagatgtgttgaaatatctaacaaggaagcaagaagaagatccagaatttttcttcaaatacaccacagatgaggaagggcgtcttatgaatgtgttttgggcagatgttgaatctncgttagactatgct

SEQ ID NO: 60887 - DNA, 432 bp, Oryza sativa
  unsure (1)..(432): unsure at all n locations
tatcatcaattactaagagttntacgatgatcttgatgtatctttatcttatacttaacgatacaatgtttatgctgttatgtccctatactaattataaatggaaagaaactataccaagatgttggtcctcgatccgtgattacatttcgtacatataagtagcgcgtaaatgttcatatggtgctataactggttgatccatttcaacgcttctacaaacttaaatagataggcgaagttagattgatggtaattactaattaataattcagtttattccgcgacactcctacagatttgggcttgaaaagtgaccatatgctgttccttcgaaattgctcgttcattcgatgcttattctcaatccttaattatttactgcaatattccacaaataaatgaacttctctgagtcaactagaagaatgt

SEQ ID NO: 60888 - DNA, 454 bp, Oryza sativa
  unsure (1)..(454): unsure at all n locations
agcttcaatatcaatatctttgcacctcacacatggtttattgcttgngacaattttggagcacgatgcctcgctagggagagagacactattctttaaggtttcgaacttcgcttcaagagagaggtaagctttatccaagccatccactctctcttgaagttgagcgtttgtcacctcaagattagcatgagactctttggtttgcttgtaaagccgtaccaaagcctcatttctctctctctccttagaaagttcactcttgagttcatgagaccactctttctcacgaatgagcaattcctcttgcctctcaagggttgcatattgattctcaattctcccaagcaactcactcaagtgtggtatggattcctttgctatggatttgaacaactcgtcatccataacctcatcctcaacatctttctcctcatcactaataagatcaaca

SEQ ID NO: 60889 - DNA, 444 bp, Oryza sativa
tactgaagctttacacttcacactgcaagttacttataatggatactaccaattctaatctcttttacttttcatctctgcctctcctctctttctttccccaccagcaaaggaagccaatgccagagaaagcgatgtgtcagggttgagcggcggcggacgacacggtggtccatgcggcgacagtaccgggcagcccgagcggcgccagcgccggctccaaatcgatgacggcctcgacctcaaactcctctgcctctccgtcacttccctctcagtccccttctcctctcctccgtcggccattccattctcttctacactgcgcctccccctactccggtcgacacacctgccctactcctcttactgcagctgccgcggcgcatagcggtagatgcgaagtggcgttcgatgcggcagatcgaagtggctcaacaagcg

SEQ ID NO: 60890 - DNA, 454 bp, Oryza sativa
  unsure (1)..(454): unsure at all n locations
agctntcatgacaaggcatttcgaaagccgatacatgtttaccatatgccgacgagaggggtcccagaccaacaacaggttatgtcccagaccatactgtgccaggaagcccaggggtcctccccgacaccaccccggcgaatccacatgtctctcggcatcaaggctcccctgataagctagttactcagccaggggtgtcccattccacccatgtggtcgtacttgtcttatgtttggatgaaattccaaggaatcggtccttaagtgcgagagcgggaaaccgtacacccggtacgttccccggtccgcggttttggaaattcatttagttcgcaagcaccgacccaagtgtcgggttttccaagtcttttgtaaaactccagttntacccaagttgttactcagatnttaagtttgaaggcgaccgtcgatactcgcacagagtgcgcga

SEQ ID NO: 60891 - DNA, 447 bp, Oryza sativa
taagctgaactgaactattatatctcaatctactaatccacttatctatcttaaataaccgtctcgtcatcttttttcttgaatgcaaatcatctcatcatcctaattaattactgacgtgtaacaatgttaatgctcgtttgctttggaatggcggggccggtaacggctcctggcgaatttattgtaagatcgaacctaggaaggcgaccatgtatgccgtgtgctaaagaacagttagttaagtataaaagtggcacgcacaacatgtgttctcattccaaacaaactgtactgtttgagccatacgtggcatggccctcgagctttcgtccgtgcatcgatcagcacaactatatatctagctgtgtgaatagttcctttttaatttttaagatggtgagtaggtaattgctaaattcgaattgaaactatatatctcaatct

SEQ ID NO: 60892 - DNA, 367 bp, Oryza sativa
  unsure (1)..(367): unsure at all n locations
agctntacagtccatcttttcatttatatttatacttattagctaaaatttaaatttttaactttaaatttaaagttgatttaaaggtatttttatcgtagtttattttccagactttgcttttagatcgttaagaacacatctataaaagttgtattcacaaattaatttttgttacaaatatgtcgtttcttttttttcctccaatgtaccaaacgatgggtctattagtttatatgtcttttgactgttgtcgcatttccgtgaaattttcctcggaaaggcatctggtatgggtggacccaggcctttatatcctatctcccaatcgaatgtgcattgcacttatggctctgccgtctatacg

SEQ ID NO: 60893 - DNA, 436 bp, Oryza sativa
  unsure (1)..(436): unsure at all n locations
tctgtcactcaaccccttgcagaaatggcaccgatgttgtgatacgtntgtgccactctctgtacatgttctgggggctgaaagcctggaactgcattgtgttaatctgaagactgaggcttaaatttttactcttgaaaacacttgcagcaagttatgtgcgttttggattgcagccacctgtagcacaagtatgttcaggagaagtggaaaacatgctgaagcccagtgtgtgactagcagaactggagattctttcaactttacagtgaaggggcgtcataagcaaattacaataccgcttattagaacatctatcccggattactcgctttactactcacccctgagcatctatctgatgtaaaatccactccccgaaacaaaaatatctcaaccttgcatatatttacagatcttaccataaataacttat

SEQ ID NO: 60894 - DNA, 392 bp, Oryza sativa
  unsure (1)..(392): unsure at all n locations
agcttgtgaagattccctatcagatgctgctctttntgctgaggctgaagccgttcggctattattctgttcagagatgatacagcctgaagctgcagcacatgctttggtgactgcttcttcaagaggctttgatgatgttgtggtcatactactgcaggtctgatcaaatgatatcagttatatacagccagttacaaagataacattttcttgtgtatatatatatgtgtgtgtttactggttcactttcattttgtcagaatggggttgacgttaattccatggctagggtcctcttgaggtctgttaagcctgcactacatgctaatgtgaatggcactccactggtggcagcagtaatgagccggcaaatntcaactgtgaaactc

SEQ ID NO: 60895 - DNA, 448 bp, Oryza sativa
  unsure (1)..(448): unsure at all n locations
tactaacgctttgtacttcatgtacgctngatggaggcttcatttgcttgtatcatcgattntctcgggattcgcctcgatgcctctttcggaaacaaggaaacccaacaacttgcctgcgcggacgccgaaaacgcacttctccagattcagccttatgcctgctgtgcgcaagctgtcgaatgtctcctgcatgtcgatcgcatggtcgaaagccttgcggctttttacgacaatgtcgtcgacgtaagcttccacattccgccccaactgcttgccaaggaccttgtacaccagcctagcgaaagttgctcctgcgttccttaagccgaaaggcatcctgaggtgacaaaatgtgccgaatggagtgatgaaggatgttttggggacgtcgagcangttcatgtgaatctagtggtaaccggaatatgcatctaagaaactcatg

SEQ ID NO: 60896 - DNA, 407 bp, Oryza sativa
  unsure (1)..(407): unsure at all n locations
agcttccatctggtcaccgtgcgatggcagctntgctatgcgccgttcgatgtgcacaatctgcccgattatgtaagctgggtgccgtggatgctgctccgtgaatagggccactgattcctctgataggtagtagtttgagcagttccggttgattgcttcgtaatgcccagcagggttccgaacaaagaccgcgagctcatgaacttcgaaacggccgaatgatatcttctccttactagcctgttgaacagtattgacaaccgaggatactgtcttgttatttcaatcaacaaaatttaacagactcaacctaacccatagagtaatatgtgcttattattgattagcgcggaatttaaactaaaacaatttcaaagtaattggcttcttatgaattcatttat

SEQ ID NO: 60897 - DNA, 420 bp, Oryza sativa
  unsure (1)..(420): unsure at all n locations
tcttactatctntgatgatagcctatctcgattgtttctttcggcacacttattacttctttgtcttaaacggccactattttaatttctataacaactagatcattttgaaaattagaaattctgttaagttattttcaaaaacatagtattttcttggtgattatgtttcttggctcgtgaaatattcacgtatacttggtgccaaggtgaccacatatgtttcatcgatccgatgaacataactaggggtgggcgttcatgcagactgaaaaatccagtctcggtcttcggtttttcggttagttcggtttttgtaaactcaggaccgaatttcatctaaaaaatctcagaaccgataaattcggtctcggtctcggtctgaaccaatttttccacatccgctggagagtggagatg

SEQ ID NO: 60898 - DNA, 410 bp, Oryza sativa
  unsure (1)..(410): unsure at all n locations
agcttatttcccacagtatgccaccaaaatgatgcagaaccggtacacttattactagcagccttaatcatttgagcattacaaaaatcatactcatcaaattgtttttctactggtagcttccaattaacataagcggcggaatcatacttaccatcaaaaccaggcaatttagattttacccttgcaagatcattatcatgtacctcatatgtgatgcgtgaagaagtcgctatatctcgttgatggtgaagatgttgacgttgagcatgaccatctcgtttccccgtgcgcaatcctaccatggttagtagcaaacaagaaacatacacaaaaatatgcgcgttcctattaactactangtagtggcagcttaaaaatcacacacnactcaagctttaaccatgctc

SEQ ID NO: 60899 - DNA, 428 bp, Oryza sativa
tgtttcttaagaaagataaacaaataaatacatatgatgtgtctgattacttcgtggccccatgaaaatgcagttgcccattcatgataatcaatttgcatagccattggtttaacttcaatttcaagggcagcaaggaagcgttgttcctcatctgtgtcctccctgtcaaggacttgctcctgccaaacaaagcggaataaatcaccaagcatacattctatgcttataaacagggaggaggccaacatgtcagctaccagataggaaattatgaagctcctgtagaaacattccccatctccatgcactgccctaaattctgaatacttgctaacaaggatcagaaaatttgaagaaataattccccgcatacccggtagacaataatggtcaggagcatattccatggataattctgcaccaca

SEQ ID NO: 60900 - DNA, 349 bp, Oryza sativa
  unsure (1)..(349): unsure at all n locations
acgtacaattctgtaattcgtgcttgaaggagcatggaatccagcgtacttctctaactcgtgatgtctattgtcctattcacaagacgaagaatcacgacttcttaagctgcaaggtctttctccgcgccatgaaaacgacgcttcctaaggtccagcagtcatgaacctcccttaaggatacagacaatgaacaaggagcgacgttgacctcggatcgattcattggagtaatcgacatcgatccccacgagccatcagtcctacacttgctcgaagactatggctcgtcatctgacagtacaccacgcgacgtgttngccatcgatgggactagcacgtctgcaca

SEQ ID NO: 60901 - DNA, 436 bp, Oryza sativa
gcttcttcacatatcctatgctactgctgtttgatgggcaacttcgtcatcatagtcgatcatctctgttgctgcttatcatcattattgtcggttgcgtttgtcgtcaccgactattttcttcatcttcatgattggtggatttcgtcatcgtctttgatctgcctcgtctgtcaccgactgattatttcgctgccatggctacacaactttatctctgggcgccttcatcttcattattggctgacctgattgttgccgactggtttcttcatctccacggctgtgcaacttcatcacttttgattggtatcactatcttcactaccaccaatatttttgccacctctggtgggcaatattatctctatattggtcgtcttgtctctatgccaactgtgtcaactaccatcaatggacaattatgattacgaca

SEQ ID NO: 60902 - DNA, 335 bp, Oryza sativa
agcttggagtgctgcggtggtggtggtgttggtggagcatagtgatgcggcggattctggatgtggtggaggaaagcagccatcatgttggcctgctgggcgaggatttgggtgaggatggggttggtgtcaggtggcggtggcggtggcaaaaggggaagtggaagtgggctgtcatggttgttgaggttgctgccttcagggtgactgccctcaccggtagcaacgcttctcctggttgtcaccatctgataacactaggagctgatgatttaaaattaccacccacgactaccataattcttgagcctatttctgctattaaattggctcat

SEQ ID NO: 60903 - DNA, 400 bp, Oryza sativa
  unsure (1)..(400): unsure at all n locations
ctcaagcttcggcgatgtttatcacaaacaacataatctaactggcatataatctcaacggagcacgtcgtgagcttatagcctcatggaaaacaaccttcattttcttagtttattcttatgatattattttctttttccagaacacgaaaatatgcacaccttcaagtacagcgttatcggagttgatatgtggcctatgggattctctgaaaccactatatacatcgtgcaagatcttgtgggcttcaactacaattttgcagccaattttagaactttttctctatccgaaaagtanatattgcctgattcgaatacgtatgcaaagttatggctgttgaagtttggctccggctcagttcccaacgggaataacctacctatttgcgaggattgg

SEQ ID NO: 60904 - DNA, 405 bp, Oryza sativa
  unsure (1)..(405): unsure at all n locations
agctttcaacgcctttatccgtgcgcgcgacgccgatttgccatgcatcagctgcggcgagaccaatccgcctgatctgcatggtggccagtgggattgcggccatttcaagacagtaggtgcttaccctgaactgcgctttgaagaacgcaacgcccataagcagtgcaaatcctgtaatgccggagctggcaagtacaccgccaaagaggcgaccgtggcgcagcaatacgaagctgggttggtcgctcgttacggtcagggatacgtcaactggctcaatggtccccacgaaatgaccaactaccgccgtgaagacttcatccggatccgggatgagtaccgcgacaagctcanagcactgaaacagcgggaggcagcatgataccaatgatattcgatctc

SEQ ID NO: 60905 - DNA, 459 bp, Oryza sativa
  unsure (1)..(459): unsure at all n locations
agctntgtatntccccttgctcttgttctgggccttgtgcacaacattggcactggactgcccaccatcgcccttagacgcggcatctttttcccgagctttctcctcaacatcaagagacgctatcaacccctcaacggagtattcctgtctcttgtgtttgagtgcagtaccgaaacttctccaagatggaggtagttttgcaataatgcacccggccacaaatttgtcgggtaagacacacttaaggagttcgagttccttagccatggtttgtatctcatgagcctgttcgactacagaacggttgtcagccatcttgtagtcatgaaactgctccatgatatacagatcattgctagcatcagtagcaccgaatttagtattcagtgcatcccacaactccttagcgtcngtcatatgcatatacacctcgaccagacgatcgccaagaacgct

SEQ ID NO: 60906 - DNA, 441 bp, Oryza sativa
  unsure (1)..(441): unsure at all n locations
cgacgatcacatcatgatgatacactttgtttaagagttaataccaatccctgtctctgcataactagatcttgcatgagtaaaccactcagccatcacaaaaccgtgatgaatgtacatgttaaccatgctggagctggacagaccaacaaaaaacatgaagtacttgtgaccgggaccagtggtagctgcgagcatgtataaaagccaatgcaagttgttcagatctaatgctgntcactcgagtctctgtacctaatggcatgatatctacagctcgaatagggagaattgcatgggatagacaaggcacatgcattaccaccatcttcactcacatgggcacagccagcgaccactttccagaactgcagtgcatggatagtactatgctactagcaggcaacatcttaaagctgcctgagaatgcagcctaattca

SEQ ID NO: 60907 - DNA, 401 bp, Oryza sativa
agcttgcttctacctgcttatcaccaccatgtctatccatgcatgccccttgcatagacatcacaagatgcctggtaatttagcaaatcaaggataatgtgagtgcatggtcacaaataatggaactcttttcagattccaaatacttcaattataatttccctttttcattaatctatttcatagagcgtgaacatactggagcatgaggttcttagaaaaggacacattaaaactcaaatattcagatacattagtgcattacagttccagattacagccttaatggagacagtaatcaattattcacttggacaatgggagaaattcctttatttttctctcctgttacatagaatactcaaacacacatgcacaccctgagtgcaccccttaataca

SEQ ID NO: 60908 - DNA, 346 bp, Oryza sativa
tgatccaatcaacatcggaatcacgaatagttttgcgactccaatccatagtaccagataccgcgaccatgtccgggggaaaaaaaacaacgggggcagagacgttgggatgaaagcagtgaattcattaccatgggtgaacaccattaattaaaaggccagtagcaataaaaatataaaaaacccaccgtcgctcacgaacaacatttatacaaaactcatataaaatactagcatcggaccgatcaccgctaaatgcgaccggctgccactagaccaacaaattatagccactaaccgaaccggccaaaaccaaaatctgacggcaagcactgcactcaactct

SEQ ID NO: 60909 - DNA, 438 bp, Oryza sativa
  unsure (1)..(438): unsure at all n locations
agcttgtaatcggaatagagagatcaatctccaacaatggtgattgtggacggcaacaaggagctccaccggttaccggatgctgaaaattggtcacgtcaaggttcacctacgaggaagcttaaagttctgagaagaaactggttggtagttagcttttaagaatctaaaaaagctaggtttttcaacttatgtctttcatttctgtgaattctataattgcagtttctcagtttctgagaatctagataaaaaaactgaattgtttgggagagctttagatttctagggaagttgtagctacaacaaactccccaaacaggttcgaagcttcatatcaagttcggtgtccaaattccagcgaggcccatttataanaccatatgaaaggccgatagtgatggacggcgcaacgcccgggtgaataattgcaaagta

SEQ ID NO: 60910 - DNA, 435 bp, Oryza sativa
ctaagctcgataaaacggtggttagcgaattgttattgataccttacgcttgccgagagttagggccttttatgattccatttttaatacatgaccaaaatgaactccgcttctatcatctctttcaaatgatgttccaatatcttcttgtcattgtttccacacttccttttgattttttcttttttttcatcctacctttccattacgaaatttctttcttttcgaagattaagaaagagccgaaatagcttgaaataaataataattgttccgatggaaccttctacatggtataagcataaccttaatgaattaactaaacttctgtttaaattaaaataaaaatagaaaatctaacctcttagcgttctaaggtcaaaatctaatttaaagaaaaaatctgctttatgatccctaatcatataaatgggg

SEQ ID NO: 60911 - DNA, 453 bp, Oryza sativa
  unsure (1)..(453): unsure at all n locations
agcttangaagagtgacataacagctaatgctcgttacagagaagcaacgcatctctgctacctggaggctactgtactgccggtggcaaagcaccgtacgtacagtataaactgaaagttgcgtgtcacctggtagggctagcttctagccttctactactccagttcttttgttgcagtatgtgatccttgttctttcgttgccttggatatcagccagtgtatttccgcatacgatgaattaattagcaagattgctttactcaagccgtcaagcgtccctgtgtccgtgattgttttccgtactaatttgtactccctcagttntattttatattataagttgttttgaattnttcttggtcaaactattntttaagttagatcagtatcatagaannaattagcaatatctaaaacaattaaatttattgaattaacattgaatatat

SEQ ID NO: 60912 - DNA, 401 bp, Oryza sativa
tgggttggagatctctcagcctgttttggaacctgataaaggtctgacatggcaaatgaccaaacggctatgagatcaagaagttcacaagtgagctgatgaatctacaatgcttcattgttgcttgatcatcacctacttgtattagtttcttgagtgatacttctctatgtacagagtaaccgaatagaggccatgctggtgcactgatccacatctaccaccatgtgcagcgtaatggctcaatcatttatcatgatgttttcttttctttttttttctttttttttttgaaacgatcgcggcaagaaccttgccgaatatattagaagagtgaaataaacagttttacattagacgattacaaaccagacggataagcgacatgaatgaaaaacagc

SEQ ID NO: 60913 - DNA, 420 bp, Oryza sativa
  unsure (1)..(420): unsure at all n locations
agcttgttggataacttttcacatcacttgataaatctttgtcccgcatgatgggtacacaaccttcagcgttgtcaccagtgccacagggctccttaaccgaaagagattcctattcggctcctgcagctacaaattttgtgaataatcagccagtgatggctatgtcttctttgatgtcttctgtttcagagcaatctatgagtgaaatgtcaggaaatactggccctgacagaaaagtcacacataacagaagtgtctctgaaccagactttggcagaacccccaaccaggtgcttcttagactggaatgttntcttgatgtggttcatttctcttttctggaaatggaactctcacagggtgcaggattagataatgcacaaagcacatcaggttcanggtagtcacgttttggat

SEQ ID NO: 60914 - DNA, 422 bp, Oryza sativa
  unsure (1)..(422): unsure at all n locations
tactgcaagattgcaacaccgttatctttggtccacagtgattcattaacaaacctatcactggccacaatgtagtagtcactgcttgcattctgatccatggtgatcaaaaatgagtaggactgtcccacatggatgtcaagatttgtgaaattctgcttcattgtgtatgatccctcagtttcaacaagggccaaattgtggttctgaatcctgaagttcaagctcgtcgatatacccacattgtggacacggaaacggtatgtttttcctgttgcggagtttgagcagtcagttaccaaatcatgagaataaacaaaggcaatcattgttcaaagaaattntagttggccctgtcatggaagtgatgatgaactatcactgtcattcatccaacatagcagtgataacacattgtacaa

SEQ ID NO: 60915 - DNA, 414 bp, Oryza sativa
  unsure (1)..(414): unsure at all n locations
agctnttaataatatggccgtgatctgtcattacgtgcgactatctccactatagaaagaataataagaaaggatcaaattttctagtatttactagaaaagggggctttctacatagggatcgtcaaaacaacgattntgccctatcagctgtaggaagaaaggacacttcacgagaatcaaaataggaagaaagaaagtatggcctatactactctatggatagagttctcaaattgatagagaaagcaccgtaaagatcaattagtgaccgactgggtcgatacaactaaaaaaaactgcttacttatcccatgatatggggcaaaatttatgaatccgcttatgtaatagagccgatccactaatggattaagcagcggtgtagtatcagatcccaaagatagtaagttc

SEQ ID NO: 60916 - DNA, 449 bp, Oryza sativa
  unsure (1)..(449): unsure at all n locations
tcttccatagcatacggctttctagatgtatatgacgatctctatacagatggatcttatatgaatcgtatgatgaagtaccacatgagtggatatataggaaaggaatccaaatctgccgaatcgctcatgttatgatcttctacatcctatgtctccgcgttccgtcatctggcttatgttcttcatgtagcattcagatcgaatgactctatgaaattacgtcgatacttctacatattatgggtaacgtaggagacatccctattttcccccgggggtcttaattaccactgcttagctttcaattcgcctctgaccatcaaattaaatgtgaataacccgtcctcctctctttgaaacaaggggcgcttccggttctgtgcgtgcttcaaacaatnttgtcttctccatattaccatatctctagagtcaataattttctatga

SEQ ID NO: 60917 - DNA, 437 bp, Oryza sativa
agcttgtctgcaatttcagatgctcacagtattgtttgtagatgctgaagatatgaacttgacatctggaaaacggaaatttacaagtttgatgggatactcaaatagcaagttagcacaggtatcacagaggtgttagattgctaattagcagttgttccctttgcaacgttaatttccttattgtactttgtattgttttcattctgctttattgcaagggaacaatcaatatctaaactgtccatgcacttttttcatgctatgtaagtctgatttattcttgtttcacttgcagataaaatttagcagcatgcttcacaggatgattccggcagaagctgaaattaatgttatttgtgcctctcctgagattgttcatacaaatgttgtgagttccgtttcccccctgtccatgtgttgcctgtgaaacatgc

SEQ ID NO: 60918 - DNA, 452 bp, Oryza sativa
  unsure (1)..(452): unsure at all n locations
tcacacggagagcangagcagttgctctccactgcatgctcatcctgctgtctaatgatcagctgcagcagggccagatgactttacatcttgtgtagatgacagcgccaagaactctacaacgagtaccttcaggatcatggaactaattaatgacggtgtaaatcataaacagatcgaatccagtgtaatgcacaatcaattattatgaagagtttttcacacaactttaaataataatcagtgactaaaaaaatcagcccatggtatctctcatttggttatgttgatgtccctgcaagtccataaaattgctaagttttactccctccgtttcatattttaagtcgttttgactttttttttctaatcaaacttctttagatttgagtaaatgtatagaanaaattagcaacatctacaacactaaattagtttcattaaatataaca

SEQ ID NO: 60919 - DNA, 444 bp, Oryza sativa
  unsure (1)..(444): unsure at all n locations
agcttgagtcaatcccctataaacaacacattctagcaactctaaaatctcgtttaattaatgggttttatgggatccttggaattccttgtcagaaagctcaaacaacataaattaaccacttcagaaatataggcatctcttaccatagatagatgccaggctataactcatgcacgacgaattattagtcttatatataaaaaataaacatgatacataatgtaactaatccagattcatatcctgtagttgttagatttgtttgttatcggacggatgagaagtactaaagttggtgggtacatatacatacaaattcattatctttcccgccgctcttatagtacgcatcanaatcgtttccttttcccgttcactttggaaattaactaatgtaaccaccaaattaagctttaagtaatcaagtgtcctacacatatg

SEQ ID NO: 60920 - DNA, 442 bp, Oryza sativa
  unsure (1)..(442): unsure at all n locations
tccgctggtctctaataagtctatttggccggtcggcctatgtaattattaagttgttgtaagtcttaagtttctttcatcttagttgtgtttgcgatgtataatcatgcttaagatgaaagtgtgaatctagtgcacatcctgngaactagattcacatgagtatgagttaagaatatttgagaggttgtagatctttagtcatttttgtcatgtctcctaaatgtgtaacacatctggtcaccgccttcgagtggtttgacgggcacatctcatgctgaagttgattggcaggctaatggcttagcaatgtcttcaatattcctctctcgaggcgtcgtatgtttcattatgcttgtttgatgacttaattattcacttcatctctcaaatataatggaagggccgaaaagcctacgataatgtgaaatgaaaggaaaag

SEQ ID NO: 60921 - DNA, 429 bp, Oryza sativa
agcttggcactgatgacttgcatttgttctccatcagtggtctactatgagtgggttgtagcgttgagttgttgtacgtgctgtgaatttgttcggtcgacaacggtagtatttatttttggggagcttggcaatactttctcggcacgatgctttttctttatcgtaacccgtttgagtttttattcctgcttattaaaaatataattggcagccactgtctgccgatttagtttcagaaaaaaaaaagactcgagcaatttgctgccgatcgatctcgatagcatcaactgttcttccgtatatacgatatagcaacaaaattgaaagaagaggttgatttatctagctagctggtaatagtatgcagctggacggaacatgtgaacagggttactgcaactgcaatattgcggtggattttgcaat

SEQ ID NO: 60922 - DNA, 446 bp, Oryza sativa
tagtatgcatcaagtcacgtcatctagaaaacaagaaacattcaatacttcttgccttaatcacaaccatcgatctgtgcattatgtactattaccattccccatcaagcttaacatgcactatctcgtcttagctcaatgagtcccttcaaatatttttagaaaaaaataaataaataactgttgcaccgtgcagggcacataggaagatgcgtctatttgggcatgtgcaatagttattaatagagagcatttagccttattaattaaaaatatttattgatataggagagaggagagataaacatcgtcgcgacaattaacagcgaagaaagtaggaaaaagaaaaaatatatgaaaaaaaggttgtttagacaaattgttagtctttactgtctcactgttgtaaggatatatagtctttaaattaacgtatatcgcttaaa

SEQ ID NO: 60923 - DNA, 455 bp, Oryza sativa
  unsure (1)..(455): unsure at all n locations
atagtttcatttagtacagcaaatgcatattataaatcatatacagtcaccacagttgcaaacatgttatgtataatactaaaaccaacttctctaactctacgtactagataaaatattaaactataaaaggagcaacaaaaagggaaaaacgagttgaatcatggaggacatactatcatgcccaccaagctgagtaacagcctccacgaaacggtcatgcaactcatttgtccaacgtaaccgctgtcttgccgccatattatggttattgttccctccgttactatggacaatagcattgttccctaactccatttgctcatgagcagtangattgccatgagtctgaccactgctggaaataggatttggctgatacattgcatttgctcatcacctgaatttacagcactgganttatccaggaagtaaaacatttaataagatgatat

SEQ ID NO: 60924 - DNA, 445 bp, Oryza sativa
  unsure (1)..(445): unsure at all n locations
agctnggcggngtacgatgagggggtgagccgtggtcgctgggccacgcccgatccaccaatggtcgccctcctcctctccgttgtcccaccgtgccggctattgcccaatggcatgagatgcgggcgtagactatgagcagtataccaccaccgccaatgtttaccgtgcccacagtctcctgatctccttattccttctgccgattgcaatttgtgttcgatttatgtgagttttttcttctttttttttttgatttgtgcgatcttcttttctctctttttcgnttggattctatctctcttttctggggggattccttactagatagcgtccctgtttnttatcgagaatgctaatctgcgaccagtcgcgtcacgcgcggagaggggggcggtggacngcgcgtgattttttgggggaacagttttttttctttctattt

SEQ ID NO: 60925 - DNA, 428 bp, Oryza sativa
  unsure (1)..(428): unsure at all n locations
agcttgctaccagaaagaatgctcagttngatccatattatttccatgttcgntgggctgcccacatagtcaatttggttgttaatgatggcctgcaaccaattcaacctttggtaccaatattaggaatattgtgaagtactttaagaagtctctagcctgtatgtataaatttgtgggtgtgtgcaacacttactcaattaaagttggtagagggttgtctattgatgttaaaacaagttggagttcgacctatcggatgctacagacatgcattgagtatagaaatgcttttcattattatgctgaatcagacaccaaatatgagtggctacctatacaatctgaatgggaatttgttgagaaaattcagctaatcttatgaacaatgtctaatgcaaccacttgcatttcatgatcaacctacc

SEQ ID NO: 60926 - DNA, 322 bp, Oryza sativa
gtcttttttggtctcgaaaaacctatgatctcaccccgtggctgtggacccccgaatttggaaatcggaaatcatttgtgtttattcgtaccaatccctgggatattagttgatacacacatacatagttgaatcacaacatatcacgaatgaattcatgcttaaagagttaaatacttacattacggccaggtatgccattaactatcatagaacaacaccagatgaccaaatattttattggcccggttaacatgccacaagcagtcgaatggtgaacgagacctagaacaagaccgcactccgatcatcttgttggata

SEQ ID NO: 60927 - DNA, 438 bp, Oryza sativa
  unsure (1)..(438): unsure at all n locations
agcttgcaatgcagagccatcccaccgggggcagatcttatggtggagctgtgctggagctacggcgtcgtcgccgattacgctgcttctgcctctcctttctccttgcttgaagcaatgcttgaccgcgtgacacatggcgcggggctgtgttacctgngatgggttgcgtgaaacataatttggtatttgggttgcgtgaagggtgcacaaatcgtgaacaaaatccaacgggccaaaaaaacggccggcaaacaaaaataaatcagcaggcagccagttagcaattcccctatttttttttcttattactacaaaaattgcccgtgcgttgatgaagtctatttaaatcttattagggttatatagtctagttaaggtgaaattcacagtcagaatttgcttggatatactccatccgtcccaaatataagaagt

SEQ ID NO: 60928 - DNA, 403 bp, Oryza sativa
  unsure (1)..(403): unsure at all n locations
ttctgccgtattgaaacggatgcccgtctcccgtatgcttggttcatagccttttaaggttccaccttttaccgtacagatcgtaataccttttatggttctacctcatatatatatatatatatctcttggaagcacgcgtgcggcattgtaacctcacccaatatagtgaagatattttactggctagcgcccgtggctttttctctcctgctttgagagggttttccacgttaaatctcatgtcttctgtgattgatctgtattgttctttatcgtttatttgcctatcgtttcctaacataaatgacaattntgaataactaatgtaacatatttacgtatcatcagttataaatcatcaatttatcattatataatgatatcatgatattatgatatc

SEQ ID NO: 60929 - DNA, 455 bp, Oryza sativa
  unsure (1)..(455): unsure at all n locations
agcttaagtgattcatataacaaatataatgttaatgtgaggaaacaataaatagtgtaacaaatcaattcacaaacttacaagagatattggcttcacaaagttgtcagccagattggactgcagttgaattgcttcctttgcaaggaaggatgagctagatgatttagtgcttctatcaaggggcctttcaccaagaatctttccacgattttcagcagtcaacttgtcagaagacttggattgcacagtatcaagcttttgctggtcaatatatttctgctgatactcccataacttccttgcatagtagctacagccatctccttcattgaggaaattaaactgtgtatttggtttgcttttctcttntgaaaaatcctcaatatgtttcccacaacgaagcaccatagcggcacaaccctcaatcaataatctcacgctagtatcttctg

SEQ ID NO: 60930 - DNA, 388 bp, Oryza sativa
ttatcttactgcttgcccgcccttctcagtcatggtctctttattctcagtgaatgagattgttggaacttgaacctatttcacgagctattgcaccaaacttgaggtatgttccttctaaaatcgagcaaacatatcggataattcaccacgacgacataaggtacctgacatggttattacgaaccatgacaactatgctttcattgacaatgacgatgtgatactggcataaccataacaatgattccgatgtctcaaagcctaacacatattatctctagtatggtttgacgattgtggaaaacctatttatcataactgaagaattaatatgaattcttgcaatttgttcactgcaatcaaattgtgtgttgattattatttt

SEQ ID NO: 60931 - DNA, 422 bp, Oryza sativa
  unsure (1)..(422): unsure at all n locations
agctttccgtgaaggcatgtgcttcatgatggatcgtggnggngaccgtattggctatgtccagttccctcaacggtttgagggcattgatccatcagatcgatatgctaaccacaacactgtcttcttcgatgtcaacatgcgtgcacttgatggtatcatgggaccagtctacgtcggcactggatgtcttttccgtcgcatcgctttgtatggatttgacccaccgcgctccaaggaacatagtggttgctgcagctgttgcttcccccagaggcgcaaggttaaaacttccacagttgcatctgaagagagagcaggcttgagaatggcagattctgatgatgaggaaatgaacatgtcacaatttcccaagaagttcggtaattcaaacttcctcatcaactctatcccaattgctg

SEQ ID NO: 60932 - DNA, 460 bp, Oryza sativa
ctaagcttagaatgaacaggaaagaccaagaacgttatttatcttatatatatcgatctaatgcaaagttccaaactaatcaaatgataaactgcttggcaacagtatagtcgaccattgtcctcctaggacatgctctaaactggccatacaactcctgttgtcaaaacaactttattagacaaacactacaaacaattggtcaacaaccagaggtggcaatttatcgctagatgcacacgatgaccgagactgggtcaacacccaagtcaagctgttggcgctatagtgaagtgggaatcatgcctattcacagcatctacccttgggcttatccctctagatttgcctcctcttttccggtgtcctcgcaagacatcaggttccaaataatattgagaaaatttgtgcacaccaacggcaaccatacgaacagtgtcattccaccatatgaaaaaca

SEQ ID NO: 60933 - DNA, 351 bp, Oryza sativa
  unsure (1)..(351): unsure at all n locations
agcttgatgatgtatgcttgcacactntatatgtttttacgctnttctctggtcaagaacttaggataaaccgaactgatatgcaaagtttccttcaacagtgtaattttcagtacatgctccttctcacatttcttctaaataaaatgctgatatcacaaactaagcttattaaatcatttagaatcttgaattacatctgctgcaaaactatccacaaataaatatcaactttattggcggtcaaggcaggtcgaatttaactggacaaaaattatagctttgatacacagttaaaaggctgaaggtaaaagcaagaggtcaactgagactcttgtattaatcctgttc

SEQ ID NO: 60934 - DNA, 473 bp, Oryza sativa
gcattaccggaccttatatactaagcttcggatggcttctccttccttccgtcatgcaatgctgtttcactacaatggaacattcagcttgttgagattgcacttgacaaggaaaaaccgaactgctcttcagctgacgagaacaatctgtagcagttatgttccatgcggttcatccttatgggggctgaatgcaagaacatggcacaactttggggcatcctccgcacacaggttaacttttataacactatgtgatttccaggagcaacatcatgtaaaattgcccgtacaaaatattctcaagtttaaccatggattgtatttgttggacaagcttgttaaacgaatattcaccaaaccaatagttatgactgaatattacacatctctacacgggatgttccaacagaacttaatcgaacatgttttcctgtagatcaatgagatgataatcatcagacattgcatgt

SEQ ID NO: 60935 - DNA, 424 bp, Oryza sativa
  unsure (1)..(424): unsure at all n locations
agcttattccgtcatctttcaaacgcatctggtctcatatccaaattcatttcgagtcaacgaaaattgtcaaaaatagacagtgctgttgttgaaatcgaacttgggcctttggccttataatagactagacccatctcagaagtgactctctccacctccacgaattactccctcctttcataatataagactttctaccaatacccacattcatatagatgttaatgaatccagaatatatgtgtctaggctcattaacatctatatgaatgtgggaaatgctagaaagtcttctattatgaaacggagggagtagcacttaaccctagctctattttcctctataaatatctatgtacaccttctagaacattaggtttngttgagatgaattttgccaagtgccattcaccttgtctct

SEQ ID NO: 60936 - DNA, 256 bp, Oryza sativa
tgactgtcctgtgatgcttacgcccgaacttgccgaccaattcttcgtggcgaatccctttggtgaatgcggcgatgataacgtcgtcggtgatgtcggagatcttgttacgttggtcataatatcgccggatgtaatctcgaatggattctccggacttctgaacaacgttgtataggtcgaattgtgtgccgggacgctctgaagtgccttggagctgtggatcaagctgtttcatttttcttcccaccatcca

SEQ ID NO: 60937 - DNA, 356 bp, Oryza sativa
agcttatctcgatcgagtcggcttcaaaccactcggacgagatcccatctatttcaacaccaccagatcaagatgatggggcctactcgccaatcctgatgaaactccccgacgacttggctgccgtcttcactacaagggcgtcttctccccgtaggcctatgcggaagtcggcttcaacaccgaccttgcctagctccagggaagtcggcgtcatactccggccactcggcacggtttcgacagatcaactggaaggctacttcggctcccccggcgtcgactcacgaccaacagagatcgtggagtacgacgaattcggctaccgctacgacaaccgtgacctcgacgacttc

SEQ ID NO: 60938 - DNA, 420 bp, Oryza sativa
  unsure (1)..(420): unsure at all n locations
actcaactgacagacggccgataaacaggttagtatctccttgtcaatcttcttcangaccggagaatcatccactaaccgccttgcgatagctgcactactgtttaccatgtcatcaaaatgtgattcatcaagtacaagtggctcatgccctggatgatcatcccacacaaattatcgtatgtccccgttgacagttgtgtttctgaacttggaagaattgcaaataacagtctggaagtaagaatccatggagtaagctgtgttggcgaagtacatcagtagtttgcggggaatgttatcccaaccatgaacacagtgttcggtgaagttcctacttataattacccatggagaacctacataacagaaataaaccagatatatcatatgtgagcctgagtagaaaatcgtgaggca

SEQ ID NO: 60939 - DNA, 399 bp, Oryza sativa
  unsure (1)..(399): unsure at all n locations
agcttcccttaacctaactaattcatcttattgccacacaatgattgtgttggtttgttaatgatgaacagatcatgatgtcccagggcaacgtgatcttggagaagagaataaaaaaggacgtccattgaacggattggacctaactgacgtaccctatagccgtagattagatcgtcctttgtcagattttccacaagatagtgaattaaaaaattaggaacatatcattggggttgaaacacctttgaataattattggaaatttgaaacattaaggtgtgcaagctgacttctggatacaatgtgccatttcttctacttgtgtagattttatcacttgacgcgtgcatgttttagacaaagggagcttangatgaacataagtccacataaaac

SEQ ID NO: 60940 - DNA, 436 bp, Oryza sativa
  unsure (1)..(436): unsure at all n locations
ntcttctatgatagccttgagcaccagganttgaatttttgtttatttgtttcattggtccttatgctccagagctgtatggtgtctgagacctgttgaataatgcattgtagactgtcaaactgtctttctaacacccggttgttgcgtgctttccatatagtatacgcgcaagcagcaaaccaaactggctcaattcctttcaatgtttgatttctgtccataattgcctggaggaaggctgaggtagaatctgagctgttggctagctgtagtaaagtgtaatttatttgtaactaggtgtttctgcaatcaagaattttacanttgagtttgagctatcctttctgccctttaatcacatatagatcgatgttattcatattaactagaaatatgggtattgcggatttgctatcatctgaactatgatatg

SEQ ID NO: 60941 - DNA, 428 bp, Oryza sativa
agcttctggcacctcagttcagcagaaaatatagatatatccaaacaaggaagataaatagcagctaattgattctattccatattttaatatggaactaaacagaacgacaagttagaattaggcatgctacaatccaaacaagcaaagctgtaaccagactttatccagagcaatgctatgttgaagatagtcacctcgtcgagtgtttgattcggagttcacagagccaagtactgggaaatcatccataattagggtgaaccccttctcaggcattttaagcccctacatagccaaaatggatgattagatatatacattaggttacttatcaccaggaggtatgggtggaaaacataccccgtttctggtattagttcttaatggtgctttcagaaattgagtgaaagaatctggaaagcgag

SEQ ID NO: 60942 - DNA, 233 bp, Oryza sativa
gattgggaagctacagtatttagagatccttgtcattatggtgacaaatgtgacgaaaccgcctacaattgtctgccagcttgatcgaatggcttacatacttggtggcaacaaaccaacaaggaacgcattggagctccctgcttaagatgtcaataaaacaatcaagtctgcttggtgaaaagatacaaacggatccagtcgctaaaaaacactgaaaaacctgcgcattc

SEQ ID NO: 60943 - DNA, 436 bp, Oryza sativa
ctaagctatgccatttcatccatcgggatttatgcctgtatacctgtactctttttcattaacccttgtttggcaagctgctgtaaagtttcgatgaaatctttactactctgtctgccaaattgaatcatgtattcattctaaaaaaattcgaaaaatggataagagccgagaagtcttatattatgaaccttcgattctaaaattcaaattcttctacattgaatgtatagctgcagcaataaatttggatcagcctttctactccctgcatctacgttgagcaggtatctttatgtaaccgcacaatacctaacctaatttattgataagagtgcttattataaatcaattcttgcaatttttttcaaaaattgatttttgcattgttaggtgtcaaaataaacacaacccatcctagtggatttgtgtggta

SEQ ID NO: 60944 - DNA, 389 bp, Oryza sativa
  unsure (1)..(389): unsure at all n locations
agctntattcaaaccagcgccaacacgactatcttctatgagtgagaaagaggaacatactctagcccatattggtacttcatacttccagagtggaccaagctaagacaatgcgtgcggcccatgctgacttagagaaaaaaatatagcagagttttttttagctcacagggcgactggccccacatataggattggtcctttctagtattacttttccacctgccgctcatcttaacaaatcataatcatatattatttgatttttttacctgattactcatctcagctaattacaactattccacgtttaattttatatcttttattaatctccataaaatttataatcggttatattttggccgaataagtagagaccgaatcgt

SEQ ID NO: 60945 - DNA, 387 bp, Oryza sativa
  unsure (1)..(387): unsure at all n locations
tcgctatatgccatgccaaaaagaaaaagaacactagaacatctctataacaaaagtttgacagatatatatatcttaatggctattaatctggatgttagaccaccacccatgctccgaacttgattaattattcgaataaacaacagacgcaccaaggatgaaaagttgttcggttcattttgtcttactgagattagaactagtactacctgtcccatatctccaaaggccaaaaatatatatatgcatgccaatcagccactttgccaaacaaattaattaactaattaagcggtttagttcgtacatgagataatggaaggaaattaaggtgccgtattattaatccatgcagtctngcatgcatatacgcatggcataaat

SEQ ID NO: 60946 - DNA, 410 bp, Oryza sativa
agcttacaaaataggagaggaaagctactatagccatacgcgaactcttccgaaggcttccagactttagatttctactgtattcctactccactagctagataacactatactaacttgagagaatatgagagagctcttgcttgaggtgtgtgagtgaagtgagaaagtgaagtccttatatagaggtagttacactggtggagaaaccatctttcgtcggtcggccgatttccacaatagtcccggatgcaataaaaaccggggctaaagatgatctttagtcccgggtcataagggtaatgggcatatttgatctttagtcccggtttgtgttaccaaccgggactaaagatcatctttagtcccggttcgaatgctgtcagggcctgtcatgcccccccgggatc

SEQ ID NO: 60947 - DNA, 451 bp, Oryza sativa
tgcttgtccctgatgtaaactccatgccatctgtctattcttttccacttcaaaacattcagcccttcatatctggcaccataagtcaacagcaacgcttgcaatctggatcatcatcccatgttgaatcttttggcccaccatatgtcccaagggaacaacctgaaccaatatgtggtacaaaaagtgtgcaagttccagctggtcgctctgtggtcgttaatgaaagggtttacacatgcaggcactgtcctaatgccacatttagtacaccacaagcatatggtggtcacatgagtgcccatagcataaaggacaagataaacatgtcctcatgtccatcttccagaagctgattatattgagatgacaaaatcttttgcgagctattaaatggaaggaaactatatagctgatggccaaatgaagaaagctactagtctatgcaata

SEQ ID NO: 60948 - DNA, 445 bp, Oryza sativa
  unsure (1)..(445): unsure at all n locations
agcttgtttccatagtgattgtcgttntgagcttaattnggcgaatgttacgtagataaaacctcttgcttaatcccttggcagaatgttggttgcaggaatgcatttgctcacgatcttttccaaaaccgaacatttactgtactttccgaggcttcatttattcttcttctcgatgagttgttcatcttcgaggatggttagtttccaagttcttcgtcgtatagaaaatgcaactcctttatctcatcttaaaatccgaaattaccttaaccaataggagttctctgcttcttggatttgttactccatatattactcaataatatgatgtttataggtatatctacttcttattatgcacctgtagctttcacttgatgtgtcgtctcaaaatnggctctacctatggcttttgatggcatgaagggttttatatatatat

SEQ ID NO: 60949 - DNA, 443 bp, Oryza sativa
  unsure (1)..(443): unsure at all n locations
tcctgtgagccacaaggtgctatggcatgtctctcttaatctctntgctcggatcgcaaacgcattgccacatgcatgtgcagtccttgagtatcccatctgccgacgagttcccggccatctccgtccaccgccggctgggatgaatagagaaacggaatcacaaagaccttatctgcattttctcctttaaccccgacctcattctgtccgccgtttgacgcatgcgagctcgagatcgagctcagccatggctctgctctgtctctgctcgtttggagaagaagacaggacctctttgtaataaatataaaagctcaaggntcgagttgcaaaagcacagttcaaacggggaaattgtgaaactaaatataggcaaacttcaaaatgcataactaattcatcttaaatcattttcgactgaacaaattttgtaagctata

SEQ ID NO: 60950 - DNA, 450 bp, Oryza sativa
  unsure (1)..(450): unsure at all n locations
actttaactgcatcaaaccaatggcattcgatntactcaccgcgttcggattaccacccgattcgatagcgataatcgccgtgatcaattgtggatcgacgccccatgctgcaccggctntctggcttattggcatccactgcatcgcacgttgcaccggaactttcgcgttccacggcgggttcgtatagtcatgctttgatgaacaacccgctaataacacaatcaaaaaggcaaaccatctcaatttcacttcttctatccttatagcctggaatcgccgttgaggtgacaacggcacacctaagcggcatgatatacatttcgtttctgttgtcagcaaggaattgccatgtctctgtntcacttaattgccccatcgggttactgcattaaacagcacgccgcgctgcgtgtatccatcgccttaccgacgcggtgcatcaagtc

SEQ ID NO: 60951 - DNA, 403 bp, Oryza sativa
agcttgcacgcaatcggattagacaggttcgggctgctatagagcgtaacaccctactcctgtgtttgggattatggatgagttttacaaagatttcttcactctagaaagcgcactcgcttcctccctcctggagtttaagttttttctccctctctcccctttttctttcttttttttcttgtctcagtgggcagggtcctccttttatagctcaaggggataccacatgcgccgcctctacctaccctctatcggagggggatcccaattcacttttcctgtgctttaaaccgtgccttctccccgaagcttagcaacaaccggttctcgagtggaaccaggcgccgccccccgcctgacacgggggacagccctgtcatttcctcatatatgaacgatg

SEQ ID NO: 60952 - DNA, 411 bp, Oryza sativa
tgatattggaataagaaatttcaaagtattgggcatacgccatgcgcacactgctttaacagatgtgcttaagtccctataagacacatggtttcaccacacctgtaaatatatggcatatgtggtgtaaaatccgagtaaataaactcataaaggatttaccaaccgcctaaaaaatggccacaatatataattagcctaagtcataatattggtcaataaaaatgcacacttacgtggcgaaaagcgatgatattgtatccaatcaattgcttaaaaacccaaacagcaccgtgacttatatataaaaaagtcagcgggacagctatataaagctttaactgttgacaccttttttgatgcattgtaccaactcctaaaaagtaaataactgcggtataaaaggatttt

SEQ ID NO: 60953 - DNA, 394 bp, Oryza sativa
agcttttctgaacatgtttctatatcaagtttgaaactacagaagaaactcaagtagttccaggagaaagtaatatcacatggtatggttctattggaccagattcagactagaattgagaacatggaaaaggctcaactaaatgaagtcatcaatgttaagttatacttgtatgtagctatgtagtgtacagtaagtgctatctacccttttcacaaaaccatgcttatggagactacattaggtaaaatcgccactcactcttggcaagattatgtgctaaaaacagaggtaccacccaaaagataatcgattttcaaaatcactgaacaaaggtaagccgaggtcaccaagcatggttaaacaatccccaaaagacgaacaacatctgcaa

SEQ ID NO: 60954 - DNA, 334 bp, Oryza sativa
atattataattattataaaaataagagaaaatattgatcatgcaactgcaacggaattataactactgaagattagaggatgggaagcattttttttctttaaacaacaggaacgccaatcatgtagacatacaaatgaaattctaaaccaacaaccaaggaataacgatcaaccacatactaatgagggaatagaaatgcagtgcatgtataacgaaggacagcaacaatggagataagacacacaattaataatgttaacggatctgggcggatgctcggcaggttgtgaagagcacatacaccacataaatgaggagacatacaaaggaag

SEQ ID NO: 60955 - DNA, 448 bp, Oryza sativa
  unsure (1)..(448): unsure at all n locations
agcttggccatgtatgcagctctcgtgcactaactgcctggcgtgaatgccatcaatctgtcatcatacttgaactattttgttagctgttagccatagcaatgcgtgtttgtactaacagatcatatttggacaggagacatggagacaacacgtcactggaggaaagcttcgggaaattaccgaggaagccaatgcttttgcaattggaaacaaggctttagctgctctctttgttcatacgccagctggtgaattgcaacgccagatccgagcatggcttgcagagaactttgagttnttatctgtaactggtggagatgttgctggagcttccgggcaacttgaattattatcaactgctattatggatggatggatggctggccttggtactgcgagacccccctcaactgatgctttgggtcaactgttatccgagtacaca

SEQ ID NO: 60956 - DNA, 404 bp, Oryza sativa
  unsure (1)..(404): unsure at all n locations
tcagagtgtatatgatnagaaatgtggagtactattttagtctccttgagtccatcatttatcaaaactaatgatcacactcgagttagttgatcaggcagagctcctgccatcccctttcccttaaaaaaccactaatgataatgaagattaagttaatgtttctgcatctttagtttacaaacaatgtgtgcccatcattgaggagtacaaaagcatccgaaagcgtccctcacactctagaaagagtggaagactcaagataaaagaaaggtttgtaacaatcgtacttgtgttaatatctttgtttggcacgaagatttacaaccgacggaatgaaagcatattatttcctatgtacttgatagatccgatcgttaatgactgacaattgacaaatcatt

SEQ ID NO: 60957 - DNA, 422 bp, Oryza sativa
  unsure (1)..(422): unsure at all n locations
agctntgactntgatgcatgtgcttcgttgctttctatccttttggntcttctattagagcatttgttcataacgatggctcgcttttcgttgacaagatggactatgcgttgatttgtttagacttcagatatgggcttgacaccaattcggtatgccatggcatccctgtcgtacttgaaagcttgcttttggtacttatgcataagtagaaaacggacaatcgggtcttttctttcttgcaaataaaggtgtcattatacttgtgaaattttctgctaaaggggaacacctagtaccagttacaaaccattgatttgagatgacctatgaaaatatgaggtctgaattttagtgctgagtgtggttctgtttcttttgtcagcttgatgaagtgcagcgggctattaaatcaaattata

SEQ ID NO: 60958 - DNA, 227 bp, Oryza sativa
taaaatttggtgttaattattaactctgcaataatgtgtttgactcctctatttctgattgacttgtggtctgttctctgaatttctacattattacagtaatgtgtctgcaactctacattgtggttatctaatttgaattgcggtgtgctgcattagaaaggtcctcacagtgactctaacttgttggttaatttttacagatcaatctcattcgacagaaatgt

SEQ ID NO: 60959 - DNA, 451 bp, Oryza sativa
atcctcttagtcacctgcggcatgcaagctcgcgcataatagcctcagagataatttcattctacccgattggttcaattattcatctagtttccgatgttgttgttgatgatgttttagtagcttcgggtaggtagatgtaaacaggtaccttcgatgcttgaacttattagcgatttatctattagcagagcttccttttctaagtctgatctctatggaatgaaccagctttttagttaactcaataaatcgtatataaataaagcaatctttatgttctggcgggcggaggacttgaaatcctctttagctttgcgcgttggactctaaatcctatgcaacttgaataactccattccaatccccaacacttttcctcagcatctgctcttgtattcccttacgatctttgcacattagaataaatatttggaaaaaagcatgtatc

SEQ ID NO: 60960 - DNA, 69 bp, Oryza sativa
agctctgagtgtggcagcggcgttgagtctatctcgagtctttttgagattatttttgtgggattttgg

SEQ ID NO: 60961 - DNA, 453 bp, Oryza sativa
aaaactaactttggacatggttcaagcagtagcccagaaaatattcttggtgctattgatgctatgcccagttaaataatagtgagtaactgagtagtgacacttgagcatgttttgtatatgccatttgttgttcaattagattgactgggcttttctgcataggttgggagcaactctccaagatggagcgatacgtacagcttcatctcacgtgacaacgaagccgatgaaactattgcatttctctttggtgacatgggcacttatataccatataacacctatgtccgcacgcaagatgaaagcttgtcgactgttaagtggatacttcgtgatattcaagcccttggagataagacctgatttatttcacacattgtggacatcatctatgctagatgttatgcgtgggtatgggatcactgtttcaaacagattgagcctattgct

SEQ ID NO: 60962 - DNA, 453 bp, Oryza sativa
agcttagtctagttgtgcacgaaatatacctcttgttctggttcaagttttcctatgaaaggcggaaaatacaaaaataaagaaaaggacattggagggaactcgtttttttgataataaactggaaggaatacatgggtgaagagtgatccaggaattctggtaatgtataagtacacagctatgtaagatgatgtgaatcgaagcagcctaaatgtatcaaaaattcattcttgcagaattccgtgtaactttattgtcatcattcactttgatcgctgaataacaacatcgatatatgagtacacaagaagaaattaacagtacttgccacgatttgcattgtacaagaaaacaaagacaaaatccttataaaaatcatcattttatttcgagagacttgatatttatgggattatagtgcctactatatctgcaacagatttgagcaat

SEQ ID NO: 60963 - DNA, 190 bp, Oryza sativa
  unsure (1)..(190): unsure at all n locations
agcttatatcccttcgtagttcgttgttgttttctaaagatacttcagcgaagtgtgcgcgaaatntctgtcacagacaagttcttgctgtcgggattcgcgtgttccaccatttatacagtattaagtctaatacttctccctccgtttcacaatgtaagtcattttagcatttcacacattcatattg

SEQ ID NO: 60964 - DNA, 355 bp, Oryza sativa
  unsure (1)..(355): unsure at all n locations
agcttgtaaacaatctcatgtctattgttctattntgnttcaacaatcataatggaaagattagcaagattttttacttttctaaacctttcatctatacgcatctcagtgaggaagagtttcaatgctgatggaagatggttcatctctgtgcttgagaaatcattaggataaaaccgcgcaagcttaatcaacttatctttgtcccaactagcaaagttatctataggactaaatgcagccatacaaaggagcatatctgtgtttacctcatcaaaccgttcattaagctcttgtagttgtctatcaatgacacttataaacatgtcaccatggagcgatgctattcttgatt

SEQ ID NO: 60965 - DNA, 370 bp, Oryza sativa
ttggctataaactatccaaccacccatcacctaatgttgcgagaatctaaatattgagctcactcctaagctcgcacaatcttttctcatctaaatgcttggtgaaaatgtcggccaatatgctctctgctctcacatgtgtaaagcaaatgtctcctttggtctcatgatctctcaataagtggtggcgaatatctatgtgtttggttcgagaatggtgaacgggattattggctatattgatggcactctcattgtcacatatgaaggggatcttggtgaagatgttaccaaaggcttttacggtttgtttcatcccaaggagttggatcaacataaaccggggcgacatttcaatttggcggtggat

SEQ ID NO: 60966 - DNA, 397 bp, Oryza sativa
  unsure (1)..(397): unsure at all n locations
agcttgtgtcatattgagttccctgatactatcctttattctcaaatgttaaaaggaagagtaaattcacagaactgtaattttttgggttaaaactatcacttcgccaactaagaaaccattattccattagccaatccccataccttggagccaatcacagggcagtagtcatcttcagctggtccttgcggttgctgggaagccccgccccctccctcgctgaggcgcctcttctcctcccgggacctgcggaggattctcccacccccatggcgctaaaaccaacacggaaaccgcaagtcagaaactccaagttcgtcacatcgcccatacgcgcgcacggcgaaccaaccatggctagtgactgacgagatgacgaanatcttaccctgat

SEQ ID NO: 60967 - DNA, 449 bp, Oryza sativa
taatatattctttaaggcaatttaatcagtatggtggtatcatatggtggggagtagcttcatgtgacaagcataggcgcatgcagcctatctacttctcgtggcacaaggccagcacatacacatgcaagtgatagcgagttgctttctcgtgcaaacgccaatggcgattcgatcggaccgatcggtcacgcgtgagcagcatgcatgcatccatgcacgccacgagacgatctggccgctcgtgacgcccggccggcgacgagaaaaagaaaagcttcttgttgggtaggtaatcactccatcctagattatgttcaatcttggcttcttccatttatctgatatgcaattgatcatttgatcatcgtgtagtgataagagatccgtggttgtatttgtttacaattatctcaaaatacgtttatttgtaagtaattattgtatag

SEQ ID NO: 60968 - DNA, 405 bp, Oryza sativa
  unsure (1)..(405): unsure at all n locations
agcttgtacagtttgagaaggggttttntgagatataagaagaatctacttcaaccgatatgcccttatgcacggccatacataacatagaaatcacacgtggaagttcgagcctctctcaccccaactttttttccgcttaatttttttgcaactccttaatccttctgtgacacaaattacatttttattttccttttctccaacttcttaatccttttatgataaaaattaattccacttaatttggaaatccttctgtgacacaaattacatttttgttttccttttctgcaacttcttaatccttttctgataaaaaatattggccagtttgagattggtattgaactgctccgatttgagaaataagtttggtatcgagcttgtcccttgcaaatcacc

SEQ ID NO: 60969 - DNA, 437 bp, Oryza sativa
  unsure (1)..(437): unsure at all n locations
nggaagtctcccgacgtggctgatccctacgggctgggtgacccgggttagtaatgtcgtgtgggtaaagtgtacccccctctgcagaggtcattgaactgttcgaatatccgtgcccacggtcatgggcggatgtgaggtgattcctagcgtagttttgtctgactactgcttatgaaattgctgttgtgaaactgggttcgatgtttgaaaaatcagcagctgacgggatcagctatgcccgggtggccgtttgaaaagttgttggcccgggtggccgtttgaaaagctgttggccgggtgccaaccctatttcaagatctaaagactgatacattgcacatactccgaccggacgagacgcactgtctcatccgtgtcgtttgagaagcactcacttagactttttagaaaagagttcaaacaatatcaattac

SEQ ID NO: 60970 - DNA, 330 bp, Oryza sativa
  unsure (1)..(330): unsure at all n locations
agctttntagatacatggcagtactgatcacaactagttngacattacaaaaataagagaaaaacagttactctgagttgtgcaatcagactttaccagtttgcattgtacattataagcccctaataaaactatttattatgcgatacaacaatagatccatcatgaagaaaacaagaaacatgaaatttgcatctgtcatgtggggacgccactaccagcggaggaacaagatggacatggtgcaggcgcatgcgcagcaagccacatgaatcaaggagtgcgaatntggaaagaatcatgcaaagaaagtattaattaggagagaat

SEQ ID NO: 60971 - DNA, 253 bp, Oryza sativa
  unsure (1)..(253): unsure at all n locations
tgagcattaggaaaacagctgaacccatcataacaaaggatctttcttctatacccctattgttaaatattactttcgctanaactatacatctttctcttaccataacctcatcagcacataatatatttcctaccctacatcctctctctctaaattaagggctatttggctggaacccataaaatcgtgaagggtacaaacacagctctgaaacatgatgccaaagttatgttcacaactgttctatagc

SEQ ID NO: 60972 - DNA, 346 bp, Oryza sativa
  unsure (1)..(346): unsure at all n locations
cgcataaagtaattatctcgtcctccgctgccattttctaaattttggcatatctctaggaatcctggaatctgtgaaatacgtttccttttaccattagtacattagtttctactatgtttttttgtaatcacaaggtaaacaagtttgtaatttgattaaaatttgatgacaacacacacatgttattcctttacttatgaatagcaaaatgaataactagaagcaagctgttgaggatctccttgcagaatagctatcttagaggtgcttattttacttcctctaanaagaagatcatgcttattttgtgngaaatctatttttaatctaaatttgggacatt

SEQ ID NO: 60973 - DNA, 467 bp, Oryza sativa
  unsure (1)..(467): unsure at all n locations
tgcttcttcgcttcttcctgctgaagacgaaagaggttttgctctgtcagaacagtcctctctctggagtccggccacaccaaggtgagatgcctccttctcttcttctttcttctttgaagcgtgtacaaaagagagatgtacagcgaatattggctctttgtatcctaatatatctcaaaagatataccatatgaattgccaatcttattctcgttctcctcatttttcttctatatatgttatatgttntgagttgaaaagctgcttcttcctctctctcctgctgctaccttgncttgggtgagttgcattggcatctcactagcctaccgattntgtgctctctgattcccctcttcaatctcgtccatctcatttctgtctcttcacagtttcatcgtcagagttcgtcgatctctctgctctagttcgtttcggagcagttacctttgctgatctttgat

SEQ ID NO: 60974 - DNA, 441 bp, Oryza sativa
  unsure (1)..(441): unsure at all n locations
cagcttcgccgncggcatgtgatcacccctgacatgacttactactacgtgtgagtataatgtgcactactatctctgtccaaaaatatacttcctccgtcgcatgatataagagaatttgagttttgcttgcaacgtttgaccactcgtcttactncaattttttgaaattattatttattttatttgtgatttactttattatccacagtactttaaacataacttttcattttttatatttgcaaaaaaaatgaataagacgagtgatcgaacgttgcaaataaaaacttaaaatcccttatattgtgggatggatggagtactagaagtcctactactaactactccctccgtcctgcaatataagaagttttaaagttggatatatttattaagaaagtaaataaaagtgaacggtgaaagattatcattggatga

SEQ ID NO: 60975 - DNA, 473 bp, Oryza sativa
tgtgtgcacaggacacattgccccaaaagatgttatgtcttaatattagtttactgacatctatgcttaccatgacactaaaaatagtacatagaaagtcatgttacatgtccagatacattagttataatcgaaataatgtgccaaataaatcaccatcctatgcaaagcgagtaataatgagaaaagtgagactacgatcacggaccataaaatgcatgattgcctttggaacgaagtcctcaacatttttccgcactatattgttatatgacttcaatagcaacttagttattgctatttcaagcgcctcctgctcagactggctatctgaaagtaccaagacaactggtggctagttgacaattacctcaatcaatcactcaacatattcaaatatcactgatgagacaatattatagcattgataagatagctcacctctctcaactgtatcgtatagagtgaatgct

SEQ ID NO: 60976 - DNA, 362 bp, Oryza sativa
gtgccatcattttcaaggaatattgattagtgatttgcacagtgaaacgtcaggtcctcatagaagcagataagcagaacaagatattagcaggatatccaatcacccatgaaggagcttgtccacatcatactgcatcggggagctcaatctgcacagaaaaaacccctcacgatgctgcatcccatcagttagctagttcgggaagtacagcttttagtcatgcaaaaagaattttgtcacacttgagattgttttctaacttatgatatttacacaaggaactggcagctgtctgatcctggtttaacatcttgagaatttagccccagatatgctatcaatctttcttgcaccatcat

SEQ ID NO: 60977 - DNA, 397 bp, Oryza sativa
aacaaagcaaccgggaaatgtcagcgctaactttttatctaatcacatgcatgcattattactatctaaatttgaaattctagaggttgttgaaactagtcgaattaaatgaaaacagcataagtataaaactgcagggttgttgaaactgaaactaactgaatgcacctgcaagtcctttcctagagacaatgtaaagaaatttggaaggccaacgttcttccagatcattgtggcttgaattgctgcaaaaaaaatatgcagcgagagagcgtgagttcaggtttcatgacattaaacccatcacgtgttcatgacggcccattacgggtgaagtaatgcgctcggcgccggtccatatgtgcaacgctcaatgtgtagtgctcttttattaaaa

SEQ ID NO: 60978 - DNA, 136 bp, Oryza sativa
aaaagccacagctggcgaaccaaacgagccggtccaaaaaccacaacccatataccacagcgacgctgcaaagagccacaacccacagccaccttggcaaaagccatagcccaaccaaacacaccctataaaagaa

SEQ ID NO: 60979 - DNA, 475 bp, Oryza sativa
  unsure (1)..(475): unsure at all n locations
ggagacatcgactctgaagggcgagaganaacattccacatatgagcattgaagttnttctttcaaaattctccaggattcatgctcgcatatggtatccccagagacctaccgcttctctgtgcgaggatcacaaccaccttacggtcctcatttttaatatatttagaagtgtggttgtggatgcttatatttatcataaatgctgcaaatctcatatttgtttgtggcactaatctagcatatcgatgtccacatggtcaagcttgtgaccataaacaaagcactatcgagagatagcccgaattactacggtaagtttcttttctaatgaaaataagaaccagtttttaggatagtatgcaccttccggtattcttggtcgctaactatttcaggttgatattaagaacgagggtcatgcaatgcctaagaaacacggaactatatcaactatacactntggtgatccttg

SEQ ID NO: 60980 - DNA, 457 bp, Oryza sativa
  unsure (1)..(457): unsure at all n locations
tatctaanaactattagtactttgtttagaatgattcatgttcttatatactgagagtaagctacccttggttaacatttttgttggaactgcttataataatctatctggaaaggaaattgctgataataggacctcatatcttctaaaaacttactgttagctgtctaagtgcaactgtatcagcgttcgacatttttgacagttaattaacccgtgggttttgcatgtcattatttcactatgtcctgaatgagtgattcttgttccttttattatcttcttctctgtaacctctggtggtgaattattgttccgtgcctttggtcattacaatgatgctaatgtgactcanaagaataatggaatagtaatgcttgttttgttattgcctctaaccgacaatgtatgttgatgtacctctatgtttgagatgaccaagagagaaaaataaaca

SEQ ID NO: 60981 - DNA, 358 bp, Oryza sativa
  unsure (1)..(358): unsure at all n locations
atataagagcccacccgctggcttatgtgtggaataagccaaacgacatatttataaacaaaaagtaatttgtcaataaaacttttatatacatgtttttagcgatctaaaagcaaatgctgaaaaataaacttcgacgaagaaaacctcaaaatcaactccaaatttaaggttgaaaattcaaattttggctgataagtataagtataagcgagaagattagacagataatctcatatgtttatgctttgtagcgggaattgtccgaatggattcaaaaaatatgtaattatactagctattggcactggtaggctactagtagtagcctanaattgcagtcgggataaagcacact

SEQ ID NO: 60982 - DNA, 482 bp, Oryza sativa
  unsure (1)..(482): unsure at all n locations
tgtactctggaaccatactctccattaatatatcgctgtactgcacaaggaanatcggtggtacacaacagtatcgatttgaagaacctctttaggggggcttccatggggactccaaggcgttcctatcgttgtcagcccgatttggtggcccgtggtccacagcatggtgatgttgctcgcagtgtcatggaatttaatttgatttgttcttcgcttgttagtaccactggactcctaggtagagatgctttatggcagctcagtgtcgctgacctgtttagttgacgggttctagagtcatttaatacagtatggcattggaaggaggttggttgtgtcctatcctangcatggcactgaaatggaatcacctccatactccacccctgtcctgnngttcttgatcggattatatgctccatttctctataaaaatgtatatgctcggagtatttatctagtattggtccattttctga

SEQ ID NO: 60983 - DNA, 430 bp, Oryza sativa
acacaaaaccagcccaaccatctgcaaaagagcactgtaactgtttttcgtctaatctacctaatgtaaagaaaatgacactggggatggggggacaatgtgacacctaaactgaataacaactccacaagatcagaacatgcattgtgaatcagccattgtggtaaaattaaatcacgcacacagatataacacctggagttgcatcatataaaataccagaaacatcatatggaatctttacacactagaaagataatatcgcaatctaatgtgtccttgaagcttgactcatctggtacatgataaaatcaaaagttatacaactcttacttgactcatcatttcatcaatcaccattaatcaaacatgagcatgggcattcgactgatgaaacggctgatacactacattacaccacagagtaccc

SEQ ID NO: 60984 - DNA, 441 bp, Oryza sativa
agcttgtacccctgtggattgagagaggtgtgaccgctccaacaacgcgaggaatcgacctacacaacgcggtgcccagacccaaagctttgcctcgcatcaactccccgcgcaaaggtgcgcgcacgtgcaaaaggtccacgcctccctacgggcgcgtgctcctcgacgctttttggcggatggtctaatgtggagggctgggggtgcggtccacgtccccgtgtcggccatgccctaacaggctcaatgacaagatgaaaccgatgacggtttctaatcaagaaagggaggatgataaggacaacactagctcggatatgaccatagctaccttatgtattcatcaagcaaaggtgcctgctttctatgtgagatttacgcgttacatattgcactatgagttttgtgtgttctcgtttgcaaggtacttgcttgggt

SEQ ID NO: 60985 - DNA, 414 bp, Oryza sativa
  unsure (1)..(414): unsure at all n locations
tntgngatgacacctgaagatgttttgagagcttattttttggctgccgcgtgcattttcgaaccaaaccgtgcctctgagcgacttgcatgggctagagtgtcagtgctggccaacactatttctaggcatttttacagcgatatgtcaagcatgaaaaggatggagcgtttcatgtggagcagcctctatgaagaaaatggcaatgttttggggtgagtactgcgaaactgaaattccttgaaattatgattttgcaccgtgcagcatgatgatgggtttttttatggatagttactactaattgcttctgatgcttgtcctctctatgagaaaaatgggaagctgaattgaatggtaaatggtttctattttgacaatcaaaagaatgaatatattanggtcttttatttg

SEQ ID NO: 60986 - DNA, 386 bp, Oryza sativa
aacagcactgttcttgagtagatggccatgccttgagtgtcacaaaggctgagttccttgtggtctgttcaacaaaaatgaatagctgcataatacgattctttatatccggcttcccctgatctttggggagaagagtgtgttctgtctaatcaaactacaaatcatgaaagaggcgtctgatttgttctactgtggcaggcatcaatgtgatggggcaccttttatgctgtagagcaaaacaaaatcaaattagcgactgattggtggctaagataaatagattgtgggttgcttctttctgatcataataatggaaagcttctttgtgacagtaatctacctgggagactgacttaaaaatgcaactgtagcagaatacaaaa

SEQ ID NO: 60987 - DNA, 473 bp, Oryza sativa
tcaagtgatagcccaacgagatacaccaagtgctcatgtcatcctatccttcaaaaccttctccaatcctcaccaccaccctcaaattcactctctcactcaataagtgcacaagatttgggtggaggaagcaaacttacattgggagaggctataacaagctatggaacacaagaactaaaggggaatggctaaagaatgagctggggtcgagttggctaaatataacggctaggtgacgtcatctagccgctactcacatatttgaactggatggttgccacgatgttccgggcctgcgtgccaggaacttccgggtaacacttaagaaaattatcaacctcacctcagcgccaggaagttctggacagaacctccgggtgggactctctgtcccaagtagagccatcttcataaacagctcctaaaaatatttcaacactttgacactactaagagcacttgtgtatctc

SEQ ID NO: 60988 - DNA, 248 bp, Oryza sativa
cacacctgttggccgctcaaaaaataatactactagaatattatgaaagataagacagaaaggtattgacaacccgacttttcataaaataaagaacttcttatccaaaataagctacctttaataaataatatgctgggaaccctgggcggatggaggtttgtaatcatgacaagtttggttgtcgaacttcctatagagcctgagctccttgttctattatacttgtgcagctcagttacattctt

SEQ ID NO: 60989 - DNA, 460 bp, Oryza sativa
  unsure (1)..(460): unsure at all n locations
ttgagtggtacaatcgaggagtaatataatgattaagcaagttaattaattaatggtcgatgtagcggtcaaggaggtcttatattattcgcgataaaattaccttaattatacaggctgtgttctgacttctgatcatacacaaggcaggtctgtactgtactgcaaaggcaataaataaagttgtctctactactgtcaaataaacttttttaaattttttattacctggagggaaaaaacacctcanatacagatttttctagaaaaaaaagtgtaactcgcatcaattatattggtttatatgaaagaatttacctgtagtcattagtattatttatagatgatgtatcttatgctaaagttttctaaaagggaattagtaaatattttttggaanaaaaaactttcaaatacgactatnntatagttatggtgtaattatatttgaactacatta

SEQ ID NO: 60990 - DNA, 453 bp, Oryza sativa
  unsure (1)..(453): unsure at all n locations
ggatccttaagcaccgcggctgcagctttcccaccccttttatattggtctcctgacgtctacgaaggagtgtggttcgttcgacaaattcctacctctatatctatctctgaggtgtttgggttttgcaaaactccataaatatgcagaagagaaatgctatccccactccgaccaagacagaacttttaccaaaagtttattgtgatctttntgttcaaataacaattaaggtgaagcagggtcaggaacaacgaatctctttatgataaacagatccattttgcaagctcgttattacgggtagttcctacaaagaatcggactaatgacgtatacaatgcttgaattatcgacgtagatgctacatagtgggttctcatccttcagagactacgagtgtaataggagcatccgttgacaaaaggatcaccctaagatgatcatctcatg

SEQ ID NO: 60991 - DNA, 434 bp, Oryza sativa
  unsure (1)..(434): unsure at all n locations
aaagaataaaantacactagtactccctccattnttttaatctatctttataacgagtggttaattcatatttaaaagcaataattgctaatgaacaaattttgacaggtgagaacaaattttgtcttgattttaatagatagtttaatccaaaccatcaaatttgtgcgattgatgataattaattactacaacaatgaaaaggtgatccaaatgaaaatactctattttcagattgtttaatgagtgagtaggctaaaaacagaaattccatgccatttttccttgccatcatttgtatctccatgcattggacacttcaccggagcatctctaatagagtggatatntttagttctccaaacatttagggtccctttgaatcgcatgattgaaaaaaacggaggaatagaaaaaaacacaagacatgaatg

SEQ ID NO: 60992 - DNA, 502 bp, Oryza sativa
ttacaaactcaagcttgatcttagcaacaatgccttccatacctcctggtgccctttaattgtcacctcaaggtccttcctcaatgccagtgctgtcgtctcctgctgggttaacaacacagccaccttatccgctgccgatgcaaatgcgtcctcccatggcaacacctgctcaaatgagaggcccgccttcacctttccctcagactgggccaactcctggcatgccacctgctggcgggtttggtgtgcctggttctggaaacatgaccgctatgaggccaccacgcccaagcagcggtgattctacctttcggcctcttgtgtcagcttcaccaacaccagagcttggagcatcaggcagtcaagtgccattattccatcctggcaaccagagaccacctatggcgcgagttgaagggttccaaaggtctattgatatgggtcatcacggccgggcgtatgccactggtccaccgcatgcacatcaacatccacatcc

SEQ ID NO: 60993 - DNA, 406 bp, Oryza sativa
  unsure (1)..(406): unsure at all n locations
cttatagaaagttgtatagatttgctccacatataatattngatcagtgatcctttagaaatagcaacacacaacataaagagtctcatgaaagaatcacatattcattaaccaataatgagttatctatttcaaggaacaaagtcggataaatatgtaaacatagtatgtgatacaatcatctctatgattgcctctagggcatatcactaacatgatcctcccatgcagctgctcgttctcgcgttgacgggttgatatatctccgtgccaacaacaagacatggccgtggctgagatttcgaaaacagataagctcatcaatctgattgattttggtatgatgaatgaaacagatgngggcagaaggacgagcannggaatgaggaagcatatgaccttatat

SEQ ID NO: 60994 - DNA, 470 bp, Oryza sativa
  unsure (1)..(470): unsure at all n locations
ntgatcgagctgggtgtttggtatatntgagtacttattatanttttatcgttntgaaagtacgttggcatgtttgctgtcttccgttgattcatgcaagatgccaagaaaacaaaatattttcttatatttaattttagtcgtcgtcaagctcaggtatagaatatcgtgatatgttggacctgttagatgtgtccaaatccacgcagatggaagtttggaaacacagtttcaagggtcattccagaagttcaaacaaccagccagctagtccctccatcctcaaatataaaatagtaccaaaatagtacccctccgtattttaatgtagaacgtcattaaccttttcactaacatttgatcatttttcttatntaaaaagtttatgtaattataatttattttattgtgatttaatttatcatcaaatattttttaagcataatataaatattnttatatttaataag

SEQ ID NO: 60995 - DNA, 480 bp, Oryza sativa
  unsure (1)..(480): unsure at all n locations
ggcaatcgatcagctgcaagttcttcgaacttataatatcgggaatctggtcattgatccaaagctcacaaagagataacaaaccaaacaattcataggagtcccccactagtgccggtttgacatccactccagcagcgcgccaagagaatcaagtcagtggtagttatataagtcatctccgacgaaacaatcatccactacttcaatactggcttttcgccccaggcctccctctttgggagcagttcgtgtcgtaagatgtcaggttgagtccgccaacgaacgcaatccctagaatctgttttgatcttattatttgctttcaacaagaagcgggagataagccttcatgactgcaatttccagccgggaaagaagatcaaggccactgctttngagccggtacccaccanaaatcatatagagtgtagtttgtcaactcaaaactttctggcttcatttcccattgtcatttct

SEQ ID NO: 60996 - DNA, 440 bp, Oryza sativa
  unsure (1)..(440): unsure at all n locations
agcttaaagaagttcaggagatggcaaataaaggtcgtgatgaactactagagactcagaggcatgttgctagtgataaccttgaatcaaaaaagttagcgcaccttgcagccatggagcacaaggaggctgttatgttggaaacatatcggtctctcatgttacaagatacaaaagatatgcctgatgatgttagatccgagcatttgatggcattgaagtgtatgagggagaagttgtttccgtaatactaaggtatcttcacgttccagtctctaattaaagcttgttgtatttttttttacttgctgtaattgaacttcctgcaaacatatatatgtttcttgcacaattcaaagagttgcaaatattgatgtaatctaacttgtaatatagtcagcatgtagctattatttccagaanaacatgtagtcaagtca

SEQ ID NO: 60997 - DNA, 474 bp, Oryza sativa
  unsure (1)..(474): unsure at all n locations
ntctcaggtagtgtgacaccctcaacctcaacttccacctatgcactacagcccaacccttcatagtgatcccaccgccacggtaccatagcgccatgttttcgctcatccaattgttgagcaccaccgtgatgaccccttcaccagtaatccaaccgtgagcgccattgtcgtggaagaacttggggaggcgaggtagcgccgtggtcttcccggagagcgggttaatgagcacagcggacaagtcatcgtctttgtcaatggctatgaggtggctggaaccagacgcagcaatacgcctgctcttcatgtcagggacatgtaccttgatggttntcagagtggagagcgagtagaagaggacgttntcggaatattcgtcctcaagccagcggcttgccatgatccaaagctggaagaaagcgtgctctttatgcgacacggcggctcgccactgtgggcagacggcacgga

SEQ ID NO: 60998 - DNA, 327 bp, Oryza sativa
  unsure (1)..(327): unsure at all n locations
agctcganacacatgcagtgcgctatcattatgatatccctggtatgacaaggaaaagctgatgctcatctttgcccacaatgataacgagagcatcatgaaaccgatccgctctattccaaactgactctgagccatccaaactctgccggcacactcttggtactactacttggtaaccaggagcagagcactatcactcctacaccactcgacaggtagccccaatggcgtacacaatgcacgtacgtacgtgcgcgcgcgcgcgcgcgcgtgtagacacctcttcgcgacgattattactccaggccggatctggcatttacc

SEQ ID NO: 60999 - DNA, 464 bp, Oryza sativa
  unsure (1)..(464): unsure at all n locations
tgttgctcttgttcaccgtcctaatgaatcctatttcgttgctccccaggtataaatttgagaactcctataaatgtatctatcatacttcaaagcatagttttcctttggcaatgaacagctaggtaggttcttagatatatcaatctagattaatctatttaagagttatgtatttgacgtttactttcagttcatacagtccatgagattaatttctttttcacaggcagacaaagttacagtagtataccctatgaggttccaggattccattgatatagttctagcaacttcctttctgcaggtattttggacacttccttcttgtctcttttatctgcttcaagcaattcattntctagttnttttatgatcatttatagacatcttcaacagaccgatctttacgcatctagcactactttcattaagacttgaacggatatatgccttaacttaat

SEQ ID NO: 61000 - DNA, 449 bp, Oryza sativa
  unsure (1)..(449): unsure at all n locations
agctntttcatgacttcagaaacaaggagcttggaagtaatagtgacatacaaagttccctctgaatgaaacacaccagcattagattcatcactttggtaaaatttatataatagcaagacacacccacgacgagaatacatagaaccaacttactgtacacaaccacccagttatgcattcatgtatataaaaataagaagaaatcagcaaggtatgcaaacttcacgtattatacctgcaactgtcatctctggtatatgaaaatcttcaaactccgattcccagctttctcgagtagtattaatctcctcggctggattgtcctcaacactaatattgctctcatcagccatgctcttcttcctgaataacacttgccagaccaactactcgaaggacactcactatatataagcagcactggcaactaatgaatatagtatatg

SEQ ID NO: 61001 - DNA, 485 bp, Oryza sativa
  unsure (1)..(485): unsure at all n locations
cttgagctactccaattataggctagcactctgtcaaattcatcacctaagaagacgatatctttgtaaggatgaaatccaaggaaatagatatagcaattctcgcgcatacttccaggctcaagaacattatcattgtcagagtcccactcaaatttctcgaatttctcttccactattggctcgagctccacatcgtcttcgtcatcatcatcatcataattaaaattaaaaggtctataattataatgttgtaagacccaaggtccatcacgctgctgctcatcatagttcagattcggcaggatgtgggaaatgtccatatcatgcttcaacacccactcggtttgaccacagtaccgttcgttaagaaaccaaaccaaaatttgnggcctcagaaatgatggtaatgatgcacaatatatcccgttggttgattntcctagataaaattgtgtatctnctggatcttncgtgggcattct

SEQ ID NO: 61002 - DNA, 444 bp, Oryza sativa
  unsure (1)..(444): unsure at all n locations
agcttgtccttcanagtatcaaaggacttctcctgtatctttccccaatggaagaccacccctttcttcgtcaaatcattcaatggtgcagcaaaagtactgaaatctttgacgaaacggcggtagaatccagcaagaccaagaaagctcctcacctgtgtgatggtttcgggaaccggccaactccttatggcttcaattttcgactcatccacctcaattccctgtggagtaacaacatatccaagaaaggagactcgttccgtgcaaaagatgcacttttcaagggtagcaaacaaacgtgcatcgcgtagagcattaaaaacagcacgtaaatgatccatgtgttcattcaaagacttgctgtaaatcaatatgtcatcaaagtacactaccacaaatcgtccaataaaaggccttaaaacctcattcattaagcgcatg

SEQ ID NO: 61003 - DNA, 434 bp, Oryza sativa
  unsure (1)..(434): unsure at all n locations
agctntaccataagattgatggtggtgccatatggcctccacgacctcaactatagcagcaggagtcaaggtcagatcagcttggacaaatggttgcaacctgttaccgatgaacttcgaagttagtttcaagtgcttgttcaatgccactacaacacgtgtgctctacacctacactggtaaccctccacctcccatccttagtcttccttgcacaaacctcccacattgttaatgatttaccaatgcatgccaccatgtacttcttagaagcgtttgggtgcttcacatggaacgggcgatgcacactgatcgagtaactctgcagtcatatttgtgtgtgtgagagagagagagaggcgctactgaagcgaggagagaaagagaccgccgtgtggggctaagtccactacctgtgggccccgccgatgcgg

SEQ ID NO: 61004 - DNA, 470 bp, Oryza sativa
  unsure (1)..(470): unsure at all n locations
tgctntactttcctttcctttctcttgttcattntttttttcaatggatacaaggcaggttacatatatgtttgttacactgcacctgtcccaacagaaggaacaatatatagcatatactttttcccctaaaaaaacatttcagaccccctttaaatcgcatgattgagaaaacgtaggaatagaaaaaacgtacggttttgatagaaatgtaagtgcaaaatagataattgtaaaacacaggaaaaacacacgaataaccgtttgactgaacaataggaaaaacacagtaattggatgagagagatagactcaaatgaaagttaccaagaggttaaaactcttgctaaatttcctccaaaatctctataggattgtccattccgtangaatttcanaggattggatatgattcgatcatttgtttcaaggggcttcgtangaaattntcctatangattcaaatcctc

SEQ ID NO: 61005 - DNA, 431 bp, Oryza sativa
agcttggcaactacaaacagggacatggtcatacccagggttataaacggtgttacctttaccggacctagatgatacactggagctggactccatcggaactttgccaatctgaaattcgcaaatctgaactttgccatgacgcacaccatggcctcagccatgcatacaatcagaatcaacctgatcaggcgaggacgcctgaaagctccccttgtccggaagaagaattggtactctagcctactgttttggctgaacatcctgcagtacaattgaactatatgaactaatctctctctttttatgcttttgacagtaaaacaaaaatggaagttgattgctgaccttgtggcttccaagagagctagcaacgttgcgcaattgaactcccgtgtggtgagcatcgtcgagaagccaccgaggatgac

SEQ ID NO: 61006 - DNA, 473 bp, Oryza sativa
  unsure (1)..(473): unsure at all n locations
ngcaataattaatacttgactaatcatgcgttattgacttgtctcgattcgcatgccgcanaaaaaggttgtcccaaacatattntgtatgaagaaggggctgagaaaccaaaattttagcttcttatttaggatatctgttttcaccagatatttgattctagagtctaacttacatgatgctgcgttataccgtctacaggtgttgggacaagtaatggatgcagagggaaaagaactcgaagtccttgttggcctcagttcacaaatatgcagggttagtcctaaaagcttttcaaaagcgctagaacagggtcagaacgaggcaagattcgtggagaagctaatcaatggactaaatgcgaatatgaaacccaatccacagcttccaggaatcagaagtgtgatagttgagcagtgtatatacatgatggagctgagctctcngtatgcaacatatatcagaaatcatg

SEQ ID NO: 61007 - DNA, 443 bp, Oryza sativa
agctagtcaacggatcggcaatgttcaattatcgcctaccgctgtgttgaatcctatcattaaactatgggcgttccaaggatgggctttggatttcattgtcaaatttatccttcgtcatcaaaagggcattggtttgtgctagttgcaatggattacttcactaagtgggctgaagccgtgccgctcgagaatattacttgtatagaggtaattgactttattttaaagcatattgttcatagatttgatattcctcaaacattaaaggagcttcttttatgtccaaagaagtgagaagttttgccgaatcttatgatattaagttgttgagttcttctctttactacgctcaagctaatggataagccgagtcgagtaataaaacattgttaaaatttgccgtttgatagttgaggtaaatcttagctctcttcggtatt

SEQ ID NO: 61008 - DNA, 424 bp, Oryza sativa
  unsure (1)..(424): unsure at all n locations
tccaacgacgccgccgccgccatgggttggcttatctagcgaaatagtggtgatacgaaaacactgaaaaatctgaaacccagcgcgacggcacgcatttggtcatccaagtcgtcgttgacatttttgttcgtacgttttctagtcgatcgagcagaaaatgcacgatcaccaacgcgttgattcgttgacatttaaggtgagcatcaccacttgcctctaattaactntctctctcaagttccgtgcgtgcgcatcctgcatgccgctattgcttatacagttatgcagcgacctagctagctactcgtcactacaaaaggaaggctgccattgaagcgaactgcccagcatattaacagagccagagatagctagccagacccttcttcttttaccgtacttgtcgggtgtttcatgccga

SEQ ID NO: 61009 - DNA, 429 bp, Oryza sativa
  unsure (1)..(429): unsure at all n locations
agctagagtggccgagtttgatttcgtgcttcacggngtaaaatcaccgcccaactgagaagacatttaagcatgggttaagaactcataaaatatgctgagaaataatcctgacatatatgagcactttgatacatatgtaaggtaatactgtagactatagaaaattatgcaaaggtcgaagaaagtgttacattttcctagtcaggaattgtggagcaaatgcttccaaaaatccaggaccatagttctccctcatccatccacaaaaaagagaaatacgtccctaaaagtaattaatgaacataaagcaaataatagaaatgagtcatgactacactaatgcgaagccaaatgttaaaaggaaaaaaacatacctctatggctcgtacgacattcacatgacccttttctctagccaaatcaagt

SEQ ID NO: 61010 - DNA, 465 bp, Oryza sativa
  unsure (1)..(465): unsure at all n locations
tgatcacaacacagttggatcggtcatcatcagtcctctggcacgttgctagtgctgtcattctggtcaccggaggttcaattccatccacaaggatgaaacaatttgaaaagaagcgagcattctgttttcacgtcaccggccggccaatctgtacatcctataccaaaagcttgtcatgtattgagcaatatcatcttaaaaaaatattctcatgctgtgatcttaaccatccatttatcatatgtattaaaactcactaaatatagttattgcacattgaactatgacacttagaaaactaatagtcactggatccttcttatgtgtgatacataaccatccaagtatcatatagaagggcaatttcacatctactaatatagaatagatgttatctatctagatattatgtgtanacaagttacttattatattggtttcttcgagaattgcttgaagata

SEQ ID NO: 61011 - DNA, 329 bp, Oryza sativa
agcttgtcagtggatataaattagagtgtgtttatttccacgttaaaatttgacgtttgactaaaattaatagtttgaagaacaaagttagaagtttatgtgtgtagaaaagttttgatgtgatggaaaaagtttgaagtttgaagaataggttgagaactaaacaagggcttgctccatccgtcgtattttaagtgtaaccataagtttccgcgccccactttgatcgttcggcttatttgaaaatttgttataatcagtatttttgttgctatgagataatattatatgaatagttctctactcttgacttattgaaaatttatttt

SEQ ID NO: 61012 - DNA, 477 bp, Oryza sativa
cttcaaaaaagaggggaggtcatgccaaattttctatcgaatctattttggtgattacatacaaatcggaggtgcctaaaaggtttgcaacttcatcctccaatgttttttttgtcatactacatttgcacctatgttttgcacactttttttgtctccaaaatttagttgtaagttgatgagagagaaaatgtgtgtggggaagaaagaatatatagaaatttagttcatttgctaaacaagattttataaaatagttgagaaggaaaactctagtgaaagttaatattaaataataaaaaacaaactataataaaaattaaaagaagttaaacacattaaaattagtttaaaactttacaaatagttgttaagaattatttggtgtaatattttatgatgtttgtatgaataaagatatcttataattattgtatgactgtcattattgtaagaataattatttgtgtgcggttt

SEQ ID NO: 61013 - DNA, 437 bp, Oryza sativa
  unsure (1)..(437): unsure at all n locations
gcttaaagaaccgtctgagtctaatagaacaactgatttcttcatacattgaggtgttccctatgaaaatcccatgttctatttattaccttaccagtattgttcattattttgccgcatatcaattgtcttcgagagnttctgttcatttgattcttgctatgaggatatgaggcattactaccatttttcttttagaacagatatactcttcattactgatttcacgtatgattctaaagagattcgtgtgtatgctcaagagcaatactggccacctgaagattttcaacgattactttctacaaaattgaaagcattggttgctactggaaaattaatcaaggtttctctcatgctgtctatatacaaaaagtacacattaagttgggtactattttaactgtggtttattggttgtaggtgaatcanaagta

SEQ ID NO: 61014 - DNA, 486 bp, Oryza sativa
  unsure (1)..(486): unsure at all n locations
gacctatgatactcagcttgtaagagctggagatcctacgatctgagaatgctcatctgatgagcanttttgccaatcaacaagtttagatagaggcattggttgtcaacgaaggtcagctntattagattctcgccctctcttaccctccagtcctctcttcctctctccggtcctcgcgtttcttgttctacaaatggccgggaattgagatctgcagcgttgctggatatgatcttggttagttttttcttgtagtgtagtggacgatctggtcacgattcagttattggtttttttggatttcagntattagtttttttggatttctcatatttcttcggctattgttgcctaaacctaaccaacacttgtgacggatgctgactggctcagtggggctctgccgctctgatattacaattatacatgtgtaaacctgctgatcaacactaaacaatcactataataaatggctatagtgac

SEQ ID NO: 61015 - DNA, 424 bp, Oryza sativa
agagtatgtgaactatctctccattgcttcacttgttagtgagaatgtacctttcggcatattgctagggcaatgtaattaccactcgttgcatactatcatagatgatagatcttgtagtgctctcatagtacaataatgtgtatgagccccatcggttggcctaataagccaaagcaaaagcatatatttgaattttcaaacttgaatttgaagttgattttaagatattttcaacgtaatttctttttagcattggtttttaagttgctaggaacaaatatataaaagttttacctataaattaacttttattccctaataagggaatatgggcaaccaatgaggctctcatgacctctatcggcagcatgctatagcaccgttgtttatggctaccatgtacgaagtagtaattactctc

SEQ ID NO: 61016 - DNA, 449 bp, Oryza sativa
  unsure (1)..(449): unsure at all n locations
ctcaagctgtaggctataatccttanggtattgataggattntatatgaatggaaggaatgaggcatataggaaaaaaatcctaatgtttgaattcctacaataatcctataaaaatcctttaaaccgaatgagcccgaaagagagagagatgatgaagaagatgaggtgacatgaaagtcgctgacacgtggatcccatctactgacttagcaagttaaaccgtggtcaaactgtcatgtcagtagaaaccacttccaaaacgatcgaaggagttgattttcactactttccgaagacaaaaaaagccttccgggagcggcgctatatccggttttgcagttgagggagacgatttacaggagcaagagatgagggagacgaaacagacttatttgcctctactagaacagcagcttatgcccaaacagcggagcgagaccagtcatg

SEQ ID NO: 61017 - DNA, 326 bp, Oryza sativa
agcttgaaacacatgccgcgcgctattttttattatccctggtaagacaaggaagagctgatgctcgcctttgcccacaaggatagcgagagcatcagaaaccgatccggtctattccaaactgactctgagccatccaaactctgccggcacactcttggtactactacttggtaaccaggagcagagcactatcactcctacaccactcgacagctagccccaatggcgtacacaatgcacgtacgtacgtgcgcgcgcgcgcgcgcgcgtgtcgacacctctccgcgacgattagtactccaggccggatttggtcatttacc

SEQ ID NO: 61018 - DNA, 429 bp, Oryza sativa
  unsure (1)..(429): unsure at all n locations
tggtgctctgggtcaccgtcctaatgaatccttttcgttgctccccaggtataaatttgagaactcctataaatgtatctatcatacttcanagcatagttttcctttggcaatgaacagctaggtaggttcttagatatatcaatctagattaatctatttaagagttatgtatttgacgtttactttcagttcatacagtccatgagattaatttctttttcacaggcagacaaagttacagtagtataccctatgaggttccaggattccattgatatagttttagcaacttcctttctgcaggtattntggacacttccttcttgtctcttttatctgcttcaagcaattcattttctagtttntttatgaatcattatagacatcttcaacagaccgatctttatgcatttagcactactttca

SEQ ID NO: 61019 - DNA, 447 bp, Oryza sativa
agcttggagagaatgtcaccaccattctaacaatatgtaaaaacctatttgatattttatatgttttgactggatgtgtctgttaagtacattcaaatactcctactttgttgtcggtaagttgggttcaaactatagtgtagtcaaaaagaaaaacagatcacatagaagtaaggtcccttgtatgaaaaagggctggattccttccattggtggcttggtggatgtcttagtttacaattgtatttagtggctcacttgcattattttgtatccattttcatattgcaacctgataatgttggaaatatgaacaaacatggttgcacgcttgtatggctctatgtgcaagtgcaaaatattactgttagacagatgagagatagtttttcatttttgaaataatgcttgtaaagagagcaaatcaagttactgtttttctttgat

SEQ ID NO: 61020 - DNA, 469 bp, Oryza sativa
  unsure (1)..(469): unsure at all n locations
agctggggggcgcatccgctctatagctcgtatcttctctgtgtggcctcgatgcctcgggcggagaccaaaaatccgagaagcttgcccgcaggtacaccgaacacgcacttatcggggttcagttttatgcgggcggagcggagactctcaaaagtttccgctagatccgagagtaaggtctcttggttgcgcgtctttacaaccaagtcatcgacataagcctcaacattacgtcctatttggctacccaaagaaattcgagtagtacgttgaaaagtaggacctgcattctttaacccgaagggcattgtcgtataacaataagttcctatggnggtaatgaatgcagttttttcctcatcctccctagccatgcgaatctgatggtaaccagagtatgcatctataaaacacaaaatgtcgcaccccctgtggagtcgacaatctgatctatgcgagacagggg

SEQ ID NO: 61021 - DNA, 428 bp, Oryza sativa
agcttgttacatgagaatgaagtccttatcacagaaaactaaatccaaattttataatataagctagaagtagatttgctagataaatttctagggcgatgcagcggagtccatcctatggattgtatcacccttgatgttggtgagatggcacacctgcagtgttaattctatattagtaggaagcatagatatatcatacaataattaaattatgacagaccggcttgatttttatcttgggttgaacgacgtgcttgatgtcctaagcgtcgaccttgcatttcatccatatacattggaattcggttatgtcttcgtcgacccaactgtatcaacctagcatcaggctcaataattggaccattataagttggccactccgattgatttccatatgggtgaaactgaccagcccaagtgtttgc

SEQ ID NO: 61022 - DNA, 472 bp, Oryza sativa
  unsure (1)..(472): unsure at all n locations
tatgttgatgatgtagtcgtcaagaccaagcagaaggatgacctgattgcggatttagaagaaacttttagaagcattcgtgctttcaagatgaaactaaacccggaaaagtgcatcttcggagtaccgtcagggaagttgctcggatttatggtatctcaaagaggcatacaggccaacccagagaaaatcaacgccatcctcaatatgaaaccgccaagctccgaaaaagacgtccaaaagctgactggttccatggctgcgctcagccggttcgtctcacgactcggcgaacggnggatgcccttcttcaagctgctgaagaagactgacaatttccagtggggacccgaagcacagaaagcctttgaagacttcaagaaacttctcaccactccaccagttttggcctcgccacatccgcaagagccgctactattatatgtgtcggcgaacctcccaggtgtgagta

SEQ ID NO: 61023 - DNA, 436 bp, Oryza sativa
  unsure (1)..(436): unsure at all n locations
agcttaataacttcttttgagtgactntgccaaatctctttcctgtatgcccttgctgctgggtatatgtgtgagtgcacatcaccaccaaatctcttcacaaagttcttcatcaaatgccagaagcattccctctgctcagcatgctcaaacacagtatgtacaaccttttctaagcctttacatgcatcagtacaaatagctaatggattcacatctcctatagccttatgaagttgtctcatgaaccactcccaattatcctaagtttcagcattaatggacccaaaagctaaaggatacatccagtgatgcccatcaacagaagtggcagcagccaaatgaccattccatcttccattcaaagcaacggaatctatactaatatatggcctacattcctataggaaaccgtctatgcagggcctcaaagcat

SEQ ID NO: 61024 - DNA, 474 bp, Oryza sativa
  unsure (1)..(474): unsure at all n locations
ggctactatgtatctntgtatagacaaatagaagtacttttagcacttgtgttaacttgtgaccatgcacatgcactttttttaggactttgtattttgcacaagagtaagatttaaaaatttagctacgcacaagcagttgtagagtagtagtaccgttactaccatatgttctctgttaccgcaattttaccatgatgttactgcaaaaagtacagtaacgacctataaatttggaacaatcaaaaccattttcaaaattttatagaaaatgtaaaattttatagaatttgtaaaatttggaatagcagttttatttatgttctagaatttaacattcatccgcttctcggtctgttgtttctcaacatcggtttcccctcatcactctaaagtattctntgctatattaactgtcgggatcaggaatgagattcccaacctgtcactctaaagatttaattacaattaata

SEQ ID NO: 61025 - DNA, 438 bp, Oryza sativa
agcttggaagaactagaagtcgaagctcttcaccgagtttgtcaacccgcccggcaatcatacgccgttcgatgaataccctcaaataaccaaggcggtgtgggaggaattctgctctcagaagaacacccaagagtttagggaatcaagcgaggcacatcgccaactgcaacagtggaatgagcacccacatcggctgggcaccgcagggtacatcggcaaggaggcaatatgggcccaagaagatgcagccgctgcagcagcgaatgtccctgccccgtttttagacatccctgaacaaagagctcgcaactgggcgcgggcaaggggtaaggtcaacccagacggctctatcacattttagaacaaaagttatgccgtcgtctatcaggaactggtgagttactacttaacctaactaatttccattcgtataaa

SEQ ID NO: 61026 - DNA, 424 bp, Oryza sativa
gctttacagataattgtgccatggtgttttagtgacaaccaccaagaggtacagatataaaactaattaaagcaaggagaaccaactcataatgctttacagttctggccatcacatggactttcagtctagtgtgtcccaacatcccctacttgaacacacacacgtgcgtacccgcaactaaaaagtgaacaaactgaaacattcagctttattctgaatctcatactgtcgtaaatacgttaatgtactaatgtggtgatcacacaaaagaggacaaggaattgaattaaagaaacaggcagagtccagtgcagtcctacccttccctcggcgaggtcctgcgtgccgatgttcacgacagtgcagccgatggccttgtgcaaaatgaagcagagggtgtgggtctcgttcttctcccaca

SEQ ID NO: 61027 - DNA, 416 bp, Oryza sativa
  unsure (1)..(416): unsure at all n locations
tgtacaaaactnnttgcctcaatactttctttaaacaaataaaaatatatgagacttaaggtttcatgaaatttatttatatatatggaaaacaatagcaactttatagaactctctccatcccaataaagcgtgcacacattttaagatttaactccctaaatatttaaccaacaataatttactggtaacatgcacatgcttacgctacggcttaacagttattttgacaattaaatatataatgagattggtataagattcacacaaaacggaacaaattattgggtgacttcggaattagacaattcattaaccttcataccaacactntaaccgaaattgagaatgcaaaagcactagtcaaagtgcaatgcagcatataaaaacagatagaagggattaatctatcatct

SEQ ID NO: 61028 - DNA, 436 bp, Oryza sativa
agctaggcaagtgccctccttctggctgatataaggtgcctttggtgtcttttagtgactcttgtatatcaatgatcgcaatgccatgcagagttgcaggcaagttttatattactctagtcctggaccaagaaacattgccagtccggtaccaattttcggacaattcagcagggaatgaggggggaagacaggtggcttgctcattgggattcactaacgatatgtagaaagcattaacttatagtcaccttaccactggtggggattctctaacaatatgtagaaagcattaacttatatgtatatgttctttgaacattaacttatatgtacatgttatttgagtttcataatgtgtatttgatattccaaaagcaaagtcaaatttgaaggttccaggctggctactcttagaaatagagataacccattt

SEQ ID NO: 61029 - DNA, 458 bp, Oryza sativa
  unsure (1)..(458): unsure at all n locations
tgcacatatgtatttaaataggttactttntctttgctattntgtaaaataatattcatacaatgtttatttcaccaaaaaaaaggagtagcttgaaatatgatttattgatatttgaaaccagaatatgtttgatagctatatacttgacaattatcaaaaataggttggaggataatttgactaggaagacatgtgatttttgaacataagcagaattttattgctacttgaaaacataatctatttgatagttaaatattaacagtaataaaatagattggattatagtttgaccacagaaacatgtaacattatactttacttagactcacaattaaatcagagtaacaaaaccgtagtctgttcattgggatagaanatcagatattgagatccttcagtctttttttttcttttggcagaacacacttaaacatcaaactatttccacctgt

SEQ ID NO: 61030 - DNA, 422 bp, Oryza sativa
  unsure (1)..(422): unsure at all n locations
agcgtatagggagcgtggcatcatcggttggcgaggccatccgcggaaaggcacggtggacggtgagctccgtctaacttgagctccagttctgcccatgtagaagcagtggtggccaagcgagccccgttaagcttgagctcacccacctcacctgttcgcgagaagaggaacatcggtgatgatatctggctaaccccctcaagctccggtgaaagtgcgtagggagagggggggtggcgaatacnttgnntatggttttacgccctcttacgtacaccccatcgtgaatgattcaaatgactgatagcggtgtcactatctgctggctaccttatgtttactagacaaacccacaacaatgatattattagccgactacctgctatgcatatatatatactgtttctcggactctcacc

SEQ ID NO: 61031 - DNA, 397 bp, Oryza sativa
  unsure (1)..(397): unsure at all n locations
ttanatctaccagtttacctccctcatcaaggtcgagatgcccgttggttgccataggtgtcttgatgggcttcgcatcctccaagccaaacctcttcagtaaatccttgatgtacttggtttggctcacaaacgtcccatccttgagttgtgtgatttgaagtccaaggaagaagctcaactctccaatcatggacatctcaaattccctagacatcatatcaccaaattccttgcacaatacctcattattagaaccgaatatgatgtcatcaacataaattcgacacacaaagaaatcatcaccaatgattgttgtgaatagggtggtgtcaactctttccaatttgaaatcctttgacaaaagacaatctctcaatctttcatatcatgccct

SEQ ID NO: 61032 - DNA, 455 bp, Oryza sativa
  unsure (1)..(455): unsure at all n locations
ggtagtgatgttcttccttggcttgaagcctatcatccattgaagtggatgaggagtggtttcaatccagcaataaagtgtgactatattactaacaatctggcggagagtttcaacaattggatcaaggattataagacattgccaatatgtgaccttgcagacaagacagagtgttggttatggtattgtggaacaagaggagaagaattgcagagaagatgactgggaacatcttgcctgctgtaacacagaagcttaaggcaagaactaggggtttgggtcacctctcagtagtgaaatctgatagcttctgtgcagagattgttgacaacagcaccacccatgagaaacatgttgtgaaggcttacaatcagtactgctcatgtgaggagtggcagcacactgganagccctgtcagcatgcattggctttgataacctctcaacaaaat

SEQ ID NO: 61033 - DNA, 433 bp, Oryza sativa
  unsure (1)..(433): unsure at all n locations
agcttattntttactgactcatatataaaaattatagttataaaaaacttttagttgcgaataaaccgtaagaataaagatacgctaagcgaaacgaaacgaaacgatggaactctatatccttttgtaaggcaatgtactgggaatatttttttccttctataggaactccttgcttaaattttggaatcaatttattgacctttcaaaaaaaaataaatgggtgcaccttcggcctcgtggtattagcattttctaactaaggtcctttcagtggtttttctaaagacacaactacgtcgagagtgctaactgaatagtggtaaagagagacacccttcttttccaaaaaaaactactagtacactcaatatctatgtgtttttttcttcttttagaagattctcttaaattactcatccgacttataatc

SEQ ID NO: 61034 - DNA, 380 bp, Oryza sativa
  unsure (1)..(380): unsure at all n locations
cactactttcaagcccacaaagtcactgtgccgtcgcagtaccctttgggcgaagtgctacggggcaaggaaattactggctgactcagcaagtgggcggcggagctatcttccttcgacctacattntgtcgcccgcagtgccatcaagtctcaagtcctagttgacttcgtggccgaatggacacctgcattctcccctgaacccgagcccgttgaacagccttgggtaatgtactctgacggctcgtggtcacacaaaggggcgggcgccgcggcggtactcactttgccaaagggcgtgccgatttggtatgctgcaaagctgcagttcgacacgaccaacaacacgatcgaatacgaagctgtactggtgggcct

SEQ ID NO: 61035 - DNA, 464 bp, Oryza sativa
  unsure (1)..(464): unsure at all n locations
tagctaggttggtctgattaattatattattaattagttcttattaattgcagnggacgaggatcgtagcaggcagcatcgatgaagcagcaaagaagataatcgatttcctggacgatacgagcaacaacagaagtacggtgatctattttgaggcctgcagaggattggggtcatcggccgtcctcaaagaggtggccaaacgactgagatcgtcgttaccggagaagctgaagctgaagctgaggttggacaagatcatccacgtcgattgctctctgtggcagagcaagagggccctgcagaatgccatcgcccaggagctggagcttcctcggtcggtgatggccatgtttgatcagcgtgacaaggaggatgatctctacggcgtggaccacggtgccagaggagtgataccgcacatagatgtgcaggagtgcggtggtcctatatatatgggactc

SEQ ID NO: 61036 - DNA, 442 bp, Oryza sativa
  unsure (1)..(442): unsure at all n locations
agcttgaaccttngcttgtcccgagtaaaggacgaaaggaaacaaagacttggttgttgaccaggagttgctactatgctgtatatctcaaatgtacaggtgcaaggtatgtgtactctctctcaaatcaaataacctttggcacagtggcttacccttacccctgattcccatgagacactgcctttccttgtcttgagcggttgagagactgaacagtaattagagcactaatcacccactctttattcaacttttactctggaagttttcaaatgattntgcaaaagaaatccaagttcctcaaattattcacttgatctctccaagtgtatcaaaaagaattctctcaccatttgcccttntgattcctactctaaggtttgatatgtggagcttggtagggatcaaacatggcatacttgcattcacatntattact

SEQ ID NO: 61037 - DNA, 336 bp, Oryza sativa
gattttgttagcttctagaccttctgcaattctaagaactatagacaatttgtactccacacccaacttgccgtgtaatctctcattcacaagtgcatgcgcactcacattcatctgaaccaattcataccgctgaaacaagaaatccgactgcctgagcacatcagataacacaatctcaatgacaacaaaacagtcatctgctggcacaagtcatttatagccttgttaacaactaccagtcgattgtgaagcaatgtgcatgctgataaaagcaccgcaatgatctacggacacaatgcaattatgcattgaaacgcagtcgatgagacaaac

SEQ ID NO: 61038 - DNA, 455 bp, Oryza sativa
  unsure (1)..(455): unsure at all n locations
agcttgatgtgtgcttagcgtacgtttgattattactgaattatctctcgcttgtcgatgtgcatgcanagatgtccattttccagtgcgatggtatctcatatgatacctcctgcgcccgtctcgattattcactgatgattaattctcaaaagcaagactatcactgatgaaaatcttgcggcggcttgtgtcctactcagctctgcaattgttactcagaaacacgagttgctgtagatctgttagatccttcctcggcctccccgccaggcggacccgtgaccggtgcaacgtctcggcgacaatgttgcgccataagatttgccagacgggccctcatttacagcgcgtgatggtgtatccgttcttcccgaaaagcgagcgcgccaccttctatctgtcgttagagccgctcctcgctccacaaaggcggtgcgcgccatgcatcattc

SEQ ID NO: 61039 - DNA, 469 bp, Oryza sativa
  unsure (1)..(469): unsure at all n locations
caaactctagctggtgccatgcggagcagtatattgtccagcanaacattctattattgcatgcattggtgataatcatttttaagagatatctacgatatggaagtacatgcaaatattttaatccaattaaattaacaaagcatattcattttttaccgtacgtataatttgatgtacgtacgtgaacatctgctcacttttctccacaagagagattttcccatcaagcaacttatcaccatatatacagttaaagttaatattataacatggtgaatcgtattagagcatttggaatgcagaataatctttagtactccatctaatatagcacacaattaaatcacatatgtgtttccagctaggtgaaccctgcataccagctacaacactgaacactgtcatcacacaaccaaattcaccagtagtattaaagaatcacacantacactggcatcacgatcaa

SEQ ID NO: 61040 - DNA, 265 bp, Oryza sativa
  unsure (1)..(265): unsure at all n locations
agcttggatcaggggaaggccggagaaattatattgccctaaagcttaaaaagacatatgtcagatntacaagctagtagtgttggttgatatttatctctttccaacagaaacaaagtattaagtcttttttacggttctttataaacaatttaaagtgtcgtctgataaataaaagagatgaatgtgctgatatataattcaagatggaaaactccaattcagtcgcacacttcatgccccgtttgtgtcttnttcttcttat

SEQ ID NO: 61041 - DNA, 469 bp, Oryza sativa
  unsure (1)..(469): unsure at all n locations
taagcatagaaacgacgaaggtgttcaatgttccttgagttgtcgacgagagtaccgtcttcgcgcttgagtcggtaggaacctggtcgggtgacttcagagatgataaatggcccctcccataaaggagataacttgtgccgatctcgtgtagtttgaattttcctcaaaaccaggtcgccgactagaaaggcacgggatcgaacattgcgattatgataacgccgcaacccttgtaagtatcgagccgaccgaatcaaagctgcttcgcggacttcttccaaacggtgcaagtcatccactcggtcctcttcgtagcgttcttcacggaaattccgaaagcgcagagattcaaattcaacttcactcggcaacattgcttctgccccatagacaaggaaaaagggtgactggcctgtggcccgactgggtgtagttcgcanagaccaaagtactgatgggcagctgt

SEQ ID NO: 61042 - DNA, 433 bp, Oryza sativa
agcttattgatcaaactggcgaaaagctattatgcattaaaaatacagacatgaagtaaaaagattgaggacacaatgccatttttatataaataaagattcatttatgttaagattgttcttcgccgacaacaaagtaaaattaaagcctaaagaatgatgcaggatttctgcaaatgtacatccactctgaaaagcgatgaacacaatatcacgggtccagatcccctagagttagactacaactctaccaggtggagttgtcatgatccatgacattccgtatacttcaagggttgggattaagccgccttaatttttactacataaaaatcagtaactaaacattcaataaatagacttgcatcaacattgtcaccagataatttctgtagaattatagaattaatacataaatttcatgcttcatcta

SEQ ID NO: 61043 - DNA, 466 bp, Oryza sativa
  unsure (1)..(466): unsure at all n locations
ntgtaaaaaggttganattaaaggttgaaaattttcttgttcttatcactactaactgctactagtgtctatgtcgaccgcacttgctcactcacaaaaagcttaccgtcatctagtacaccagtatcaccttcatcgacgaccgactgaatgaactccaggtcgtaaagtgtgctccctccgtcccagaaaagttaaccaacaaatatatccagattcgttgtattacagtacagcccccgctaaccactgtcttctttctgaaatatgaaaccttatattggacgtctcgatctaattgatagtactagcttatatattttgtgatagaagaaatactgtaatagaagcatgcatgtgcatatcttcacttaatttatganagcaaatgaaatatctntgcttganattatctaagctatatatatataagagcatcctagtcatctactccctccgtagaaaa

SEQ ID NO: 61044 - DNA, 439 bp, Oryza sativa
agcttctgcaacccaagtaagcagcacttcttgggcaacatccttggcactgcaatcttggtcttgctcaagacctgattaaaatgcaaaaggacaagaagagtataccttgtgttttacggaaaaaactacactttgcacttcaatctaaatcatttgtatatcacggtgcacgtagcatgtaaaattatcattttatggctaaatgtgtcccacaggctgtttcgttttctgagtatgttgggggtatgtccaacaaatccttttcctattgaataattctatgcagaagctgggggtgtaatatctgtttccagtatctaaaagaaagaaaactatcattgttggttctattcattctttgtgatgaaaacaacgtagctaatcaagaatattacatttctaaattgtcgcatcacgattagccatgtatatggat

SEQ ID NO: 61045 - DNA, 395 bp, Oryza sativa
  unsure (1)..(395): unsure at all n locations
tcgtgtacgtacgtagcggtacaacttcatctccgttttacctgagccgntccgttcttcacgtgaggcgccggcgcgcgtatatcctccggtaagccgactcccctgcggccctgcaccacggcactaccgtgaactccgctgccgacctcctccgcgcgcagaaccccggcacttttcccccacgcgagcgccacgccggactgccggagtagtagaccgccacctccccgctgttggcgcaccaccgccggaagtagcgcgtgggttctcgacgcgcaccgcgaggttaaacgcgggcgaaaccgtgtgcccgacaaccgttttcgcgtccatgtatccagcccgtctgcggcgtcgaatgaggcgagatccatggtgatcgtggcactttc

SEQ ID NO: 61046 - DNA, 303 bp, Oryza sativa
aggaagagcttttggcagctgtatttttcctgaactcaaaagcttgtctaaacaatatagcttttcattcacaatcttagaagatgtacctatagaatccagaaaataaactagaagctcaccagctgaatttctactaatagctccatataatctaaagctacctaaacatgcccttagatgacgccaccagtgggagctattctattatcctttctagctagaagtgccatgactatgggtttgtttacccaaccttaaggctgtagctagacgaagaaatctgttcgctgaaaaatttct

SEQ ID NO: 61047 - DNA, 415 bp, Oryza sativa
  unsure (1)..(415): unsure at all n locations
tggtttactntatttacttaccttcttactttgattttctaactntattcaaattaattcaaaaacttgtgctattaattggataaatgtcttaactccctcctttcacttgtctttagatgccgcgctacaagcctgagtatttgtttggtgttgagggatttgtccaggagttgcgtacgatgtcttttgtcattggatttgggactgcccctttttatgcccagattcctcatgatcgtcatgaagagaagtgccgagtcaaagtcaccttgaacagtaatagcgaagatattccctcagtgatgttcgaagctggaggaagaaactacatccatgcatgtcaggaggtggcaaggatcgccatatgagagcttcgcgatcgctacagtgatcacgtgggcgacacggagta

SEQ ID NO: 61048 - DNA, 375 bp, Oryza sativa
agcttccatatgcttcagataggctagtgttgtaaccccaacattgaagccagacaatgtgatttccccccttatttcccatagcagcatattaccagatttcataataaataagtcgatttatttattgatttgttatcaagtggattcaccaatgtcaatagcacacacttctccatcaacaagcaccagaccatacaaaaccattccatctacttaaaactcgagcaaaatactccaatccaacgcaacgaaatccccctaaaaagcgcgtaaaataagcagaagcggaacggaggagagaagtgcataccactctgcggcatccaatcgtggcgcgctgcggagactagcgggagtagaaacccgctccat

SEQ ID NO: 61049 - DNA, 423 bp, Oryza sativa
  unsure (1)..(423): unsure at all n locations
ntacacagtccanagaaccattcttcactgctaagaactatggggtgtctttggtcttggaaggagtatcaacacaatcttgagcatgaagcagaagtgacttacagagcaaacaaacatactatcaattagttataagctcaaaaaatgccatcgtgtgagtagaagttacaaaaggctacctgaagagctttataatttcccttagctgcagcgctgtgtactggtgtaagaccaagttngttcccctggaaaactctggcaccattcttcagcaggagccacacaatcctgcacaaatacagaagacaactaagtaaagagaatgcaaatagcagtaagaactagtatgttgtattttaacagttgatagaacaaaattctaatagcataccttggcttctgtgtgcttgagctaccact

SEQ ID NO: 61050 - DNA, 499 bp, Oryza sativa
ctatacatactcaagcctttagacaagcactcgctgcaattggccgtgtaaaccattagcctatctatatatatgaacacattcccacaagctcccaaaaaaaataaatttgtatcaaattggaactagtaaccaatcccaacatggaagtattgaaaaaacttatataaacaaaaaatctcaaatatccctcatcgtgagacatataatcatcactataaataagaaccacgattcctacagtagtaattagtattaacataatagaagtaagcgggtcgattaagtatccaaattctaaggaaaaatcattattgacggtccaagaccatagatattgatagatagaacttccatttatttgttgaatagacaggtgaactgagaataccatagctatacttaaaagtacaacactacgagaagcccatatgcgacgaagattttttttgctgctgaacaagaaaagtccaaccccattgacatataactggaagtg

SEQ ID NO: 61051 - DNA, 324 bp, Oryza sativa
agctgcagcttcacttctttaactggaagatctctgttaacaagcaccaggaccattgtggagatgagttgcaaaagtaagcaccatgattgctcttagagaattctgatgcttataaccttgcatagatggatttttggctggatgtataccttacatacgtgtagatgccactagattaactggtaatacactggacagttagcttcagccactggtgggaaaggacataactgggtgtattatgtagcatatgctgtggttgactcagaaacagatgactattggctttgtgttatgcaacaactaaataaggccatatga

SEQ ID NO: 61052 - DNA, 470 bp, Oryza sativa
  unsure (1)..(470): unsure at all n locations
tggtagtgcttcaagaggaagtatattatgctttgtatgctctttcaaggatcgagggagctctggtaacaatatcgatatattcattgaactgataatcaatgagaaaggactatatttatacgatatctatgagaagaggttcagcatgctcgcgtagaccatgaggaatgactatatttgtaactttggtccagaatgattatatgtgttattntaccgcaaacctgtttttgtctaatatatatatatgtgttatatttcaattaaaatgaaattgcagtgtgcgggtaaaccttgccagatattttgaaaggaaagagtattgtcggggttgcagcgacagcgatggttgcttggcgagttgccatgctgctgctacttgtgtacttctaccttacagaagatcttcattaattctataaagcagacactataaatagacgaaatacttggctatacctctacct

SEQ ID NO: 61053 - DNA, 320 bp, Oryza sativa
  unsure (1)..(320): unsure at all n locations
ntgtatggcttgaaacaagctcctacggcatggtatgatatgtttaataactctttgcttgcgaaagggtttacaatgggaaatgttgacaaaacgcttattgttcttaagcatggtgataatcaactttttgttcagatttatgtggatgatattatctttggttgttcgactcacgctttggatgtagattttgctgagactatttgcatggaatttgacaagaacatgaagggtgagttatcgcactttctgtgatatcaaatttaactaacacctcaggtacttctgtgcatcatacgaagttaccaaagattttt

SEQ ID NO: 61054 - DNA, 203 bp, Oryza sativa
tcaagtgatagcccaacgagatatcaccaagtgctttttttttctattctgtcaaaccttcttcagtgctcatcaccaccctcaaattcactctctcactcaataagtgcacaagatttgggtggaggaagcaaacttacattgggagaggctataacaagctatggaacacaagaactaaagtggaatggcttaagaatgag

SEQ ID NO: 61055 - DNA, 412 bp, Oryza sativa
  unsure (1)..(412): unsure at all n locations
tttggtgtcgacaagacgacaagtatatctttatgctttcccttaatctccactccctgtccttgaattcccttcctgaagctatctcaacacattcaactcctattcagctttgctggaaacctatgtatctgctttcttgtctcacaaacactaaggcatgattatttactgcagagtgaagaaatttacaagcagtcaccttgctgccttgtaacactcgttactcttttttttctcatcattgacgcttggtcctgaatggcttcctccataagaaggttactaatagctttggtctcaaataatttattttaacaactggttaccaaccgtccaccctagtataatctaactntcaatgatgagcatgttggggttctgcagcaagatctggattcttttctttgtt

SEQ ID NO: 61056 - DNA, 311 bp, Oryza sativa
agctctacattttcagcctctatactatgtgcatacatactacttcggataaagtaagaaacataataatagggaaaaaaattaagtcccccctctcataaatctaaagaaaagaccagcataaccttctactagtgtgtcatctcaagagttgaaatagaaatagttcgttggtgaccgactccaagtgtgtagctctgatcataaatgcatgctgaattgctgatcctaaagtaagtaccactatatatatcaagacttgctaaattttacataaaaataagatacctctcggttccttattcctttgt

SEQ ID NO: 61057 - DNA, 448 bp, Oryza sativa
  unsure (1)..(448): unsure at all n locations
tcggatgtgcatcgactacaccgaccttaacaaggcatgtcctaaggacccttacccnctgccacgcatagatcagattgtcgtctccaccgcggggtgcgaccttttgtgttttctggatgcatactctggttatcatcagattcgcgtggctagggaggatgaggaaaaaactgcattcattacccccataggaacttattgttatacgacaatgcctttcgggttaaagaatgcaggtcctacttttcaacgtactactcgaatntctttgggtagccagataggacgcaatgttgaggcctatgttgatgacttggttgtgaagacgcgcaaccaagagaccttactctcggatctagcggaaactttcgaaagtctccgctcggcccgcataaagctgaaccccgataagtgtgtgttcgacgtgcctgcgggcaagcttctc

SEQ ID NO: 61058 - DNA, 419 bp, Oryza sativa
  unsure (1)..(419): unsure at all n locations
agcttaagaagtatgaaagccatgcaaaattctctattttgtcgaaccaagtccccttttttttgtgtgtgacattttttaagaatgattttgaactgtttttctcgtaattaacctctgtcctccctccggntttttaatagatgaagttgttgacttctttacatatgtttgaccatttatcttattaaaaaaacatatgtaaatatgaaaagaaaatcatgcttaaagtatctttaatgataaaacaagtttcaaataaaacaatttatagagtatgaaaattgaatatatatctcatatattntaatatttcgtttaacctaacctttgttcataaaagaaactatatataaacgattataattaacttctagaaatataagcccaaccttggctctagacctgaattgatcatt

SEQ ID NO: 61059 - DNA, 445 bp, Oryza sativa
  unsure (1)..(445): unsure at all n locations
ctgcagctgtactgtgatctacaacgaattctttgttgtgcaaattccacttcctcgtaacatggggactcttcgatttcttgaccttactggaaacttgctttctggaagaataccaccatctctagcaaatatttcatctctaagttccatattgctaggacaaaacaatttatcaggaccaattccagaatccttgagtcaaatcgcaaacctgaataagctagatctgagtggaaacagattatcagggtttgtcccagtcacactgtacaataagtcgtcgcttgaattctttggtataggaaacaacagtcttattggaaagatacctcctgacattggtcacacacttccaaatctcanatcgttggtcatgtctctgaataggtttgatggatcaattccaacttccttggccaatgcatcaaacctacaaatgctt

SEQ ID NO: 61060 - DNA, 471 bp, Oryza sativa
  unsure (1)..(471): unsure at all n locations
ngaccttctgttgagtaagattggacaccactagccaactgtgtaagatggtctaggtcccttggccacattgttgcttttttgttgaatcatttctgctgctgttgctactgctgctgctgcttcgctatggtgctgtagtgggcaaagtgacatttctgctcttgttgctgctgagctagttattagctccttttgttgtgatgaaaactttgatgctggagtggccaatgccttggacttgtgctgtagtgggcaaagtgacatttctgctcttgctgctgctgagatagatattagctccttttgttgtgatgaanactttgatgctggagtggccaatgccttggacatgtgctggagtggctattaactactgtcatttgcttgcggacacgcttaattatgttgtatgagatgtgacgacacttataatttggtgatctgtaccatctntcttatggctacatg

SEQ ID NO: 61061 - DNA, 448 bp, Oryza sativa
  unsure (1)..(448): unsure at all n locations
gcagcctggctagtggctaactggctaccctctttaagtctgaacttgcaaacgttagagcaattggttgttgccttgtctgatagctacagtactacactgatacagagctagcggctcatgctgcgtgcaatcaatccgcagaaaggatcaaagcgacgttatggtgtcctttatggctttgttagcttaattatttcctctgtaaattgtcagatcaccactgatgcaatgcacttgctatgcatgtgggacatgtcatgtggttacacaattgctacagtaattgatgggatcaaatcagccgtcgccttctttacctgaccaatgggtcattgataatttgttatactagtggatatcccacagcttgtcgcgggattttgaaattcattcaaaaacacttanaaacgaaattgagttaaaaaaaacaacaaaatactcgatg

SEQ ID NO: 61062 - DNA, 477 bp, Oryza sativa
  unsure (1)..(477): unsure at all n locations
tgacaccatctctatntaatggccatcctgcctatntaattatatagtactgtggtgccaaaaattagcttggtgtccacttacaagtaaatggaatgggggtccaagcattgcccccaacatgtgttgattttttggtatcatgtttaatatttctcaacattctttggtatcataagcttgtctgcaaccaaccactaagaacactggacaagaaaacaaaggatgttcatcttcatcaatttacacgtccaaattatgagatgacccactaggcctatagatcataacacataaagcaagtgaataaatattgtcaacaactaaactcaaccacatcagcatggccacctcctccatttacatcttatgtactatttgtcactagtctttgttactacatnttgacttaagaatagttagatacatcacatttcgcatttctttttagcgcgggcacttaagttnttctactta

SEQ ID NO: 61063 - DNA, 417 bp, Oryza sativa
ggctattggactattgggtcactcggcctgaccctgtgcttttatggagttcagtcacatcgggtactcaagcaagataaacgaacaagtgaaaaaaaaagatcagtctttgcacttctctgaccgaactatgaaccgatgaccgacatttcgggtacttcggtctcggttttttatgcccacccctaaagacaaacaaaagtggtggtgggttttggtccttgtgtgtttttcaatgtctactgtttaaaggccagaggaggctttgaactttttttatatgaaagcagattctgatacaatgaaaagaaagacggaatttcaggatggagttgacagtattttcagtgaacataatagcaagagctggaacaggtagtgtaaatatcagggcactaaattgtcaatagataacta

SEQ ID NO: 61064 - DNA, 477 bp, Oryza sativa
  unsure (1)..(477): unsure at all n locations
tcaagcaaaccgtcatagcatcattgacgatgtatgctgtgtttgtagctagttatgaggccacggngtaggcaaaatggttaaagaagtttgtacccgggttgaaagtggtcgacagcattgaaagaccactcaagatgcattgtgacaatgagccaccagtgttttatgctcacaacaataagtcaagtggtgctgccaaacacattgacattaagttttatgttgtgaaagagaaaatccaggatcagacaattagtctcgagcatataagtacaaaggagatgttagcggatccgcttacaaaagacttatccgccagtgtggtcagagaacactttgccggcatgggtttacaggaaagcctatgatccttggattacaaaagggcctagtgtttatttctagatggcgaggtacatcgtagtcgttgcgtctgatggttcagtgatgactgtcgtgatgatcatgctctat

SEQ ID NO: 61065 - DNA, 448 bp, Oryza sativa
  unsure (1)..(448): unsure at all n locations
cggatcttaagtcacctgagctgcaagctgaaaaaccctatgtttacccaagcaatataaataactagtttatatgctctttcttggccataatgactagatgcattcagtttttgtgcctatagttgtcataatctggtaagttcgggttcatccacctctctggtgcattgtcaccaatgctttggtggttttgtttgaagtaatttaccacctcttaaaacttagcttctatgttgtagacaatctccttgtgtgcattacaatgccttcatcgagccaagcctttgatggtgatgatgccacgttgagacggctcaaagatggagtagtgtttggccttttggtttggtggctcaaggatacgatggattgcaaagaatgttaccattgntgttgttgtcatcgttgctgccaccgtttgtggcgttcccaatgttggcatgtg

SEQ ID NO: 61066 - DNA, 461 bp, Oryza sativa
tcacatgtatactgaatatcgcacaatgtcgaatcttgttggtggagatttccatgaattttaactcttgttattaacattgtgcgaaactagctcaaacgggttaaatggctctcaaattggcattgcatggatggttcttccttggagctgcaatggctcacatttgcatggttaccaaatgccaagtgccaatccaccgaaaaatggggcttgcagagcccaaattgtgatctgcaaattcaattccccatgccatcttattctttatttgtgttcatgaccatcgtttctccaagaaatttgtctaatggtgttcaatgtcgatcatcgttgaaaattatgcggatctatatatgagcataatcttctgtgtttggttgtctttaatgattcgcgtgtttccgacaatagctgcaacctgcatacaataacatgcaactcttaacagatgtagatct

SEQ ID NO: 61067 - DNA, 420 bp, Oryza sativa
agcttcggcgacctccgtctcccggagcccattctccgcgcgctccgcggcaagggaatcgagaagccgaccccaatccaggtgcagggtctccccgtcgcgctctccgggcgggacatgatcgggatcgcgttcacggggtccgggaagacgctggtgttcgtgctgccgctcatcatggcggcgctgcaggaggagatcctgatgccgatcgtgcccggcgagggcccgttcgggctcatcgtctgcccgtcgcgggagctcgcgaggcagacgcacgaggtgatcgagatgttcctcgcgccgctcatggaggccgggtacccggagatacggccgctgctctgcattggaggcgtggacatgaggacgcagatggaggtggtgaagaaaggcgtgcatattgtagtggcgactcct

SEQ ID NO: 61068 - DNA, 422 bp, Oryza sativa
tgactgtcctgagaggcttacgcccaaacttgccgactatttcttcgtggcgaattcctttggtgaacgcggcgatgatgacatcttctgtgatgtcggagatcttgttacgttgttcagaaaatcgccggatgtaatctcgaagggattctccggacttctgaatgacgttgtagagatcatattgtgtgccgggacgctcgaaggtgccttggaagttggcgatgaagtggtcgcgtagttcggcccaagatccaattgtaccacggggcaatccatggagccaagatcgggcggaatccgctaaagccactggtaaatagttcgccatggccttgctgtctcctcctgctgcgcggatcgcgagaccgtatacggtaagccacgattctggggtagtggtgccgtcgtactactctatt

SEQ ID NO: 61069 - DNA, 442 bp, Oryza sativa
agcttgcaagactcttctggtctcatcactatgaacaaagaggatgcaatgccaacccttgaagcagttagtctccctgaacactgaggctcggatgtctaattcactcactgttgatggcccttcctctatatcttcttcagctgcttggtttccactagtcttcagaagaacattgaacccaaagcatgttcctctctcccctggttccttttctttgatacttatctctcctcccatcagacgaacctgtcaataaaagaatattagcaatctaaagtagtgaaaaaactaatctttctcaaaacaataacgtgccatgtcatctaaatgcggacaatccaatttttgctctggaatttgtagaccgttggatccttcgactggcaaagtatcttttcgacccttcacaaaacttgtatctaatttagtatatatgtat

SEQ ID NO: 61070 - DNA, 276 bp, Oryza sativa
  unsure (1)..(276): unsure at all n locations
tcacacttcagataccgaacaaaagacactgcagcaaacatgtgaacaacttgttggaaattaagccaaagccccgctaacgctagagatcacttcctacaccgttgtgctcctgaagtatgatttccatagacattgtgaatccaaaaaccgatgatccagagccgccctaccaatntgtagctcgcactcgcgaagatagcagacagaaggcaataaacacagcagatctactacctcaggtctccgcgcgatcctcctggagatgaagagcac

SEQ ID NO: 61071 - DNA, 446 bp, Oryza sativa
agcttatataaaaaatgtcaatgttatggattaagtatatatcctatacttagattcgtagctaccataaataccgcataccgaatatcaaacagaaaagtatatttaaatatggtataagaatgaaaactccttccataggaatagaggttgtcggagtctgatacggaaaaggcaaggtcttatctacctgcattctacaagggctatccgacttttacttggagaggaagttgcctacatgcataaatacaatgttccctagaagaggagggcatggaatcacaagccatagctacaagccacaaagcagatccgtccagagaaagtcaatagctagcccctgactataagtcatcggatagttctcggcaaagatcaattggtaggctagattagctaacttactccactattgttatatgtgagagacatttcataactat

SEQ ID NO: 61072 - DNA, 454 bp, Oryza sativa
  unsure (1)..(454): unsure at all n locations
taagcaagacaccagacatgcttaacttgnggacatttgtcgcaagactgctgagaacagcttccacatacccacggacttcttgagatatccatttaagctcttcctcaggatctactggctttctaagcatcgtgtcctgaaaataggaaaggattacaaaaacgatatactaattaatcctttctactctagaagatgattttcaaaatcttttcacgatgaactttttgaagaataaaagaaggattctgacttactagagaaccatcctttttagaagtggacattagagaaccatccgaatggctttgcttcattggtaaaccactcgttgcagaagctcctttntggtcaacaatgctcctaatcttatgtaacccattcagtttttccgccatactttcagccttcagtataatagccttgtgagctgccacggtaattaatgaac

SEQ ID NO: 61073 - DNA, 434 bp, Oryza sativa
agcttcctgtcttgtaaagtcaaactgtatataatgtttaaattggtgggagcaataatgtaacagcaaaattgaatggagtagttattatgttagtgctcgttgttgctgtactgctgatgtatatataatgatttttatgttgttgcaaatattaaacttatgtggaaagattgtttttcactttagttatcatttttttaaaaattctgctatagaattctactatatgtagaagaaatcttaccccaacatcttagttgcgaacacaaaagctttatatgaacacaccatgcacaccaacgaacaaatttttactaaacctttaaaaaaaatgtacatgtacttcaatagtactatacttgtgtgtaaattcttaaccttaattaaattcactctattttagccgtaataaaagagataaaaattctgac

SEQ ID NO: 61074 - DNA, 456 bp, Oryza sativa
  unsure (1)..(456): unsure at all n locations
tgcctgaagagattggtaacctcgttaggttagaagctcttctactccataacaactctttcacgggaattcttccgtcatcgttgggcaggcttaaaaatctgcaagttttatatatagacaataataaaataagtggatcaatcccattagccatagggaatcttacagaactaaattatttccgccttgatgtgaatgccttcactggtaggataccaagtgcacttggaaacctgacaaacctagtggaactaggtctttcaagcaataatttcacaggttctattcctgttgaaatatttaagattcacacgttgtcgttaactttggatatatccaataacaactnggaaggatcaataccacaagaaatcgggggcttgaaaaatcttgttcaattctatgcagattccaacaagttatcaggtgaaatccctagcacccttggtgaat

SEQ ID NO: 61075 - DNA, 410 bp, Oryza sativa
gcttctagagtggacaaaaatcgcttttgttctatggaattggggttgagatggtagatattaatcccataaaattcaagaattccccaaaagaatttagaggtttgaagtacaaagcctccataaaagaagtgggtgaataccacgatctcatgggtgtcaagagttggaaatggctcaccaaatacaggacgccacccgatgatctccttgcttggcagtaccccatgcgccaccatttccttgagagtttcttccttgacatcggaaggtgcccattggctctggaagttttctctattgaaggcggaggttgcgtggaaggtttctgttgaagggagacggtttggaagaagcggattgcggtgcagctgcgaacccctatcttttggcggcacaagtttgttact

SEQ ID NO: 61076 - DNA, 466 bp, Oryza sativa
  unsure (1)..(466): unsure at all n locations
ntatagtaataactgtataggactatataggaagaatgtatttcatgcatttcccttcctttaatatattgatgccctgtaaccttgtcaccttcaattgtaaatggttaggatggtttattctatcatcgaatgcttagccgtgcttaggtctacttttgattcaccacccgtgatttatgggtattaaaatctgattacctcactcaatgattaatatggaaacatgctctaacttggacgggtgatagggcgatgactggacggtgattttccctgatgcaagtagcctcgtctgggttgttaaggaccgaacatgttgacgtatattcaagcaccatacgtacttccacacgccttatttggngccggcttgtctgttttcaagtttataagatgcaattggaaagcatatatgcaattggatagggatatatgcaatgtgatacaagttacctcaatgggg

SEQ ID NO: 61077 - DNA, 431 bp, Oryza sativa
  unsure (1)..(431): unsure at all n locations
agcttccaccttntaatgtgtccacctcctttctcttctcaccaatcacaatcttcttccattgaagtgcacctactttcttagtacttgtgtccaaccacaaaacttcttatattttgggacagaggtagtattgaatagagtaactcccaagtgaacatcatctcatcatcacattactagttttcatgaaataaagtgaaggaaactactatacatgagagatcccatctatctggtcaaaacatacaaggtactcttatgggagatatcatcatttgattcaacaaataaacaacataattgcatcacaaacgttcgaagaataaatgtaaccttcaaatcagatagtagatgatcgagatcatatgaagtgaagaactaccttgtttgaactattctatttgggttntgaacaacgttccatcata

SEQ ID NO: 61078 - DNA, 319 bp, Oryza sativa
tgcgatgtgcatcgactacaccgaccgtaacaaggcatgttctatggacccttacccactgccacgcatagatcagattgttgactccaccgcggcgtgcgaccttctgtgttttctagatgcatactccggttatcatcagattcgcatggctagggatgatgaggaaaaaactgcattcattacccccgtacgaacttattgttatacgacaatgcctttcgggctaaaaaatgcacgctctaactttcaacgtactattcgaatttgtgtgggtagccaaataggacgtaatgatgatgactacgatgatgacttg

SEQ ID NO: 61079 - DNA, 430 bp, Oryza sativa
  unsure (1)..(430): unsure at all n locations
agcttgcatagtgtacgtgcactgtgcttgcaccattcttctaaaaaaatggtgtcattagaattgcaatcttgccatgaaaaatccaactaatcacagctacttttaacagtttctaaaatgtgtccaaattttgagcactcgcaaagtcccaagtcacatttgcactcagtgcactaaggttgtgtttagttccacgccaaaattaaaagtttgactaaaattggaagtttgaaaaaaaaacgttggaagtttacttgtgtaggaaagttntgatgtgatgaaaaagttgaaagtttgaaggaaaagttgggaactaaactcagccttaacaaanagtcagaacagcaacaataacggctgacttcggttaagttacacaatggttttgagagtggataaggtctggacttctggttcaccatgttat

SEQ ID NO: 61080 - DNA, 431 bp, Oryza sativa
  unsure (1)..(431): unsure at all n locations
taacatctanatatgacacatgatcactcactagcaatatttatctatggtattttaaagctcatggaaccatgacatatatacaatttattactccaagcataccaaatcatgtcaattatcatcctcacatcattttcacattatttaacatatatatccataatttatattatatatagcataaaatcatccatgtattccatagcaaagcgcagggtttcaactagttaattactacaaatgatccaccctaagtggagttgagttaaataaagcaaccagttttcaacaagataaagaatttcaatttgagtagattctactggtagacctgcataatactctgctcatcaaaaacctgcacaagacattttgatattcctcgggtgcattngcatgctcttgcaactatatatattannattttt

SEQ ID NO: 61081 - DNA, 435 bp, Oryza sativa
  unsure (1)..(435): unsure at all n locations
agcttctaatataaatgtttaagaacaaatttttaagcaccatattaaaaaaatattaaatntatatcctataaacgcccctacatcaccccgtggcaatcataccaatgcccctaaaccgacaagtgaccctctaataaattataaaaattcacagaaattatatttaaaaaatctaaccattgatttttcaatattttcaatcattatacgcatccgcgtgtgcgctcgcgcgttatagaacacgtgcgcatgcgcgcaccaatagatcacgtgcgcatacgcatgcgcacaccacacgcgcgtgcatcatatcgatttagctgcataggcaatatgacgttactatgaataaatgacgagcgaaccctctaaaaccgaatcgggattatccacttgaacagatggaaaacacaaagcaaggtatcattgttt

SEQ ID NO: 61082 - DNA, 456 bp, Oryza sativa
tgtagcaagagttgttgagcatgctatattcgtcaattattttcatcaggcttgtgcaggatcaggaattcctggatcacgcattgcttcgaagtccaacttccgaagcatattaacatcattatttaaaaaacatatacaaaaatttgtctcaattgttgaataaatgggccatgcccgatttaattcaattaaatttcatacgcccacaattaatgttagagacaataataacaccttaaaaatttaagtggagagatctcaccttaaatagggagacaattaagacttcctgttgaccggttgagaaaggtgggcagactgtgcgccccgtgtggccatgccgtggcccaggccgagcggagcttgtgctctctctctctcattatgaaatgatggaaatcgattctgtggtaccgtgaaccagcggatgtacgttatacaaatgcctcaacc

SEQ ID NO: 61083 - DNA, 430 bp, Oryza sativa
gcttatccatgaaagtctgtctgatgaattcaaatccatgtttgtggaacgaaagaaggattgtgaagatctcatgatcctagggatattgatcagtaaggctgctttcatgtacaccaatgctatactgcttgtaacgcaggcccatttgttccgctgggttgccgaaatcaattcttgatatccagtctagtccaccccatggcacaatctgaatcaatgtagcgttttgtggcaagaacacacagttggtgagtccagcaccatggacacccatcatcacatcaacagagttgacaaccttgccaaaatgggagagatcagagctcacattggcctcttcaaccaccacctcgtaacctatctcctcagccatcgccactatctcgttaagattgagaaacattcttgtcctctgcctggatataat

SEQ ID NO: 61084 - DNA, 347 bp, Oryza sativa
  unsure (1)..(347): unsure at all n locations
tgaaagcatntacccaaattcgagctagaanactaacaagtaattgcgactaggganacacgttcgacctcgtcactcctttgaaacgttagggggacggcggctttcgagcaattttttgccttatctcgaaaacacgacataaaataagctctatagcatctacccaaattcgagctcgaaaactaaaaagtaattgcgacgatgaagttgatgcattcacactgagaattctgctctgtgtactgccgagcgatatggatatatgctaattctccgccatgcggagttcctctcgagctatctcaacgatgctgaatactcgaccataattcttttccatcttc

SEQ ID NO: 61085 - DNA, 433 bp, Oryza sativa
  unsure (1)..(433): unsure at all n locations
tgcatagcttcaacagcagccatttgtgctgcatccctgtacttcanaagctcctgtgaaaagttggatgcaattaaatattcaatatgacattaatgaagcattcaacagctacagagaaaaatgatctccaattctttcatccttcaatcctctggacagtatgactaanatggtatagtaaaattgctttgttgatgcccaggggaactggagccatcatttcacatagtaaaacagggcttgtccatcgtttcttttgttaagtatatatttgtgcaaagacaaaaattaaattagcaccctcaaaattgcaaaaggttttgcaatgctagacctattgtagcaaacagccatagtgaacacatcaatgagccaacctatgcgaacatgtgaatgagcatattcataccttccctaatttagcaagtga

SEQ ID NO: 61086 - DNA, 384 bp, Oryza sativa
  unsure (1)..(384): unsure at all n locations
taagcacaaaaactcttctcaatcacacatcatgtaatcacaaattacttgctcacgtcaaaaattaatcactgtggataaatagaccaaaataccccattcatagggcaacatctattcaactaataattgatctactgtgaattaactgcttcacctagttctttcaacaacaagggaaaatcatctcaggaaacaaattcaacaagatctaaggtttcaagtgctagggttttcttacctttctcactgangatgcgaggacgaagatgagcagttgagtacagaggaggaaaggaggcgacaggtgggaggcgctggttcttcttcctcttgttgctgcagtacccaacggggatggaggatggaggacggacagatgat

SEQ ID NO: 61087 - DNA, 469 bp, Oryza sativa
  unsure (1)..(469): unsure at all n locations
ngactatctgaggaagatcttgcctggcccttgcaccatactatccaatgatcttcacctggtcccatgtgaacatgtaaataaacaagcataatagtacaattcaagaaagcaattcagttgatgttatgtttttttgtgtggggctattgcaaatttatggtgaatcaacagaacaacaaatgcaatgtgttatcacaatgttgcagtttagtagttcctatgtttaagatgttatggtcctcttttgcaagcagaacaagaagaaagtatctgcatctagactgaatgagtagctcaaatggctctgctgtttgtaccaagaaggtattagtatctctcttctctttcttagaaaaccaagtcaatagtacttcattggagctagtttctgtacctgtcggcgaacaagacgggttatatccaccttccccatcacatttgtggcagcaaggccaatcataacagc

SEQ ID NO: 61088 - DNA, 420 bp, Oryza sativa
agcttggaatgtatctggccggagctgacgtgtcttctccaggagtcctcacgccggctccgactaaggacgagtgcctggaggctctcatcattccgacaggacggggcgaggcgtgtgtcaagccgcctgttgccccttaacccgcgatctgaccggtctgtgaccggtcacacactgcgacctgtcgcggaccggataagcctgcgctatgctgcattaaatgcagcgtgaggcgctcgtccaacccgcaataaacgcggttaggtgagcgccgctgtgctcacctaacccacacacgtggcgccaaaccctcaaggggtcggaggggtaaaggcttccccaacaaggctgtactagttctaacctcttttatgccgccgacgtcactacgtggtagttccttcttaacttactatt

SEQ ID NO: 61089 - DNA, 440 bp, Oryza sativa
  unsure (1)..(440): unsure at all n locations
ngcaatttccacccgacgttcgtactccatccaagcatgaatgaactgtatggtcggttcaagttgcgttatcggcccgccacttgaagtaactctgactgtgtcaatccattgtacgaattgacatttccttacatcctcctatgtacatccattttgggatagttgagttaatgatagtactgaggagtgatgaaaagaatagttgtaattaccacgaaatcatcgtcgacaatgtttggacacacgaaacacctttgtcctcgagttcggtgccttacggaccttatgacctgacagcggtcaccacaacgacactccggacgctcacgccacgtggggagtcctatgggatttacgtgccattctaaagcctcagcagcaattcgacgttcatgctcatncttccgccttangtagtccgatctttgttcactacg

SEQ ID NO: 61090 - DNA, 441 bp, Oryza sativa
agcttagtagaaatagttcgatctgatcgttgtatttcggtgctcttaagtttgtttgaatttaccctgtattactgtactgtgcttacattttagatcttatcaatcctgtatttctcctgttggatattctgaattacctaacctgagctcttattaaagccaagccaagtttctggaatgactgccagtctgtcagtcaccaagatatatcttcagatttaccaatacccaaatagaggaaaagttcttttgccactgaaaacagggaaaagtatttcaagtagtatggattaagcctcttgcagggcatttgttcggcagaactcactgcaatatataaagctgtaatcttgaagtgttatagccctaacgaaatattcagggcactgctattatttcaccaagtagaataaagtaaaaaaatattttattatgcta

SEQ ID NO: 61091 - DNA, 428 bp, Oryza sativa
gggttctcaccatgcaggctcagacaagcagcacctactccctccgtccaaaaaaaaaaatttcattcctaccatcccaaggtgaaaataatagagagtaagaatgactaaaatacccttaatcattgaaaaagtagtaagagtgataggtaggtaaataatattgaagggataaagcttctcgttttacgtgctgagggtaggtaggatggtagaagttggtagaagttgagtttttttttttgacggagggagtatgcttttagccctttacatgctagtcagatgcaagttatacacatggtcggatgcatagcaatttccatattgcaaacacacggtgcattctcaatgtaaattgacagttaacattcgtctcatttgagtaaaatacgatgccgcgccttatagttgaagcgtggtatcac

SEQ ID NO: 61092 - DNA, 441 bp, Oryza sativa
  unsure (1)..(441): unsure at all n locations
agcttatccagaagagaccgagtntaaagagaatacggcatggtaagttatctattaattaggaatagtttgttagtttccttttatctttaggaaagtgtgtttagtgtcctataaggactttatcttttccttttatctttaggaaagtttctttcttgtccgacaaggacttatatcaacccatggatataaatatgtacacctggggtctatgtaatctgtcctcacgatcaatacaattcggcgcatcgccaccttttttacttctacttttgtttttacgttccggcggaacttggcacccgacgcggggctgcatcgtcttcgatctccggcgaaaggataagtccaatgtttcaccggtccaggcaattgtatcgtttacgtcggcgtcaacagtagtcctcaccacctcgacgccacttgtcgccagtcctc

SEQ ID NO: 61093 - DNA, 437 bp, Oryza sativa
  unsure (1)..(437): unsure at all n locations
acggacctataaaactaagcttagtaggactgccgaacggggccatatgttgcgatctgtgttatgatacggatagctacatacatggcgtcgggccgtcggcacgtacggctgcaatgtggaaggcctcggcaaagtcgtcgtcggaggtcgtaagggcaaatttcgccgacggaaatcgtcgttggtggtgcccgcatgcatggctgcattattaatattgtacaatatgaaaactgcgactgttacggttatgccatctcaatgtcaaagggaaaaactatactaaaaaaaaatagcacaacccaggtcgtcacagtatactactccatcagtcgcatccctccgttccaatttaacagcacttatatgtttggngcaatttcgtttctcaccctacttttattgacttatatcaatcttatccctactttata

SEQ ID NO: 61094 - DNA, 438 bp, Oryza sativa
  unsure (1)..(438): unsure at all n locations
agcttagaaanatgattgatatgatttttaaaacaatttgtctatattttttaaaaagaatatactgtattgttagcagtttgggaagcgcgtgaaaaatgaggaagaagttaggaaaagagagtagaacgctgccctagccgtttcaatatattttgtaggaagcagatcagctgcctgcagggtggaccaaaggtttgatcgtgtacatatgcaaatgaaaacacatttaaacatgggtacgtaacaaatgaattatgatagaagttatataaaaagataattttctgttctataataatatttttgagttttaaatagatattatgcagatacgtatgtatgtttcatatatatgtccaaatttatacggatgtgatgaagcctgagctccacgagagacactcaagactggtggtggcccgatctttcagtgag

SEQ ID NO: 61095 - DNA, 450 bp, Oryza sativa
  unsure (1)..(450): unsure at all n locations
ntgcccggngtgcgcccgcatccagccagcaaccttaataaccttatagctgtggccgttattatcatttcacgataaacgggccgaaacgggcatcgcacctttggcagacccttcaacgccacaaacttctcgtttttgcttcgccaattcccagaggggggccaaatgcacaattttcagcgaacatcctgataaacagtgcagaaagggcaaaaggcaaatttcatagtaagaatgggcgaaaaagagtaaatattatgtaatgcgaaaatggcgcaagcgcatacgccaaaggcatcgaccataaaaagtgactaagaccgagtcatacattccaaatatccaaaaggccattttcggctacaataagaagggtaaggggccatcagccaaatatacattgttcgcctttcgtggcaaacgcanaaagaaaaactacaaaaatct

SEQ ID NO: 61096 - DNA, 439 bp, Oryza sativa
agcttcagcgctgagatgcccgatgtcagcgccaaagaatcttggcacttcactttgtttctttggtggctgctgacattgcctatttcagcgccaactgatatggtgctgatgtttgttgtttcagcgccatttgtgttggcgctgaggatgcaaacactttgagccagcacagcaaactgctctctgcccaggaaaaatacatttaacaccgcatagcaacctatttcagcagcacaggaacacaacttttagaaaccatccatccattccagccattccatccatccagtctggggagccgttccaagcgccactcccgcgtcgttgacggtccgcaagagctcttgtgcctgtaaggttagaaagtgcaaaaagtcacaaaaattaaagcgagagcgtgcaaataacataacatggcaagtactcaccactctat

SEQ ID NO: 61097 - DNA, 412 bp, Oryza sativa
tggattgtggcatagcattggattaagcttctgcaggttatcttgtcgctttaaagctaatatggtacctagatagtaaggagctcctcaatatgcagttctggttcgggcattttctaccatctgcatctggcatcactatttagtttggaacgttttatacagcatgatgctttgaagtggaagattgatcttactccttttttatgtatttgtaggaaaacttgcttacagattcaagaatgaaggagtgaaggtgaggctattttctagacataccctggtttataggctagatgcatgggaattaaattcagctatgtacatattgcctcaccacattctctgaacatgtaatattgtacaatagatcaaaataatgagttcatgttcatgctctcaacaataatat

SEQ ID NO: 61098 - DNA, 350 bp, Oryza sativa
  unsure (1)..(350): unsure at all n locations
agcttgtcatgtatcacctgttattatatattcatcactggtcaattttgcctgagaaaccagtgaaacaagtgaatcaatagaaaagtttaaatctgtaagctcatcgaaagcacgccataacattngctgctaaaaaagaaaaaaagaacttacagaaaagagtattcagtaagctttcacttatccactagcacctttagatgcatgctgtcaaaatgataagattgctccccatcagaatagattcaactctcacctggagatcagatcagctttaacacagttttcagcttgttcacgaacaatctataggggcctgatgcaacanggacggtggcatactggca

SEQ ID NO: 61099 - DNA, 462 bp, Oryza sativa
tgcatgtagcctccctagctcctcatggcaacattctcccaatgtgtttagcgccggccatactccaccaacctaattcctcttggatacgactaatcatctggtgtactgtcgcctcctttgctctaaagattcttgcatttcgttccttccagatttcccaagcaatgagcaagaagagagttctgagtcctttctgttttgttgcttccaggtcgcttgttccttgtgtccaccaatctaagaggtttctacttgtgttccattttgggatgatgtgcccttggtgcagccatgtgagaatcccaaaccaaatttgctttgagaccaggcattcaaacagaagatggtcgattgtttcgaggtttcgaaagcatagctggtagaaataattatttggccattccctgatctgtaaccggtcagctgtccacacccgggtttgaagaaccaaccaactga

SEQ ID NO: 61100 - DNA, 425 bp, Oryza sativa
agaactattggatatgaaaacagagtcaagaaatgcagaatccatgtttgccaaaagcagcaatataaatatgttgtgtatacccatagaaacatgctgggttatcaactcactagtttttttttaaaaaaaaggaaactcaattacattagacaagaagactatttgaactgaggaagttattgtgtatggtaaaagaagtaacaagaggcaaacaaagaaatttgttgtaaacaaataagggaagtagtattatctttccagtttgaagacagtttttttttccagataagacgatgagctaccaactctattgaatttggtactccattatcagtcctcgttttgcggggtgttaccccctattgtaaaaagctagtttgtctaagcaaaatgcttccaagtcccaccaaagctagattaac

SEQ ID NO: 61101 - DNA, 467 bp, Oryza sativa
  unsure (1)..(467): unsure at all n locations
tgcccttgcatggnggtataacctaatgatatcgnggtttatctccatttggtttggcccatggatcaagccattttcacgaatcacgacgccaactagctagctgtggtccttggataccaacaaggaatgttttgaagtgcttcaatttgcatatgagacattcaacatcattttcttccatcatcccatggtccagggcaaacctccattgataagaaagtctcttctagcacctttgagcctttgaggcgcctttacaatctgcctcgagtgatcttcaagccttctagaagcctttgaggatttcggcatggcttcaaagatggaagttttcgttttgtatgtctagtgtttaccttttgcctttaactcgagaggtccgagagggctccttgcttccatagaatttttcctagacggccctatggaacaaaggcttgtactttctttttttggaccatatg

SEQ ID NO: 61102 - DNA, 431 bp, Oryza sativa
  unsure (1)..(431): unsure at all n locations
tcttacaaggttaaatcttgagatgaaccagctccatgctcgtagcaagcaagactgggagttcatggatagcgtagccaattgtactcagctacaaagaatctctatagcgaggaatcaaatggaaggagaggtaccaagttcattaggcaatttttcagttcagctacagtatcttttcttgggacagaatcaattgtcagggagttttccttcaggcattgcaaatcttcccaacctgataattcttggactagattacaaccgattttcaggttctgtaccacaatggctaggaggtctgaagacattgcagaaactaagcttgtctaccaacagttntacagggtatcttccctcctccctttccaatctgtcacacttgacagagattcttctagacacaaatcagttcattggaaacatacctt

SEQ ID NO: 61103 - DNA, 280 bp, Oryza sativa
  unsure (1)..(280): unsure at all n locations
agggtaccaacaatacgggatcgattacttcttctacaatgccggcgacggcgacgaggacccaccacggcggccgccgtcgttgtcgctctcccgacttatcagggtaccaataccaagccgncccggctgcgtggaggtagcaccggactcctcgtgcgccggtgcggcgacgacgacgacgacaagctcgtggtggcggcgctcctcaccgaggagtaccgcaggcgcgacacgctggagggcgcctagctcgtcgtgctccgctccggtgagtgga

SEQ ID NO: 61104 - DNA, 474 bp, Oryza sativa
  unsure (1)..(474): unsure at all n locations
tcaatcgtaacttccgaagactntctcgcccctccttgatcttcttctgtaggcgcccacgttccacttcttccttctttttctcttcttctatttgacgcaggtccatgcgcagaggcgacgcccggtaaacgcggacgccctgcctgcgcatgctatcatagaacctctcgggattccagacggcgacgtaaacgccgatggcgtccgtgaagttgccactccggccgcagaagccgacgatggaccccgagtgctccatggagacctcgaaccgcgtccatccagctctgtcttctccaagattgccgtatggtccgaacgtcctgttccggttgctcctgaactgcaaccaccggatgaggtggttgtcatggtagccgcacatgtgcgtcaacacctccccatggaagtcgagctcctcctgtgtgcgtgcatgcatcaggttatttgtcagtcagtgattaattagta

SEQ ID NO: 61105 - DNA, 325 bp, Oryza sativa
agcttgtcgagctgctgcatgttgtttatttatatatcgagctccaacgttgctaggaagagaatatccgacgtcaaaaggaatgagaacacgtctcagccatcttatccttatagtgacctgtgagttctttagctttattgcttatatggttatagctgtgtgctaatgacatgttaaaaattgtgatagtgaatattgaaatacttgtcatttttcatggatctcaaggaccatttagtgtattacttggactctcattgtaaatgtaacgataagggtgatacattccatgtcaataatggggtttgatcgtttaaacatt

SEQ ID NO: 61106 - DNA, 398 bp, Oryza sativa
  unsure (1)..(398): unsure at all n locations
tcaatcgtaacttccgaagactatctcgcccctccttgatctccttctgtaggcgcccacgttccacttcttccttctttntctcttcttctatttgacgcaggtccatgcgcagaggcgacgcccggtaaacgcggacgccctgcctgcgcatgctatcatagaacctctcgggattccagacggcgacgtaaacgccgatggcgttcgtgaagttgccactccggccgcagaagccgacgatggaccccgagtgctccatggagacctcgaaccgcgtccatccagctctgtcttctccagattgccgtatggtccgaacgtcctgttccggttgctcctgaactgcaaccacccgatgaagtggttgtcatgggtaccgcacatgtgcgtcaaca

SEQ ID NO: 61107 - DNA, 440 bp, Oryza sativa
  unsure (1)..(440): unsure at all n locations
agcttaaagaatgaatttgaatccatctgttctggcttgaaggtgaacatgattgtatttttaagattgcattttagttactcttaacatactccagttactcaatcatatacatatctgtttcacacatgatctatttatgcacttttgtcgcgtttagtctaaaacgatgctgtcaaattttaaaagggcattgctttactaaattgtggtgtatgtagtattagcatgtcaaattacatttatgcgtttcttgcttcccgaccatatgtcaaataactgaaagtgttagtacttgagttaaccctttnttcatacttatgccatatagcaccctaattttgttcatgcgatcagaggataaaatattaagaggattctttagtatggctcattntattgtttctaagtttaaggttattcagacagataacacttta

SEQ ID NO: 61108 - DNA, 433 bp, Oryza sativa
  unsure (1)..(433): unsure at all n locations
cctgatgtgcatcgactacaccgaccttaacaatgtttgtcctatagatccttaccccttgcctcgcatagatcagatcgtcgactccactgcggtgagcgaccttttgtgttttctagatgcatactctggttaccatcagattcgcatggctagggaggatgaggaaaaaactgcgttcattacccccgtaggaacctattgttatacatcaatgcccttcgggttaaagaatgcaggtcctacttttcaacgtactactcgaatgtctttgggtagccaaataggacgtaatgctgaggcttatgtcgatgacttggttgtaaaaacgcgcaaccaagaaactttactttcagatctagcggaaactttngagaacctccgctccgcccgcataaagctgaaccccgataagtgtgtgtttggtgtacct

SEQ ID NO: 61109 - DNA, 437 bp, Oryza sativa
  unsure (1)..(437): unsure at all n locations
agcttcacattgctggaccatgtcgcatgcatctttgagggcggttggccagaaaaacccctgtcgaaaagctttcccgaccaatgtccgactggtggcgtgtgacccacagatgccttcatgtatatcaaggaggaggtgtctgccgtcgtccgacgagacgcatttgagaagtaccccgtttggtgctttcttgtatagatcgttgctgaccatacagtagatttttgctttacgagttattttctcggcctctgtatcgtcctcgggcagctcctcgctgttgatgaatttgattagtgggatgcgccagtcatctgtggtctcgatatcggcaacggcgcgttctgcctttgtggcctccgagccaatgtcgggggtggccgggctaacttcgccgctaacctctnttactgatggcttcgtcaagatgtcta

SEQ ID NO: 61110 - DNA, 475 bp, Oryza sativa
  unsure (1)..(475): unsure at all n locations
tagatcatcatctatctctacgttgaaactntctgccccacctgtcatccgcaccaaacacatttcctgcaaacctgggattccacttgagattagccaccaccaccgccacttcccatggcagcagagtaccgatgcccaaggacgttcgtgcacacaggaatagagttttccattccaaacctctcataattagtcgccatccaaccgaggcaactttgaccgcaagaaacacacaaaaccaaaccagaaacaaaaaaaaaatgccattgtgtgctcatcttcttctccggggacacaagacccacaaagccggcaccggagaaagtgccggcgtctttccctggccggagcttaataaaatggctagctggtcaaatgaagatgacaaagctaacccaacccaagcctagattggtaagcgcaccggcgcggagtaaacaaatccacacctaacctaaacaaacccggacac

SEQ ID NO: 61111 - DNA, 438 bp, Oryza sativa
  unsure (1)..(438): unsure at all n locations
agcttggtagaggcaggaacaagtccgtttcttacgatggattttctgtgtcggccgattcagagagggagaatagaatttggatttattgaggtatatccagccctagtgggattagaagttatacttctgatttatgttggagggctcttgctacaaatagatgagggattcaaacaaagggcaaacaacctttaaaagagagaaaaattaaagctaaggtttagtcgagagagagagaggtgcttgctgtgcactttgtaaactcggttgatataataaaatagatcttcattgagtaagttctgaattcaagggtatttttaatttcataaaaagatttgattgtttgtttgtttggtctttcctatcatttgcatccctctanttataaattggttgttgtatttgatcctacgtatatctatgagctgttac

SEQ ID NO: 61112 - DNA, 464 bp, Oryza sativa
  unsure (1)..(464): unsure at all n locations
ggactntaaaagtcagagcatggagggaatagaaacgattgaatctgtaaggactgattntaaattttttagcagttatttcaggtgatatttttttttttgcaagcggttgtagaccgagctattttttttttaactacgcaccttgtgcctcgcagcagtagaacccctctgtttccaaccaatcaaaccgttccccagccggctcttgaacggtccacttcgcaaagccaggagaagagccacggccacccccacgctcgctcccaaaattctctaatcgaccgatttctcctctccacacgaacaggtactcatcaggcttacctagctctgacaacttcatgccgaaatccttccttcttctccgtcgacggcaaaagaggcacctcggcatgaaacacccgacaagtacgggaaaagaagaatggtctggctagctatctctggctctgttaatatgc

SEQ ID NO: 61113 - DNA, 437 bp, Oryza sativa
  unsure (1)..(437): unsure at all n locations
agcttctcgaggccctaagaactcataatatcacatcattgatgtcaagatctgtccaacgacaggcaatggcgtgcacattttatattatacatgaaaactgtatcttgttaattcaattaataaagatcatgtgtttttatgtctcttttgtttgttttattttgtatacttaggtacactggcacgcccgcacttattttgtctctaaacatatagggaaatattcgtatttttctatcctaaacactaatgcgagtcgttaaaagaaaactttttcgtactttatgaactataagcataaaatggactcaagctacatgtacatacgtgtaggtgcgcaaatagttaccacaatttgcagatagccgtctgggtgtaattacttaattattntgtgtgaagtaatccaaaacaatacatatacgtaaaaaaat

SEQ ID NO: 61114 - DNA, 451 bp, Oryza sativa
  unsure (1)..(451): unsure at all n locations
ngatttccactctgttcctaacagagtactctgtaattgctttcctcacactctcaactgaaggaaagacaagcccaacagagaaagctgggttgttcatgtcctcttggttccaagaattgaatctcattctctcttctccttcaccatcagactcaggaagatccagggcatcatcctctgtgtctgcatcatcatctactgcagtaggtactctgatctcaatagccttcaaatggcttcgctttgccttcttgttgcctctaacctttggcatatccaagttaacagcatcctctaataagtcatcatctccatcactaagatcatagtcactgtcaaacaattcctgctgttcatctccatcagggtcttggtggtcatctccatcagattcttgctgttcatctncatcaaggtggtggcctgggccaagctgggtctactcttt

SEQ ID NO: 61115 - DNA, 434 bp, Oryza sativa
agctttccaacttcacggctgggggctatgtatcagagcttattcaaccaagacgggccaagggtccaggagccttgtcacccgaggaaatccctcctacgacaaggctgggggctagggagagtgtacgactcaaacggctaactaaagtcgttaactgagaacacactcttacacacacaacatccagagtaagaaaacatttgttaaagatagatttctttattcacataataattcttactgtttttttacataaatctcccactacattacactttttcctaagacatctgtaacaggccacgagtactaccaagagggccaatgccagttcatagactggaataccttctcggctaatggcgacatcgacctcgcaaggtggtctatctccgtcggagtcctccgagaacaagcaaacccttcatgga

SEQ ID NO: 61116 - DNA, 457 bp, Oryza sativa
  unsure (1)..(457): unsure at all n locations
tcaactaccaaaatctctccataacatactcttatagcttttataaaanccggggctctcttatctatcgtagagctagagcttcaagatgccaatatttgatgtatggaagatgtttatagggatgggaagaacaccggtggctcgataaagacatagttagtagaantttttttcagagataatgaatattttgtaaataaatgaaagcatttggcttctgcacagagttcactcagttgaaacaccatgaagcatgcaaaaggaaaaaaaaaaagcaatacggagaaacttccctactgacttgccccggtgaaggctttcacctctatgggcctgttatgtttagagaataaagagagtaaaggatatcaatcgcgaaagaataattcctctagtgtcatttgctttggaggaatgaaatatactacaactagagataaatcttcttttctac

SEQ ID NO: 61117 - DNA, 404 bp, Oryza sativa
agcttctttatcgttccacctgtctttatgcacactcatgattggttgccctggcaagcagtcggcggcttcacggcgtgcagcacgcacacacatcttgtgagcgagaatccagggaccagtgcatccatgcatgccaagatgatcatcagcgctgaacgtgcaaacgcccggcgacgttgctaattggatcgacattgatcttttttctttctgaagttgatttccatcgcactcgttgataggaaactcggcgtcacccctacctggcgcgccaactgtcgaaacaaattttcggcaatatgaaaagggggtagcatacgagacctaaaagtggatggatgcggagacaaaagatttagacaggttcaagccctctcgatgagagagaataccctactcct

SEQ ID NO: 61118 - DNA, 444 bp, Oryza sativa
  unsure (1)..(444): unsure at all n locations
tgttggtgtcttgttgtctgcgtgcatgctgtggtggctcttctgcgggcgatcaaaagggcagtgacagcatgtattgacgaacgcaatgtgcttgctggccgaatagacatgaacacatatcactgagagggagtgaaacagtgttgacgagtagcctgcttttgggttagttcttgatcaagctaaaatgcacttctttttcttgatcggtataaagggcaccctttttttttcttgcagcattttcatatgcacccaatattgcccacacggccacaccaccatcatctataggcaagtagtatgttcatgtgcaaattttgcagggatcaaataaatgtcatttccctgatccattatttggctatctcgtgtacttgatgccgattnttaatttcttattgctgcatgaactactttcttttgacaagcagagtctca

SEQ ID NO: 61119 - DNA, 461 bp, Oryza sativa
  unsure (1)..(461): unsure at all n locations
actacgggttggtactataatcatacattactttgctgtgttcatcggttcgcacaacagatcccagcaatctcttcgttcattccatacatcatccagcacaagtaaaaccatcttgtgctttattcgttttgccaatgtctcatgaggactacaaacttccgatagaccacaattatccttctctaatgaacttatgatgctctttgttatgtaagtaggatcaaattgctctgacacacaaacccatgcatgcatgtcaaaaaaacccttgtatccttgagtcgttatatacaagctgtgccaatgttgtcttgcctaatccacccataccgacaatagccaagatagaaactggagtagctacactgtcactcgtcatggacaacaactnntctacaatgttgtccttgtcttgctctctttcaataatttccgtgcatatataacagagctagtct

SEQ ID NO: 61120 - DNA, 367 bp, Oryza sativa
  unsure (1)..(367): unsure at all n locations
aattccgttcccgcgtctccatctctttatggtcggctagcttaggctgagtgtagtttcaaactttntcttcaaacttcaaactttttcatcacatcaaaactttcctacacacacaaacttttaacttttccatcacatcgttttaatttcaatcaaactttcaattttgacgtgaactaaacacactgtcacaccctgaaaattcaaaatatataaattggtgtttaaatggaatttctagaatttattttaaaagtcttgaaaagaaaatctaagtttaattaataaattccaatataaaaagtggccagataaaatttcattaaatactttgcttaattctataattgctagatctttctgg

SEQ ID NO: 61121 - DNA, 419 bp, Oryza sativa
  unsure (1)..(419): unsure at all n locations
gtgaaacancacgtntgccccatctattacattcttattgctcaaagcaagacgctctacctgaacaccgatcaccttgggggcaacctctcgaggaagcgagaaaccgcccataagcaacggcgatgtgccaactaccatcaccttacatgcaagatggattccaagcaaggaagccgcgcttgcacaacagggagtggtcaagaagagagttgcagagatagatgaggtaaaagcgggtgctcagtgcatgcagcccccagccctctacacttcagtttctaccccgttagaggaatgggcaattccagatccatcttcttctacatgccggaccattctctacaaggtcccacaggtacaagagtgtgattctatantcgaattccctaagcctcattctgatacacaagaaacgt

SEQ ID NO: 61122 - DNA, 283 bp, Oryza sativa
aacgaacacaagaggcactgagataccaaaccaaaggaggaccaaggcgaacatagtggtgaaagggacggcaccaaatgacttctccccccaaataagagcattcaatatgaagaagataacaaaagcaatccctggaaataagaaagctgtgcgcataattattctcttccactctgaacccttgaacatcttgtagaggcgtgaagaagcataaccagcaagcaaccccatctagacccagacaagaagcatcgcggtcatcaatactccccgatttgat

SEQ ID NO: 61123 - DNA, 315 bp, Oryza sativa
  unsure (1)..(315): unsure at all n locations
acttatntgagtatcgctctgagaggataactgtggatgggctcaagaccgatatcgcgcgtggagtatcgatctgagagtctgattgtggggtgagttggttgaattaatagcgttctccgtaaaagaataagtacatgtacagggggcatgagtttaagccataacttggctagaagagaatacatcaggcgggccacattatatagtatagctctcatgagtcatacaatggccagctaaagaaccggctaaatcagtgtgtgaaatagatgggtggatgcagcaatcgatcatgccggatcggagatatgt

SEQ ID NO: 61124 - DNA, 298 bp, Oryza sativa
acacggagagatcgccggctacctgaggacctcaaccctttcctaatcaccttatccaacacaatctctgcctgctcacctcggccagccgcacagagcgccaccagcaatgcccggtacaccacaacatcttcgtcgcatcccttctgcgacacgcgccacagcatggagtagagaacgtgtgtggcctcatcgagcatgccagcatcgcagagcgcaagcacgatcgcgcgataagcgtccttctctggtgcgaggcactggttagacatttcatcaacacctgcagagcgagttc

SEQ ID NO: 61125 - DNA, 434 bp, Oryza sativa
  unsure (1)..(434): unsure at all n locations
acgcatgacaacttgctgtgcttcttcttgtattcatcatacaacggcatctggcaatcttccaccaacttactaaacttctcataatctctgtcgttgtcctctgcgtcttcaatgtcatgcaacattgtagatagacattgagtgtccaaatctatggtctctccacctaaaggagaaggtacgaacatgccttctcgagctgcggcggtgttctctacatcctgatccaacacttcttcagctgcgacatcaggcgcctcttgctctccatgcttggtccagctggtatatntcttcatgaatccattcattatcaaatgagcatgcacttcatccttgtcttcgatcatctgttcattcttacagtccctacatgggcacaacatgtgcatgctcatcctactttttctgtcattatcncgcaatgtgac

SEQ ID NO: 61126 - DNA, 473 bp, Oryza sativa
  unsure (1)..(473): unsure at all n locations
gactagttgtggcactggcgcctttatttgttatccctctnngttaatcctaanaaagagaacgagtcctttagattagatactttcttctttttttagtaaattggtatttgcttctgcaattccaattatatcaatactttactcctaatttattactcctagagttttctatttatggggacagacaataccccaccccaggaatagctgatntgaggatgatcaatttagaggatatgttcgccgtcttgcttcccgccctttgtttagggcagtggaaagtatttttccttttattntangaattttgggaacatttcaacaaaggaggtctttcacaggtcaaacgagatctaagacttaatctaaaagaaattactaaattgaatctatttctattaagaaaaattgcattataaaaaccgatcaaaaatggcgagcgaagtatgtgatcgaaaaactttgttctt

SEQ ID NO: 61127 - DNA, 328 bp, Oryza sativa
catgataataacgcagatacccgatgcttaatttgctccgaatttaagcttcgtttagttcaacttatcagctgattagctagtaaatgaatataaggatcaattaaatatataaactataaagttaacaaataggttagaaaaaagttatctgcgcaatgctgatgaatctttttttttgaagaaatcgtaattctaaaagcatgacacagataatagatatgcctccattagctaaaaagaaatgttattgctcagttattacttaattcatgattcttcttgaggagaagttgattgacaattgaattaattaagggaatatctt

SEQ ID NO: 61128 - DNA, 449 bp, Oryza sativa
  unsure (1)..(449): unsure at all n locations
cctcgagctggattcctttaggtatgttgtgtttgccgccggctcgtcgtcggggcttggccgatgggagattgcggcggaagaaaggggaattgggccacctaaaactcagcttttccaaggggtgtgtttagatgcgggtaaaactttctatttgctgtcacgtcggatgtttggacgctaatttagagtattaaatatagactaataaaaaaactaattntataaatgagagctaatccgcgagacgaattttttaaacctaattaatctataattataaaaangttattgtagcatcacattgtcaaatcatgacgtaattaggctcaaaagattcgtctcacgaattagttcaagggtatggtattggttttgaattagtctatatttaatacttcaaattagtggtcaaaatccgatgggacagggacttggaataagtcccg

SEQ ID NO: 61129 - DNA, 375 bp, Oryza sativa
  unsure (1)..(375): unsure at all n locations
cagctcttaatgattttgtcttatcttgttcggcgaagnaaagcgtgtcgattgcgacgccagcaaatacatcaaccggcccaggccctacagaccataccactttcgtggccatttgctgtctggggactcgatatcctgtgaccgtttatgcgggccccgggcgggtttgagtatctgtatgtcgcgattgacaggttcactaagtggcccgaggcttatccggtcgtcaagatcgataagcactccgcacttaaatacattaaaggcatcacggcccgcgttggagtgcctaaccgtattattacggataatggcacccaattcactagtgaactcttcggcactactgcgatacatgggcataagctctgt

SEQ ID NO: 61130 - DNA, 346 bp, Oryza sativa
  unsure (1)..(346): unsure at all n locations
acgcgtnntatgtgttgngacgaggctcatgtgttgggcagtcgcgaagtgcgggtgaagtgtacatccactgcagtgtgagtaaactaaatctattcgaatagccgtgctcgcggttactgagcaccgtgtattacacttgactagactctaaattcttaatttgtgtgggatgggatattgcatgatgatttttatgctgttggagccacttcctgagaggctggaaggtggacgtcctcagaaaaccatgacgactcaatagcgggaagctatccttgggatcacaatggatggtggtcagaaccgtcattggntactatgaacactgatgaacactggtact

SEQ ID NO: 61131 - DNA, 337 bp, Oryza sativa
  unsure (1)..(337): unsure at all n locations
cctttgggctcctncatctctctgtattgtttattcttatgatgggcgtcaatttccagagatggcgccagcgccgggacaggacacacgtcttcacagcatcctctgccggcatgaatgacacaatgtgctggaggagagcatcctggaggacgtcgatcccgtcctcttcgctggcctcagccattctcttgctcctcaagctcttttgcttatgagacattccgtcgaacaagtggcgggcgacgcgggcactaccgcgcaagaagcgaagagccgactcaccatgtgcaatgcgaggtcctcgcttaatcaatcagacgcgcggcgcccatgg

SEQ ID NO: 61132 - DNA, 288 bp, Oryza sativa
ttttttgtgtcaatctggctccgacgtcgtatccactggctttcattgaatgtttgtcaaatacactggagtgaggactcgctttcttcgatcaactgacttattccgatctattgatccagtctctaccactgctaaatatgcttactatgataccatgagtggcctgatatctgactgggaaagagagagtgaaaacattgtaagatccatatacttgagattaacatctctgtgccgttgaatgtgtccgattttatgagttcttttgatataatatacatcgtt

SEQ ID NO: 61133 - DNA, 351 bp, Oryza sativa
gtcgaactctttatgcctttttttgtaatccacaccactttgtgggctccctttgatacttcttaccttcactcttgctcgtgatccgatgcccacaataggcgacatcagtcacgattcttataatacaaaatgcatcgtcgactgcataatctttgacctcagccacggacataaacttgttccttatatgcgctgaggaaatgttccctctggcacgatcttaacactaagagttgtaaactttgtcgacacctactacctaacttatgagtcacacctgaacttgtggcttcactgatcatatacacgattggatttcacactactaatttatacttgcgtgccttg

SEQ ID NO: 61134 - DNA, 424 bp, Oryza sativa
  unsure (1)..(424): unsure at all n locations
tgccaaaatatcacccactagcaatatttatatattcaacctcatgcaagcatgcaacatcatctacaatntatttaattctacaaatcaacatgcaaacatatccaatcatcacccctcgcatcattttcacaatatttttacaaatctatctatcatntgtataatatttaaaataaacttatcaatatgttccacattaaagcgggttttatttgtttgtttcatgataaatactgataagctctgatatttcatttgttttctttacccctatcttgattgtaacgagaaaatatatattgaaaattacttattaatttccgcagcaaagcacggcgaatcacctaatatattgataacgtaatgcaattcatggatgttcttttttttcacagatacacctgaatgtactctcaacata

SEQ ID NO: 61135 - DNA, 464 bp, Oryza sativa
  unsure (1)..(464): unsure at all n locations
ctcaacgaagaggcgaggaanaggcacagacttatctcacattgccgtttgccatgcctagtctctcgccacatacaaccactgcacatgagctcgacaacggaggcctccatgaccatcggatgagctcgacgacggttgcagcggggagctcgtcgactcgatttgcgccgctgacatcaatctccgcccccgccgcctcaagccaggcgactgtggcctcccactccacactgccgccgaggagctcgccgacccaatttacaccgccaagatccacctctgcccacgtcgctcagcaccacaccagatccggcgacaccgtcaagcttcgcatccgtccactctagaagccttataggagagaggcgtcgaggatggcgtcgatctggtcgctcgattcacacaggttgtcacggagctcgtggccgtggaaggggagagaggacgttgtcgccgtcgct

SEQ ID NO: 61136 - DNA, 385 bp, Oryza sativa
  unsure (1)..(385): unsure at all n locations
tactnaagcttntggtgaaattgctgcanaagaatgtccttatgaaacttatatctgtagccctgtcagcaagggtagtgcctgatgtccaataactttcccagcatttatgttgcaggtgccaatccggccaagaaaaatgctgcctgtatgatttgctattctttctcaagtagtttaagtaagatattgaaactcttagggcttttgaattgaaatgtcattntgttatttgatatctgggttgcaatagccaatactatgttctaaggctgtactcaatgcatctnctaccagggcattcttcaacctgatatgtggaatgtagttccatctgatagatggagatggtcagaattaagggagatgatttccaaagttggag

SEQ ID NO: 61137 - DNA, 435 bp, Oryza sativa
  unsure (1)..(435): unsure at all n locations
ccggacgcgtctatgtgtgggacgaggctcatgtgtttttcttctcggagtgcgggtaaagtgtacatccactgcagtgtgagtaaaccaaatctattcgaatagccgtgctcgcggttattgagcaccgggacatgtattacacttggctagactcanagttcttaacttgtgtgggatgggatattgcatgatgattttatgttgttggagccacttcctgagaggcgggaaggtggacgtcctcagaaaaccatgacgattcaatggtgggaagctatccttgggatcataatggatggtggacagaaccgtcgttgttaatgtgaaattggattaanaattgacagctatgcttgtcttaggttatgaaagaatacaaactagcttatgcaaagacctgaagcatccttaaatacctctatatatcttgtg

SEQ ID NO: 61138 - DNA, 391 bp, Oryza sativa
  unsure (1)..(391): unsure at all n locations
aggcgcggnctgcactgcacgcgatgtcnattgttcangacgatggccgcagcatcgatcgggtggtctggcgtggggaaaaaaaccctcagctctgtgcacgaaacgtaccgggaatcaagtcatcatgtggtcgagctatcacgcgatggtggcgcggtggtgcaacgcagaaaaggtgcctgcctgattgatgaatcgattgatttggctagtgcgtggagtggttgcgatgcatgcggtttggttagtagctgcaggagaacgtacgcacgcaccggccggcgtgacgttcgtactccgcgcactaatgtgatgggtttgagataacctgatccatcttatctatcgatcgatctgcaatcttcgtcttagagatcgggtgatgatg

SEQ ID NO: 61139 - DNA, 380 bp, Oryza sativa
agttaaataatgaaggaagtatgttcttattgttttaaattaccaaagctgttccagagaacaaatacacagtgcaaattcttcacgctttgatgcaacaatccccaattttggcagccaaagtctgacgttatgcttcaaatattgaaattcaaaattccgtgtgttcacgaatttaaaattcttttcaacaaagaatacttctaaatgggaaaatttattggtcgctctacagttgcacgcgcttcgacaaatatgccacgaagttgtctgtacagactgtacttcatgttttttgtcccaaatctgtttacagaagatcaagaacaaatatctttggacacaatgtataagcacatgcgactatggagaaaatcatc

SEQ ID NO: 61140 - DNA, 190 bp, Oryza sativa
cattagaactatgtacaagctggattcacgtggacagccagctgtttatccgttatacaattcacaccgacaaatctatgtattattctcagctaagatctcaatgaccattgtttgatccaagacgttaagcgttcaaaaccattcaagccaaagaatatgcggttacttcagcgatctgacgtatgaa

SEQ ID NO: 61141 - DNA, 321 bp, Oryza sativa
  unsure (1)..(321): unsure at all n locations
gaganagcatttgattctatataacacttcactctttatctcttatgaaaagaacaggggtggctgattaatggctgcacaggatacaaatgacattttcctctgcacattcttccaaactacgtaatggggtacctgtaaactctcttaaatgcacaacgggggcttggcaatgtaatgcactctcaccactgcgatctggttttggtgttgaattcttgccagaataactaaacagcttgctacttatgcccgcaaccaagcccaccaatgaactcgatgtaaatggtttctcacagtacaaaacttgtgtgacacttt

SEQ ID NO: 61142 - DNA, 323 bp, Oryza sativa
agcatgagactatggtttcgcacgacgatttagctatgatattgattagctggtacacatggggaaaattcatgttatttcgattatgatcagctgatgactattacatattatgaaaccagaggttgatgtttcgtttttgtacgttcattttggttgtactatattaaaagacagtggtggtgaagtttgccttattgccctacgtgtttcttagtttggcttttatcctttccaaattctagattaaaacaatcttggaaacaaaaattttaatggaaacagacaatttaatggaaatgaatgttaattaaattgggtga

SEQ ID NO: 61143 - DNA, 379 bp, Oryza sativa
  unsure (1)..(379): unsure at all n locations
cgaaatactccgaggcgaggaagtcactggccggctcaacaagtgggcggcagagctatccccgttcgacttacattatgttgcacgctctgctatcaagtctcaagtgttggccgacttcgtagctgaatggacagcggtacttgcccccaaccccgagcccgccgaacaattctaggtgatgtgctctgacggctcgtggtcgcacaagggagcacgcgttgcggcagtactattttcgccgaatggtgtgccgattccgtacgcagcaagactgcagttcgacacaaccaacaatgcagcagaatacgaagccgttctcctgggcctaagataggcgagagcactangaattcggcgcctactaatccgaactgac

SEQ ID NO: 61144 - DNA, 415 bp, Oryza sativa
  unsure (1)..(415): unsure at all n locations
ctatttccgngggggactcagttcaagaatgggcacttcctacattgatactattcagcagggttatgatcattatccgagaagcccctattacattcatactttcatgcatcactcattggttntgcacaagctgtaggaaaatctaaatgtattgtacttgttaacatctgactcccttaataacattctataaagttggattggacttacggaatatcacacagctactagtgttgttcttttgtaagcgtcttccttgcattggtacataaataaaaaatgcactctctctggacataactacttgggcttttggactcaagcactcaagctttcgaaactttgactaaattcgtttaaaatacctaatccgaaaacataanaatccgatgtatagatgtgtctttgaatg

SEQ ID NO: 61145 - DNA, 442 bp, Oryza sativa
cccgcaacattttcactgtttttattgttaaccacattcagtatacaaaagaagttaagtgtatctacagttctaaaaaagggcaataaaatataccagcagttggagatgaatccttcccttcaagagtaaggcaagccttagctatttcttttatagtatcacccatgaacggacgaagaatgttacattcctcataatcacggaaagtattctgaacctgttgatataaaaacatgcttaattgtaacaaatacaatcaaaccactaagggttctgattaaatgttagaattgcaaaacatgcagtaactctaccttggtgtcaaaagcagatacagtagcacgaaccatactagcaacttcatcaagagtatggtttgtgtactttgcttctccacctttatcatcaggcttatttacactctgttttgattcatatc

SEQ ID NO: 61146 - DNA, 314 bp, Oryza sativa
gattgatatggagtgatatatagtgtccgatcaatatgcagatgataaaattcagaggaaaattatacaaattcatggagatgagaaaacaaatcacatgacagctcgtaattacagtactatatacacgatggaacggaacatcaaccccatatcatcatcaccatcatcatctagctagctagcaaaccactcatctctctcacacacatgcatgccggccgtcagacgaaatgatcaataaacaagaatcatatgcactgcctctatcctggcaggtgggcccgatcagaagaaggcgagcttgacgagga

SEQ ID NO: 61147 - DNA, 317 bp, Oryza sativa
tttgtgctagtccttctcttttgtttggtggtggagctgctaacttatgatggtggtgtccttattagattttttcctgactacaattttccagacttataatcttgtaattttttttcttctatatcaatatgaaactatgcactttctggagtaggtcgtctcaaaataaataagatagtagcttgaaatgcaaatataatagcatggactctttgttaatttgtcatcgttgttcttgggggaggggggacaatggcaagtgccaaaaggatctacattaagacgggggcggtgtggctagatctaacataacc

SEQ ID NO: 61148 - DNA, 446 bp, Oryza sativa
  unsure (1)..(446): unsure at all n locations
aagaattagaagtcgaagctcttcaccgagtttgtcttcctttccggcaatcatatgtcgntcgatgaataccctcaaataaccgaggcggtgtgggaggaattttgctctctcaaaaacacccaagagtttatggaatcaagcgagacacatcgccaactgcaacaacgaaatgagcacccacatcggttgggcaccgcagggtacatcggcaaggaggcaatatgggcccaagaagatgcagccgctgcagcagcgaatgtccctgccccgttttcagacatccctgaacaaggagctcgcaactggtcgcgggcaaggtgtaaggtcaacccggacggctctgtcacatttgagaacaaaagtgatgccatcgtctatcaggaactggtgagttcactacttaacctaactaatttccattcgtataaagtagaagtttatat

SEQ ID NO: 61149 - DNA, 380 bp, Oryza sativa
atctgaatcaatagcacacaaccactcatgttggatgatggtgcctgacaacaacaggccttacagagctgtctatatgttcacgccaacactgctgagccccaactgaaacggcccatatcaccaaggttggtgaccaaaggaatccatatcgccgaagcaatgtcacccccagcatcaggaaacagaacccctcccaacaagtgcaagatgtatgcacgggcataacactcaacacgccatggctcagcatcgtcgtcaagatgtgagaagatctgactcagccaagacaggtgtattccattctgcttcttcttcccaccttgcccctgctcaatattcaatggaatgccaaacagctgctgcacttgtgcatgcca

SEQ ID NO: 61150 - DNA, 338 bp, Oryza sativa
  unsure (1)..(338): unsure at all n locations
ataatttncttcggattgagccattattctttacgttcgttcgnncnaancaaaaaatctccgggtgatatccgtacatgagggtttcacctcatacggctcctcccttctgtacatattactaagcgaaaaaatctatagaataaaaatagaattagttccatctcattatggaccgaaaggggctggtatttttccaaaagatctctagccaaccttcccacaagaagtttgtcttaacaccaatgaattctattaatgctagaggaaaacgatagctncaagaatttctttgttctcaacgcctcctatttagaggagatagccacttcaacgat

SEQ ID NO: 61151 - DNA, 402 bp, Oryza sativa
  unsure (1)..(402): unsure at all n locations
gaagnnnangagatggcaaataaaggtcgngatgatctatctatatactcataggcatgttgctagtgataaccttgaatcaaaaaagttagcgcaccttgcagccatggagcacaaagaggctgttatgttggaaacatatcggtctctcatgttacaagatacaaaagatatgcctgatgatgttagatccgagcatttgatggcattgaagtgtatgagggagaagttgtttccgtaatactaaggtatcttcacgttccagtctctaattaaagcttggtggagttttttttacttgctgtaattgaacttcctgcagacatatatatgtttcttgcacaattcaaagaagtgcaaatattgatgtaatctaacttgtaatatagtcagcatgtagct

SEQ ID NO: 61152 - DNA, 474 bp, Oryza sativa
  unsure (1)..(474): unsure at all n locations
gaaattgctataaaccctatcngatgttcttatttgttaagtagnctaatatattgacgtgcaatttttttacgtgttcgagagacaaaaatctaataataagtagtactaaaataccaaattatattgagtatgtattgtgaaaaggaatttttatctattttcatttcaaataccctatctcaaatcctgaacccaccctgttgtttggtgcgtgtcaaccaagaccaaaagaacacaataagactaatctcgctgatttaagctatgattaggatgcgacgcaaacacgataaanaaaagatgccacacaaacatatatatacgctcaaccaaatggtagaataatgcacacttattgtacagattaaagacataaaatactacataatgatgcaagggtggaaatgaaaataagcgtaatgtagacaccgagtgtataaatatagcattctcacttccatctcttatatc

SEQ ID NO: 61153 - DNA, 442 bp, Oryza sativa
  unsure (1)..(442): unsure at all n locations
cattgacaattgataatgaatctttttgtatatcttgatgagggtggtacacatgatgctcttttgttaccattgttactctaattcagtatcagtaagtggtgactcttttctgtgtttgttntgcacgccaacatggatctgtgtttctttttgcttgctgttatcacttagcagtagattgtcattctgttattgttggctaactactggtgctttattttggcaaataggttatagacaggtacgtggatccattggtaggccacctgaagagcatgctcttgtaccgcaaattcaagaaaggatcaaaaagtgatgttgatgagatgttaagggctgagaaatcatagaatcctatgagaatagtgtattgttttcgcatatctcatgagcatccaggcacatntattttattttacattatgagtacaagatcaca

SEQ ID NO: 61154 - DNA, 351 bp, Oryza sativa
  unsure (1)..(351): unsure at all n locations
ctgaacagaaagaaacaggaaatatcttctatcgttgttaatatgctccagaaatgcatgcttatgttagcattgttatgatttcaggaaagagctcatgactattacaatggtatgacaaaagagcaattcgcaagtatgcagaaatttatacaggggcggagttcgaagccaccatcaaagctgtgatgatatatgttctgtaccactgtatgtaccgaaatatcaatgtactgtatacatccactgaagtgttcaatgacctgaaagaanaataaacactgccgatgttgcatacaaagaaagtaccatcttcacatgtgttattggaagagtatcgcagcctatgct

SEQ ID NO: 61155 - DNA, 354 bp, Oryza sativa
  unsure (1)..(354): unsure at all n locations
acatgacaataacagaaggaagatataatctttttattatataaaatttacagacaaagcgacgacgacacagtcacatcactaggggaatgcanagaccgtggagggaagaacacgattcttaaacctcctttcctcctcttctgacaccgcctctcgcaacacccggacgcacattttccgccatataattaacccgaggctaattataaatctgtaattaccaatttaccgcaactctgcactgcagcttcttgcaggagatgtggagagagctgtaattaatttaagagtagttcaccagggagcggtacgtcacgccgggctttcagctcgccgggatgactgttgttg

SEQ ID NO: 61156 - DNA, 396 bp, Oryza sativa
  unsure (1)..(396): unsure at all n locations
ttcgnactactcctacgaaagacgcatgcttccttactacagtatactttcattaatgactcttttcatacttttattttggacgggaaagccgcgttaactgctcactctgcttgtgttcttggaggacgtgaccaaagctgctgctatccatgacagcgaggtatatggagtatatcatatcaccgaccacgatcacggtaatggatttatgttgtctattcgcccccccccgcctgaggcgtcgtcacgagtcatgacctcgctattccgctcgggtaattcttcaagcaacagcaaagcctgagatataattaagtcatcattaatacttttcctatcatttgaatcattgtgaaaatacctatatgagacatatattttatatcttcataa

SEQ ID NO: 61157 - DNA, 324 bp, Oryza sativa
  unsure (1)..(324): unsure at all n locations
gatnaaactaannnatnatatgtgagttnacatgcnannacattgnatntagatncattgctaacgctcatacttgaccttacagcatgcctaatataaacattgaggttcaatttacaatggtggctagttagacttgacactgaagaagagctgtcaaaccaagtgcatgaatcctagctcgctatcaatggacaccgaatataataaggtatttctacttaatttataagcaactcgatccaaaatctttatttcttgtagtgactcgcgccatcgaacggacttactagcgaagagctataaaatataatttaaaacatg

SEQ ID NO: 61158 - DNA, 293 bp, Oryza sativa
  unsure (1)..(293): unsure at all n locations
ctggacagaactttaatacttgtgattctgataaataaaatggtgganaacatggatattaggtttgggcctcaagtggtgcacatatggtgattagttgtataccgataaggagagagtgcgcccaaaccgacctaaggacttcactcaatgtcagttcatttcgtatacagtgcaaccacatgtgctagtatatgatagcccatgcttagtaaattatttatggtttagccttacacttctgtaggccggcgtgtatgagttcctataattcacaagaacttcctatttac

SEQ ID NO: 61159 - DNA, 405 bp, Oryza sativa
  unsure (1)..(405): unsure at all n locations
acatgttctaagactatccatntgtagggttgttttctgaataagtaattaaatgtaatagccgctgccgcatctgattcgttgtttggactttggaccagtatctaagttgttgaatttccatgacagggagaactccatatcccaaacattttgtaaccgcaatcatgcgggactagcaaaaacttgtgaaacacgctactcctgccaggcacaaatcaaaaaacgccctgtcttgtcagccgcatgcccgcatttccacaaacactctccgctcgcgctcgtctcccatcaatgcacactgaaatggcgatgaggtctactggacaagagaccggacgcttgtgagcattttcacaaacacactgcgcgccgccaccaggtgtggccggtggggatcgatct

SEQ ID NO: 61160 - DNA, 430 bp, Oryza sativa
  unsure (1)..(430): unsure at all n locations
tttttatatctngatgaggttggtacacgtgatctctttttgttaccattgttactctanttcagtatcagtaagtggtgactcttttctgtgtttgttttgcacgccagcatggttctgtgtttctttttgcttgctggtatcacttagcagtagattgtcattctgttatttttggctaactactggtgctttattttggcaaataggttatagacaggtacgtggatccattggtaggccacctgaagagcatgcttttgtaccgcaaattcaagaaaggatcaaaaagtgaggttgatgagatgttaagggctgagaaatcagagaatcctatgagaatagtgtattggttcggcatatctcatgagcatccaggcacanttattttatcttacattangagtacanatcacatcacgagtatatt

SEQ ID NO: 61161 - DNA, 379 bp, Oryza sativa
acaaaattacgattgtgcaagaatttaacatgggactcaaaaacacagagcaggagaaagcaacaggtgcaacgaacagcccataatttctcatagcaacacgaactcaattggatcagcactgaggaattcagacacgtacagaaattttataaagcaaacacagcgggatatcaactgaatgatctgtaagaaagcagaacatgttcatggaattgggttttaattgaaccaaacaactcacggaattatgtttaatttaaccaaacaactcagaagtcagaacacactgtgacatcagttcatatatctgtgaagcgaaatgcttcagattctgaagaacacacaacgcagaacattctggaggtcagtccacatg

SEQ ID NO: 61162 - DNA, 470 bp, Oryza sativa
  unsure (1)..(470): unsure at all n locations
cgcttagntttgntagtactccctcaagattgattattctcatcgttntggacaagggctaagaagtgaaaacgcatgaacgttagccctttgcacaaggttttgtgattattaaccttgtgggaaaaataatatttatccatcggcctagaaacagatgagtatgtacgaattatgggcctgtaattcggcccaccattccaataatggttctcgacgaacaagatagaagttcactaaataaacatcgntgctataatattatcatggttctaaactaggatcggtagaccgtgcaatccacaaagagaaaaaggtcaagcatttcgaacagaaaactcacaaatttctaagccactggattacaagaaaaatctgtcactgaacagaaatacgtccgcagtacaatccatccccagattctgggtgaaggtatttacaggaggaanatgtaggcacaaaatatgaaa

SEQ ID NO: 61163 - DNA, 457 bp, Oryza sativa
  unsure (1)..(457): unsure at all n locations
tactngacatctctttttacacgctgtctttctctctagcatatccncatcaaagcgttttcttnttttccttgacccatcttgcgatctagggccaataaaatcgaaaacgggctgaaagtaggtctggttttcttgattagggcccaattccagcccccaaggcttgttttgggccgtttacacaaaatcttgttttggctccatttctcaatgaaaaatggaattggaactgaaaaaaaaaaggaagacgaagatgacaaatntaaagtttaaacaggcaaaaagttggtgccattcctgctaaaaaactagcttccgtatatatccgaaaactgattntctgatgattgtaagaatccggcttctgacgatgatcagaactgtctgatggaactcacggttggtaaaacaaaaactgaaaaattggttgaattgaaatattatctcatcacat

SEQ ID NO: 61164 - DNA, 336 bp, Oryza sativa
gtattacaagattgcaatcgtcatgttctaaacctttttcctggacctatttctgtttaattcttgtctagagtggaatgagtgttaccacattccactgccttatgagctataaagttatgcttaatctgcattatgaagtaatctttgcctgcttgcatactaactggctttgcagcatgcaatcagatactgcttgtgttggcaatgaatgtgattttgccggttctacttggactcctgctcatgtacggatacctgtttgagactatgtgacctttcttgtttattttcggtgtgaattatatacagaacctttcttcattccaccctatc

SEQ ID NO: 61165 - DNA, 345 bp, Oryza sativa
  unsure (1)..(345): unsure at all n locations
caaacaancagaggagcgtcgtttcattattgngaaattaccgtattacaagattgcaatcgttatgttctaaacctttttcctggacctattactgcttaattcttgtctagagtggaatgaggtttaccacagtccactgcattatgagctataaagttatgcttaatcgtgaatatgagggaatttttgcggggttgcgtgcttctgggctttgcagcttgcaattgacatactggatagatttgaatagagtgtgatatatgctcggttctacttgttactcctgctccacggtccggattaacttgtttctgagatctattctgacactctgttttgtgt

SEQ ID NO: 61166 - DNA, 481 bp, Oryza sativa
  unsure (1)..(481): unsure at all n locations
gcacccctacctggcgcgccaactgtcgaaactagtatttttgtataataaaagggggtggctatcaagctggagaagtgaatgggtttggagacaaaggatntatacaggttcagaccttctcattcaagaagtaataccctacttctgtccggggatgaatccgccgagtatcttattgattgtatgatttggagaanatcaacacatgcccctagaggcacccggaccccccttatatatgggaaggagtccgtgttacaaaagataatctatatccctaacggaatatgcagatacagataatatacagtcgtaaccgactaagtctcaaggtatttccttgatgtatcaagtgagaaacaaacccgagatacaaataagatattctatctatattcggtatcctatattcagtccaaatatcatcgccgtgtagatatgggatatccataatcntcacactaaatgcagtctacac

SEQ ID NO: 61167 - DNA, 368 bp, Oryza sativa
caactattggcacgcgaggtgttcctgaaccgactattacttaccagaggtcattccaccttgggaagccttgtattatgtcgatgagaattcgacaggaatacgtccttatatgcgaatacgggacagtgccacatatgcacaaccaccgcatcgcgagattttacaattcattttatgttcaaacacaccgacaccacatgtcgggttgtgaaggcttcctaaaccatttcccaaggtttagcaaacaaccgtgcaagtgggataattggtgtacacgctcatagagcacgaataccgatgtaccacaacgggtggagtgacaatgaattatgggtgtacgacctacgtgaattagtgcgactact

SEQ ID NO: 61168 - DNA, 319 bp, Oryza sativa
  unsure (1)..(319): unsure at all n locations
atctcctctngcttgagtgtgaggaggtgttgtgggagcgacaaactgtgcatatctcagagtggatgaaggctaaccaaggcggcgcatgagctcaagagaggggctggtttgcttcaagcagcatgatcgctactggcgaggtgtatagtcagaaaagactcgcacataatgcagtctttgatctagatgtagcccgtcagccctcttgttctcttcctcttctcccatcttatattttctttttttttcttctgtctctctttgtattgtctcttctttcttttcagcaaggtatgactaacatcaactgtaaatc

SEQ ID NO: 61169 - DNA, 385 bp, Oryza sativa
  unsure (1)..(385): unsure at all n locations
ccatgttgctctgtngctnaacatgttggatggttctggtatggtagaagaaggtttgcactaattgaggctgccatgtgggcctggtgtaatcgggttccaagaggacccattaggccatcttcaatgggtacccttaggtcgtgcccctagcgccgtccgttaatatttctgtctgcgtcgtcccctcgcgagtccacgcgcgccctggctaggggacctgtctctcgttggttttttgccaggggatgaaggcaagcaacgcattgccccgatgggctcctgtggccactgtgtctccagcgataggattccccttccacccctnctctctctctctttctctctctcgcccgttcccctctctcgggccctacnaccgcac

SEQ ID NO: 61170 - DNA, 318 bp, Oryza sativa
  unsure (1)..(318): unsure at all n locations
cctaaaaggtttgcaacttcatcgtccaatgtttttttttgtcatactacatttgcacctatgtttngcacactatttttgtctccacaatttagttgttaagttgatgagagagaaaatgtgtgtggggaagaaagaatatatagaaatatacttcatttgctaaacaaggttgtataaaatagttgagaaggaaaactctagtgaaagttaatcttaaataatagaaaacacactaaaatggaaattataagaagaacacacactataagtagtttaaaactctacaaataagttttaagaattattcggtgaata

SEQ ID NO: 61171 - DNA, 398 bp, Oryza sativa
aaatgagaccggtaattaatgggactctatttatgataactcgaattactagtctagaaatattatgttaggcttttaaaaacaataaaggtataggctctgatcattgtgctaattacaacatcacagccacaacaactatataatcgtagtttatttttcattgtggatattgttgtggtagctgtaacacagccacaagtagcacatataaacagccccgtggttctaacttcatccttttataaagatattaaaatagtttgtactaataattttatgaaatcttttgttatagcaaacctgccgatatcattttcatatacctaaacctacaattttaaataataattatggtgaaagttaactcacgttaagttgttagctacactaattct

SEQ ID NO: 61172 - DNA, 335 bp, Oryza sativa
  unsure (1)..(335): unsure at all n locations
tatgtatatgcattcctatgaatttatattgattgnaaagcttcaatcattggaatcggagggccaaatagaaaaattttctatataatttgaatcctatgaaattcctatataaaacttttgattcaaatgagctcttaatatgagtaggacggaagagcactggaattatcattaattcagtgatactagctaccttcgccgtcctaaaaattttagttactccaaaataatacaaaatcaataagactacaataccccactttatcaaatcctaatgtaattatgtttcactgaacacgcttctaatgcatttactttccaatntcattaac

SEQ ID NO: 61173 - DNA, 427 bp, Oryza sativa
  unsure (1)..(427): unsure at all n locations
atcaagctgctggtgagaggagctctctgttcttgctactatcactatactcctatgtattcgttcacaagctccctcgagctgaaagaggaaaganaggttctcgctccctcgttattccttccttcgatcgatcggttccccgtccttgcactgcgaaggtcatggatgcgatcgagcccaaggagaatgcccgagaataactccgggataagctgggaggccatgagggtgacatctcacgcatggagagagagagagagagagagagagaggaggagaaggaggaggagagacagagacgggaccatggcgtatacagtactgaggtcacaagtctacaatgagagtctctctctctcactcatcactccctatctatctctctcaattatatatatttatttacctcgttggtcgtatatac

SEQ ID NO: 61174 - DNA, 371 bp, Oryza sativa
  unsure (1)..(371): unsure at all n locations
gttggaacaatattaacttatcctctctccgattttaatatatgacgccgntaacattttaatcaacatttgattattcgtcttattcaaaaatgtatgtaattatcatttattttattgttacttgatttatcatcaaatattgtttaagcttgatacaaatatctttatatttaaacaaaaaaatttaaataagacgaatggtcaaacgttggttgaaaagtcaacggcgtcatatattaaaatatagagagagtattattttctggaaacggtcttaatatggtggggaagttttcatattgatgaagttaactatttagtggtgacattagtatgatgctgaatgaaattagaaaatctaagttcta

SEQ ID NO: 61175 - DNA, 444 bp, Oryza sativa
  unsure (1)..(444): unsure at all n locations
agcnttcattaatttggctggtgatttgtatctgattctagtcctataaaatgtcatcagttatattatttgatgagccacatgataattatattctttaataatacaagcacatgtagagtgttcagatgaattactccatcacaatatatagctacttctagtgctcaaatcttgtcgtcgcaaccaattacaacctcctcattcaatttctccacctaccttctccatctcaaccaatcacaacaatctcgtgtttcacctgtcttcttaatctcagtgaattntttttctagaagtgcttatattttgggaacggagggagtattaaataagctgacaagcactacatgtctttgtgtcatcagtgctacctgtggaacagtgcaaacatggcggagaacttatctatttgtcatgacagttcaaattctggaggtaatc

SEQ ID NO: 61176 - DNA, 243 bp, Oryza sativa
tatcatatggctcctactacaaaaagagctccatatggtaagttaaaccaatttggtcctcaaaaattctccattttctttactttcaagatgatgcattggcttcttgcttatgtttactattgtgagtcatgggcatgggtcccattcatggcggatactcaaacacagtatctgccgctgacataaccctataccatgacaaaaatttaacagtgattgtgatttaactttatttcacct

SEQ ID NO: 61177 - DNA, 399 bp, Oryza sativa
agcttaacttatataagatcatgagccttgtgtcttcagtctgtacaaattacaaaactgtatatcgtagtagatcatgagccttgtgctaatagatggagccaatgatgcgaaattattcctattaatattggatgccgcaagtgttttctaacaatctttgacggactctattgacatgctatcttgggattcttctgagaaaaacgtgtaacactaatagcaccaaaggtgcgtactgcatttgcatgcacttgctgttcctaaaatctggaagtttgaaatgccaatcaagaatggctacttagccctggctactgtttcatcactctattcgataacctatattatgttattaactgttctctgtccaatgcagtctgctaactatgtcagtat

SEQ ID NO: 61178 - DNA, 479 bp, Oryza sativa
gagctctgcacaaatgacaaggtcggcctcctgtcagttgtcatccgaatcttccgcgagaacagcctgactgtcacaagagcggaggtgagcacgataggaaggatggctgtcaacacattctatgttcgcgattccacaggagggacggctgatcagaagacaatatactccatcatgcaagccataggccataacattcatgtgaaaggccagcctgagccatcagagcccacaagaaagagtcacccacatggttcctcttctccaacctgtttcgaccgagatctctctacagtttcgggatgttcatgcgctgatctcatgagccgatcccgaaaaccgcactgaatattcttatctgacgaagaggcccaagaattcatgaagttacagagagggccttcattctgttcaagacttaccactggagtggcgcaagaatggaatactagtgcatgggttgttatagatcatca

SEQ ID NO: 61179 - DNA, 387 bp, Oryza sativa
  unsure (1)..(387): unsure at all n locations
taaggagttgctgtggaccccaaaacagtgaccggcgtcactgattggaagccacccaagacagtcacttcaattcacagctttttgggtttgggcgggtactaccgaaaattcattgagaatttcttccaaattggccaaaccatgaccccagtgctggagaaagaagaaaaattttgtgtggaagcccgcaatgcgagaaagcgttccaaactctcaaagaaaagctggtttcctcgccagtgttaatcttaccggatactcgcaaggacttcctggtgtactgtgacgcttcgcgccaaggattggggtgcgtgctcatgcangaaggtcatgtggtagcctatgcctcccggcagcttcgtcctcatgaaggcaactacccta

SEQ ID NO: 61180 - DNA, 457 bp, Oryza sativa
tcgacggtcattatcgatcagtttcgaccattttattaccagaataaaggagaactagtgatgcttgcaatgcataaatatgttagaataataatattacactagtattaagtatactaaccttttgcagagaatgacaataaagtggaggagaatcgacatcaactcaaacgataaatcaatcggacgatgtcgagaatcacacttatgtgtgaataggcaagaactcagaattgacacgatgaattgggccaaaattcacaagtctacgaattgaagcaacggagaaggccacctaccgtatttgggccaggatgcgccggcccctcgttcggccgaacctccctctccaccgttggatgtggagtttggcaaggacgctccagatcttcttctgatggcggttgcgcggtacttgagacatttcgcagcgggtacaaccgtcatacctgcctat

SEQ ID NO: 61181 - DNA, 446 bp, Oryza sativa
  unsure (1)..(446): unsure at all n locations
agcttcaaggaagcttctctaatatttttcttttcctgtcagcagcaagtgaaagaagcttattctgttaagaatcaagagtacttacaacatgtgtggtcatacatacgtcacgtggagaaattttaatgtaagtcatattctttgacatttctaatcatgtgcttgtacttgttaataaaggttaatttgtcaactatactagtgaccagtcatggtcaaacgcatacgcgtattctagtactcaggtgtatcacgccctcggttaatttacactgcttggtttatctccattcttaaatcgcagataacgaaaaaaatgctgatttaatggattacagataaaagcgatgaactcttaatcagactattacaaaaacgaacggaaatgagttntttctttactttgaccaatataatatgatatttcctgcattagcgtttat

SEQ ID NO: 61182 - DNA, 480 bp, Oryza sativa
  unsure (1)..(480): unsure at all n locations
tatatgtcttatcattaggcttttcctcactagggtttttattaaatgataactgtagacattatactattgtggatcatactatgagctctactcatagatctaaaatagtcaataatatatatcacgggtctctccttatttttcccactgggttttcgaggagttttacgtgatgtatttaactataattatttctaagattatctttatagatatctggaacaatgaaaaacaatgatcaaagctcaagggggagtgttatgaaacaacaggtgatctcatccatataaaaggatggatcgcaaccgaaggcaaccgcgtcttccctatgcgctccttggcaacggacgcaatggttcccaaccatcgcgtctccggttgccaccccttacccatctatantttgtaccgcattgatcaatataggatcccgctcattcattccctacnattctttgtgcaatactctctcgctca

SEQ ID NO: 61183 - DNA, 374 bp, Oryza sativa
  unsure (1)..(374): unsure at all n locations
ataatgctgcttttgggcgatcgatggcttgctaggtacttanaagctaactagagaggtgcgtcgatttgcagagcttcacccggtatttaaacccccatgctgaggtgcatgaatttttaagttagacatgttcaagatcatggttttgcttacgctgatgcgtttcagcacaagagctgggtgatgcttgtcagcataaacaattccatcgttttgcttctaagaataatggccaataatggatctatggtggcatggtggatcaatgaagggagtaatattatttgagagagtatatatgtattggtgcttcccttaacgggtagtattggaaaatttgtaattgagaactacattattgagcatatgat

SEQ ID NO: 61184 - DNA, 465 bp, Oryza sativa
  unsure (1)..(465): unsure at all n locations
taaaagcaacttattgctccacctattattcgtttgaaatccgatttattctaaaggtccaatgacggcctatcgttgttccattatgtttgctccaacaccactattttcatgtgtacacgccaacttgcaaacaaaaagaaaaaagggaactttcagcaccacaaaataagattctcttttgattcagaaagtgtgaatattttgttatttttttatctacataagaaacttatatatgggtcaagaactaccagatgcaagtaagccataatttctttagtggtgcatgctagtattaaacttgaactcaatttgataaaaaaaaaagctgcacaaaatagtgagactacagtatataatttccttcaatccctataatatggagaagttctcttgtctgaaggaaatggagaagtcaattcaatntggttagaatggagttctagaactgaaaaacaatat

SEQ ID NO: 61185 - DNA, 440 bp, Oryza sativa
acctgcagctgcagctagccctgtaagctaccaagctttgctctaccttctcatcttcccttgttgcaagcccaagaatgagcgcattgtatgtcacgatatcaagctccactcggatcttcaccatctcctcatgaaccctacccgccatggcattatcaccaagcgccacgtacccatgaatcagcgtgttatacgtgaccgtgttgggcataacccccttcaccctcatctcgctcagcacctggttcggctttcccatcctcccctccttgcacagaccatggatgatcgtgtcgaacgtcaccacgtcaggcaccaacccctcctgctacatgttattttaagctgcagcgcatgcccctggtcacaccattcctgcagaagcccggatcagcgttgtgaactgatcgttgtcttccacgcccactcccgctttt

SEQ ID NO: 61186 - DNA, 491 bp, Oryza sativa
  unsure (1)..(491): unsure at all n locations
acacataaaactcagctttgctcaacaactccctttcgctgtgcagcaccttcatagcatatgcatcaccactcatcaatggcctttcaaatgttgtcctagccgtgaaatcctcaaatgttttctgtcaaatgtcaatgataacaagatctcataatcttgaaaaaatgcacagtattaataggatagaaaataacaagatgttttcttttaaataacataaatctttgaaaaactgtgcatcccctctggcctcctgtttcagctataatgatgtttttttcccagtgacttatcatggtataagcagttttgaatggagacacctattctaaacatttttctttggacaaacaaattgctaatggctaatcagattttatactccttccagtcagtcacaaaaacataccatnttgatcacacggccttcataatacaactttcacagctaatttctttacaatgcattttagaaacctgactaaata

SEQ ID NO: 61187 - DNA, 145 bp, Oryza sativa
atgaactgaggcgtgcatcagtgaatcagatcatctgcactttcatatgcctgcccttgtcagatctatggcaagttagtaaccaaatgtttggctctcatagaaaaaaaagagaaaattcgatccatagcacaagaaaaaaagc

SEQ ID NO: 61188 - DNA, 438 bp, Oryza sativa
  unsure (1)..(438): unsure at all n locations
ttcacaagctgataattatgttgtgctaactgctaattttgttaacgagtactatctccatntcagaatgtacgacgacgttgacttttcacataacgttcgaccattcgtgttattaaaaaaattagtatagatatataaaaatataggttaagattataatttatttgatggtcacaacaaataaataaataatattgatgtaggttttttaataagacgaatggttaatagtatgcgaaaagttaacgacatcgtacattctaagagagaggttgtgtatactacctttgtagnttttttccctgtcagaatacgcatacgtctacaccatcatgtatgcacattacactcacacctgcaaatacgttcatgacacatgctcgaagagatggagtccagtgatatatccctagctgtagtaataaaacctattga

SEQ ID NO: 61189 - DNA, 430 bp, Oryza sativa
  unsure (1)..(430): unsure at all n locations
agcttattntcgcgtgcggacctgttatattattctacacggaaatagcccacctacattnttaatcccgcaggtgccgaccataccactcactcccatatgactctaaactccttccactcctcccatctacctctgcttctcaccctcctcccatctcctgatcccggagacgacaatggaggcgactgcaacggctacgttggcggcggtggagcagatccatcaatggccaccgcagggacgccggattcatcaccggcgatcgcgaggaggccggacccgtcgccaaccaccatggggaggcctgattcgtcgtcggccatctcggtgaggctggattcatcgtcagcaaccgcggtgatgacagcatctggcctcgggcatgcggtgacaacaacggcggtggcagcgactatgacagtggtga

SEQ ID NO: 61190 - DNA, 436 bp, Oryza sativa
tctcatggaatctggagactggttgtagaagaactctgttttgccaatggctgtgaacacctcaccaataccaaccaacaagtattgaggcgcttgccaaagaatgctcatgggaacaggtaccttactatggatcagatcttctgaccttgcaatctccagacgcttaatctcaaccaatgctgcagttgccactgcagtagtagccacaaacagaccaattcccattcttgaagctccgagaagcctctctctttaccagtcagtctacttgctatcggcacaacgaaagtttcgtagattgtgacccaaacaacaatgctgataacatccaaggatgacagagtggctggcggaattttaaaggattcaatttgattgttgagggccatcctttgttctatatacatcgatgatatttgagcacatacagtga

SEQ ID NO: 61191 - DNA, 450 bp, Oryza sativa
tgcaagcttcgcagaaccctcatcgacggttgttgtgcactcaatatcctcttcgccaagaccttggatgatatgcagattcctcgctccgagctaaaaccaagcaatgcgccttttcacggagtaattccaggattatccgcaactccactcggccagatcaccctcccggtcacttttggcactcgggaaaactttcgcacagagaatatcagctttgaagtcgccgatttcgagacagcataccatgccatactcggacgcccgacgttagccaagttcatggccgtcccgcactacacttacatgatgatgaagatgcctggtccccgaggagtcctatccctacggagcgacatcaagcaagccgtcacatgcgacaaggagagttgcgacatggcccaaacccgcgagatggcgtctgcccgagaggatatccgactagctgca

SEQ ID NO: 61192 - DNA, 478 bp, Oryza sativa
  unsure (1)..(478): unsure at all n locations
nntgctaaccacaagtagatatcttggagacatattagtgatacatcggaatttgtggatctacaagggatgttccaggcagtgggcattgataggattgttaccttgaagcaaccctatgatgaagacttgatccgacagttctatgccactgtgtgggtgtccggcgagtatgatgctatgaaatggatgtcggggaccctacagtgctccatcacccggcgtgagttaaggacttgttgcaaatccgtttcaacaacggcgatgatctccaagacgagcacacccacaatcctttcccctatgaccactatgcccggntctataaagatggggaaggcacacctatgggaaggtggcgggtttgaggaccatccctaatatggtcaaccgcatcgtgagaagccactagtctccaaggtgtggcaacaatgacaacattcgcgttgcncatggcatgtcatggatgccatcatgg

SEQ ID NO: 61193 - DNA, 398 bp, Oryza sativa
  unsure (1)..(398): unsure at all n locations
agcttatctctaactgtaataatgttatctcttttctggacagtattgaggaatacagatatctttctttgttggagtggaatttcagagtttttattagatctaagctgcttacttacttaagatataagcaagtttactggcaaaagagatgtaccattagatgggcaaaatttgggggagaaaacacgaaattttttcatgccatggcaactgagtcctacaggaaaaattctattgcttccttgatagatgttgatggtactataatctttgatcatgagggtaaagctcatgtggcttgggatacttttaaaggtagaatgggagtttcaaattttgtgtctatgccttttgatctctattctttaattacccctcanaatggtctggaagtt

SEQ ID NO: 61194 - DNA, 472 bp, Oryza sativa
  unsure (1)..(472): unsure at all n locations
nttcttgatagtctcagactgaanattaaatagaaattcttgttaatatcaagcataggtagataaggatacagaaagcatttcagtacctcggttttgaaatcctgaagtgcagactccatttgcttcaatgcagattcatttgagtttgcaatttctttgtactgtcaagtaattagagttataatatgacttatagaggtcagcaaataattgacttctacacgcaaaatagaaacacaggccacactacgcaagcaccaatgaattcagttcacctactctacagaacaactaagccattataatgacctttcaaaaggaaatatggtgtgctttctgattatgacaaaggtggctatgctagatatattattcatgcatgggccttcaagagaggaanataactctattacatcacatcttcattatcataacaatccattggtggttatgttgcacggtcctctca

SEQ ID NO: 61195 - DNA, 436 bp, Oryza sativa
  unsure (1)..(436): unsure at all n locations
agcttgngataatatttgctattgtctttcttattcgntgatggccgccggtagtttctattgtaagttagctggtaatacatgtacaccttttgtctgggggtggtgtgaaaagagaaagaacaagatgttgagccacttgaaagatttgctttggtcaagcgaaaagtatctcacggtacctcaatgcactttgagaccaaagatagtatcgtctctcctacctctgcagttcggctgccagcgcagttggaataatttctcgtttactagagttattcttcctcttctaaggaaatattagaaactaaattatatatctaaccttttctagttagcacatgggccatacttttaagtacctttccgtaggtatcntttattatagtttttttaaaaaaaataaaacatttttattgaatctgaataaattata

SEQ ID NO: 61196 - DNA, 395 bp, Oryza sativa
  unsure (1)..(395): unsure at all n locations
tcggatgctgaatctgagcacanatttgctcctangaagcattcctgtggagatgagaggatgcaccaagctcatgacccttcacctaggcaataaccagcttcaaggtgagatcccagctgagataagttccagcttgaaaaatctcatcaatttatatcttaccagaaatcttttgtcgggagagatccctcaatctctggccgagttaccatcgctggaacgttatctttgtcgcacaataaattatctggagaggtaccatctgctttgagcaatctcacaaacctcttgaatattcgtttctccaataacatgctttcaggagtcatcccttcatctttaggcatgttgcccacattatatgagctcagcttaggtgttatacaattatc

SEQ ID NO: 61197 - DNA, 453 bp, Oryza sativa
  unsure (1)..(453): unsure at all n locations
gctttgcgaaacatatgttatcatgtgcttttgttctcactgcggntaaggacaataagctcgtcagttcttcttaaaacgctacacatgggctcaattgcttagggtctttatggtaaaatctcctcgctcataatatgagtgtggcatttacgatatgtttcgagttttagatnttgataaacatccttcctaaaataccatacatggcttaattggttagggtcattgtagtggaatctgctcacccatagcatagtatcgcatttaggacatgtttgaaggagcttataatttgagaagcatcattcctaatacgctatgcatagccttaattggttaagatttttgtggtggaattagctcacccataatatgagtgtcacatttagggcatgtctggaggaatttacatnctgagagcagctgatgaaatctccaccaactttaact

SEQ ID NO: 61198 - DNA, 449 bp, Oryza sativa
  unsure (1)..(449): unsure at all n locations
gcaatcactgacagggaattatcttcaaacaccacatcgacgagagctaaagtttgctagccgcccgcgacgacgcggatgcgctagagcccactaatctgtagcagcagcttggctgagggcccggcgtgtcagtcatccaacaccgttggatcatgccgagattacgaggaaggtaggcgggcccgcgcggatcgatatatggcctgtttgaggagcgttagatctaaaaagcaactgattggtagacagcttccgacaatatataaaagctttgaaacccagctacttcagctgctaactgcttagttcatatttcagagggcccggtcactatgatagcaaaaacatggcatctcgccataatactgacagagtcatnatatagtaccaacattggcagcaactaaaagagccactttttgacaacttatcaaactcgggagata

SEQ ID NO: 61199 - DNA, 402 bp, Oryza sativa
ctttagtggttcagtttccacttttgaagcttatctataccccgcctggcaaatcagttttgtgtccaagctagagcttacacgttctatttagacaatgcagccagcttttccatctaaggaaatcatccatcaggtcaatctcaacatgattgtttacaacatctcttgagctggcactactgttcttgaactgatcaagttcggctatcagagccgaggcccatgaatcagaatttctcatttcactgtcaacagtcagcatacgctccccactgtcagactggctatcagtgagagattccatgcaagcattgttaggcgcacgcctagaatcattggccaagggaagtcttcgtgtcagatggcgcaacttacggcattctgcctcaacccttgcat

SEQ ID NO: 61200 - DNA, 437 bp, Oryza sativa
  unsure (1)..(437): unsure at all n locations
aactctcaacttttgaagtctacttcctcagtcccattattactgcattctttatttctgatcgtgcggcttatgtaaagaaagagataatccaataaatgccattgacaagcgtgcaactttagaaataccattgacacaagtgtgagttctaagaaatactatcatacaaacgattttgtcccaaaaatgtcatcgccgttagggtttcatttatattacaccgttaaaacactgctcatcatatagaacttaatggcacaggatggacggaaccctaacgacgatggcatttttgggacaaagatcgttgtatgatgacatttcttggaactaacacttgccgatgatatctttgggacttggacgcttgtcaatgacatttcttggagtttcttttataggatttatgaaatntttttaaaaaaaatagtcat

SEQ ID NO: 61201 - DNA, 418 bp, Oryza sativa
  unsure (1)..(418): unsure at all n locations
gctgaatgctnttctttgataccacggctcatgtcaccgacggaaaacgtgatgcgatcactcgtgaacagtacagtagaaatggtcttttcatcgggtctccttcatcatcatccatgagattatagttccatgaaacttcaaagatgactaccagtgtacaactctctgatttcactgtaaaaactgtctataatttactgaaagtgcgcgttgcgtaactgaaaaaagatgcatattctggtcgaatttcaacaaaatggccttcagatcgatcagcagaccaagcccttgaagcagtagacgccgaggacgaaccagccgaggaggagggaggagaatgccgccatgctgatgaggaaggaccagccggccatgaggacgccgacgcatgccacggcggcgaaggggaggagcg

SEQ ID NO: 61202 - DNA, 477 bp, Oryza sativa
  unsure (1)..(477): unsure at all n locations
nggatcatgtataccactatgtatatctctcctttccattatgctttcttgtgtcaagtttgatcatgtcaggttgatgcatgggcatgaacagtgtagcaagatcttagcagcgctacggcaaagcctctgcaccaagggcatgtttggttgctaccctgagtgtatgcctgagtaaaagtggtacttgagacttcaatgaattttttttatgctttntgcctgatgaggcgtcctgagttttctcatttttgtagaaggcctggagccctggactaaacaggattgtcgcgcttgaaattagctccggccactaatttcgagcgcatgagccaggctagtgaaattggcggataagcttaagtcaagcaggtgctttaagcatcatcangcgtatctctggcatgcatctggtcaggcagatgttactcaggctatgttagagtttgatagcattgctntctcgtatgctcctcg

SEQ ID NO: 61203 - DNA, 202 bp, Oryza sativa
cgaggatcgaccctagcgcgcatgccgtacctatatctcacgccagtgacgcgccaaccccggcgcgaatccctcacgaaacgagccgtggtcattccctcgctcggcaacacccgggcacgttcgctgatcgcgggtagccccgacgagtgcgacgcgtcgccagcgacctttaaactcgcggccagggagcactagccca

SEQ ID NO: 61204 - DNA, 263 bp, Oryza sativa
gctgtatgcgggtccgagcggatgactctcgaaagatgtccgctatgatccgagagtaatgtctcttggttgctgcgtttcacaaccaagtgatcaacataggcctcaacaatcagtcctatctggctacccaaataaattcgagtagcacgtagaaaagtaggacctgcattctttaacctcgacggccttgaggcgaacaataagttcctatgggggtgatgaatgcagtattttcctcgagctcccttgccatgcgaatc

SEQ ID NO: 61205 - DNA, 415 bp, Oryza sativa
agctaggtcgagcatatacgaactgtatcttctgctccaggctctacttctctgccttcagctttgcttctcatacgcactctgtttctcacctgaaaatagaggacatgatgctcaatttggcctttggatgtacactttataagccatacaaaccatataacctagggttaacaccatgctgagccaacaaaactatcaatatatgcattacattttagacaacaatatgtacacagctgctgcggcggtgcccataaaaatagatgcatggcaaataattatgaagagaaaataaaaagacataccttcaactctttgattttctcttggaagactcttatttgattccttcaacttctgtgcctcactacgcagctcagtcattacacgaataagattgttcaatatagac

SEQ ID NO: 61206 - DNA, 408 bp, Oryza sativa
  unsure (1)..(408): unsure at all n locations
ctttacatgatttacgcgctaattgcattgagggttacattgccgatataaagtcgcgaaatctaatttgggttaagcccctttgatacctacgataacctttctctttntttttccgcgggtgcttaggaaagaaaatgtataaaaggaatcacatgacgacgcgaatataagaagaaatttaaagaagctggtagtttaaaaaaaacttaagaatttatgtgagtaagaaagttttagtgtgatgtgatggaaagttgggagtctgagggaagattggtgtgagagaacataataagttgacgtgtatgattacattaacccatttcacttccctctcttactacaccgggtcacatataaataatattttggataccaatagagtcatcaagctagtactatcag

SEQ ID NO: 61207 - DNA, 416 bp, Oryza sativa
  unsure (1)..(416): unsure at all n locations
agcttaatccctatacggagaccaagtatttttatgagaggaaaacacgaanaaaaaaggcgtacataaaagaaagggagaaaaaccaaatccaacataccggcggatgagccgtgcgtgcacgtcttggtaacggatgatgaagagaaattgtcggagaggcgaaggctctaaaagcttcaacgccttgatagttaattcccacatgctctgctccttctatctccgaacaatggatactttcttctaccattgcaactgcgtccatggacggctgagacgaacaatctcactcagtgcgtcgacagagtggaaccaaacaaatcacaaatcgggggcgggggatcgcaacgatcggatcggagcaaagaacgccagtcgcgcccactggcgatgggcagaacaacaattgggaa

SEQ ID NO: 61208 - DNA, 393 bp, Oryza sativa
  unsure (1)..(393): unsure at all n locations
tctgaaacactggcagtaccaaatgccacaatatttattctttattaaatcagaacaattgtctatcaccctaagtcttaagaatcatgataacaattgtaaactggagccaaaccagataacataattaaatcagaacaactttgtctatcaccctgacacccttatatagtgtcaagtttcctgctgacaatagtaaatttgagctaaaccaaaagttngaaggcaatcgtttcatagagcaaacaaaacgggtgatctgagtccttgctgattgcgaatgttctatgcaggctgacagcatgcaatgcaaatgcggctaggcagcgacgagctccggtagtcactgcaccgtcaagaacatgagcacgcgcgcgcaccacgccgcgcacg

SEQ ID NO: 61209 - DNA, 395 bp, Oryza sativa
  unsure (1)..(395): unsure at all n locations
agcttaaaccagaaggtttccaaggacactttgaatggctggtaggttcagaatgttacccaccgctgttttctgctgttctcttaagacatatttcacgataccttattcctatttttacgctgcagacagaggttaactaccttggccaacttcaccacaaaaatcttgttaagctgattggctattgctctgatggcgacaaccgacttctggtgtatgagttcatgccaaagggaagtttggagaatcatctgttcagaagtatgttctctattaaaaatatttatgccttcttgatttcctgggttctcatgtcttaaatgttcacatagttcanataacattntntttctattcttgtaggaggtgctgatcctttgtcatgggcaata

SEQ ID NO: 61210 - DNA, 373 bp, Oryza sativa
  unsure (1)..(373): unsure at all n locations
taacaacaactnttcgggcatgtacggttcattgtttctttttatcatgccacatgttaaacatgccattaggtaggagtagatgtttagtaagttgctataactatgataaatcacgcttggctaactcattgtcccatattgccatatgtcatgggtttgttttttggcactggtctttgacaagttntcaactaaacaaaccttaaatctactactacttaaaaaaaaaataagaggtgctctcatcgtccgtcaaaataaccgggtgaaaaaaaaccgggcgaaaaaaaccagtttgtccgatccataataaaccggtaaagaaatttccgttcttaattataaaaaaattaaccacataaatatgttc

SEQ ID NO: 61211 - DNA, 420 bp, Oryza sativa
agcttgtcagttctcacacttgataataatagcacgtgcacgcggagcacgtgctcagtccacaatataattcaagccgcaattgcaacggcaacgaataatgaagaagataaaaaaaacgaaaaataattaatcaagccaaacgagtagctaagctagctcgtccatgccgcggattaaaggcgaaagcttaaccatctatgcgtgttgacgaacagcgaaagcgcacagaagagtgatcagagaggagctgcagcctacacacatttattatataaaactgttgctaattccaacttgcaaagcaaacaggagaaagctaagccatcgcactgaaattctgcaacttatgtgaacgcacgcaagattggctcgtgcagcaactctgaattttttcttttcccagcgtgattcacaacg

SEQ ID NO: 61212 - DNA, 387 bp, Oryza sativa
  unsure (1)..(387): unsure at all n locations
attacggacctatgaaactaagctttcttgtgtaatatgcatcagcanaagctctccttgtgctaccagcaaggggcgaaaattcatcgcggttttcctacaaactttgtgaccaccagatcctctgcagaaatgagcctcaaagccatcctcatctctatgggatctcgtcctggtggtataggtagaggccgaaaccaaaccgtgcgcaggctttgcagaacgctgcttcctccgcaggcgcaaagcatcgtcggtacggtcctcgtgcactggtgccgcgccagtagcctctctgtatgcctacactcacacacatacaggggttatgctgacctgacataaaggcagctacaaaaacaagatagtacgagtaggttgttcttt

SEQ ID NO: 61213 - DNA, 320 bp, Oryza sativa
gcaatcgagcaaacaaacatctcgttaatatttctccattacgtgaaactgaccaattggttcttggctgattgacacgccaagaatcgggcgggcttggatgaacagggggaatggaatgaggcataattaagaggagcagtaatggcagcacagccacatctacaactgtgggaacgaacacgatgggcatgcctcgtctagagaggatgaacccagcaccatccccagcgagatgagggcggagaatggatatggatgtattgggaaaagagagggaaggcctgcatccaactaccgcgacctactcataacacacc

SEQ ID NO: 61214 - DNA, 414 bp, Oryza sativa
  unsure (1)..(414): unsure at all n locations
agctntgtacttttattagaatactcttctatatacatttatggtattgggatactttccgagtatatgagtatcaactctacattatgttcttattatattgaatatactgctagcttatcagggagatgctttggtgcgggtatagtgtttgcttatgcaattactctatgtcatgacgatgatattagagtagtatctggtagtttagacgtggtgtctatattacgggatatcattatttgatgttatatattgcggatgaaaggtgggccgctgattgtgacagctcagcacgggtattccttcgcgcctatatataatcctaagttaatttcctagggagggtattcctccgtatatagccccggntggatggtcatgacgggttgtcgtaaggaactcggcagtcag

SEQ ID NO: 61215 - DNA, 487 bp, Oryza sativa
  unsure (1)..(487): unsure at all n locations
actcagcttcttgtgaacacccacttgcaccccacaagtttacacctatagagtcgctctgtcacctctgaagtcccgttagcaataatggaatccatttcactacggacagccttctcacagtagtctgcatcaggagatgcatatgcttctgaaattgacttatgagtgtcatacacgaggtacacagtgaaatcatcgctaaaagacttagctgttctttatctcttactcctccgaggacttcattgtcatcctcctcaatgacatgttcatgcatatgtttatttgttctgatggtgtggtgtgattgaacagggaattatttcagaggattggctagaagtactatgtgtatccttcattggaaaaaaaactctcaaagaagatagcgtcacaagactaattgtaccaacatgtatgtcangtaccacagatttaactattaaaaatctataagcaatgctataatgagcatatcctagaa

SEQ ID NO: 61216 - DNA, 456 bp, Oryza sativa
gcttgaatcaacaatcaaaattcatgattttatacgatttataatgcaacatcttaacaagcacataagttgaagaatggacactaaacacatatacctattgcatttatcactctttctcaaataacctttagcacaaaacaaccaagagaattttttactttttctttttcttgagcatttttgctcatatttttctcttttattccgggtgcgtccctgtcgtcaggattgtttctagggattcggcacccattattttgcttacatcgaatacgtccttgtcgtcaagactgtttccaaggattcggtattcattttttttcgtagttttattctcttttcacaatgagcaattaaagctatttgaggaataataattcaataaagcatatatatagagcatttagaaatcaaaccacatgctagcatcaacattgcatatttaagtgtcat

SEQ ID NO: 61217 - DNA, 443 bp, Oryza sativa
tgagctacctgccgatttagggttagccccacagttattattgcatatttaaagccatatttgggagaagaagatgagttagagtcgaggacgactcatatgcaagaaggggaggatgatgaggacatcccttccaacgatacaaccacgcctattgcacagcaaggaccaatgactaaagctcgagctcgtgaacttaattatcaagtaaagtcattcctagctaatcatacaagtcttctcagaattgggtgctactaaatggttgttgtgatctacttgttgttacgaatatgggagaggaaccagatcgcaagcagcactagcagcgctgatttgatgaagttcatgctcttcactccggagggcaaacggtgcatatgagtacttgttggagagatctccgtcgctactttcaactatgtgtgtgctcaccatcatat

SEQ ID NO: 61218 - DNA, 452 bp, Oryza sativa
  unsure (1)..(452): unsure at all n locations
gagccgtggcgttgccgtcgcaccgacagcatttatatggcggtgcttcaaagaggcgcaccgcgactnccagtactgcgagcgccacatgcaccgtggccgcaaccgttcatgaaagcctgtggaatccaagaccgctgcccctgcgctccagtcgcagtcccagctggtcaatgtcacgaccgcgactcacgacaccgatgcgcctctcccgtcactcactgtggggctaaaacccacggtctgtcccttggtggtgctggctcgtcgcagttccatgtcgacgcaccatcgtacggcagcaagtatcccctctaatctcattgactctgtgttgaatgcttatttgaattaagcttgcctagattgattgcatattatgctggaatagagctgatctggtagctttcttataagggttgagacactcacaatagtatttgagctctaat

SEQ ID NO: 61219 - DNA, 409 bp, Oryza sativa
  unsure (1)..(409): unsure at all n locations
tcattagcacaaaaccatagaaacattgtatttagcacaacacaaatgaaaacaaattaaagagttgatattcaattatccattggagagtactccatgtgttatattaaaactaagggaaaccacctaatccaaaccaaagaaaagtagggctgtctaacttgctggccctttctaaccaaggctactgcttctcatcccatataacgttaagagcctcatatgcacgtggaatgcacatgtttgtataatatgccaaaaaaaacatttcaatagtatttgcatataaaccaaatctagaagaatagattgtatttcttagtccctagtggaaaatattctttacacttgtcgctacgttgatgaaatattatanaccaaggcaagatattaatggtcatgaataatg

SEQ ID NO: 61220 - DNA, 458 bp, Oryza sativa
  unsure (1)..(458): unsure at all n locations
tgattntatcttcaatgatttgctgtcggctagcctcatctgttgtcaccatggcttgtctctccaaccaatcagcaagtctttgcatggctcgttggtatttgaactcatgttgctccaagttgactgctggagtaatcatattagctaattcatctagagtagagcttggatatcgtggaatctagaccttattgatccgcaatcggccaccagtgcatcaagtgaagcatcagccgatcagccatatccagaagtatagctcttgtttcgtccgagattggctgcatgatttcactggtgacctcagcatcgtcatcttcatccaggaattccttaattaatgtcaaagggaaacatatcggctagtttctgaaaaaggaagattgaagatttgaagttaatacaatggattangccgatatgacatttgttcaagttatcggattttatcttga

SEQ ID NO: 61221 - DNA, 405 bp, Oryza sativa
atctctgagtcacctgcggcatgcaagcttttcttcagtagctcaaccaaccctaatcatttcagaagcaaccccttcggtccagctggagggaaacacaagtcaaggtgcacccagttggctaccatcgaacctttctggtcccaggccttcgccatggagtcaaggaccgtagttcgacttcagcaatgctactcaagcaccaaccatccgaccacaggcaccgacaccaagcttcggagcgaatcaggcgccgaacaagatcgccatggcatggacccagccttcgttcgacccatccatggcggcacaccaagcgtcaccatttatggccgggcagccgaacactatggtccaactgcacgtgcaagccatcacatctgacttcgccacgccatatacaaa

SEQ ID NO: 61222 - DNA, 440 bp, Oryza sativa
  unsure (1)..(440): unsure at all n locations
tcccggtttagctcgcttttatcttttccgctgcattagtaatcttttctatctttgtaagacgtggatctgtatgtcaacaattgtcgtttgtgtaccctggctggtcctggacagggatttaatgcacattcagcttagaaattctggttcgagaatttctgggcgtgacagtgtggatggttaggggagggttatgtggagggtcttgtcacgatttccccctttgcagtacatggtgatacttcagngcatggcgacatgtgtggaatcgtgtcttgtgggtacagttgtacacctctggccagagtaaaactattctaatagccgtgcccgcggttatgggtgatcaaccagattcaccgtgattagtctcacccctagtttagcttaatgaactggtgtagttcacgtggttggttggcctcgtgcaacgtggt

SEQ ID NO: 61223 - DNA, 409 bp, Oryza sativa
gcttgctgcctcagcgctagctatttttttactagtgcttccactgatgcggccatccaccgcttctatacacaacatcgccctcggtataattacatcccaccacgacgcacatatgtcttcatccatcggcgcggcggccactgcaccagccatcgtttcgcctaccgactgatatgattataaaccgtaagatattttatatgtaaaactcttgtataaatatatttacgatttaaaaaccaatactaaaaataaaccaggataataattttgatttactatttttctctttctctgacataagccggtctgactgaattgcattgtgtataaaacaaatacttctctctaagatattggcgtacattttttttgcgtgattgtgaataaaaaaaagataagctga

SEQ ID NO: 61224 - DNA, 481 bp, Oryza sativa
gacactataaaaaacacaagctagacgccaagatggatggcacatggcaaaggtattctttatctaagaatgtcttcatacacattcgccggtcttggtgtttggtgtacaccggatttgctagatatacgccgtactatcaagaggaatctatgaagccagcttgtggatgatcttgtgccatattagttcatatgcatgtaggtgcatttttggagcttgtctaaccaagtgtgatgtagattctcaagtacataccaagagagaagtgggcatgtccaatatgagtgagtgacatcttgtggctatgtacggaggatatacttcggagagcgagccctttatccttgacttaagttatgtatcttggatggatattccatgggttggatagtccattgaataagctttccatagaggtcgcgaacgttcaattccgagactcgagtctagagatatcgtctcctacttacggtggatg

SEQ ID NO: 61225 - DNA, 450 bp, Oryza sativa
  unsure (1)..(450): unsure at all n locations
gctttcagctgattgagagcgtgcttcttcttctctgtccacacaaacggcccggggcgcttgaggagtttgaataggggcagcgccctctctcccagcctcgatatgaatcgacttagcgcggccatgcattcagtgacgcactgcacatcaataagcttgctgggggggcgcatcctctctatcgcgcgtattttctcaggattagcttctatgcctcgggaggagactataaaaccgaggagtttgaccgctggcacgccgaacacacacttttcggggttcagtttcatgcgcgtggacctaaaactgtcgaaatgccacaccctannaaatctaaatatataaatcgggtgttaattggaattattagaatntattttaccagcctagaagagaagatctcaatttaattaataaattccaatattaaatggcgcagataaaatt

SEQ ID NO: 61226 - DNA, 378 bp, Oryza sativa
  unsure (1)..(378): unsure at all n locations
aaatccataaacgatagccgatcggctagttgccgatgacatatcatttatctcgaagccgatgtcatatgtgaatcgatcggcaaacatgaataagtaagaaagaactaaatctactcgagcggctgtagatattaacaatatatagtccttatacacgcagaatggcgactctcttctctggcgacgtccatggcgactctccctaggagatggtcacgcctgcgccacctactggatgggatntctccccgggggattccatccgcgatgaagtttggagccgtgttggttcaccggtgcactatttctctcactttagccagtctgcttttcgattaggggtggatgttcctcgctcttccgtttgattgacct

SEQ ID NO: 61227 - DNA, 389 bp, Oryza sativa
agcttacacgtctattgcagtagggaacatatgactttaaagggcccaaattttgctgcctggctgcccggccagcctttgctccaagtaccaccactactactacaacaacaatacaacaaccaagtctcatggtgacgcacacatacacgctgctggcctcactacccaccagccagagagtgaggaaaagactgttttgtgtgtgtgagatcgagagagagagagagagagagatagctggccggccgggtgtggtccagggaagaagaggtgtcagtgacagtgagctaactagctgggggtgatggtgcatggcatggcactgctcacattcatgtcgacacacacagatcgatgcatgcacgcgactatgttctgatcaaccg

SEQ ID NO: 61228 - DNA, 395 bp, Oryza sativa
  unsure (1)..(395): unsure at all n locations
agctntcatgttctaaaaatatatatcattctcccttgcagcccttggcctatccagcactgtggtttgcatggtcacattggcgacaacacacggccgggcctactttcaaaaatatccctaaatgaaaaaaatcggggtcacttataattaagtgtcattttatgatggcggtttattatcccctcatatctacgctcggatgagggaataacatgcatttcttaatgtcaagaattatactgactatgtgctttgtacactaaagggatgcgctaacgccgttattacacttagaaaaagcaggagcacacttttgaccctagacacaacccgatactgttattgccgagctctttctgatagcctaaacgggcacgtataagcgcacacac

SEQ ID NO: 61229 - DNA, 253 bp, Oryza sativa
agcttgcatgcattcacgcatggcaaattgtttatcatcatgcaaacacaaaccaaacactgtgattatcgatcacacgcatcgacacttttgacatgagttatatacctatcaatcaacaaaatggttcaatattttcaaaaatggagttgtattttcaaaaatggagttgaactcaacaaagataaagactcatcgaaaagatcgatgtattcattgtctctgaactgatcgtgtgtgttgtttctactga

SEQ ID NO: 61230 - DNA, 416 bp, Oryza sativa
  unsure (1)..(416): unsure at all n locations
tgatgtttcatcagtcacaatgaaatggtttaatctttgattcgacttagtcccaccattntaatattgtaaaacattattgtcttagtgctaaaacatttctcttttagaggtgaaccaatgtttgagtttttagaaaaatcagacattttatgacaaactagaagagtggaattcttatacatttttggaatggagggtgttagataattggacacgtatgttgactctctaggggcttttgaaatgccttgcggactatgttacctgttgtgtatatatataatcagttgcaagtagagaacgtacagctgcactaaattattaaattggcatatccgtacggcgtgcatgattgttatatttaccatatttccacccttcaagatttatactgtataggccctatttgcata

SEQ ID NO: 61231 - DNA, 338 bp, Oryza sativa
agcttcttgcttccagaaggagtaattatttttctatctgatcgacacagagagaataagatagtgacttgagcgagtgagtggcccactggtaaaactggcgacctatcaaatgtctccattgcttcttagcacatgctatatagccggatactcttcacttatattcactcattaattatacaacgttgtccagtatgatgttgccaccgatatggacacatatcggcgtcgctactgggctgagcacgcccaattattactcctaattaagtgtcacaaatgctgcttatttacttggtcagagaccactaaatagcccgcctaagtactatctg

SEQ ID NO: 61232 - DNA, 475 bp, Oryza sativa
  unsure (1)..(475): unsure at all n locations
ggacctataaaactcagcttgttgcaaaattacttgatgatattggcgactcatttcatgaaagntgtctaaatttccccccaagtggtgccctcactagaaagaagatggttatgatcacgtgtcttggcttgttctggtgattggtggttgcataatcttgattttcatatctctatttctccctctatttcaagattttttcaccataaccttgattcgctagttgagcttggaagctccagcttcacatgaaaatcacttngttttttccaaggccattaatcccctntttttcagtttcagtttcagagtaataatcttatactagagagaaactgaaccgacaagagatattattcgtcctcgtcggtttactgcagtccagtactgttggaaataactataccttttcacgtgatgctccagtgccaataattgatgtgctacagcagtcaaatggtcttttttcctt

SEQ ID NO: 61233 - DNA, 446 bp, Oryza sativa
agcttaccggatagcagctgtgccagatggttgttgagcgcgccgacattttcggaaatcgacatttcattgtcgttgagaatcaccagcatatcaggacggatatcgcccgcgtgattcatcgcttcaaacgccatgcctgcggtaatcgcgccatcgccaatgacacagacggtgcggcgaattttgccttctttttcggcagcaaccgcaataccaattccggcactgatggagggtgatgaatgcccgacgcttaatacgtcatattcgctttcgccgcgccacgggaacgggtgcagaccgcctttctgacggatgggtgccgatttgtcgcggcgtccggtcaaaatttatgcggatagcctgatgcccacatccaaataattggtcaacgggtgtgtgagacatagtgcacgccaggtcagttgaccgtcccagcccgg

SEQ ID NO: 61234 - DNA, 486 bp, Oryza sativa
  unsure (1)..(486): unsure at all n locations
acatcagcttttggccctaggagcattctcatcttttataaagaantatctctatccaattgagtcgatagcctcatctcgcgacttttagttggtaaacgcttttccgatctttactagcatattacataaaattgaagtgacctataataaaagctacttaataattattaaatagaccaacctaatacatgatataatacatcgtactactatgaatccgagaatataccggatggcctccaagtaagattttatcgagatacttagtattgatgcaaataaattctcctcaaaacaatgggcgcctggatcagagtcattctggcacaatggaccatgtctgcacacgggcacgtgtgtgcgtgcgttctcacaggcatgaacgtacgtgtactaggcgagttctactacggcacgtacgacgttcgcaatgggatgactagcatacatgcacgcatatactcgactcaaattaactactga

SEQ ID NO: 61235 - DNA, 467 bp, Oryza sativa
  unsure (1)..(467): unsure at all n locations
tgccgcatgcaagcttgtagccatcctgcaagaagatatgttcttattgctaatccaccctcgagaatgggccaagaaattatgtcaaaaccttggcctttgccgtggccccggggatgggcaaaggatttggccttgaaaaaggtatgaaacacacagtcataggcaanaacattataagttataactcaagcttttgcagggacaaatgattagtaacacaattgggttgccttttcataattatctcgctctcttgaaatgatattgttgctgataagtgttaagcacacgttctcctttttttacatgaagaaattcatgtgttttcccttttctaaagaaaaaacttctgagctgtaaatggtggtaccattgctgaatagcaaataacaccttgtatgcaaatctacatgctgtgtgctcattcctatgaaatattaacagacaccacaaagggatgaaac

SEQ ID NO: 61236 - DNA, 350 bp, Oryza sativa
tggctgtttatggatgaacatctgaagtcgttgcgctatgtgtgccgctattaatatctctcatgataccgatgttttgttgttgatataactagatgattttcatcgtatcttctaattagtgcagagtctggaatgggcggttctatttcaactggatgcgatgtgtatagttatggagtgctaacttgttggaaatgcttacaggatagcattcaattgatgatacatttgcgatggagttagcattcacaactgtgatgactccatgtttccagatagagttgcggagattctagatccctatatgacgcacgatgagcaccaagtgtatacagcataatggtcgg

SEQ ID NO: 61237 - DNA, 328 bp, Oryza sativa
tgtaagatcatatctcgcaacacacgaatccgaggatgtttcaccacgaagcataagagccgacggacagcgagggtgccgctggaaaaaatcaaggaatggcgcgcgaatcccaagaggtttcaccgggatgcataggagctgatggacgatgctcgccgcggtggaaggaaacgaggaatcgcgcgctttctatgaggattcgccatgatggggagaagccaggggatggcgcgcccgctggcaggaagaatcgagttatcgcgcgcggaggcgaacgcttccgaggaggttatctccagaagcacggaagccggcgtttgcaagc

SEQ ID NO: 61238 - DNA, 399 bp, Oryza sativa
  unsure (1)..(399): unsure at all n locations
agctctatttataagcccaaacaccatgacataggggctgtttagttcgcgaaaaaaaaaaattcggacgtcatatcagatgnttatcggatgtcagatagagctctctgacacgaatgaaaaaactaattacgtaactcgtctggaaaccgcgagacgaatcttctgagcctaattaatccgtcattagcacatgtaggttactttatggctaatgatggataaattaggtcaaaatatttatctcgcgatttccctcctaactgtgtaattagttctttaatctatacttaatgctctatgcatatgtccaaaggttcgatgtgatgtttttggaaatatttttggtgaactaaaccaggccatagtttagtccttgtaaaaaaaactttgacaagc

SEQ ID NO: 61239 - DNA, 449 bp, Oryza sativa
agcttgaacagcataacatgatcacacattcttcttatgcatatgatagctagacaagagatcaaactagcataagagtgatacatgcatagcatagtgatgaccaagagattacaagcaaagctcaattgaagagtgtataaaacaatgcataaagtaaacatgatgcaatatgttacaaatgcatgcaaaagaaaaacaactccccctcaaatcaagccataggggtggatcacccctaactcactccgcaagaactcaaaacgagagcgatcaagtggttttgtaaatatgtctgccaattgtttttcagattcaacaaattctagcacaatggtacctttctcaacattgtctcggagaaagtggtaccgtatctcaatgtgcttggtcctggagtgttgaacttggatttttgcactattgattgcacttgtattatcacaaag

SEQ ID NO: 61240 - DNA, 325 bp, Oryza sativa
  unsure (1)..(325): unsure at all n locations
agcttggcgacgactgatggagaagcattgtctcttctgtatatcaaacacgaccgtgaacttcgggttgaccgcgaagatggagctccagtggatttctgcttctgagaagtgaaggacgatctttcttttctccttacgaacccaaccggggcagcggcgaccgaaggggacccttgaagacnggcaacgcgggtgaaacggcggccggcgactgagagagaaagtgctcgcggggagagcgatttcggcgactgcggaaagagggagagatggccgccgaaagaggggagggagggggctttatatatagccatgggagccc

SEQ ID NO: 61241 - DNA, 386 bp, Oryza sativa
gctctcgtccagtctcggtacttcctatataaaagccggtccctttggcccctttccttgcaagaccgtcatgactacgacccactaccacacggtgattccctctcccgtggtgtcaactggaccgcgtttaattgttttaccgaaaatctgtttcttttttgccgaattatcctaacgggtcattctatgtaattaaaataggaagataaatgtacaagaaagagtttacatcgactgctgactgtctaggaaagatgtgaaccatagcacatgcccagaccatgtgccaacctgccaacacacgccagagagggaagccaacaccgatccggccatcgctatgccagaccgattgctcaccggccaacatcaccacctcgaca

SEQ ID NO: 61242 - DNA, 351 bp, Oryza sativa
agcttgcagctcatgttactttcctactacaaataggtcaggactttcattatctcatacggtatagtatgtacttagccggtttgttaatggacacaatctttcaacatcggtcgcaatattttcgccggttcaattacttccgtgcttgactatttatgttgttacagcctgtgctgcccgccagatgaatgtacaggactgagtgagactgaccgcagctggagttgtagtataagaaggcaacagcttaattaccaacgaccaaccacatttgtatgttcacttccatcaaaggcaccagctagctttaaccgtctgcacctactgtatatatgaacaatcttgaac

SEQ ID NO: 61243 - DNA, 385 bp, Oryza sativa
  unsure (1)..(385): unsure at all n locations
acactactacaaactcaagcctgacgtctgcagaggngcgactccactccacaggctatccttgactgcagcgactaaacccacttcgacatgacagctcccactaggaagatctttagctctggagtggtggataagagatcaagactgagttctacccactgtactcagcaagtcataccggaagaggaggtatgatacatgatatatcctaaggaggcttacggcataaaccggcatttatagctgacgtgaaagcagcgaaacaattgtagtagattaagcaagattaactaatcactgttcaacgctacaccactgttacaacagggccaaccaaccacctgaactataccagttcatttagctatactaggggtgagac

SEQ ID NO: 61244 - DNA, 437 bp, Oryza sativa
agcttgtctggaatctgacaaaaataggggtcttcagtgtgaaatccctctacaatgcactgtgtgttcaacaaatagacattcctcttaagaaaatttggagtttcaaaattcttttgaaaattaaaatcttcatttggattcttttgagaggcaagattctgactaaggacaatttgtttaagagaaggtggagaaagggtgaaacaaaatgtcagatttgggacaaacatgaatcaattcaacaccttttctttgattgctctcttgcagactaatttggaatataatacagtgtgcctttgatctcaaaacagctaaagactgccaacacctttttggggcttggctttctgctttctcaaacaaaaccaaaaacttgattggtactagtattgctgcttgtatctgggctgtctggaaaaccagaaaataag

SEQ ID NO: 61245 - DNA, 467 bp, Oryza sativa
  unsure (1)..(467): unsure at all n locations
tccctgtaacttcagtaaggtaatgacataatgtccttctatcaatgtcacaaagtcacaggtctctttgtttcatcagagatatgcgcttatcccacttcacttcttttgcctcctcttcagtcttcagatagcgagcaagtgactcagaggaaaaggaagaacaatgcttcagtaattttctgaatttggtttctcgaacacagctgcttgtctgattgtcggctacatctgaatacaggatgtcttgtgctattgctttggaagatagctattgaaatctagctcaacatctcttaattctttggaagtgtactgcttcctgaccctgtactctactattgtagatcattcagataagtgcgatatttacataaactcagtctcaaatcatttacttttgcatagaanaattgctcacaaacaagagattggacaggcatcntggttttgtttcagactctcag

SEQ ID NO: 61246 - DNA, 382 bp, Oryza sativa
  unsure (1)..(382): unsure at all n locations
agcttattgggacaatataaatatcgtggtagcatgtaaaggatatgctggtgtactggcgtggtaaaagaaaggctcgaatttgaaaataaacttttagagcaagtttaattgtatagctaaccactggctccaaatcatctatatagctaatctaatagccagtcatacaatagttaactataaaaatatactacaccattcatacccggtcccacctcttatacacacataacgtcttagagtctgtgttgcagctggctacaaatctacagcccgctttcttttctctcttctcttttcttctcgatatgtgggtatagctggcttatagtttgttatcgtacctgctcttagagggtttattnttaaaatattaatt

SEQ ID NO: 61247 - DNA, 392 bp, Oryza sativa
  unsure (1)..(392): unsure at all n locations
ntccaacaaatacttatggtcccaaaagttcttctggattatcagctatgtccgnttaagggtaatgctgtcaggagtacataatcctaatccagtatatgcataacttaatctcttaccttctatggacaaaaaaatcacttaatctcttaccttctatggataaaaaatgacgcggttatattggagtagacttgggcaagatcttggtttagccctaatcacttctttgactatccatatatattccttgtgttcagactctatcccttaaccaaacaagtctggaaatgagaacacacaaaacttacagtgcaataatgcttattcaaatatactagccatattagtcgcgctctgcccgactttttacataccccgataaatgctct

SEQ ID NO: 61248 - DNA, 440 bp, Oryza sativa
  unsure (1)..(440): unsure at all n locations
gcttgtatcgtcaattcaagttggttgatttttgatcatgttggaagnttagtgtgaaattgaacatcggatatgcatgttgctgaattttctgaacattacttgtgtagtcatgattttgctgtgaaatggatgcatggcatccagtgggcagtgtttattgcttttctgggtcctttttgtttgttcagcactttaaattttccggttttctgtactgtgcattgtttctgcaacttgcagaatttgtggtgaaaatgcagttatgatgtgnttgctcgttgagttaggacttgtctgaacaatacttgagaactgataaaactacagaagtgaaatacatctgcacttatttgataaactttcattttaggcatccctagacaattctgcgcactcttggattatctgaatgttatagaattttntagcgtgatatt

SEQ ID NO: 61249 - DNA, 399 bp, Oryza sativa
  unsure (1)..(399): unsure at all n locations
tgagaagtccaaaagttttggtggttgtctgtactaccttgtggttagtattattactctatcnttttttcaattgctttgctttcttgtaaccacttaactttatatttttgctntttcttattaataggtcaattacttggattttcttaactttggtatgcgaaaagtgttgctagatactccaagaatcaaagtatggaaaggaacaatgatcaaaaaattttcaaagttgataaaataagcaaaggagtctatggcaaaagaccgataaaagatttttctgagagctgttacaaaatggtaattctatacctactcttttagttatgaacttgctttcttntaaattgtttactctttagttctatcattcttttgtagattgaaactggtact

SEQ ID NO: 61250 - DNA, 313 bp, Oryza sativa
gcagctgtgtgtgttagcctctcagctttgtttctaccatatgagctccttttttctttcttgagtagacactggcttgagatggtgttttgtaacccttatattgacaaattcttcttttaacgaaattatattgacggattcttattcctttatactatgtggatagttgctgcacattttatttctccttccaagttttaacatttaggaaaaaaaattactactatcttctctattaatatatacatggcaaagcttttgctgtcctttaaaaaaaatactccctccgtttcgtaatgtaagtcattct

SEQ ID NO: 61251 - DNA, 412 bp, Oryza sativa
  unsure (1)..(412): unsure at all n locations
gcttcagaactgtagctacagcttatattatttgtactacatatgcatgccagctagcatttctagcagtaagggccgccactgtgctaaacctgaaactgagttggtttccttattctggatgtaaccccattataatataatccttggtccttggatttatagtctcgatcatatttcaattgtcagatatatgttgcctcgttctaaacttcaacatgattcagattattccacggttttcgttagcacatttttcaaactattgtgaaagctttttacatagaagttgctataaaaaaacaaataaatntattcttttcagtttttaataaataaaatctaattaatcatgtgctaatgatttgactagttttgcatgcgtatttaatctttcttcatgttggatgtt

SEQ ID NO: 61252 - DNA, 463 bp, Oryza sativa
tgttggtgagcatctggccaacctaacaaactaaccatgagaccatatatatagagagacatatgtgttatgtttgtatatcgcaaagatgtattttgtatggtctgcttagtatcacaatctttgctgtttttatggctttatacctctagataaagtgggatttggttttttttggctaccatgtactctcctaactgaattccatggattctcatgattttgggcaaaatttgttcaaatctattttgaattccgaatccggtgaaaagcctgaatattcaagaaggggataattaataggataaagtccaatataccccatgaactattgcggtcgatcaaattaccccccgacaaatagcagacatgtttcactgtgaactattcaaatctgacaaataaccactcaagcactgttctatgcgattttggcccaagctggtacacatggtgccgacgt

SEQ ID NO: 61253 - DNA, 256 bp, Oryza sativa
gacctaatgagagaagagagaaatcatcttaactaacacttattaagaataaaccatgtgaatatataggaggaatcgagcagctagccgggacataaacagaaagctgcgcgccgaaaaatcctatacgaccagtcaaaggaggggagacaaatcacgattagcggagaaataataacacatagctcaaactctaaaaatagactatatgaacctttaaaacaactctggtatagaaatatactccgaaagacat

SEQ ID NO: 61254 - DNA, 425 bp, Oryza sativa
  unsure (1)..(425): unsure at all n locations
tgtcgatttctcatcagcaaacagaagaagaattatgtacagaacctgtaattntataaacttcctatgttagaaggtgaaacatttaagtgcagtttagtcaagagtgtataagggtgctagacatacagagatggtgactcctcaactatatcaaatgactatttggtgctatatgtgcagatgtaagataagctcgttgggccattcagttttttgggcacatcaacacatctattcaattcatgcccatacttcagctgaactagtaaaaaaatcatccagcatagcactcatgttgcacatagtccagcatgtaagcagccaaacatccatgtagatactgccaaatatagattaatcatgtacctcggaagcaacacaacagaatgccatgaatggtcgatgtccataatatatattta

SEQ ID NO: 61255 - DNA, 402 bp, Oryza sativa
ctgcatgcttcaagcacagaacgtgctctgaattttttctttgtgagatatgcttgatgactattaatgcatttacatatgatgattctgtgaggaaattgaatccatacatgaattttcctgtttgtaggaggaactgatgaggcttgcttttgaagcaacatctatgttaaaacagctgacacaggtaaagataccttgatagtacgaatagtgagctgctagtataatcctttcagtcatctaaactggtgcatattactatcaataatgtgaagactatgatcctaccttacagttatgatcttattgagcttaaactcacttcccaggtaaatgatcagctgggggagcttgttcgtgataacataacatgaccaaaagatacatgccttgtagatg

SEQ ID NO: 61256 - DNA, 454 bp, Oryza sativa
  unsure (1)..(454): unsure at all n locations
tctggcgcgctgccacgtgggccccaccgcggngcataatggttgttaaccatgggtcccagcgcggcgaacgttggggtggcccacctgtcggtctcgggaggtaatggggattggggatggttaggtttgtttggcggaggaggcacgctgtcacgcttgaaatgggaagtgagggaggttcatctctatccgctggatcggcgagatggaccgttatgtgtgaaccacgtacgctttgggaattttgcgtgtgctgcggatgttgtttcgctttcgctatcgtttggctggacagtttaacctcaaaaggtttatgtgacgatattgggaggatgaatacctaccggagtagtacatatttatgcgatggttggtcagaaactataaccagcggaaatcgaatccttagttttcctttgcacactccgatttcaatgaacctcaacctaac

SEQ ID NO: 61257 - DNA, 449 bp, Oryza sativa
  unsure (1)..(449): unsure at all n locations
agcttgaacactgcagtacccttcttctctttacaaaactcttggccntctcattgtaattagctattggcacaattgcccgaatacgaaacccacaaccacacctctttgattgatatggttcccgcttcaatactcgtgtcttcttcccatcagggacacttcctgaagaagacgtagcattcacaccacttgaagttggcaccccagcacggtggcatgcataatctttcacctcggccatgaatggtttatgccttatatacttctgcctgatacagagaaccaccttatgcttagcagacaactgtngcagtcggcgtggaacatctcgcgcgggcacatctagtgtctccgtatattcaaacctgcggcgccgtttcccccagcctggcgatgacatagcaaaatcaggctgtcccgcatgtgcgggcctacatacagcacat

SEQ ID NO: 61258 - DNA, 389 bp, Oryza sativa
cctcggcaacaatgacatgcttccaagagaaagacggagctgtttcgtcacttttgcgcaagcttgggcactccatataaggtctaatatgaatgggttgcagcgttgagtagagcgtgctgtgaactattcagccggcaacaatagcgttctttgatttttttcttgtaacccatctgggttcttacatcctgcttattgaaaatataattggcagcctctggctgccggttagttcaaaaaagaaactattaccaaagataacacatctcttaacttataatactggatgagatcacagggcgatattctgactagttcagcaagagacctatgtgagccccacatgtcagaccctatatatttttctacctatctgatagtatgat

SEQ ID NO: 61259 - DNA, 232 bp, Oryza sativa
  unsure (1)..(232): unsure at all n locations
cagcttntaacttaaatttaaagaaattatctcttacacccatcacatcttattagtatgttgctccccttcaacaactaaaagtctatctttgattgtcaaataatccgaggtgataaacaatatctaccaagtcaatcctcaggaccatatgccacacttggtccacttaaaatgaactttctgagtaactatgacgaaagcatttttctcaaaaactgctctgaacatc

SEQ ID NO: 61260 - DNA, 461 bp, Oryza sativa
actcagcttcctgctgaacacggcgtctgagcggattaccttctagctcttcgtgctgctccggatggaggtgctggtcgctcactgaaaccggctgtcaagtgggttttctgtggcactcatgaacatgtcggggctcgccgtgctcggcctcagcaccaacggctgcaccggcgagctgtcgtccggcatcggcggctttctgcccaagctccggcagctcaccatcggcggaacttcttccaagggaatataccttcttccttagcaaatgcttcgaatctctcaagcatggtatgtctgacaataacttcaccggtgtggtgcctgccttcattggcaagcttgccaagcttacattattgaaccttgagatgaaacaactcatgctcgtagcaagcaagaatgggagttcatggatatcctagctaatggcaccgagctacaagtactctctcttg

SEQ ID NO: 61261 - DNA, 439 bp, Oryza sativa
  unsure (1)..(439): unsure at all n locations
agcttcaaccaccagcagaacctgcattcttnttgggtagagaatcagcttcctctcctccatcctgtgggcaacacggctataactgtgattgatctggtttagctaaatctagtcattaacatgtgattcgcccggcaaatagttctgaaagaatttttagtataaacattcatttttttctagctagtttggatcataaaagtcatcatgggatttcaaataaattgtgaagtgtagntttttgcttggtttattatttatcatatacttttttctactataattntgtactgaaaattcgaattatttttagtcaactgtaaaataattatatatatgttgccctggaattctcanacgaatgtaaaacacgagctttgagcatatgtntaaaatcctttcttaaaactgaataaatggaagcaatccattttta

SEQ ID NO: 61262 - DNA, 444 bp, Oryza sativa
  unsure (1)..(444): unsure at all n locations
ntactgtttgacacattntaagatgcatcgtaccaacttctataaagtcgagtaactgcggtataaaaggattttaaggtattgagcacttgatcacgcgcactntggcctaagcgaaaagtgcctaagtccctaaaagaacgtgacaggccacacctgaaaatatgggctgcagacatattaagcctatgccaaaacatatgccttcgacaccctttaaaggatacgcatataacatgctcccgagtaataaatcttccgggtaatatagatcaagcgtagctcatatgaatagcttctgatctaaatgattatcccttatgggatactccacaataaatataataattgaatcccgactggcgcaagtattcggttgatagcccttacggggaataataattggtccagtctttgagcatagaaaatagactcatgactatg

SEQ ID NO: 61263 - DNA, 430 bp, Oryza sativa
  unsure (1)..(430): unsure at all n locations
agcttctaagacagatctggtgcattctacaaccttatatcattatcttccagttgtgctatatgttgtcaaaatgtctccttcaaacggaatgagtgtagctcatctgattaagtttcttgtggtagaactatccactcggatttaagttgtatacttgacaccggtgctcgcatttatggataattatttttcagttgttgggttaatctcaagatatgcctaatctctcgtgtttctaaaaacaatatctttttcgagtctacaggtcatccacatcttctactaagtgcaacaactctgtgtctaaatggtctttttctgtaatattnttttctgacaataacccctaacctcactgatgggctgtggaataacaagagagtttcaagaagagataaccagatgagagagagcttgctgtgtatat

SEQ ID NO: 61264 - DNA, 331 bp, Oryza sativa
aaaactcactcgctacgaaggggagagattatttatttttcaccacgccttagggcgcttcgactgctttatatgatgggggccaacgtgacatatattagggctaactttcattctcggctttacttcacttattgtcatacttatttaatgagattctcaactgtcaaatattatcaagccgtatactcccatcctgtctaaccttgcctctagatttaaccgactggaacctcgacctgtgccatcttgtgcaaccactcggccaacattgacatttgactgtgtcaattttagacttagcctgcttggtactgtctagttgccataa

SEQ ID NO: 61265 - DNA, 61 bp, Oryza sativa
aacaaaaaccagagaacccgggggggttcctcaggagccaaggaaggcgcaaacagcgcag

SEQ ID NO: 61266 - DNA, 429 bp, Oryza sativa
agcttggagcccggaccgggtaatcacatctatggctgtcttgttcttgtctcaactcgttgctgcgtttggacaatgttagaaatatggtcacaattcagcatattttaatccaaaatattaagacaataagtatgacttttgcagggaaggaaagagagtaaactacagatcatgcttaatatagaataaacataagcatttgtcacaacacaatgtaatgaaaccatttcacctaacagaaatatagaagaaaagaacatgaacacaatgaataacgaattataccctaagaatggccctccgctggtgtttgaggcagtattgcctcccgtggtgttgtctctaagcgcactgccgttggtgttatctgttgacatgatcgtcgatcaatatgaacatgagctgaagaagttgattccgatgaac

SEQ ID NO: 61267 - DNA, 439 bp, Oryza sativa
tcaagtgcgcaagcccttatcatgtcctccaatatttgattgactcttctgtctgaccatcggtctgcggatggtaggctgtgctgaaatctaaccgggttcccaattcctcttgcaatttctgctagaactttgaagtgaattggctccctcgatcagatacaatcttcttgggtactccatgtagacacatgattctcgagaggtagagtctgccaaccttttgcacgtatacgtggtatgtactggtatgaagtgagcaaccttagtgagtcgatccacgactacccagattgaatcgtgacccgatgatgtccggggcattcctattataaagttcattccaatctcctcccatttccattccgggatttgaagagggtggagtaaacctgcttgcctttggtgctctgccttcactctgttgcaaacgtctcag

SEQ ID NO: 61268 - DNA, 409 bp, Oryza sativa
ttcgtgcagcgcgcgatgagatatgcttatcctcgtccgttcttagccatagtattaaaacactggaacaacgtcttaaaattcgcttattcaatcggacaacccgaagcgtatcgataacggaagcgggttctaatctctatgaacgattgcgcccagctttcgacgaaattcagatcatgttagatgagatgaatgattttcgtctgacaccgactggaacgctcataatcatgccgcccgggtagctgcacgtatatttataatgtctctactggttggtttcacacgagaatatcctgatattaaagtcgagctcacaactgacgactctcttgtcgatatcgtccaacagggctatgacgctggcgttcgacttagttgcatcgtcgaaaaagatatgatcagc

SEQ ID NO: 61269 - DNA, 426 bp, Oryza sativa
  unsure (1)..(426): unsure at all n locations
gtgtggtggtggagcatcngtgcatcattcgtggtttcgcaagggcgatctcgtctgtgccctttgttgatctagtggcggtcggtcacccttaacggcggccaatgcggtgctagccttttcctggtcgtgtgtgttggcgatgtccgcgtgtgggtggcggtatattttctccttctcctagttacgactctctccagggttgtaatcttataattttttcctgctctatcaatagaacttcgcaccgtctcgtgcgagtcgttcaaaaaaaacaaccaaacggaaagaaggatttcgacaaatttgctaattaaggcgtgtgagccttaattagctgttagaacattcatggattcatcgttaggcatattatggtgttgatctctatatagaaatacatataaatgtgattaaaaagacaca

SEQ ID NO: 61270 - DNA, 476 bp, Oryza sativa
  unsure (1)..(476): unsure at all n locations
ctttcctcttaatttcagagcattaaccttagtacttacaagttaaagtttgatttccacccccaaaagtatggtgattcaactggattgaacccccatgtccggatccgcccctgngagagggtaatttcgtcggtttattatgcttttcggtgcttcgcggtgagggatttggtattttggatttgggtgggcacgcccatgtgcatttatcgtggagcaagattggtaggaggctggctcgaggtttaccatgaaatttgggactatttttctatttgtaatttcttggtagcgcgatgtacgatggcaacaatttattttaatttttgcctccttcctctggtttgataaaattgagggtggtggcggaaggaaacctccatttcatcaatcctgaggcaagaagggtaccctctttctttgaaacctcatattaaattgtcatggatatngctttcatgtaaccctatact

SEQ ID NO: 61271 - DNA, 207 bp, Oryza sativa
  unsure (1)..(207): unsure at all n locations
agctntgtcttgagctcatatgagtttatctctgcggacagcgcattaaccgagagggcattcttagagcatgcatattctttgatatatcccgtccatagccgatccaatcgggtggggaccaccaacgatacgctgtcggcgtaccggccgattggctatcgggtgactaatctcccctcttttgtctccttgttgattgcagga

SEQ ID NO: 61272 - DNA, 351 bp, Oryza sativa
ctcgctggagctccgagtgctgatccacgcttgtacctgttttatgtcacggggaaagcgtacccctctacatatgattacaaactgttccaacagccgtgcacactgatatcggctgatgtgaggtgactcctaacgtcattatgcttgtctactgcttgtgatattgctgctgtcaaatggagctcgatgcttgcaaaatgaatagctgactggatagctaggtccggttggccgtctgtagagatgtaggcccaggagggccgttaaaaagctgttggtccatgcctaccctgtctgagaactaagactgttgcattgacatactccgaccggacgagatcactgtct

SEQ ID NO: 61273 - DNA, 447 bp, Oryza sativa
ttttcttgaagacccatttgcattctacatgcttgcacccatatggacgctcaaagacttcccaagtaccattggacataatcgagtccatctcactgcgtactgcttccttccagtagtcagcgtcaggagatgaatatgcctcttctatggttcttggagtgtcatccacaaggtatacaatgtagtcatctccaaaggattttgcaaccctttgtctcttactcttacgagtatctacaatcttatcctcctcacgatttccctcaagcgtttgatcattgtgttctatcggtgcaaagtgctcatggggtatgacagtttcttgactagaagtgctaggtgtatttttcatgggaaattcattcttcaagaatgtagcatctctggactcaataattgtaccaacacgcatgtcgtggactccagaagttactactaagaatc

SEQ ID NO: 61274 - DNA, 423 bp, Oryza sativa
  unsure (1)..(423): unsure at all n locations
agcttgcatntttgtcagctcctgagaatgtgctctcctccattatctcttcccttgctgctgaacaagcaaggaatagtggttcgacttctggagatctttctgcaggacctccaggctttgagagcaataagaagcctatgcttgacaaccccattcatgctagtgacatgagtgctcccccattctttgggcaactgccgcaggtgcaaccacagattggagcaacagctgctcttggaggcacacagccaccaacccaagcaaaccaagcagctggttcatttccaccacctccacctccattaccacttatgccacaatttgttcacaatactggaggaatgtttggaatgggaccttttgggatggtgagtggctctgcgccacctccacccccatttgcccaacattatgtcagca

SEQ ID NO: 61275 - DNA, 470 bp, Oryza sativa
cgcgccagcatcgcaagaaactgtgccggtagccactcaacatcctccatttattattactatctcttttataaataaacttttctgctgcgttgcacgtcagtcggtcagtaacacacaatttaccgagcgttctagatatatatacagggcggcaagataaattcccttcaactttcaggaaagaaaaggagaaaccatcctttcttcaagagttccgtcattcctgaaccaaattcgcccatataattcgcggaaattgctatgatgttccccatttatagctcataagttcatgtgcttgttccaaaatgacctagtccactgatcaaggataagggtatgttgactaacctcttaactgaatttgatgcaacaaggacaagttcaagtttgaatatgacatgacatctaacaatgtaatccctcagctggtatgaagtctttctgtaggagagggaccatataca

SEQ ID NO: 61276 - DNA, 381 bp, Oryza sativa
  unsure (1)..(381): unsure at all n locations
agcttctaggatcaaattcctattagagggcgatgcacacactaaattcttccacctcaagattaatgccaggcgaaggaagaacttcatccagcacattaaaaaaggaaccgtatgggtagaacgccattacgacaaggcagcagcaatccaggctcactttgtgcccctcatgagtccacctggtcaacgagacttcgacctaaattgggattcgctccaactagccagccacaacctagaggccctccaagaacctttcaccgaggatgaggttcggcaagcaattaatcaaatgccaggagataaggcgcctgngccggacggcttcacggggttgttctataagaaatggtggcacatcatataagcagatatcat

SEQ ID NO: 61277 - DNA, 442 bp, Oryza sativa
  unsure (1)..(442): unsure at all n locations
agcttggtgatctactagatattgatctgcaatggcgcatgcataaagtctcagatggacaacgccgcacggtacaaatctgcatgggtcttcttcatccatacaaggtgataccgngttcctaggtttctgttgcttcttttatttcatatgtagcaccctaagagtgactcacagacataataactcttgagtgctccatcatacatttgtagtacgccatagttattggctcattgctgggctgagtgctccctgatatgataatggtattgtgcccccaaaagggtaatagcattattgcctagactattctgagaattcacccaacacatcattttagtttaaagatagaanaactaccttatgnttggctagaggtattctcatggttaannattgtgttagtgtagtgccaaagactgctatgaaactatgacac

SEQ ID NO: 61278 - DNA, 458 bp, Oryza sativa
  unsure (1)..(458): unsure at all n locations
gggtgcacacganagagtgcaagagctcataagatcactctcagagtccnctacctggcgcgccagatgacggagcgtggggctcctcaccgggagaccgcgctggccctcctttgccggttcggccggngaccctgtgtgagattctaagctctcaatctgtatgtggaaggttcgcgagacaggaagcacagaagacaccggcgatgtatacaggttcgggcgctgagaagcgtaataccctactcctgtgttttgggagatctgtgtatgaaagagctacaaagtatcagccagcctctcccttgttctgggttcctaatctggaaaggtccagtccaagaaaaagctctcttcctctctcagtgggcaagggcctccttttatatcttaaggggataccacatgcaccatccccccttctcattggggacttaccctaccttttcataaatgga

SEQ ID NO: 61279 - DNA, 269 bp, Oryza sativa
  unsure (1)..(269): unsure at all n locations
agcttgcagctcaccgtgcggagagagggttatcctttttatgtgtangcagggcgggcaagtgattggtgagatgatatgcctctggtgatactggtgaaaggtaacgttggtagcgtcagatggcagcatcgtacggagatgtaatgtgtgggccgaactataaaaagttgatacctattggatgaagttctacgtgcaccgatgatgttcctcacggcatgcacatgtaccaactctcggtagcaatctagacatttcttcggctg

SEQ ID NO: 61280 - DNA, 437 bp, Oryza sativa
  unsure (1)..(437): unsure at all n locations
agcttnctgattgctgctgtttaggcatgactatatttccccatcttgggccagatcaactggacttaagaccattcanggcactaacttttcaaacgcattttttttataattttttttagagaagggtattttctacccggcctccatatccaaccggatatatacggccattgagatagggaacttagccccgcaaacaacccaatttgaaattcgctccataggagatttgaactcaggacctttgggtactactcaaatcactgtaacttttcaaacgcataaggaagaatctctaagaaattttgttttgtcaattgccattgaacagtaagttctatgttttgccatcatctaactaaggttttatgaaaaatgccaatgtataagccttttcttttctcttttgcatctacgtcagtctctcgtaaata

SEQ ID NO: 61281 - DNA, 376 bp, Oryza sativa
  unsure (1)..(376): unsure at all n locations
acatggttcaaccggatggtcacaagtgttgatctcggctcaagctagaccctaagatggatggcgcaaggcaaaggtataatgtagcttagaatgttttcttagtcttttcccggtcttggtgcttggagtagatcggatttgctagataggcgccgtactatcaagagggttctatgaagcgagcttgtggatgatcttgcgccatattagttcatatgcatgtangtgcattttttgggcttgtctaaccaaatgtgattagttttctcaagtcctaaaccaagagagaagtgacatgtccaatatgagtgagtgacatcttgtgggtatgtccggnggatatactttggagtgtgagcccattatacttgac

SEQ ID NO: 61282 - DNA, 411 bp, Oryza sativa
  unsure (1)..(411): unsure at all n locations
ggatcttaagcaccgcngctgcagctngcaaggtgtgcctttggtcttgtggataggacaccaggtccttgtcgcctcggaagttatccttgtcggctcgtgcttctcgtcggggagacaagaattggccgtgttaggatccttctcgggctcaaatgttgtcgatgttccgttctccgcttctgcaggaggatctttcgacgtggagtcgaccggggtcgtaaccacgccattctcgctcctggtaattgctgggccattcgagatcggcatcgtggtgtagaccgggaagacgatttcgccgacttgagtccacaccagcatcgttgaagttgaggctccttggttgatgccggggtcgacgctgtcgtcnaagaggctttgagtcatagtagtagaaccttgagcacc

SEQ ID NO: 61283 - DNA, 151 bp, Oryza sativa
tcgtctccatttatgtctgtcggtgacatgggatcaggagtatcatgactagaggtttgatgcagacacaatcgcacacgtggcctggtacccctgagggatgtcgggcccgagggtgatgcgttcgccctcctcttagtccccccgaggg

SEQ ID NO: 61284 - DNA, 427 bp, Oryza sativa
  unsure (1)..(427): unsure at all n locations
tagcgccttatctcccagcctcgatatgaaccgacttanggcggccttgcaaccggtgacgcattgcacatccctaagcttgctgggggggcgcatccgctctatagctcgtatcttctcggggttggcctcgatgcctcgggcagagaccaaaaacccgagaagcttgcccgcaagtacaccgaacacgcacttatcggggttcagttttatgcgggcggagcggagactctcaaaagtttccgctagatccgagagtaaagtctcttggttgcgcgtctttacaaccaagtcatcgacataagcctcaacattacgtcctaattggctacccaaagaaattcaagtagtacgttgaaaagtaggacctgcattctttaacccgaagggcattgtcgtataacaataagttcctatgggggtaatg

SEQ ID NO: 61285 - DNA, 477 bp, Oryza sativa
  unsure (1)..(477): unsure at all n locations
ctcaagcttggcatacaattgatgttcccgcaactttcccaataccaaacggatatggtgctgatggtcttcctctgattgtgagtatatcagaatgtcatcgatgaaaaccacaacaaacttgtccaagtattccatgaacactttgttcattaagttcatgaagaaggcaggagcattggtcaagccgaacgacatcaccgtgaattcatacagtccatatcgcgtggtgaatgcggtcttcggaatatcttcttcacgaatacgtaattggtgatatccggaacgaagatcaatcttggagaatacggtggcacctttaagctgatcgaacagatcatcgatccggggaagagggtactttgttttgatggtgacttcattgagagctcttgagtcaacgcacatcctcttcgtctggtctttcttctctancaaaatcacaggagcaccccatggggaagtactcngacgtat

SEQ ID NO: 61286 - DNA, 409 bp, Oryza sativa
  unsure (1)..(409): unsure at all n locations
agctntntcttgaagtagcagaattcgggtttgggcgtcaggtaagcaggagagggcactagggttgggggtgtataccttgaagacgagggcggcggagacgccgatgatgaagaggaaggcgggcatgacgaagtcggccaccgtcaccccgagccacggcgagtggttcatccccggccacgccccgccggcgtcgtccaccagtatcatcatctgcgcccccaaccaaaaaaaccaaacccccagtcaccacgagaatgagaggatccccgaccacgccgtcgggagaaatccggtcgaggaaggaggctcacggcgacggtgaggccgcggaacacgtctagcgaggcgacccgccgcggctttcgctcaacccccgccgggtgctgcggcgaangggatgatg

SEQ ID NO: 61287 - DNA, 413 bp, Oryza sativa
  unsure (1)..(413): unsure at all n locations
gagcagactgcagagtgcatgtgctatagcttttcaaccttcgtgtggtcatcttttggacttcaataaccacaagaattatttcatcccaaaagagaagatggtaggtgaaaaattgtacttatagttatcacttaacactggcaacatcccaacatattaactagtaatgccatcttgggtctaggctctccattgcacaagaaaggataaaaataaaacaaataaaaaaaacagcacccttcaatactgctggcatgagaaaggcatgggaacgagctattatgcagtaacatctactgtattcatatgggttagtcaatttcaactntctcccctatacatgtagcaatataattaggaccaaactgaagttacattctgaagaagttcagaatgtcaatgcgggaatg

SEQ ID NO: 61288 - DNA, 418 bp, Oryza sativa
agcttaaatgtgaaaactatggttcatggttatactataatgcatgcttgttatgatatatatgggcttatcttctttttattgcaacacatgacatgatatgctatatgtatgctaagctcttgaacattaatgactataattcctatgcttgatgaaatcattgtcaaaagggggagaagtaatgtgaatttttggatttttgaagagttgtcgagaagagcatgtttttggttcaattgggaatttctttcttttaaaaagggggagaagatttcttttggatttttgagcacgatgtgtacatttgtacgaagtgtgctttttaccaaacaacaaaacattttttatgagtttgccaatgtgttcatcaagggggagaatgtaaatcaaaggtgttttgattattattctgtga

SEQ ID NO: 61289 - DNA, 334 bp, Oryza sativa
  unsure (1)..(334): unsure at all n locations
tgctcgangctcaccgaacacacgcctatcgtggtttatttctatgcgggcagagccgagactctcacaagttttcgctagatctgacagtaacatttactcggtgcgcgtctttacaaccaattcatcgacataagcctccacattacgtactaattggctactcacagaaattcaagtattaccttgaaaagtacgacctgcattctttaacccgaacggcattgtcgtataacaataggatcctatggtggtaatgaacgcagttttttcctcatgcttcctaaccatgcgaatgtgatggtgaccagagtatgcatctagaacacacaaa

SEQ ID NO: 61290 - DNA, 430 bp, Oryza sativa
  unsure (1)..(430): unsure at all n locations
agctgtgcccaaaaaaacacaggggctagctaaacactaatcatcaccacctaaataaatctaaacatcagcgaaattacgtaagaaaggacaagtgcggtccaaggtttggattccaaacacaccggcttgaacagaactacagaagccattgatggacctttgcccgtacgcagcagacagtgaacaagcccactgccctctgtccacgacgcccaaaccagttactcccattaaaccatcccaccaaaaactccgttcttttaacctcccccactattccactaacccagatatcgctgcctcccctaaccttccagntacttttactgctaactgctaaccctttcttcttctacacatctactgctctttgccctcctctccgtttctgccctgtttttaaaaccaccaacccttccctctcttc

SEQ ID NO: 61291 - DNA, 486 bp, Oryza sativa
  unsure (1)..(486): unsure at all n locations
tacggacctatgatactcaagcttgtaatgacctagtctccggtgatatgcctggagttggtgattaaatgaaagcttatgtttaaaaaaagattgtttaattagtagtactccatatagagttatagatgtagttgctttcagccccagctaattgggagttttcttcagattgctgatgtttgcatgtattggtgatgaaagcacaccaccgaatttcttaacaccgttttcatccctatcagtgtgaccattggccctgatctccatgttattatttgtataaaacttgcgctgctcttacctgatcatattatctangaagtttgatatgatgaagtcttatcaatcactaatatatcgttgtggcatcangagcacgaagtataccattagttgggcaattattggtggacgttggtccctggatagtagtatatacaaggcagaattcgaccagtgacctaacaagatctgagatccatg

SEQ ID NO: 61292 - DNA, 398 bp, Oryza sativa
  unsure (1)..(398): unsure at all n locations
ncaagcttgacgatacaggtatcacaaatgtccagcgtgatatgtgccacttcatccaccatgagtgctgtcatgtgaaaggagatttctttgacccagagggtgccctagcggcaagtgacgaatacaaggatcttcgggagtggaatactgctatgccgttatttgaagtgacaatctaaaaaaatattgtaatatatatattttggcaacacttttgagttatgcaatatatgtagatttatcagtaccaaatgcttgataatcttccaatatatgtacataataatctacctgcaagaatttctataaaataatttaaaagtaatttacgggcaaattattattaaatttcaatattttctacctatctttgcaggcggaagtttttttttttt

SEQ ID NO: 61293 - DNA, 217 bp, Oryza sativa
tgctcggacagctggaggaggaagaagacatatatatatgggtgggactttagacccggttggtagcaccaaccggggctaaagatcaccgggatcattagtcccggttggtattaccaaccgggactaaagttaagatctttagtcccggttggtagcaccaatcggggctaaagatcaccgggatctttagtcccggttggtagatctttagtcc

SEQ ID NO: 61294 - DNA, 433 bp, Oryza sativa
  unsure (1)..(433): unsure at all n locations
agcttctaccatcagcatatcaatttccatgtcatcacaaacacgttgagcatataaatataggataagcagcttacctggttgatactctctcgagatggcaaacaaaccaatacggcaacccaaggaccccaaaattcgaaaattgaatatttgaggtgccattggtatccaagtcatgcttcanaaccctttgaccatcttcacagaaaggaaataaattggaaccatttattatataatttgacagaaaatcaagtcttaacatcaataatagcttatagatcaacctgcatcacagaagataatgtacttctgaaatcttgcaacagacgagacaagttccttgaacgggatcttccccaacagatcagaatgctctttagcacttgacgaccaattcatgttcatattcttcangagagcacatctt

SEQ ID NO: 61295 - DNA, 411 bp, Oryza sativa
  unsure (1)..(411): unsure at all n locations
gaattggaagtcgaagctcttcaccttagttgtctacccgtccggcaatcatacgccgttcgatgaataccctcaaataaccgaagcggnttgggaggaattctgctctctcaagaccacccaagaatttagggaatcaagcgaagcacatcgcctactgcaacagcggaatgagcacccgcatcggctgggcaccgcagggtacatcggcaaggaggcaatatgggcccaagaagatgcagccgctgcagcagcgaatgtccctgccccgttttcagacatccctgaacaaagagctcgcaactgggcgcgggcaaggggtaaggtcaacccgaacggctctgtcacatttgagaacaanagtgatgccgtcgtctatcaggaaactggtgagtcactacttaacctaac

SEQ ID NO: 61296 - DNA, 134 bp, Oryza sativa
cctggacttgagcactggaccttatggctattaaacgatgcatgctcagcaccgttaggctgaccaggatcataacctggctggatgggaacttaatctaaccaacggtaccgtttgtcccgtaaaataaaaaa

SEQ ID NO: 61297 - DNA, 405 bp, Oryza sativa
gtaatttgaacctagcagattggtagtaatggatgagggaagactccatatggatgaataaggaggaaggggcgttatgttcttgaattatccataatttaatttttcaaagagtggtcactatctagtgccatttcttgaggaaaaaacttgactgtcatgtattaacagcattcaatatgaactggcacatatctaaatttctaaagaagaaaatgcttgcctgcgaagctgtccttttagcagttaaataacctttatctgatatcaaggattttttttttgaaatatagagtttgattttcaagaaattctggcaactgttaacaaatggcatgcacttttgcaggtttctttttgtttcacaaatcaaatcgatgggaaacttgttccagttgaatctat

SEQ ID NO: 61298 - DNA, 364 bp, Oryza sativa
  unsure (1)..(364): unsure at all n locations
gctttgtcgacatgtgggacccctgcaccggtgtcccccggctgtcagtcttcattcgccaaagaccggaccacacccaccggcaggttcttcttacaactagggcggcttctncaacggcgggcgggccactctgtgccaagccggcctccttcaccggacgcgccttcggctaatccgggcttccttcatcggtcgcgccttccgcgccaagccggcctctatctctgccggtcgcgcctctcgcgccgagccggnctncactgtcatcggctgcgcttctctgcgccaagccggtctccgacccctccaccanacgatgccgcgccggccagatgtagtcgtctcccacgccctcagctag

SEQ ID NO: 61299 - DNA, 445 bp, Oryza sativa
  unsure (1)..(445): unsure at all n locations
gcttctctacatcatccaaggtctgtataccataatccaacatattatgtatgtacacacgactagttgttttcgaactacattattgttcacaacatgtgaggttntttaattgtgtgagtacatgttgtaagtcatggagtgtttgggatggcactaccaggctgcccggagacatttcaatcggtgcagtatgcatttgagcagtctagcacccaaaaattgagcgatgagcaccagcagcttcacaagttccgccaaggggatgtcattgcagtgccagctggagtggcccattggttgtacaacaacggtgattctcctatggttgcttttttggtcatcgactttggaaacaatgctaaccagcttgatccaataccaagggtatgcccatatatacatctcacaagcataattaatactattccatatttctaacttt

SEQ ID NO: 61300 - DNA, 461 bp, Oryza sativa
  unsure (1)..(461): unsure at all n locations
ntatttcctttctcttntttttatagccatgcctttcccttcttttctcattttctttttgccaagaacttttccaggagaagaaagcatagtctaaagtagaagtttggttaaatggaacttttgtgggaagccaacttccagtgtagaagcttagttttttatcatgtatgtggaaatgaaagtgaaattgaccccttgatcatgagagcatgaaagatatctaacacgagtcacataaatttgacaaagctcaatataatgtcaagcagtcatatgtatgataaggtttatcaaagatactcttgcatatggccttggtaggtataaaatgaagtcaactggaagaatgagctattaaaacaatttttattttttaaaaaaaacaaattcccaagagtgataacaagagttgcaaaaattcctttcatcttanatcatctcacatnggagcaatactt

SEQ ID NO: 61301 - DNA, 429 bp, Oryza sativa
  unsure (1)..(429): unsure at all n locations
agcttcttcatctaaactttntatatcactgccatgcatccatggcatcatgtagttgaaccaacagactggagctttgaactttatgtacacatacattgcctaaagagaggtgcatgagtcgattcggctgacttttaaagggtgctagttgtctctttaattaagacccctagccgcgtcaaccagtgcggtgcacgggctattattactaaaaattaaaaatttatagccataggcagttaataactttaactatgattttctattaaaatatataaaaatatgtaaatatttatatttactaaagtactttttaataattttttaccagaacattgttcaaaacgattaaaattatgcaaccggagggaattgttattttattgaaagaaaggaccacaccagtcactggtggagaaaccctta

SEQ ID NO: 61302 - DNA, 471 bp, Oryza sativa
  unsure (1)..(471): unsure at all n locations
ntaactnttctcatatcctgttaaacttataacacaccacaatcactactacaaaacctataataggggatgtccgatcatattcaccggtttatcgaaccggtacatataaggctttttctgtcctcctaagtcctgaccccttgtacgagtctaaaactaataacagcacctaagatcttatatgtgccagtctatttaaaaacggatttgctatcctactgtctacagtttttaggggtgaaaactgtcaatatgctttgagatttgtgctgtggaggggtgaaaactgtcaaatttttaaccgtacgatatgcttntgaaattgtgctgtggaggaaaaaatngaaaanaaacccgatgctcgcaacaaggatcaaacatgagacctgtagctngcatgcttgttcaactaaccaattgatccatccaattnttcanaattatatatgagttacatattactttata

SEQ ID NO: 61303 - DNA, 370 bp, Oryza sativa
agctttgctctgcctcgccacgtgcaccgtcgctttgagctcctctacacgatctagtagtaaacggagtgcacaaaagtagttgggagacttacatggatgacgtcgaccttgacaccgtctatgccggaggcctggaggtgggagtggagcccctcgtagagctcccgcgcgcggcgcgggtcgacgagcccgacgccgttgttgacgatcttgtcgacggcgaggtcctccatggtgcgctgcaagcccggcgagagcctcggcgcgacgaccttcttcggcggcaagcccggcgcgccggggcggaggccgccccagtacccgcacagcgcgtgccacacgtacacctgctccaccgtcgggaacg

SEQ ID NO: 61304 - DNA, 465 bp, Oryza sativa
  unsure (1)..(465): unsure at all n locations
ntcttgaacgactcctcctgtcctccttttagacgatactcttgccaccgtaaaatttcttgtctcttctatgtattntataactctgcgttgaagtggttttttgtgattggagttggcttaaataggatgatttttaataaaatgaggagcaaccataagaggacatatttgaagaatctcaactatatctaaacattattaggaagaaacacacacatagactcactaagtttctttatattttaaaaaagttacatgtcattgcgtgttgtacactattacaccccaccatactatagaccgttttgtaattgtaaggctacgttcaaaagtggaggatgggatgaactccactttctacataaaacataatgatctattagaacatgattatntaagcattagctaaaataaacttaaaaattggattaatgtgattnnttttcatgcaacattactata

SEQ ID NO: 61305 - DNA, 436 bp, Oryza sativa
  unsure (1)..(436): unsure at all n locations
agcttatcatcttgcatatntacattatcttaaaaatgcttatccgcaatatggaggattntcaaagaaattttgtttactccttttgatttcaaatgtaagttgtttaaacttgtacacataaattaagaaaccagctcaaatgactaagttacctttcatttttactacattgaaaaagatgatctgtttatttgtgagtaatggcttgcatttagcaagggcaaatggacatgcatctgtgcaaaagtactgtaagattaaaaacggtgacttacatttagtaaagcgccgagaaaactaaaacgatttatccacatcactccctccattaaatagtataaatcattctagttacgtttgtctaagctaaactactttaagtttgactaagtttgcncaaaatatagaaacactcctaanaagataaagagat

SEQ ID NO: 61306 - DNA, 435 bp, Oryza sativa
  unsure (1)..(435): unsure at all n locations
tgtatgcagtgaataaagaaatttccaaagtattgggcacacaccatgcacacactgctttaacagatgtacttaagtccctaaaagacacatggtttcaccacacctggaaatatatggcatatatggtgtaacatccgagtaaataaactcataaaggatttaccaaccgcctagaaaatgaccacaatatataatcagcctaagccataatattggtcaataaaaatgcacacttacgtggcaaaaagcaatgacattgtatccaatcaattgctttataaacccaaacagcatcttgactgtataaaanagtcagtaggacagctatganaaaactacactgctaggcacattttaaaatgcattgtaccaactccaaaaaagttgagtaactgcggtataaaaggaatttagggattggacacttgatca

SEQ ID NO: 61307 - DNA, 423 bp, Oryza sativa
agcttcccactagacttctgtattctgtcgcatcaactagcgatcctgcactttccttgctcagctttagacgtggttccatcggtgttgcacaggggttgcagccggtgagcccagccttctccacaatacgcgacgcatacgctgcttgctttaaagtgatgattccagcttcttgatgtacctcgatcccaagataaaaactcaaaggaccaagatcactcatcttaaattcagccttcatctgctctttgaatcccttgatcatgccactgtcacccccgacaattaccagatcatccacatacacaccgacgagcagtcgcccactgccatcgccgcgcgcgtacagaccatgctccaacgggctctgcttgaagccaagtttcttcagtgtgcagtctagcttggtgtccaagctct

SEQ ID NO: 61308 - DNA, 377 bp, Oryza sativa
tcgtttcttagatgagcttcgttcactacgctcctctcgcacggggccgtgggccatcgtaggcgatttcaacctcattctcgaagctcgggataaaaacaaccttaatctcaatcgtcatatgatgggtcgttttcgtcggctcatcgacgagttggaactccaggagctgccgcttcacggacgttgcttcacttggagcaatgagcgcgagtcgcccacgcttgttaagctcgaccgcgtcctcttctctgcggattgggaggagcttttcccctcttgcctcctccaagcggcctcttctgtcgcctcagttcactgtgctcttctccttcatacctgcgtcacctccccaaaagcgcatcgttttcgtttta

SEQ ID NO: 61309 - DNA, 430 bp, Oryza sativa
  unsure (1)..(430): unsure at all n locations
agcttgggacaatgagatctaagatgaccaagtcctccacaatgaaagcaacgaggtggtcctcctcttttcctgtgcctgacattacttatagctcgagaaaatctgttagcaaccaaaaccaagtcctcctcactgatttcagctagttgatcattggacaaggcattaaaaacagcaagtacatccttatgagaagtatccaaagaagatccagatgaagacaccaaagcagtagatttcgaatctgttctttttgaaagaatattcatctcataggttttcaatttagtataaagaacatccaaagtcaaagtgttcatgtcaacagattcctgaatagaagtcactntaacatcccaaactctcatatcaagatcattcataaagagacgagcaatctcagaatggatatagttaacatcataag

SEQ ID NO: 61310 - DNA, 424 bp, Oryza sativa
  unsure (1)..(424): unsure at all n locations
ctatgtcatgcatgagaccgagctgtataatataagcccttcacgaattctacaatggtgtgtntctttggaggagggaaggcaattgctgccagatattcactcgggcatttgtaggaatcacgctggcgcacgaacaattgttggcaaggcttatcggcagggttttttctggcccactgcagtatctgacgctgacaaaattgtgcgaacatgtgaaggttgtncaatttttgctagacaaattcacctaccagctcaagagttgcaaactatcctattngtcctggccgttgtggtttaagggcttgatatggttggcccttttcaaagggctaccagtggtttcactcatctntttgtagctgtggacaagttttccaagtggattgaagccanaccagtcgtcacaatcactgctgac

SEQ ID NO: 61311 - DNA, 385 bp, Oryza sativa
agcttcttcctccttcacgatggagtatttgagcttagctagctcactagatggcaatgctggatgcagctacacgtgcggcagcacaatgacgggaacgatgtacctgcacatctgcaaccagaaggcactgacgacccgtggtcagatctagttgtgtacctgccttcctggccagtgagcacgacggcgcccccttctctagctctgtccgctaggcgcccctcctcgagcctcggtgttagactcctgctaccgcgccgctgctcgctagcgtcgtcactcgcgggacttcgccgtggacacccatgacccactaccttcctgccctcccattttctttcttgggctgtgaagaaaaaaatagagaagatagagctatcaa

SEQ ID NO: 61312 - DNA, 421 bp, Oryza sativa
actagctaacattatacgccttcatatgcatctttgatagtacagtgtgcgtatacgcctttgtatcagaaggaaacactctcacctaagtcgcccaaggtcgtaaaataacacccgatagacctagacgactacataataagcctatcaattctgcaacccgtataataacagttattttggtaaaatagaagtatacttacttccttcgtcctataataaagttattttagctcatttcatttgtcccaaaatatttagagtggtcattgtattcgagtttatgaaagtagaaaatagttgtgtttgaagtagataaaatgatgaatggttatatattgggattcgataaagcagagatattctacgtctttagttctgtattgcgatgtattaaatggatgacaaatgaatttacttt

SEQ ID NO: 61313 - DNA, 425 bp, Oryza sativa
  unsure (1)..(425): unsure at all n locations
agcttgtgcntttgtctgaacccctcctctaatntgctcttcaatcttctgcacagagagttgctgcacaaatttacgccactgtggctgcatttccatcatcgtcgtcggattatgtatgcttagatcgtaccagactagctctgttttttcggctacttcaccgaattattgtctctgattatttgcttatatcgtctctgaaagtatgttccctcacaaaattttcatttattatatcgttcggactatttgttaaattcatttcttaaaacatttaatttatctctataataaagtatataatctgtgacaaaatccatataaggccgagtttagttccaaacttcttctttaaacttctaacttttccatcacattaaaactttcttacacacacaaacttncaactttttcgtcacatc

SEQ ID NO: 61314 - DNA, 378 bp, Oryza sativa
  unsure (1)..(378): unsure at all n locations
agagaccacacatatatatgatatacatttatatagcacatcctatatcttcatcctaaaatataaaaaaaatttagctataaatataaaccatacatgtatccagatttatagtttaaaatgcttatattttataacgaagcgagtacaattttatctaaagaacgaaaaataacaaataaatcactggtcaaagacacgtactctntgagttttatcgtgatctctggngtattggtgacgaagtgatcgacgtaatcctgcatattgnggtacccaacggcgcagaggaagcggccggcgatggacggctgctccgcgcagaagatatgcgcctcgcagatgtcctcgatgtgtgccagtggcaccgaacctatc

SEQ ID NO: 61315 - DNA, 415 bp, Oryza sativa
  unsure (1)..(415): unsure at all n locations
gcaagctnttcgataacctcacattggcaatattctctttatgaactttacatcctcatgcggtctatgcgtacacggtttctagcaatgagaggagttctaacgcacccgggaaggaaagactcacacatgcattaagttataattatgtttaaattctcacatggcagtcctaccgatggcgacaccactgtagacacccacctcgcggttctaccaatggctgccccaccgtagagcccctgcctcacacatcaagaaaccactatgcatggattccactcagctatctactccgctaggtctatacccatacgagaagtgcggttgtacgggggtagnttcatgcttaacttcatggctcggtccttaattgaccggngacgatactatccttttccggataccacccaaa

SEQ ID NO: 61316 - DNA, 455 bp, Oryza sativa
tcaatcgggctcacacagtgctggatcagtagccttgccgtgcatgctaccaggctagctttcacggttccatgagcaattgagcacgcaaaattagcccacgatgctgccatgcttatgatctcaattaccaggtcgcaagaaaaaaatcattctgagtaggcggcttcatgttgtcctggaagtacaaaaacaaaaacagaagagcaaaacgtgtttttcattctccaggagagcaacgatcgatcgagccacggtgtagacaatgtcccaaattaaaagagagttgcgtgacgtcctacgatttttccctggctcccaacaaacgcttgatccgtcattcaatcaattgcgtaatcacgctcgctcgggacctgaagtttagtgcgcgttggcgacgaagcacttgaccagcagcaggccacagcccacaggggcaagtccatgtccatcct

SEQ ID NO: 61317 - DNA, 383 bp, Oryza sativa
agcttagcaagagcgagttcttgttgttctaagtcaaattcttacggcacgtgatatctgctaaaggagttgctgtggaccccgaaatagtgaccgccgtcactgattggaagcaacccaagacagttactcaggttcgcagccttttgggtttggcaggatactaccggaggttcatcgagaacttctccaaaatcgctcgacccatgacacagttgttgaagaaagaagaaaaatttgtgtggaacctgcaatgcgagaaggcgttccaaactctcaaggaaaagctggtttccttcccagttttaatcttaccggatactcgcaaggacttcatggtgtactgtgacgcttctcgccaaggattggggtgcgtgctcatg

SEQ ID NO: 61318 - DNA, 444 bp, Oryza sativa
  unsure (1)..(444): unsure at all n locations
gtgaactataaacctcagctttacctttgttctaaaaatagtacgcacatatgtgtatgggtgagtgaacgtgcctgtgcgcaggggactctntgccaacctatctcaagcttcagccacacatcttttttttaggggtaaagggcaggagctctgccagtttcatttcagccacacattgagtacggtgtgtccttagatgaattctgagatcatgaacgctactctcagccactttcaccaagtttgtgatggctgtttcatgttcatagcgcacacaggatgacgcaactcttagactatataaatttcatctcacgctntctgctatgaataatctgagcggaatttgacaagtagccagctagacgtacagcaaaggatgcacaagccanatagccgatgaattgaccgctggtcatggcgatgtagcacatccatatg

SEQ ID NO: 61319 - DNA, 458 bp, Oryza sativa
  unsure (1)..(458): unsure at all n locations
ntatcaacttctgatcgtctgatggagtacgtttatattataaagaactgcaattcaatagccggtgctccatctcattattttcacgaacactctggcaaggaccagaaacaaattaaatcaatatagatgttgaacaaaaatatcaaacaaatagtaaaatagatgagaaagatgatctaatgagatagcctattcttagcagggaaagattagaaatattgctagacaaaaataagcatgcaaattaaaatatgagctgacaagcatgcaaattagagataagctgacctcatctagttgcttttttaagtcctccaactgttcattcagcaactntgcttcgtcctcagagtttagcgccctgagtctcattctttcaagctatcatcagacattntcaaacagataagccaatatctagtaataaatcattatgcacaagagttcaacaatac

SEQ ID NO: 61320 - DNA, 441 bp, Oryza sativa
agctttaattgttccatttgcttttcttgcatagctggacccgggaggagaaggaccattgtctggatgaaacggagaagtcgttctcgtattctggagatctcctccgtcacatattcacctaagcttaattgatcacggtgtctgctatctagtcttgataaacgctgtaaatactaaagttcacgtcagtcagacagactgttactggacactgggcagaggtcatttacttactcaaccagttggccttgcctcccatcaaattgccaaattctaataatccttcggtgtgccacttgtctgttgctgtgctagcatctccttgctaattgccaaatgggtaatttaactgaaagttcttgcgttttcaggcgactgaaatgtgacaaaacaaatagcataaatggtgttgatctcctcgacgtattctccaaacag

SEQ ID NO: 61321 - DNA, 391 bp, Oryza sativa
  unsure (1)..(391): unsure at all n locations
taattagcacatgaagaccaaggacaanttggttatctctacttaactgacactctgctgcatgatcagcacatgacatgaatgcatctccaaaatataatgagactagaactagtaaatattggcgccaaaatactaaaatgtgcttagatcaagctagctggcatggattaaccgacaaaactaagatcgatcgtagcttttatattctttttaattgtattgtaaggtagacatgtatgcatatacaccatcatatgcacatgcctacaattgtggatgatacggatgaatccgagacctcatggagtgttgtaccatgcactttcttgagcattgaaggagagtgtgacacagtaactcttgataaactacatgtaagggcatgttt

SEQ ID NO: 61322 - DNA, 391 bp, Oryza sativa
agcttttaactgcatcaaaccaatggcattcgatttactcaccgcgttcggattaccacccgattcgatagcgataatcgccgtgatcaattgtggatcgacgccccaggctgcaccggctttctggcttattggcatccactgcatcgcacgttgcaccggaactttcgcgttccacggcgggttcgtatagtcatgctttgatgaacaacccgctaataacacaatcaaaaaggcaaaccatctcaatttcacttcttctatccttatagcctggaatcgccgttgaggtgacaacggcacacctaagcggcatgatatacatttcgtttctgttgtcagcaaggaattgccatgtctcttgttcacttaattgcccccatcggttact

SEQ ID NO: 61323 - DNA, 418 bp, Oryza sativa
agcttcacgaaagtggtccccgacaccggcgccgagaacgacctgatgaggttcctcggcgataccgggtcggagtcgatcgccggagttggtgacgccttgtggtggccacgtctgaaagacctgacgtcgaactcgatcgcgtgcttcttctcctccttgctccttatcttgcccttccttgccacctcatgcctcggcttcggcctcggctcttcgttgaacgacgccgaggcggttcttctccggtgagacagtgccggcggctcggtctccggctctcgtcggagcacattcttcagcctgtcggagaggtgcttcctggcatctctgcagatgtagtccatctggctctggccattgagcgggatgtcgctgcggtacgaccgcgtcgactccgaccggagcaacgccgagt

SEQ ID NO: 61324 - DNA, 447 bp, Oryza sativa
agcttcatagagtggtagatatcttacataatctaagttaacgtcaatagttaacctaatcggctgccttctactgacagatgttagccgattgagggttagatagcgatattgccagagattatgtaagatacatgataactcgacgagttacacaaacaagattagagtatcataaagatggaagcactaatctcgagaacacaagccgccataacaagttttacctctagttgaagatcgaaaccgatgcagctcaacccgaaagcaagaactcgtcgaaacaaaacgaaagtaaaaagtgtggcgatgcgccgagattgtattgaacgtgtgatattaattacatagggctcggggtctatttatacccgagaattacaaaaaatgtccatatcagacacgactcttatctctaacaaactctaagataccataagtctttac

SEQ ID NO: 61325 - DNA, 480 bp, Oryza sativa
  unsure (1)..(480): unsure at all n locations
tcacaaagcgagggtgagtccgcgccgaagaggcgcgaatatgacatcctcacaaaggcgctcggaaccaaagaacatcctagccgaactcggggaattggtagcgatgtgccctagaagcatggactccctcagtacagctcccaatacaggaaacggaaagtctccaaggaagagagggacgctcgtttgaaggccgaacttaaggttgaggtcattcaagaactagaagctagcatgaatgcaagggtggaagaaagggttaacaaggtgctcgccgacatgaatataccccgagtcacaacacctgctgtgcaaccaactcctcgtgtacaacacgacgcgagtccgtcacagcatangagtagttgtgcatccacagaggtgccggcccctgggtctccgatcgcaccactagctgcagtggaccacatcgaggtaattggntgtatccgatccatatctaaataaagacattta

SEQ ID NO: 61326 - DNA, 411 bp, Oryza sativa
accaatattagcacgcaagggtttaagagagcaattggatagaattagagtttgcatattctgaaacatatgcaaatatttaggaagtgctgcaattggcaagcctgagacatcaagataagctagcagcatcagttgacgaatggaggatggcaacgccatactaacagggatagattgcccttcagacgaacatccgctcaggtccaagatccgtatatactttgacccagagaatgcctttcggggaagttgcgatccaatgcactccctaaaatgaatggttctaaccttgcttggtagatctttgaaaaacttgggttgcttctggtagttgaccaactgtgcatgtcggcaataacagctaatattagctttgctccatgtaattggcatggtagcgtccatgac

SEQ ID NO: 61327 - DNA, 403 bp, Oryza sativa
  unsure (1)..(403): unsure at all n locations
ctatgcaatggtttctagatggtaatatcaaacattttcacatcttgaacctagtataataatttgaaagttgtggaaaacgtggatgtttgttcctggtttaaatcgatcttaagatccacatcattctttccagcaccttcattggatcttgtctctcatgaagattctttagtccctttcatgcatgtttcaaatttcgctggttcagctgtctatatatgcttangtgttgcattgaaagagggcaaccaattaagagctagcattntaaacatgctatgtatgaggtgtacaatgtctcaaataaaaaaggtagccatggacagtgtttagcgttccgttcaaacttctaaaaattccgtaacatcacatgtttggacacatgtatggagcattaaat

SEQ ID NO: 61328 - DNA, 359 bp, Oryza sativa
aattatgcaactcttaaaatgccatcactctaaggggtacattggtagtatatatcataatccgtcttcactcgtatgttaggttagaaacttgtagccataggacattcttgtttttcttttaaaagtttctcttttaattggatcgaaaatatctttccataaacataacacgtttttagggtattctctagccatgatatgtttttacaatgtccactagttaattatataaacttttaagtgtcatagagtaaagtttgtcttcatggtataaaattgtaaatttaatttgggtttctcaattaccaaaacggtctaaattactgcacttacctatgagaaattggacgggtgaa

SEQ ID NO: 61329 - DNA, 453 bp, Oryza sativa
  unsure (1)..(453): unsure at all n locations
agaaatttctaaagattgggcatactccatgcgcacactggtttaacagatgtgcttaagtccctagaagacacatggtttcaccacacctggaaatatatggcatatgttgtgtaaaatcccgagtaataaactcataaaggatttaccaaccgcctagaaaatgaccacaatatataatcagcctaagccataatattggtcaataaaaatgcacacttacgtggcgaanagcaatgatattgtatccaatcaattgcttaaaatcccaaacagtaccttgacttatatataaaaaagtcagcgggacagctatataaagctntactgtttgacaccttttaagatgcattgtaccaactcctaanaagttaagtaactgcggtataaaaggattntaaggtattgggcacttgatcacgcgcactttggcctaagcaaaaagtgcctaag

SEQ ID NO: 61330 - DNA, 442 bp, Oryza sativa
tactaaaaagaatacgagttcattacagactattaaacaaaaaaacgacagaaagttaagaaaggtagcatgctggggaacaccagctaactcctcccctactttgtctcccctaataacaacaaccaaatcaatatgcccagtgccaagaggttaactacttgaggataagacacggagaaaaataacgacaaggttgtggcttctcagctgaaccccatcgatttgttgactaggctgtgagattttcagccgaattacgtgggccaggtaatagctgccaatatgttggtagaggctgatcctgtgacccccagtacgaacacacacacacacacaaaaagaaatacacgaggagggctacgaactaccaattcatagaagatcgtttaatcataacctgcccagcggtagaaatgctttcgcttgaaaatctgaaatc

SEQ ID NO: 61331 - DNA, 448 bp, Oryza sativa
  unsure (1)..(448): unsure at all n locations
ntcatgctctcccgtgttgccatttcgtcgtcttcaatctggaatgctggagcacaggttacaccgacgaaagagtagtgcagctcaaagtctcttccaggcgttttgacaaacacacttccatcttcggtgaaggactcgatgtcgcaggtcaagaaggcgccaaaccaaacatttggaggaactgtgtattgtggcttttggccatgccgtagatcaggtccaacaactgtcatcttgaattgtccatcgtcatgcacttcaaatacctgaaaaaaaatggggttagtcaagaagttatgttaatttgatatttatgttaaaatttgctgaccgtgagaggtcccccatgtagtagtgccaggtctcaacacaagggatgcgatgcaacttaacgatctctccagcaggtagcaggaaatatatggcattgctcacagcacggtct

SEQ ID NO: 61332 - DNA, 454 bp, Oryza sativa
  unsure (1)..(454): unsure at all n locations
tgtctacaaagatggaactaactgatggatggtatgtggttgctttctctgtattgcacgagttgaagctgaaagatgttagaaccttttccttttcgcaggtattctctagatgcgtcattagatctggcacttttggagcaactagagaaaagaaaactttntataggacagaagcttcgggtactgtgctatttcaactagtcatgagacatgactataatttactcatagcacctaatatgtatttcatcttggcagatatggggagcttcactatgtgggtgggctgggcctgtgtcatttcatgaggtttgactaatcttctaagtcttttaacctcattagctgtgaacattgactaccattgaaccatataatcannatttttgttgatctcactttacaggcatcgggtaccgtcaaattaatgatccacataaatgcacctatc

SEQ ID NO: 61333 - DNA, 406 bp, Oryza sativa
  unsure (1)..(406): unsure at all n locations
agcttcttaattntgttgaccaagacgtctaattgagctcgagatttaattntgcgatctgcatgaatggtttacatcaatgattgngtacgaagacaagaatggttctgaagtttcagttacaaatacattcgacgtctttcaaagccgagtccctctatttggtcaattcacccttgtcttttttcagagctttgattcgctcttctagctcggatatcttggcagcttgcactgtaatactttccattggttaattacatatggacagcggcttgaaacaaatcagacaggaataaaggctacctttggatgaaccactcagctcaaagttggaatcttggagcttggcgattcgatccctaagatcatgctcggttttcctggcaagctccttggtttcatg

SEQ ID NO: 61334 - DNA, 472 bp, Oryza sativa
  unsure (1)..(472): unsure at all n locations
tgtgagtggggctgtgcaatcagcatgcaaacagattaattgattaattttgagccctttgctccgactggctgtcatttttttatttttgttccatgatagtgttcaatgattttttctgaaatgttataatattttaaaatttgtggcatcaagtgctgatcttaacatactttgcagctagttaagatggaggacacaatcattagatgtgctgccagatgatctagtttagtattttgtatgtttgatcaggagttggaacagaacaaagaacatattttttatcccaacttcataatgtactaactgatataaatgacaggtatatatacttgatataaatagtaggattggtgtgtgattgaaatcatgcaatcttttaacaagaacaaagatgcagaaattgtttatggttagagcttgtgacactaanggatcagaagtgtattaccacacatttcagaatcat

SEQ ID NO: 61335 - DNA, 443 bp, Oryza sativa
  unsure (1)..(443): unsure at all n locations
agctnggcctgctcctccttcatgatcatctccttggggcacttggagcacatgttcatggtcgccgcgctgccaaagaagccgcagttattgatgcaaaggattgggccctcgggctgctggcagccagcctccttgtgttccatcgcaactgtgatctgttcatcaaacaaacaatgcaaaactcaataccgaaatgcgtataagaaacaaatttaaaatttaacatacggataaatcaactagtgtccaattaaatcgggcggtaagataatccaagaagcacctagttgctacaattttcctatcgaaatttccatataattgtgactnttaaaataacctataacccactgcggcgagcttacactttatgaaacaagatcctaatttctatgaggcgcaacgaaatcgccatcacaaaagtggattcctcatcttat

SEQ ID NO: 61336 - DNA, 418 bp, Oryza sativa
  unsure (1)..(418): unsure at all n locations
tcananntttaagtgaatgttntaaaaattgggtagagtttttacaatttttgggtataaagtttcaagagctcaacaattgttatgcctccgatccaatttatccgtcccttccagtaaagttaaatagcagaatgattaaataaatatgaacaggacacagtaaaaaaaacgacgcacgacatccctttcatctcaccaacaagctgcagtcgcactcttgcactacagcattgtaatttacagcattcaagtggtaaaaggaaaataaacagcgagccagagatcgcaattacaggagacagcaaatacaagggcgtgtcgctcaatctcatgggctcctgcgaagcttgacacgagccatggcaatcgagtatgtactcaccagtgttacaagttacaatctggcactggtagt

SEQ ID NO: 61337 - DNA, 395 bp, Oryza sativa
  unsure (1)..(395): unsure at all n locations
agcttgccaggttntcatcattcataggtttccaataggttgggatggctgagccattcgggaactttcggcattttgatgaaaattaccagacaaatatggttactgacaaaacagtgagaaaaacctccatccatttccgctaccattttcgaataatattaagtttctatttccaacaccgatagttatcaatactgactgaaacgatcggtgtaaactggaaaccatagccgaaatctcggaaatttccgtaccgttttcacccctattcctagctaaagcacatcactatcgtccgtctgatccaccgcacaaagagcgaaggagcgatctagccatccgttatgagagcctacctctttcgtgtcgatcccctcctcccgtcgcagaaa

SEQ ID NO: 61338 - DNA, 415 bp, Oryza sativa
  unsure (1)..(415): unsure at all n locations
gcttttagcaggaaccccaatgccacttcgactgctaatccacttggtccagtcattccagtcatctaccattttctgccaatcaaatcctgatggattgaagagccaagtgataaccaagagctatattgatgatgtcagaagtatatatgcagatgaatccgtagcaacatcaccttaaaactgatagactactagcagcaacatcagctcaagtcctttcacaaagtggcttctgaagtacattctgtatttctcagtcaaccttacatggcgaacaaaaaaacatctgccagttgctctatattttgcaccaccatggagaattgtgtgtcgaanataatgtgacttggtcccaaggtagaaagtgaagaacactgaacagagctgaagcgtcatgattatgaaatccccc

SEQ ID NO: 61339 - DNA, 330 bp, Oryza sativa
  unsure (1)..(330): unsure at all n locations
agctngaaccttaaccggcatcgcatgccgatcccgtcttttgacgntgcagtaattttccgttcattagcctctgcatacttaccactgcagcttaagcgttcatgcgagccgggtactgctcgacgcagtccagccacgggctgcgcgccgggcggcgcacgccgcggacggcgcgccacacggcgctgttgcacttgaacccggagccgaaggcgagctggcacacgcggtcgccgcggcggacgcggcccttggcctccaggtacgccagctcgtaccagatgctgctgctcgacgtgttgccgaagcggtggagcgcggcgcgcg

SEQ ID NO: 61340 - DNA, 374 bp, Oryza sativa
agcttgaggcatttgcagcgtcgagcttcttttgcatgatcaggtgattggcacattttgcaatggaagtagacatagtggaaataatgagtttgctggtgatgccggtccaggccttgacaggaccgagtgactggtttgagcgctcatatacttaagctgttgaagtagtagttccttttccatttcaatcttgtgtgttctgaacaagaacatttttttcttctgtttctcatgtgcccttcctgcactttgtgcatgaaagacccccaaaaaagcaaaagaaagaaaacaaaaaagaaagacatatcctttgaggaatggactgtacatgatataaagtaaagatcccattcttcatgtctggataagct

SEQ ID NO: 61341 - DNA, 396 bp, Oryza sativa
  unsure (1)..(396): unsure at all n locations
tagactggaggaacaatccattagggttacctaaatggtccgagcgtccaaagtgtgggtgcagagatcgctgccaggtggctacctcctttgcagaacaaacatttggaaggagatattttgtctgccacaatgtagacaacgatttcgttatatgtctaaccgtttccaaaatccgctatgatttgcacaaaatttctacccaaactgaataacattactatttttntcagggcaatccaacgatgtgtggatttactcgatggatcgacaatgtcactccatcatatcatggccaaaatataacagagtcagaaacacaagtagagtatcaacgattgaaggaccacgagaatacaatgcatattgaccgacctagaaggggccgatagggta

SEQ ID NO: 61342 - DNA, 415 bp, Oryza sativa
  unsure (1)..(415): unsure at all n locations
agcttgtcgaatatatggttgtgttntgacgaatatatgggtgtgttttgatgagtttaagattttaaaaagctacggatggttaattaaccaacttttgagaatctggataatctggttccctaagattttagtatctttcagaagccaaatgaaaaactgaaaagctcatccagacatatatatcgtataccgtcgtatgtagctttccttaaaccatcagatcgactatttgaattgatccctagatttcgaaagttggctcttctctctcgtttttttttcttttcatactccttttttctttcttttcatgctctaacatgtgcccgcgtagcctcctattctcttcttccatcctagtaaatctcaccacaggatggacgcgtgattaaaaattatggggaaatttcta

SEQ ID NO: 61343 - DNA, 366 bp, Oryza sativa
  unsure (1)..(366): unsure at all n locations
tgcattaaacacgtaaattcccgtgacttgctgagtacttaagtactcacccttgctctatatatgtatatatagttcctccgtcgtgaagtgaagatgaagtgaagtgaagtgaagattatggtttcgtcctggttcccagccgtcgcctgtggtgttgggtgttagaccgttggttccgctgctgctgctgttgttggtgtttgcctcgtccgtgtcgtcggttgcattctcgggctgtctgagctgcaacctaagttaaggtaaataagtcctctatttattttaaggattgcaatgattcatttttgtcaccgtgggtaccagcgctatgtcctgngactggtacttagatcgcggtttcgt

SEQ ID NO: 61344 - DNA, 290 bp, Oryza sativa
  unsure (1)..(290): unsure at all n locations
agctntgaatggcactgagtccagtaaatctataatgttaagggggtggattcaaggcacggagttattgatgttggttgattcgggaagttctcattcatttatcgatgaagaagtgggaaggaaattaacaggagtggaaccattacaacaacctctgaaggtgcaagtggcagatgggggataaatcaattgctctggaatcttacctgaatgtcattggtggatgcacggacattgttttaagagtaacttcacgctgctagcattggggggatatgacattatac

SEQ ID NO: 61345 - DNA, 425 bp, Oryza sativa
tttagtagatcaatttccttaactgaatatagcaagaatccgacaactgacgacttggcaactctcatcggctaatctcaggacttcaaagccaatgctgactctaagccgatgactactccgggcttaccaaatttcactgttaacagtaaggatatatgttcttttggctttagtgtatttgccgattgtgcacatacgtataggagtatgtacttatatgtatgtatacataggaaatatgttctttcgggtttatccgtttttggttttctcaaatcatttttcgtacatattgtgaggccctgaatgtactaaagatgatgttcaaacttatctgaagaaaacagggattccagagctagctcaatgggaatgatggatagctaagatttcctgataccgcttcgctgtgttgaatacac

SEQ ID NO: 61346 - DNA, 122 bp, Oryza sativa
  unsure (1)..(122): unsure at all n locations
agcttggaagtgtatgttgaagtgagtgagatgatgttcttatataggggtaggtatgacggntggcngaaggaaaatgttcgaagtgccctccaaccgtcatcanggatgtatctgggacg

SEQ ID NO: 61347 - DNA, 426 bp, Oryza sativa
  unsure (1)..(426): unsure at all n locations
taactaagaaattctggctttggaaattagtatgggtagccataagcccatagtaatagtaactaaacaacctaagaaattgttatctgcctaagggttatcttggcaagttgatgcatctaaccaaataatactccattttgatcaaaagtcaagagggagtacacccttaataccccacgtgttatgagctatctaaatgtctaacatagacaaatgtttaagttgtatttaactaaaatttaaaatcttaaatcaataatactattgaaatttgatatgtaaaaataacatgaacatatttgtcacataggttatttcccattaattttattaatctatgttcgaaaaagtagtgataatgtggggacaaaagaatattntaattntcttttgntgttccaatcatgtgcctcatcatataaa

SEQ ID NO: 61348 - DNA, 410 bp, Oryza sativa
  unsure (1)..(410): unsure at all n locations
agcttgcagctntcctgaccttatctctgaaacttaaatagcagtatttacatgcagactcaaaaactgaaactcggagatcctgttgggtttagtcccacatcggtaattgatgatggaggaacatgatttaaaaggtgggggcggtcctcattcatcaaactagtcttttgggttgtgtaggctcagggcctaaagttgtggctctggttgggcctgtggtggagcaagccaaatgtgacctgtgtggcccacggttagtgggccgggctgcgcactctaacaagtggtatcagagcccaaggtttgaaacccggaataatttccatgggtcacatggtggggaggccgagtaacaagtctttagggtcacatgcccaaccccgaacaattttcatgggtcacatggt

SEQ ID NO: 61349 - DNA, 408 bp, Oryza sativa
  unsure (1)..(408): unsure at all n locations
tctcaagntntgtctggtntatgtgtgtgaaagtctgggttgcactttaaagtgaggaacccgaaagaataaaaacctcaatggatggaattgtgttcaccacaagaggtgatcaatatatcatttactgcgcttatgtttacgctgctcatgtcaaggtacttaagttgatgtagattggttaaccatgagatatctactgagtacatatcagtatccatgaaaccgaggttaaggtgttgtagatttgaaaggttaccaagctgaggaggcactctaccaaacaatatggatgtttcagacacatcaagatatcttatgttcttcattgaaccanagtactctgggacatggctggcttcaactggatagccaaacttgttaatagagacatcaagctccacaaag

SEQ ID NO: 61350 - DNA, 418 bp, Oryza sativa
  unsure (1)..(418): unsure at all n locations
agctntaaaagtgtctgcacttaggttgacaaacttatgtggcactataagtaactacctaaaggcaacttaaagtagaagcatgtagcagctagagcatgatgttagtagtagtagtagtagtagccttggtagatctgtggggttggagacgtggcactgttaagcccacgtgcctttcctaagttccatttgctccatggtgtgtccactctccaggaagataccaaggtatgggcaaaagtgtattttaagctatcctggtattttaccacaaattgtgccgccatgttctcaatcctgtagtacttattctgtgcagttattggatatcgtacagaaacgaacaaacggtaaaaaacgtgtaatagtgatgggtttgggtggcttgcttaatggtactgaccaaacatggaat

SEQ ID NO: 61351 - DNA, 448 bp, Oryza sativa
  unsure (1)..(448): unsure at all n locations
tcagaaccaagagcattaanaatcaggggatattaaatcttacaattatgcatatgcagatgatatgcacatagacaaagaatagatcaaacaagaaactaatatagctggtagtaataaaatctcaaattttacaaatcatattcatgatagcaaaatagagatggtacagcacaataggtttggccaatgatgaatgaagagaaagaaacaatgaatactgtccttccaagttaaaatgggaaacaaatactcactttatcatcctcatcagactcctcatcagagctgctatcagagctgctgctgtctgtctcaaccttttttgatccattggtagcaagtgcaactggcttcttcaaaggggcagcaggctttttcacaggttcatcatctgataaactctcatcactgctatcatcactgcttgctactgtggtagaaagtg

SEQ ID NO: 61352 - DNA, 431 bp, Oryza sativa
  unsure (1)..(431): unsure at all n locations
agctnttcctttgcatgtgcagtagttgtttataaggctcatgtgcaacagaacagtaaactttcttgagcattgacgagataagtagataacatatagtgctatatatcagtcataggcatcggaatatcacaggaattgatagacagtgtgttccttgcaaactacagcatgttcaacacttatttacttatttggtgaacagaaaattggacccacaatgaggtgcctcaccaggtaccagcaagtttgctattgaacttaaatgtcgctgccaatttgaatcaatagggcgtattgaattatgttttacaagttctagttttatgcacacatgtttgatcccttccaacagtgttacaatcatcagccagcaggcgatcatctgggtggcactgagaaacagcattttaactaatgatatttatttg

SEQ ID NO: 61353 - DNA, 362 bp, Oryza sativa
  unsure (1)..(362): unsure at all n locations
ntgccgtgacgcgtctcatgtgttgggatgaggctcatgtgttgggcagtcgcggagtgcgggtaaagtgtacatccactgcagtgtgagtaaaccaaatctattcgaatagccgagctcgcggttaatgagcaccgggacatgtattacacttggctagactctaaattctttaacttgagtgggatggaatattgcatgaataattttatgctgatagagccacttcctgagaggcgggaatgtggacgtccttagaaaatcataacgactcaatggcgggaagctatccttgggatcacaatggatggtggacagaaccgtcattgtttattatgaacaatggtattaaaacttgatta

SEQ ID NO: 61354 - DNA, 408 bp, Oryza sativa
  unsure (1)..(408): unsure at all n locations
agctntgccgtgacgcgtctcatgtgttgggacgaggctcatgagttgggcagtcgcggagtgcgggtaaagtgtacatccactgcagtgtgagtaaaccaaacctattcgaatagccgtgctcgcggttattgagcaccgggacatgtattacacttggctagactctaaattcttaacttgtgtgggatgggatattgcatgatgaattttatgctgttggagccacttcctgagaggcgggaaggtggacgtcctcagaaaaccatgacgaatcaatggcgggaagctatccttgggatcacaatggatggtggacagaaccgtcgttgtttaaatacaaactctggtactaaaaatttgatcagtcaatgctaggtcttaagcttgtgaaaagaaatacaaaac

SEQ ID NO: 61355 - DNA, 417 bp, Oryza sativa
  unsure (1)..(417): unsure at all n locations
tcctcccctccnctgcatccactccacagtccaccacactctcatacgtatctgcggactgcggcgatcgatttgggaggagaggattcagacgacgatcgatcgctcaaaattcagatgaccagcgtgaggcgagcagacaaacgcagctgattcgacggattcagaatggcatcatcagttgcaggctcagtgactcgtcgtcctcctcccgtgctgctggcttgccgatcgcgaccaaataatcgtcgcctcatcagattgttaccgctcctcttcgccgtcgtcgtcttgcttgctcttcttccaccatgcgttcatggagctcgtgctctgaatgagtgccaagaagccaaaggtcagtcactggtggtaagaattgctgctagttgatctgcttcgtcaggagagtgagaa

SEQ ID NO: 61356 - DNA, 416 bp, Oryza sativa
agcttgtgaagattcctcataccaacatgggctagcctctgatgccaaagccaccccgtgttggacttagccactaagcatgtctcatgtttggctttacttgaggaaaaatccacaaggtaaagctttcccttgaggacacccttaaagactaccgaggaatcattccttctatagacggtcacatcaacatcggtaaaaagacaattataacccatagaacataattgagaaacggacaaaagattgtagtttagagattttaccaagagaatgttggcaatggaaagatcattagaaattgcaatcttacccaatcccataacctttccctttccatcgtccccgaaaactatgttatcttgtgaagtgccatttggatcaagagttgaaaacattgattcttctctggtcat

SEQ ID NO: 61357 - DNA, 465 bp, Oryza sativa
  unsure (1)..(465): unsure at all n locations
ntgaccatccattatttcttccaaatctttctgttctttccaggggatggtcctaattcatttgcgcaccagctagaaatgaatcaccaatattatatagaaaattagttcaaatatagtggctacttttgttgtgctcaactgcttttgcaatataataccatataagtttagcagttaggtacttaagggcaaaagatctatttacaacttatttgcttttagcagataactcacaaaatttgtcaattggcaagcatatatagctagacttcctttctatatataagttacaaccacttgggctgttttctccaggattacaacagttacacacactntaagattgaatggagcatcagctgaaaataactgcaaatggtaaggtctcttgtgtcatatattaacagttcttacaaagagtctgtttaaaattatntaatcgtntagctttgtagcaatcac

SEQ ID NO: 61358 - DNA, 382 bp, Oryza sativa
tgcatttctgttaatcagaccatctcgccccacaagacaatgaagcctctttgccagatcgatgttaccataaccaacacaagctgaaagcactgtaactattgtggcttcatctgcctcaaaccctgcctcttccatctcctcaaacaacaccactgcctccttgtacctccctgcccggacaaagccacctatcaaagcagtccacgcgaccgtatccttctcaggcatctcatgaaataatctttgagctatgtcaaactcctgagctcttgcataccctgacaccatggttgtccataacctcgcattccttgcaatatcccctgccaaatcaaacacctgcctggcaagctccatgcttctgcacttcacatatgca

SEQ ID NO: 61359 - DNA, 424 bp, Oryza sativa
  unsure (1)..(424): unsure at all n locations
ntcaccaacagttgtgcctcagacgaagacaaattggcctgttgttagtaaagtatagctagaataagtctactatgactccctcctttattgctcctgattgagggtgtgttcgctactagagcttcccgcgccaaaaacggagcggtctattagcacgtgattattaagtattagctaatttttttaaaaaaatggaacaatatgatttttntaagcaactttcatataaaaactttttgtaaaaaaacacaccgtttagtagtttgaaaaacgtgtgcgcggaaaacgagagggaaaagttggaaccggcagtgccgaacacaccctgaattgtcttcccaactgcaaaacctgtctcagtgagtcgaccagagtcaacctgtcacgtcagcagaaaccgcttcataaggagatcgtcttt

SEQ ID NO: 61360 - DNA, 358 bp, Oryza sativa
  unsure (1)..(358): unsure at all n locations
tgtcgagttcttctcgtatggcttggtttcgatctggtgcaaatcttcgcagnttttgctttagtggcttggcatcgggtcgcaccatgagtttatgctcaatcacctccctgggtacccccggcatgtcggacggctgccaagcgaacacgtcagcattgtcgcggaggaaggtgatgagcacgagttcctatttctcgcctagtgatgccccgatcttgacggtcttgtcggggttggcactggagagtggaacgatcttgattgcgccgtccggtttcggcgtcttgtttgttntgctcactntcttgggtggctcagctgtggcaggtgggctgggcgtgtgctcgaccatgtc

SEQ ID NO: 61361 - DNA, 364 bp, Oryza sativa
  unsure (1)..(364): unsure at all n locations
agctnnttttgtgttttatgcacacgtcatttcttggacagagaaggccgtggctacaaaatggctgttactgtagattcttcgtcacattttgctatgatgagaagtgaggtgttctggaattctttgggcacagttttttggaagataagactcgtgtctacatgatatgcaatattctgctgacatggatgaggagagaaatttcatgcacaagatatggtcaaattgtatcaatctgttgtatggtatatagtttcgaacggtcttcatttcggctacagggaccaaagaaaaatgtttctgtccaaagattgaattttttttttggttaaatgattctggangtggaaaatgtttgtat

SEQ ID NO: 61362 - DNA, 445 bp, Oryza sativa
  unsure (1)..(445): unsure at all n locations
ntatcgntccatgattggtagcttgctttaccttaccgtatctangccggatatcatgtntagtgtttgcatgtgtgcatggtttcaagccgctcctaaggagtgtcacttagtggccgtgaaaaggattctaagatatttaaagcattcctctactattggcttgtggtacccaaaaggtactaagtttaaccttgttggctattccgattcggattatgccggttgcaaagtggatagaaagagcacatccggtagttgccaaatgcttggtagatcccttgtgtcatggtcatccaagaaacaaaactctgtagccctctctaccgccaaggcggaatatgtttcggcgggtagttgttgtgcccaattgctntggatgaaacaaacattgtggactatagcatatccttcaccanaaccccactcctatgtgacaatgata

SEQ ID NO: 61363 - DNA, 430 bp, Oryza sativa
agcttctctcatcatcaccatggaactatttgttgtatatcaaattcctatatcaagcagtagaccagtagtaaattatcatatttgcccttttgtaaagttaggctttattcgccataataagcttcttgcagtttatcttccccagctgcataattttaaggctgacaatttggatcaggataacgaaacatgattttataaaggatgaaccatgattagatttctactgttgattctttttcaatctagtatatgatcatcttatggacattttgctactgtaggttttctattatttcgactggtggcacagcatcaagcctggaagcagctggagttaatgttacaaaagttgaacaaattacaaattttcctgaaatggtataacctaatttttaatttactcctacatttcttgaaatatatg

SEQ ID NO: 61364 - DNA, 419 bp, Oryza sativa
  unsure (1)..(419): unsure at all n locations
tatttcatctttcatttagtgaccctcatgaccactagttgaatcatcaagatcaatgaataaagaacttaaatctgtcttctcaccatagaatgggacagattctctaaaagtaacatccatacttacaaaggttcgtcggtctaatggactccaacacttataccccttctggccagatgaatagcctacaaagatgcatttgacagcccgaggatcaagttttccaatggaaggtctatgatctctaacaaaacaagtgcaaccaaacactnttggtggaacaacaaattcattctttccaaatatcatctcacatggtgtcttcattccaagtattcttgatggtgtgcggntgataagataagtgctgcattactgcctcactcacaagaattangtacttcatagtatacatc

SEQ ID NO: 61365 - DNA, 383 bp, Oryza sativa
  unsure (1)..(383): unsure at all n locations
gcttcactatagctaatatgtactaccgtaattctatctcaacatttctaatgacatggaatgttaatggattatccatcgacgagcccagatggatgtctggggtcaccgggcggtagatccgcccctgcctgctctatatgttgtgacgactcattgagatcattcatcaaacacagnttcctcacttgaatctgatcgctgtgccaaatgttgcgataaaactacatgtccgggcacaggttattaataatggtacgtctctatgtttgatgttaggaaagacttctatagtagaaagatacttaacctacacctctaacaagatcacagaaagcatgcttggtaattcttcatgctcccagtgacctaactagcaacac

SEQ ID NO: 61366 - DNA, 457 bp, Oryza sativa
  unsure (1)..(457): unsure at all n locations
tgtagctcggtcttcccacagcgcaacatttattgtcacattactattaaaaggtatagtataatggcagaaaaagtatatggatggtaagtggttggtatgttattagtaaaacagaacaatatacaaaaagcacatattgaaaggaaggagaatattangcagcggttagctggcgttactggaacagtggcaacaaagttgttagggaagcagagtaaatatcttttggcagatatgaaaaactgagatggaggactaactcggcatcacggatgtagatgctcctcttgaggctttcaccgtctctgatgcatgtctggataggagctactgacgttatctcagtaatgattccaatagcatctgctatgatgacaatangaaggaatagtctcttangaatgcaatgagaacagtagtaaattataagaacttaactgcaactataatacct

SEQ ID NO: 61367 - DNA, 369 bp, Oryza sativa
  unsure (1)..(369): unsure at all n locations
gccagcttatctagtggtgcaatgccactgatatctatgttaacccctctggtttttatataatgtctgaaccatagtgtatttgcatctatgaaatccttatcgcaacaagcaagccacctgattctttnttttttaatgtagcctattggaagccagtttgtcgttgttatttcatggaaggtagaaaatcatgtctaaatatttagaggtcaactatgaaactaatctactgtgggcgtgttgactgatgataaatctaatgcaatggtgctgataacatattgtcaagttaatgtgggttggtaatttaaagctaacttcgtggttcagaaagtacacgataatctgttcaaacaagcttgtatt

SEQ ID NO: 61368 - DNA, 158 bp, Oryza sativa
  unsure (1)..(158): unsure at all n locations
ctatatgtggcacaattaaagcgtacacaattgtttggcaagcttatatatcttaatttatntaccgcaccaaccaaatttaacaccccctaatacattcctttgttatcttaagtaactgctactaccttccgttcaggttataagactttctagca

SEQ ID NO: 61369 - DNA, 462 bp, Oryza sativa
  unsure (1)..(462): unsure at all n locations
tgagattcacatgatagaagggaaccagaaacaagatagttatcattctgaccttagtgtaaaaccttggctcccggtaatgtgtaggattcactttcctttttgaatcttcagactgatggaaacaagattccctaaagaagatataaccggcaacctttagccatcttaccattctctttactagcttctcaacctacagtaacagtatgagttagccaactcagaagacatagccaagacataccaagtntcaacacaaagtcgatttatatcatccagggttcatttcccaagacatattcagatgtgcaaagaaggtcgcaacagatcttaaatatgcttatttatttgaaatgagacacgatatgaggcctattaagtactatcttctcattaccttctcgtctgagagatacatcagttaccagnttgaaatatcagacaatggagtattctcat

SEQ ID NO: 61370 - DNA, 397 bp, Oryza sativa
  unsure (1)..(397): unsure at all n locations
agaaactgagcttcagcatgttcttagaatacgactgctgacgcactgtgtttgatatactngcttnttctgaccatgcgatcttatcatctatggagtcagcatacttctatgctattattagttctgaaataaagttaatattgcacgatagagaatctggagcttatgctcaaccatggtgttgaggtttggaagcttcagaatatacacatggaatcagtctcgtctatggaggctatagtgacatacgtntattatctttgaatttggagctacgtatcctgcgttattcatgagattgatttagagccatctcagtacgccggttcagatactgcgggctcatatgttgatagcgtagcttagctgattaacctccagtaaagcacttatt

SEQ ID NO: 61371 - DNA, 439 bp, Oryza sativa
  unsure (1)..(439): unsure at all n locations
gcaagcttaacttaaaaattaaagaaataaacactcacacccatcacatcttattagtatgttgctccccttcaacaactaanagtctatctttgattgtcaattattcggaggtaataaacaatatctacgaagtcaatctcaaggaccataagccacacttgttccacttagaatgaactttctgagtaactatgacgaaagcattttcctcaaaaactgctctgaacatcaatagatcgtgaattttctatgaaactcaaacattccaaagtaaaggaattaaatccactcaataaaaaacaatttgttgggtgcatgtaattgaaaagaaataatcaaacatggaaggtcaagcnacaaaacaaacaacataaaaaatgaatatttagtcgcaaacacggttttcttaagaaatctgagatcatgaaaatgacta

SEQ ID NO: 61372 - DNA, 432 bp, Oryza sativa
  unsure (1)..(432): unsure at all n locations
tgccaagcttacattattgaaccttgagatgaatcagctccatgctcgtagcaagcaagaatgggagttcatggataacctagctaattgcaccgagctacaagtactctctcttgagaagaatcaaatggaaggacaggtaccaagttcactaggcaatttttcagttcaacttcagtatctttacctgnggctcaatagattgtcagggagttttccttctggcattgcaaaccttccaaacctgataattctggcactggatgacaactggtttacaggttctgtaccacaatggcttggaggtctcaaaacattgcagagcctaacagtgtcctacnaacaatttacagggtatgtcccctcctccctttccaatctatcacatttgatggagcnttttctagagtcaaatcagttcattgngaacat

SEQ ID NO: 61373 - DNA, 331 bp, Oryza sativa
agcttcacctaatgtcaaaccgaggcagttaactctgtcttcacggtgacagcggcttccggccggatttggcgcaaaggaacgggtggccgaggtggagctcttcactgcgaagccgagggaagtgacggcgcaaatcatggacgaccggtgaggcaacacggtgcggctggagcggcggccggcaaatgagagagaagccgaacgtggggaggcggctatggctaaggaaaaactcgggaaaaagagggaaacggaagaggaggtcttgggactgctatttatagccggaagagggagagatcggctatggaacggatggaattggcga

SEQ ID NO: 61374 - DNA, 461 bp, Oryza sativa
  unsure (1)..(461): unsure at all n locations
tcttcgtaaggatctgtagtaaagcaagaattcaagattctcccaccttgctaggatgcatatgaatgcgacggcaagcgaggagcacattgctacggtgtcagagatcaaaaatgcttgaaacgctaacttctttgccatgacaggaagtccctcgcttccagaatcgttgctgtatcccccaggcagggtgaaggctgcggcaaaggttatcgtcgccatgagaatagccactagcgaagtgttgcttgtgtatgtttgagtgagtgacttaacattccttgctaattcatcagttagtcgtttccttgcgaactgacggtgaagcgtggttgcagcttcaggatcagctntagtcataagcatggacacttcattctgcagtataaaagtaaggggtaattagatccataccattacanattctttggtttgaaaaatatgtattactattcacatat

SEQ ID NO: 61375 - DNA, 420 bp, Oryza sativa
  unsure (1)..(420): unsure at all n locations
ctacacacgaagactctcttttttatgttgctcaagagtatccggacaactggcctgtatgcaaagctgggcangtatgcacttgtcatgttcaacattccaaccgaaaagatccaccatatttttgctgtcttgtttaagtgcacggggactatgatatatatgaaggaatctgcaatgacgaattctgacctgaatacgaactgattagagccacactagcactaagtatccttggcgaatattaaaacgacatttcgtacatagaaagtccgctgatcacgttcacgagccgaagatccagcttatgccgcaacctccgaaacagcagagcaaccaacaacacgcacgtaccaggtgatagattaaattattacaaccatattgtccatgcattaaaatattaactatgtcgccatg

SEQ ID NO: 61376 - DNA, 370 bp, Oryza sativa
tgccatgaatttggaatacgtgagtgcctctcatgggtgatactttaagatagacatggtcaccaacatcaaaacttagctctcgtcgacgacgatcagagtagctcttttgacgagtttgagcttcttttaatcggtcccgaataagagtgacattcttttcagcttcattaatgatagcaggtccaaagaattgtctttctcctacttcggaccaataaagaggagtcctacaatttctcccataaagagcttcaaatggtgacatttggatacttgattgaaagctattggtgtaggagaattcagcaaaagatagacatttctcccagttagtgttatgttcaagcacacaagctcggagcatgtc

SEQ ID NO: 61377 - DNA, 363 bp, Oryza sativa
  unsure (1)..(363): unsure at all n locations
taacaagtaatcctattgtgggagggtttggncacggggatgcagaaatagtgcttcaggatccattacgcgttcaaggccttttgttcttcttcgcatccggtattttggcacaagtttttttggttctcaaaaagaaacagtttgaaaaggttcaattgtacgaaatgaatttctaggtcccgggatttcttaccatcaagttggtaaaaagccgcgatttattggcgattgctagaattctctatgatccattttggaaatcttttttttgtttagactattttttgtttgcgagatgtcttgtctgcaattccttatttctatcatctcatgccaaacgaggagaatgcaagcaagggc

SEQ ID NO: 61378 - DNA, 409 bp, Oryza sativa
tgatcgattccacctctgaaacaagaagatctggaccggtaggtatattatcaatcacttggcgtccatgcgatgcatcgactatggatatttcatatccccccttttctttacgcagtatttttcttactacacctgatgacggtgcattatagaaccgattggtactcttgctaccatcaggatagatctgtccccttcctcggtttcccgccacatatatgggatattttaagaaatgaacgtctttcttcatagcagggtctggggaaagaatgggaaagacgatttcactatatttcttaccgggaacagggcctatcacaagagatatttttttattgggacgataactctgaaaagagagatttcctatcttttttttcactcaggagaaatacgggcgggc

SEQ ID NO: 61379 - DNA, 319 bp, Oryza sativa
agcttcttgttagattggtctgcatcaagatttgtctcattagcttgccttttctgtccttcctggtacatcacccaaacttgaatcaaatcaaaatggcagattaatgaaataataagatatatggtgctcacataataaagaataaaactacactactgacttaaagaaccaaatatttaataatatgccagaacaaagcaaaaagattatactttgggatctgaatcacaaaatatagcatcagcaagagccagataattatcagcttctatatgcacccagttgtaatcgaataagtttagtagaatattcaaca

SEQ ID NO: 61380 - DNA, 429 bp, Oryza sativa
  unsure (1)..(429): unsure at all n locations
tggaggtctcccgacgtggctgatccncacgggctgtgtgatccgggttagtaatgtcntgtgggtaaagtgtaccccctctgcaaggttaacaaactgttcgaacagccgtgcccacggtcatgggcggatgtgaggtgattcctagcatagttttgtttgactactgcttgtgaaattgctgttgtggaaaggggatcgatgtttggaaaatctgcagctgatgggatcagctatgcccgggaggccgtttgaaagttgttggcccgggtggccgtttgaaaattgatggccgggtgccaatcttgatcaattcaaaagactgatacattgcacatactccgaccggacgagacgcactgtctcattcgtgtcgtttgagaagcactcacttatntgtnttcagaanagagatcaaataanatcaat

SEQ ID NO: 61381 - DNA, 398 bp, Oryza sativa
  unsure (1)..(398): unsure at all n locations
agcattggctngcatgaatatcaacttgtttctctgcataacgaaactcatcaagcattctttcatagtgcttaaagaaagataacaggtcaaattgtggactcaaggacttcttcaaggcatttctaacactttccgactgcaaagaactttttatatctgcagtgaatacatggcgattgtatactggagaccatttatcacgatcatcaaatatttttttaatccactcattgtttcgtagatcatacttctctagcatagtattccatccaagcaagaagttctcttcatcatcgtagtcataaacgcattttccgaaatcctttgcaaatggtttggagccttgaaagatgtgattaacgtgcttgacagaattttggtacacttgccatgga

SEQ ID NO: 61382 - DNA, 400 bp, Oryza sativa
  unsure (1)..(400): unsure at all n locations
actttggttgaatgagaaccctgcactgaaggaagggtcagaatcaagccttatttgtttttggtgaagttttaattttgttaattctgttgtgaatatttttcatttcaagtttttcactgttatagcctgataagtccaagtaggaaaataactctgggggtcctgatggaagttgaccagcaactagttattgtggaatcatgtagttatctcaacatgattgataggagaaaattgtaacttctgtgcttgaacagaaagcaagtgaacaacatcttaagataattgagatattattntgcttagttatagtatatgtcctctttaatttgaagaataaaaccatcttaggatgagttggtcatcatgaggcttccatggtttagtgggatacttc

SEQ ID NO: 61383 - DNA, 415 bp, Oryza sativa
  unsure (1)..(415): unsure at all n locations
tgcagctggacctgccttgcggatctttatgattgtgctttttcgccacggcgtgggcattaaaaggttaaggcatctgtggctacagcgacacacctatgcagagtgtacgaatggtgatatgtcacttcctgtttcggatagaaaccgtgaacgcngcaggaaaggaacctatcggaggctctaatacctgtggtgctttatttgcaagagattttataattacttaatatgagcttttactacactgtgttatgaacatgcataaaattccttgttggattatgggatttggaaaaatatttattatgcaggtggattatgggcttgtatttgttggatagctatagttggacctggtgagtaccattcggactcatcccatatatatattatcctttggagatggttgact

SEQ ID NO: 61384 - DNA, 422 bp, Oryza sativa
  unsure (1)..(422): unsure at all n locations
gaactcagattccaaccctttgactcaaaccatagaatgcagacagaatactaacttttcttattggcagccagagaatgtctctcgtcaaataggaactactttntttttttgcttttggggcaaagaactattttttctttccgaacaaactaaagatatgcacatcatttcattactaagaagaagatacacataggaggagaatccagaaactccccaccctaaacacttaaaaacagaaaaacaagaccacttgagccgcaagggccatagacctagctctgtgaagctccggctaagctccaaagtatgccttcatttgttactggttgcagcaccactgacaccctcagaattgagctattgaaagctcattcatgtgtntcacaatttctttggtacataactaaagaactatt

SEQ ID NO: 61385 - DNA, 284 bp, Oryza sativa
  unsure (1)..(284): unsure at all n locations
tgcgatatggcacaaagcccaccattctcaatttcggtccattaatattgtgggaggatcagagcagctcatcaggcccacgcccaccacaccgggtcatttgcgtgtcttttcttctctccttttcctatgacgtgaggcgttcttttcttcgtgtcgcatttccggctccttgtgccaagataaaaggaaaaagtcaatgggctttcaaatttcatttcaaaccttacgaatgtggccgaanagaaaaaagaactaacgaaacgtacgtgagggcttgcttt

SEQ ID NO: 61386 - DNA, 355 bp, Oryza sativa
  unsure (1)..(355): unsure at all n locations
ggcgggttgatgtcattgaatgaactgaggcttgcngggaatgggttcaccggtggcttgccggagtcaattggtggatgccagagcctaatgcatgttgatgtgagctggaattctctgaccggcacccttgcttcctgggtctttgctttcggcgtgcaatgggtatcggtgtcggacaacaccttgagtggagaggtgtttgtacctgtgaatgcatcttcgatggttcgaggcgtggatttgtcgagcaatgcgttntcaggaatgatcccatctgaaatctcccaggtgatcaccttgcagtcactgaacatgtcctggaactcgctgtctgggagtatttcgncgagca

SEQ ID NO: 61387 - DNA, 443 bp, Oryza sativa
  unsure (1)..(443): unsure at all n locations
gcttggaacagtaccggaataggtggtatgctagatccgaacattccggtcaataccaactggaaaattaccggaacgatcagtacattttgaccggaacggtagacatacacgaaaaacggagcggtgtattaacgcgtgattaattaagtattagctaatttttttttaaaaaaatagatcaatatgatttttttaaacaacttttgtatagaaaatttttacaaaaaaagcaccgtttaacagtttgaaaagcgtgcacgtggaaaacgagaggaagtngtgggaacttgctgttacaaacacacccatactggttattttggccgtagcagaatggagctgatatgcttattggtatgcatatctgcttaaaatcatcctatcgtaattcgactaattttgaaaaccgatcagatcgatcaattaatcgtgcatgcatg

SEQ ID NO: 61388 - DNA, 467 bp, Oryza sativa
  unsure (1)..(467): unsure at all n locations
ctcagcttcaggctgcgtatgattattttctcaaaattcttggcatgccttgccccccgtcggcatcccttgccttcgatgcgatccgcttggcggtgcatgatttctctgatttggagcgcgacattactgaagacgaggcgaagaaggcgatcttggaaatgtcgaacgacaaggcaccgggccggatggctttagtgccaccttctacaagaaatgttgggaaattatcaagaatgatctggtggcagctcttaacttagcatggagatccaatgcccagcatcttcacctttgtaacacagcctcaattgtcctgctgccaaagaaggaggaaccgaatcaactgtcagattntcggccgattagtttgattcacagcttcgccaagaatctcaacaagatattggctttgcgacttgcgtcgaggatggatgagctaattgggccggcacagtctgatttca

SEQ ID NO: 61389 - DNA, 449 bp, Oryza sativa
  unsure (1)..(449): unsure at all n locations
tcgagaggcttctcgtgttcttccgtttgttctacgatatccacggtctaccggagggagaggactggaggagagaagttggatacgattaaaaaaatatttaaaaccattagattgtccaaatccacgaggtaaagacatcctttttgtgaggctgacaggtatggcccacatactgcgcgtgggggcctaatggcaatgttcccttttcgtaaagaaaggtgattttgcaaaaagaggcaggtgattttgctaaaggctaaagaggctctctctctctctctcttttgtacgatactccttttgttgaagatacgattcctaggaatgcccttcttttgaaaaattgctggggtggaatttgattcttattattcgaatttcaactttttactaagctangccctcttattgctggcctacttagagccgcatccagcctttatatg

SEQ ID NO: 61390 - DNA, 367 bp, Oryza sativa
  unsure (1)..(367): unsure at all n locations
agcttatgttctactacgtattttgcacttgtagtgaacttcagtgttatgcatgtcaaagtgttaggtgcagtaactctagcatccaaaaatccanacgagatgtttggtttatgtttctcagagactgttctgcacaggtcaataatcttggtatggaagtaacacacgagcgtaatactctattttctatataaatagagttagttttgttgtgaagcataagcatgattgaataggaactctattggcagttttatcacaagaaatcttggtggttataaccttataggaacaaaaatatactatggtttgtgatgtgatctgaacttagtgattcattatgtatgcgtgcttagttgcaggg

SEQ ID NO: 61391 - DNA, 386 bp, Oryza sativa
ccgaaacaatgaccgccgtcaccgattggaagcaacccaagacaggcactctagtccgcagcttcttatgtttggaaggatactatcggagattcatcgagaacttctccataatcgctcgacccatgacacagttgttgaagaaagaagagaaatttgtgtggagcccgcaatgcgagaatgcgtttcaaactctcaaggaaaagctggtttcctcgccagtgttaatcttgccggatactcgcatgacttcatggtgtattgtgacgcttcacgcctacgattggggtgcgtgctcatgcatgactgtcatgtggttacctatgcctcacgtcatctacgaacctatgaaggccactactctacacatgacttggagttagccg

SEQ ID NO: 61392 - DNA, 429 bp, Oryza sativa
  unsure (1)..(429): unsure at all n locations
gcttatgttctactacgtatttgcaactagtagtgaacttcagtgttatgcatgtcaaagtgttaggtgcagtaactctagcatccaaaattccaaacgagatgtttgttttatgtttctcagagactgttctgcacagttcaataatcttggtatggaagtaacacacgagcgtaatactctattttctataaaattagagttagttttggtgtgaagcataagcatgattgaataggaactctattggcagttttatcacaagaaatcttggtggttataaccttataggaacaaaaatatactatggtttgtgatgtgatctgaacttagtgattcattatgtatgcgtgcttagttgcaggggtgccttttgaatagttgggactggatntattagtatattaattagtatatgactcagaaatg

SEQ ID NO: 61393 - DNA, 449 bp, Oryza sativa
gtgtgagttctggttgtccgaagtcaaattcttattgcacgtgatatctgctaaaggagctgctgtggaccccgaaacagtgaccgccgtcacccattggaagcaacccaagacagtcactcaagtccgcagtttcttaggtttggaaggatactatcggagattcatcgagaacttctccaaaatcgctcgacccatgacacagttgttgaagaaagaagagaaatttgtgtggagcccgcaatgcgagaatgcgtttcaaactctcaaggaaaagctggtttcctcgccagtgtttatcttgccggatactcgcaagacttcatggtgtattgtgacgcttcacgccaaggattgtggtgcgtgctcatgcacgacggtcatgtggtagcctatgcctcacgtcagctacgacctcatgaaggcaactaccctacacatgacttgga

SEQ ID NO: 61394 - DNA, 413 bp, Oryza sativa
agcttggatggagctctacttaagcagatttcagctttccttatgacaaattttagtagttttgaagttgtggtttgccctatagtttgtaacaaagtgtctgattgtttggcctcttttggtgtgggtaccggggccaatggttctccctgtttttggaaccaagccccgggttttgtaactgctttggtctccggcgatttgcctggagaagctggttaataaaatcagcttgttaccgtgtcaaacaaaaatgctggaactgctctttctcaagatcgaaacaaacccaaccattgcctttgctgaccgaagtgaaaatgttgcatttaatgtgcctagagatcagagcttacaatttagtttcgggttaaaattagaccccagcgagataagggggaaagaaaatacgt

SEQ ID NO: 61395 - DNA, 353 bp, Oryza sativa
  unsure (1)..(353): unsure at all n locations
tactcagctntacaaatanaggtttcgataggttagtcctactatggttgtgggagggagagctattcaagtgacaaatagtatgagttgtgagagggcgaccctttggatgaaaaagagcaaagcaagggatgcaaggacgacaacatttagagggacttcaaacatgatcacgatcatgataagtttcaatattattaggcgtcgacaacaataaagaagagatgcggtgtaagctaacaaggggataagtgataaaggagcgggaagcagtggttgccatgggagagcgagctgaggagcaaaaaaaaatagaagtaatgtggcagcgatgacttctaaaaataataaaa

SEQ ID NO: 61396 - DNA, 444 bp, Oryza sativa
  unsure (1)..(444): unsure at all n locations
tgccgctgcagctagatttggtgtttttaacctgcgaaagactacagacctgaggaattgtctcggttgcagtgctcatttggacatgtataaacctaaacatctcggtagtttcacccattgttgttttctattctacgtggagtacatctcctcctttactttttacagtctttttttcctccccccctccccctaattctcttccactgtcaagattcgaaattctgacgaattttcctgataaattctgaagcctttggaacgatgtctacagagattcctctgtcgcctgtacgtagagtagaaatcctgggtattttgtacttgctcggtttctgttctgtttcgtgttttcacatttgtctgatctaaagacatggtaaaatacgccttcctacctctcataactgatttttatttctgacagannatacagtcttt

SEQ ID NO: 61397 - DNA, 411 bp, Oryza sativa
  unsure (1)..(411): unsure at all n locations
ntagtntacgagtacatgcctaatggcaacttggacacttggatacatgacaaagagggtgggaaagctcccggacgtttgggtttaagacaaacaattagcatatgtgttaacatagccgatgcactggactatttacaccatgaatgcggaagaacaactatccattgtgatttgaaacccagcaatatactnttagctgatgacatgaatgctcttttgggagattntggcattgcaagaatttatatcgactcttggtcgacatcaacaggttcgaatagtacagtcggtgttaagggtaccatatggtatattcctccaggtaattaatatggctacttctgagttcagtttcagcttttgttatagacagctaaatagataactgtactttctcttcatacctat

SEQ ID NO: 61398 - DNA, 385 bp, Oryza sativa
agcttgaagggcaacgtgtggtatcacgccatctgttttctggagatgtccccagctgcaactgttgagaatttctcacgctgggagatcctgtcgcatgaggataaaagagctgttcttgatcttgttaagaaagatgcccccagctcaggtaatgaaacatgggcatcaaattttcttcgcgccacttcgtaatctgacttgatattttgtattgttgtttctcaagggcaaacatcttctaagggttccaagcgcaagaataatcagaatgatatacacgactgtcaagctcccaagataatcaggagtatatcagaaggcacagcagaagataaagggaaagctgttgtatcacatgattccaatgctaattcttctgatc

SEQ ID NO: 61399 - DNA, 465 bp, Oryza sativa
  unsure (1)..(465): unsure at all n locations
taacatgcanagacaccacatcatcatccactaacaactattacatttaagtataatgcaagcacactatattatctataatttaataatttattaaattttagagatttaaaatgtaagcatgttaaatgattccacataattcacatagtctttcaatatatctctccattattttttttataatatcctatacatctatatagttcatcctcacttagttcatgttggttttctcttctctcattaagtcatatctcatcaatttatttttctagtccttatatgattaatctatgattcaaattatcccttttctttttcttctctcgttaagccatatcatctcaactttntttagcccttagatgtataatctaaattatcttccttctttttntttctttcataaagccacatcattttacttttgacattgagatatcattctacatattatttaaa

SEQ ID NO: 61400 - DNA, 419 bp, Oryza sativa
  unsure (1)..(419): unsure at all n locations
agcttatccataacccaaatgttctccttctcaagagatgcatcgtgcaagaacgaggttgtttcttgaccactgtcaagaacaacatattgagggccananagataaggttttggctcgattggaggtcatgatggtggttttatggaatgtaattcaaagatctcaaccgactcttctttttcttggataaaatccagagcgtcttgtttagaagatgatttgagcagctaaaatggaagaacaaccattatgtcctccacgatatcttcttcaggaagggtatcagtcaaggcttttcttgactgcgagaatggaacaaagaaattgaccctcctaaagagaatttgaggctacctaatcgaggagtattgatgagaaaagttctcgatggatgtcttattagaaacatcaaaatc

SEQ ID NO: 61401 - DNA, 380 bp, Oryza sativa
tactaaagacctaagagtatgacttatatgctccacccgtagggtagtctacagacggtctagtaccagataagactctgagtgaaacttgcttgcacaagacttgcaattcaaggcgtagtccattgttcaagttgtgagtaagtgtagcttggagttctaggtggatgttcaaccttaatcggtctccatcaaaccgctggtatataaacagtacattggaaaaggcaaatctcagtgggaatttgagatttggtgggggattgttggaattaataaatgggctaaggcccattcgaagattaactctttggaaaatcacaaaagcccaccacatgggatggcatgcatgtgaagtttagtaccaccttacttattct

SEQ ID NO: 61402 - DNA, 286 bp, Oryza sativa
ctgcagcttggcatctattgatgtgtccgcatctttcccaacactagacggagatgctgctgatggtcttcctctgattgtgagtacaccaaaatgtcggcgatgaagaccacatcaaacttatccaagtattccatgaacactttggtcattaagatcatgacaaaggcatgagcattggtcacaccgaacgacatctaccgtgattcatacagtccataacgcgtggtgaatgcagtcttcaagatatctttcttaccgatacgcaattggtgatatccggagc

SEQ ID NO: 61403 - DNA, 361 bp, Oryza sativa
  unsure (1)..(361): unsure at all n locations
tatggagtctacttttagatgggttttgtcccacgtcaaaatttctaccgagctaccgggaatctgcaaaacaagccatgtaccttatccagtccgaatttgatttgtgttttgggccttataattatgtcatgggcttaccccaagggggtgtgtgccctatggcaaccccagaacgtccctaatcatatttattcaagtacccgtcattgttagagtcgggttttgcttagaatgttcttgtaagaacagtttcgccgctagatcggtttgtagaaccataaattcgagtgcttaatcattcatatgcaatttggttgcaatntatcttgttcttgattgtgttcttcaattcacatgc

SEQ ID NO: 61404 - DNA, 386 bp, Oryza sativa
  unsure (1)..(386): unsure at all n locations
attatacttctgaatcttatttctaatttcagaattgccattttcacactctttcattgctagggtatttcatatataatggattggagatattcattaatatcgtatgcagcatctcattttcgccattccttgatgtcagttgttcagaggtatcatatccgtcttgcatttgttgaatatattgtaagccatataagttttgttctttatccaataattgtgtattcctgtttgtagctcctgtagccatgcatgggatgcatttcangttgcatatgctacttttcaactgtattgtgtaagaaataatgaggtgcaacgtcttatgcttgggcctcatctactttgggatgctccaaggatatatatcacccctcctggaa

SEQ ID NO: 61405 - DNA, 332 bp, Oryza sativa
  unsure (1)..(332): unsure at all n locations
cttggtagagcaagcctcacttgtggtgttcctttggtggttaagttggggatcttagtggtcacttgaaaccaaagagaagtacctacgggtgttggcttgaagaccggagacctcttcctaggccttttcttggcgaggcaaggtgttaatcaagacccggctctttggagctcctcaacagagacataggattctcggtggagaatcccgaacttcggaaacaaatcatttgtctctctcactctctntatctttgtgattgtgatgcttatctcctttattgcctagntgtgctattcatgtctccattggatgaacacttgtgatat

SEQ ID NO: 61406 - DNA, 433 bp, Oryza sativa
  unsure (1)..(433): unsure at all n locations
agcttatgcgngggtgattagttttggtgaaatattcattatcattggtctaaacctggtttcgtcaataattatttcttttacttatttagggcactaattcaagaacacacaacagagaatttcccaaacactatagtcaaagcctctagctagatgtgtatttcagatcacacccagtgtttggtacagattggcatctcaattcctaaggcctctattttcatatttgaaaacttttgggtggagcttgagggattttttgagctagtgaattcttcatggagaaatcatggttgctgaaatgatgaaaaacaaagacaagcttagctacaggatggcgcgacttcatgatttaagcgtgataacaccgcacgtgatcacttttgtgaggaaaatactctctaaacatgggtatttgttagtggacatc

SEQ ID NO: 61407 - DNA, 415 bp, Oryza sativa
  unsure (1)..(415): unsure at all n locations
acattcccacatacgtattggtaaagaataaagccacgtgtcaaaaaagatgaaaccaaaaaaaatatacctatatagtatcatataaaaaaataaattaaattctaccatatactcccacaaattagttattggtaataaatttggaaaaacaataaatacattcttctaatgagtaaaggtgtctcacgtgattattaacaataagggttgaaaataaaccaaacgctataatatatatttgtcaaaatataaataacaatatggtgctatgataattatcatagtggtatgtctatntaagttataattttttagtattgtcgaattataacttcgctcattttcaaattgcagtatttgtaatggttaacaccatanacaatangtgtctactctatacaatgaatctact

SEQ ID NO: 61408 - DNA, 76 bp, Oryza sativa
gcatcaagatttgtctcattagcttgccttttctgtccttcctggtacatcaccaaaacttgaatcaaatcaaaat

SEQ ID NO: 61409 - DNA, 381 bp, Oryza sativa
  unsure (1)..(381): unsure at all n locations
tggagagcatctcaatttctggtgaaacacttcanggaagcatttatctctcagagcattcatgagacttccatctataatcctactaaacttctggctggttcggtagttctatgtgatctggatttgggttgtgtaacactagcatccattgatattctgaatttttcaggcttctatacatctacaggtttctgtaattgataggttaagggcccctttgaatcacagggtagaaaaaacattggaataggaaaaacacaggattctgacaggaattaaagtgtaaaacagaggattgcaaaacacangaaaaacacaggaatggtcgtttgattggagcgcangaaaaacgcangaatcggatgagagagatagact

SEQ ID NO: 61410 - DNA, 374 bp, Oryza sativa
gcttatctgctgtcatatagaaagcaccttcatttaaccttttttttttttgctgtgaccatgcaggtttattatttgaaatgctcaggtcaactaggaaacattcaaaatcaacatggaaagtaaggaatcctgggcacctttcagattgacatggtttcttttgaggtccctgctgtatacattgaataatgataaagtcggaaaacacgtatgcatctttttaaggaaaaaaaactacttgaggtccctgctgtatacattgaataatgataaagtcggaaaacatgtaaatatgacatttcttttgatttatagtctgcattgcatcatatgtacaacaacttgcagggtgagtgcaagtgtggaacttg

SEQ ID NO: 61411 - DNA, 469 bp, Oryza sativa
  unsure (1)..(469): unsure at all n locations
nttcanattaaattcattagatcacataggtgatacgacatgtgtgagcaagcctagggtgatccagacgcaaattcatcacacgagcaccttcaatttttgaagtttcaaaattttgttcttcacctagtattttccaagcactttgaacttgatgaaatcttgcatctttggggtctcttttcttgttttatttaattcccttggtgttgtatactgtcattcagatttttttaaaaaaaaaattcaacgtttgtttgtgtggtttgaagcaaaatctacaaatttggcgtgtgctgatttttgcagactgtaagttccagtgcaagcggaagtttgatctaaatctttgagagaatcaattctatgccacttaccctacttcaacgattngtcattgactttgtctccctctataatatgcgactgactttgtcactttctttttacaatatgtcacagctgggtg

SEQ ID NO: 61412 - DNA, 388 bp, Oryza sativa
agcttgtgaacccagtattttagcatgtttaacttcatcacgcatttgtattgttattaatttgcaagtggtatgatcctgtggttatcctgtcaatgacctcagtttaggatattatggttaaataaaggtctacaagtggtagctatgtcaactactctgtgttgtgttacatgtctagcaatcatgagtagaccagcaattgagtatctagggaaaataattttgggcatgtactatatatctaagataggcaaaatacaggtcacactaagatcatcaaccgttctattctgcgtggtcaactcacagaaatatgtggggtgtacttggttaatccacaggattatgagccatcatccttctgcactccacaactgaacaacgt

SEQ ID NO: 61413 - DNA, 130 bp, Oryza sativa
gcaacaaactctttggccgcaacctcacacacaagcttgagctgggtgagagagagagagagagagagagagttcttggatggatcgggtgatcgagagatgagatccagggtggcgctggagacgtttg

SEQ ID NO: 61414 - DNA, 432 bp, Oryza sativa
  unsure (1)..(432): unsure at all n locations
agcttgcagtctagtgtgcaaagtatagatcccaatggagagaatccattgaatcccgggaattgctttcctcctagcctttcgtaccacgtggggtcacgtactaagcaagccaaaggcaagaagagttagaatcagaagagaaaagcaccgatgcgaactgaagaagaagtacgtaagatgactattaccagcaccgaatggcctcccgcagggataactattcctagacgtcaaagaggaaataccttccgaggtgcacgacagttgacccagcacctcctaagccatggtggcagagtatctgatagtgaagggtcagatcaagtctcctcggatgattaatgagaatgcataanagcttgatttgcctagagctgatggaccatntaaagtgttagcaaagatttatgagaatgcataaaagcttga

SEQ ID NO: 61415 - DNA, 379 bp, Oryza sativa
  unsure (1)..(379): unsure at all n locations
tgactgatgcccagttggccgaattggctntntatggtatgattgctccaatcanggagaaattctcatatgaggatattgaaagcttgtctcatctcacacagaagataatcttgcatgaacaaaggtttccagaggcgaggaagaattctaggaaagttaaccatgtctgtccttacatgtatgggtcggacgatgaggatgatgattctgaaatagctgcagccgagtgggtaagtagcaaaaaggttataccatgccaatgggtaaagagttcagganaagaggaaaggtatgactttgatatcactaaggctgacaagattttcgacttgctactccgagagatgcagattcaacttccaactggccacacaat

SEQ ID NO: 61416 - DNA, 422 bp, Oryza sativa
accttatgatggtgaagtaaaggccatcatctaacttcagtgtggacctccccttgaagccttcaacatttgtgatgtatacaaggactcctattgagatgtacaagatgacgctaacgatagcctgccttgcaaatgatggtacgtgttgtgcagcatggctttgctcattgaactcatctgcacagggagtttctttgattgatgtgaacatagaaggagaagaatgcacccgctggaaattttgtgcggtaactatattgccatttccgctagtatgtaacggatgattgggagtattggggttacctttgctatttgtacttgggtgaaaggaagtcacgaacctgtttgggacatcggaggattttcttctgtcttgtcttgaagagtatacttgatcacggtggactacaggcagc

SEQ ID NO: 61417 - DNA, 387 bp, Oryza sativa
  unsure (1)..(387): unsure at all n locations
agcttagcttgtttcttattctcaaacattctcttcatgcgctgcgcaattgggagataccacaccacctttgctgggcctcccctctttgacttactttcttcaccttcactctatggtcgtttgtatcttgatgccccatagatagggcagacatccaagtcagcgtattccttgtaatacaaaatgcagtcgttcggacatgcatgaattcttctgacctccaggcccaacggacataatacttgcttcgcttcatatgttgtctgcggtaaattgttcccctctggcaacagatcctttaacagctcaagaagttctgtaaaactcttgtataaccagccattactatgcctaaagcttatgagtntcaacacgcatgacaac

SEQ ID NO: 61418 - DNA, 324 bp, Oryza sativa
gagctgagaaaccatcgctctggcatttttttatgaggcctccaccacaccgtatcggcgcccctccaccgatcaacttccacacaagatgctgcaccttgtcgtcacccctgtaagctatcccaggcctccttcgttccaccacccgctggcctcctcgttgattatggcaaaatgagaacccggaactggaggacgtctcatctgaagccagagatttccctggtaaccacgctgtcatttcaatccaacttataaattctcccgccaaataggggagaagctctaggatggacgagggtgcccacccgcaatgatgaatat

SEQ ID NO: 61419 - DNA, 401 bp, Oryza sativa
  unsure (1)..(401): unsure at all n locations
catatgactaaaccatgcctttcctagatagttctataacataacctggcttcttgttcttaaagctatgtggaccacctgcttattgggtgtattatccatacaccgattgcctttatttggtgccaattctacacaaatgctacgtagaaaaatgacttctggttgttgaatctgatatacgcggggtttaaatcacggcaggtttctcatttggctgccctttttcgntcttaatgttcctgatctttgcactagatatggtcgctcttgatgtcaatctcttatttatgtttgagcctgaggaaatatattaaatcattgtactacttatttgctgcaagtactttcttatacaacataatgacttaacagggtctgaagaaagcttataggatgag

SEQ ID NO: 61420 - DNA, 454 bp, Oryza sativa
  unsure (1)..(454): unsure at all n locations
tgtctttcttgagatctgctgtagtacagaatagttatgtgttgcttgtagaagaaaaaaagaacagttttgcctagtacattaaaattccaatgtttaaccatctggcatcttctggttatacagaacctgtgtcaaagcacatggaggaacaaggattggactttcttcagtttgcgtttcgttggttcaattgtcttatgattcgtgaggtcagcgttgtaaaagcctgttgcttagatgtgatctatatattgttgctaatatgtctcatatccttgtagattccttttcatcttgtaacacgcttgtgggatacctaccttgctgaaggcgattatctaccggattntcttgtatatatatcagctagctctntgtaacggtaagttgaagtaccccttgactggtcataattatatttttcaacttcagtgtatgcaagtgttgcatg

SEQ ID NO: 61421 - DNA, 377 bp, Oryza sativa
  unsure (1)..(377): unsure at all n locations
agcttgacacccaagtgacacagcagcttctactttaatgcgatgctaccccaacgccacaatgaacaaacaagaacgacacccacgaaggacatcaacccaagctaccaaggaaccactcctacacacagctagcatcaacaatcctataaagagattgcagtgtgtcatcgttgccaagcttcgtcgccccagcaaagcaactccgactctaccccacagtaaccagataagagtgatgaacacgcgctgtagcaaggaacgaagccaaggaagtgaggcctcgtcaaacaccctagacctgaagagcttcngggacattgcaggagtccaccaaggctaccattgcgcgcagagggttcttggtgttatgaggg

SEQ ID NO: 61422 - DNA, 407 bp, Oryza sativa
  unsure (1)..(407): unsure at all n locations
ggatcagctgtctggaggcccgatcaagtcatatatcgatcggctntaagctcgtaagattgatctcatggcacaacttcaagaatgcaacgccgagctggatatggagcacaaaaagctagccgatctcccgcaagctgttgaagaacagaagacaaagctaaaatcggctatcaagaatgtcgctgatatgaccaagtcctcgaaagttatccctggaactgacgctcaagatgcccaagccatagaagaagtagaacagattatgcagaaagctatattggctatctagcaatacttgtctcaatgactttccatgtagtaggtcttagaaaattttgtagtcggctaagacgttctaatactntacgggcttgacaatctttatgccgactaacatgactttg

SEQ ID NO: 61423 - DNA, 383 bp, Oryza sativa
  unsure (1)..(383): unsure at all n locations
ctataaaccgattcagggtgagaactctagttcatgattgcgacaggtggcaccaatcttagaaaccgatcgaattcttggctggagaagcgcaccacgtatcccaacccctcagcagcggtacgatagcatatctacggtgaataagacgtcttgcggacttaaatgtatattgaaactcttaagaggtctttnttacacaaagcgtgatctcatctagaacagcccggaagtagaccaacatatcctctgagaaaaaaagactctattaaaaaataacagccgttagcccatcacgtggctaattcctatatagtctggcactaccatagccctttgataaaaatcttgcacataaaaaaaactgccccattgcaatcttg

SEQ ID NO: 61424 - DNA, 353 bp, Oryza sativa
  unsure (1)..(353): unsure at all n locations
actatatttatgagaaattaaagtttcttaagatntctaagataaaataaacaatgagcattcaattaagaagggaaatacataactctaatctaaattccatttgttagacctgttttcgaaaagaaataacaagcatgcccgtgcgaatgcgcgggctaccttcctagtttatataaagaatatatcaatatctacaacaccaaactaatttaattaaatctacaatcgaattnttttataatatatttgctcggtattagaaaatatggctaaatatttttttgataaataagtcaaattcaatacgttaacttagacgaaatcttcaagggagtaccgagtatatgata

SEQ ID NO: 61425 - DNA, 446 bp, Oryza sativa
  unsure (1)..(446): unsure at all n locations
tgcaagcttctaactagtaatcctcagggaaaactgatcattcgaccacaacttcaaagtggggatacggtatgaatgaacaccaaggataaaaactgtgatgtacccttttactctcatccatatcagccttgttgccaaccaaaattttgttgacattatcagaggcatgttgctcaatattccgaatccagttccgaatgtctgtattgtcaaataaaacagcagtgacaaaatagttcanaatggaataattaaggaaggtatatatgtaaggagacagtactgttgaaagatgactcgtcggtgacatcataaacaagcaggatacccatggctccacggtagtacgctgaggtanaatgagatttacttgatcaaaaggttctcatttaacttcacaaggttagtatgctgaatggaacaataattataccagtggtaat

SEQ ID NO: 61426 - DNA, 402 bp, Oryza sativa
  unsure (1)..(402): unsure at all n locations
gcaccatctatgacttcggcggttgatcgggcttgtttcctcctcgttccccgatagcttcaatgtccatggtcgcttctctattgcaaaaatggaatgtctctattcagttagtacgatagtagtatgagcaacaggattaccatcattttgtttaccgcgactgttgacgtcaaacacgaggcctgngagagtacaggttcaaagctcgccttcgggtgtgttagcgtgccaattgaattgatcctgcaatcaacaagaaatagaaacagagagatcgcggttaaatctataaatgatagccgatcggctaagtgtcgatgacatatcatttatctttgagccgatgtcatatgtgaatcgatcggcgactataaatagataataaagacttaaacctac

SEQ ID NO: 61427 - DNA, 469 bp, Oryza sativa
  unsure (1)..(469): unsure at all n locations
agctntntcatgcttggagtattcttctcctcttcttttcactgcgcatcatccagaaagggagtatttctacaagggtggaaaggtcggtaaaagaagatcctttggtttggagcagcgtgaatttttaatgatcttttaaaatttggccatggtcatcttggttagataaataaatactcctgttatctgcacacgtgtaacgcacaaacagcgtttagatatttatgggagaatttgagtttgacttgcaattgatgaggtgataagaatggtgaggcttcttatcaaaaagagagcacgtgctttcgagataatcagtgcaataatatactctatggtacgtacagcttctgcccagaacgtgctgtatacacgcaacgaatgagatactcctttcatttcanaatatatcatcgctctacattcgtcctaaaatataaattattctacatatataattaaatag

SEQ ID NO: 61428 - DNA, 396 bp, Oryza sativa
  unsure (1)..(396): unsure at all n locations
tactcaagctccgagtcctcaagcatcgagataattgttattagattcttttttccagatagcctatcaacacgaagaatctgtacccagctgatagatattacatttcagtggattccattccgatgacgggaaaggacacgctggtcaccttgattgcgaataggaaacagatcatcctcctgcctgtaaccatggccacggctattgcccaaattatgaggtcgcccatgggtgtcaaatggatgaacatagtctcggtcaggtccacctcttccaatggaggctntgttcaagggcctgtcccgaaagggtgaacggcttctcttccgtaagtctagtcccctgttcatgggcttgttacgcatgggtgaatgacttctgtcccgtacagct

SEQ ID NO: 61429 - DNA, 355 bp, Oryza sativa
agcttattttattagtatctaggataaactctgtaaccacaatataccaggagtatttctacgtcattgttgagtattatatttctagtaatgtcgttaagaaataccaacaagcatttctggcgccgttgccggggaagattcataatagagattacatgaactaatactttatatttacctctgtataatcattttcctttgcaggcttaccttggttgttttcgcttttgttgtgaaaacagggtagtgcacgactggtttcaacttgacggaaaacttcaaagaaaatctagaagctttcttccggtgcgtcaggccgcgagtcgttgctccacagaaaactctacccgac

SEQ ID NO: 61430 - DNA, 397 bp, Oryza sativa
  unsure (1)..(397): unsure at all n locations
ntatgtcaagattaagcaatcaatcaatcaacgagtcaattcggggagttattatcttcgtctacgcttcagagccggcatttaatttcagcgactccaattattacaccgtcaattntggcttcttcacgccgtcacaatctactccaaatatttccagtatcaattntgaaatttaatctacatgttcgggaatttggagttatcaaccaataagttcagttttgatgagttgggcaacaacatctactttcctccaagtgaagaatctgcaacagctataacaccaagttctactgccatctttataaatcaaggagctttgcatcaatcttcattatacacactctcgcgccaggaaactactcgagcttcgatatcttctcaacaagttgat

SEQ ID NO: 61431 - DNA, 425 bp, Oryza sativa
agcttttcacttcttgtggtggatgagaagatgccaagctaggtagccgggtatttgtaggcctcaatggctgggagctttacaagctgtggtgtactttgctttccatggacaccttgagattagcttccaaagcatatgacacctcacctttacttccatcttgtgttcttgtctgtctcttgtgcttgttgcaatgccatggttgcctacctgacattcacagcagagctcaagactagccaggtgacactggaatattcatggcttgtgagtcagtccatggtacatggaaaaaaaaaagtcattttccaatgtagtgattgtttgggtcaaatcactctcatgtggttagttagtacacgtggcacagcgtgatacgtcggtcaacgcagggccatgactttgtcttagcattgactcac

SEQ ID NO: 61432 - DNA, 441 bp, Oryza sativa
  unsure (1)..(441): unsure at all n locations
tgctgcanagacgatgtcacgcttaatggcattggacgctgtctccattntcttatgcaacgcggagttccccattatggaagctgcattcctgaactccctgcaagtttcatccaaccgcacgattgttcttacaatgagaccttcagatacatctgtcagctcacagatgtctgcaaatggggtcccctgcattgaaagatcaaataagaacacactgattctgcataactctcgcagaagagttcccgtgacgtgaggatgtatacctttgcccattcgtagacgacttcaacaagaccgaacttgagattatcacgggcatattcctcgggatctacaggcaccttgaactctctctggagctttcctaatctgattgctgtatcataaatcctagaatagaaaataacacaagaacaaatggcacttaagtgtgtt

SEQ ID NO: 61433 - DNA, 370 bp, Oryza sativa
  unsure (1)..(370): unsure at all n locations
tagatcttaaaatacgaccaggaaaatgattttcctgtattcatcaatgggcccatcaatcaaatgatttgtgctataatgtgactctggataatcatccagttggatatgatgttcccagttcagtactaatatcggtcaaagcgcagaataatagagataactgataaagaggaagacatcaagtccttagcagcaaacgtgattgctgatacagtatacatttgtatgagatgatgaggttcagctacagttgcagaatatgtgatccagtgattgctgacgagtgatgacaccaagttctttgcnaaacatgatggagactggcatgtttgttgagatgatgaccaccatctgaattctgatggat

SEQ ID NO: 61434 - DNA, 426 bp, Oryza sativa
  unsure (1)..(426): unsure at all n locations
agcttatgtctattggaggtagatctacatattacatttattntttaaaaaaagtagtatttgagaaattattgaangttagaattttaaagggaccatcaaatatttatgagtgacgcgatgtgccagctgctgccaaagctcaagtctgaagaaagagtacagtacgcaattcttcaggcctattttagatgggccttactctgggctcatctttgtctaaagacctgtaaaattccagcccatacatgtgaattggccaggattgaggcccatatcagcgaggtacatgacagaattttgtttatttatacattttttattaaaatatttacaaaaatatttttttatttcgaaaatttacaaatctaatcgccctcccacaggggcggcagggacctaaatgcannaattttatttgtgttc

SEQ ID NO: 61435 - DNA, 296 bp, Oryza sativa
  unsure (1)..(296): unsure at all n locations
ccttcagcttactgctctctagttgttgcacatatgccttatatgttcaaagagaanatacatgtcatggtggatcaaaactaactatcactaanaactgcaattaaacaattaaacttgattcatatttgacttaagcccttgccatcccatataaaagagataacaactgcgacaattcaaattagatagacctagtttgcacaggtaagttcacagaattaatcctatgcttttccaaacaaggcttttttattcagagcaaaagcgaacataagagcaaatctgcagtagta

SEQ ID NO: 61436 - DNA, 373 bp, Oryza sativa
  unsure (1)..(373): unsure at all n locations
agctntaattnttggtattggtatacactctcctcagttcccaaatataagatatttcatattaatgtgaatcagataggctcccttttcagaattgcagtatcatagtatattctatccgatcaaaatatcttatattttggaatggaaagagtacgttgtaggacaaaaaaaaatgggagaaaactacctataggacgccccatttctcagagaaaaatagacggtcaaatgttgcagttaaccaacaagtaaaacattaacttatacatggtgaaaaaaccagcaactaaaacatttaaaaattttatgaaacatggtgaagatacacgttgaaacattcgctatcacgtatgaaacaaccgagagtaat

SEQ ID NO: 61437 - DNA, 297 bp, Oryza sativa
  unsure (1)..(297): unsure at all n locations
tgctggggggcgcatccgctctatagctcgtatcttctttgtgttggcctcgatgcctcgggcagagaccaagaacccgagaagcttgcccgcaggcacactgaacacgcacttgtcggggttcagttntatgcgggcggagcggagacttttgaaagtttccgctagatccgagagtaaggtctcttgagtgcgcgtcttcacaaccaagtcatcaacataggccgtaacattacgtcctatttggctacctcaagaaattcgagtagtacgcagaatagtaggacctgcattctt

SEQ ID NO: 61438 - DNA, 439 bp, Oryza sativa
  unsure (1)..(439): unsure at all n locations
agcttgtccgacaagttatgctagtcttgttntattgatgatcatcattctgtaagcgccattgtaacacgctggttaaactctctgggtgctagatgccagcggtatgttatgatttattgtatcattgattcttgcaggcatttgagaggctgatagagaaaataaagggatggaagcgcatgcaggagcacccaatatcaataatcacgttttgaaatgtttggttctctgcaattccggaagagtgttgattctaaatgtactatcccatctcactgactgaacatgcgcctttattcatctcatgacagggggaagattcttgagttcttcaccacttatgatacaacggatgacagtgagaaaacaccttgagccttcattccttccatctgatccacgtttcttgatctgacatgctttcttctgtatcaga

SEQ ID NO: 61439 - DNA, 411 bp, Oryza sativa
  unsure (1)..(411): unsure at all n locations
tntatattntcaacagaagaacatgtagactttctataaccataacacgatgaanacaacacattttagagtaaatcaaatttctgtgaactcatcaaattatgaactctaatgttatggaataaaaacttggcactcacacgtacaaatttgcctctaaaactcatctaaactaaatcacacataaggcttgcacaaacttataaaatgcatagagaattcaatttaagtcattntggaacaaactcagtttctatagatccaccaacttatgttcttctataaagtaaaatanaatagtatacgtacttcacatcacatgcccctaaaaatactatctacaaaatgattagttntagataagctgaactttagagattcatatnaaatggcatttcaactcttttttta

SEQ ID NO: 61440 - DNA, 366 bp, Oryza sativa
  unsure (1)..(366): unsure at all n locations
agctttttagttattgtgctctctcagattatttgttctggcatggaccacggaaatggggactggcacagttagagtcaattaaattcatacttgattatatactactagtataaaattatgcttccatattgtgatttgggtttattgatcgagagttagtggtcatgtggatacaaatgtccaccaacattntcaggggttttcagctagaagcctataatagagcactgaggtttctcctgtgggtttatatgtagatggagaacttgttggagggtgtaggattatgtatatagggcctgtgtagttcgcgaaaagaaaatttttgggtgtcacatcgcacgtttgaccggatgtcggaaa

SEQ ID NO: 61441 - DNA, 357 bp, Oryza sativa
  unsure (1)..(357): unsure at all n locations
nntgctttgttntatttaactgctttaacctaacaagccttaatgccatgatcataactcttagcacatgcgggagatattgttgctgctttgcttgagatagtattggtctaatactctgtatttatatatactgagctctttagaatatgagaaacagactcgtatgcagttgtatgaatgcatgcgaggttcgagagtggttacatttgatctgctcaatactttcagtggaaatcttccgcttctgaatattgtgattagcttattatagtcttttgctattatagatattgaaatttgaactatatgatctggtatgatccatgtctaatttggaatatgatagatggtgat

SEQ ID NO: 61442 - DNA, 458 bp, Oryza sativa
  unsure (1)..(458): unsure at all n locations
acatgttatttaaccatcaacaataaaagctctaatatttttgtttttttaaaaaacagaatggcacattaaaaatcatgttttaattaaccttattgtacgatcttaactatgccatatgctagatagtaccttatttatatattttacatatgttttctaacatttgtgtgtaattaaatttaattttatagagtgatgacgggctgatcggcgacgacgggatggcggngcggagctacccggatcactggaagggggagaacgggctgtactgcgccgggatggtgaggaggggaatctacggcagctacgaggacgcggagcacatcgccgacgacatcagcaagcaactccggagcagcagcaagcctacccacaacaatggctcggcctagaaagaaattaaatcaagctgatgaggctctcccncttggaccttgtcttnggtattatat

SEQ ID NO: 61443 - DNA, 433 bp, Oryza sativa
  unsure (1)..(433): unsure at all n locations
atatcgatctaatgcaaagttcccaactaagcaagagataaactgcttggcaatagtatagtcgaccggtgtcctcctaggacatgctctaaactagccatacaactcccgttgtcaaaacaactttattagacaaacacttaccaaccgtggtcatcaaccaaaggtggccatttagcgctagatccacatgaggaccaagactgggtcaacacccaagtttagctgttggcgctatagtgaagtgggaatcatgcctattcacagcatctacccttcggcttattcccgtagaattgcctctaattntccattgtcctcacaagacagcaggtttcaaataatattgagaagatttatgcacaccaagggcaaccatatgaacagtgtcattccaccacatggaaaacactntacatctttcaccggaccg

SEQ ID NO: 61444 - DNA, 442 bp, Oryza sativa
  unsure (1)..(442): unsure at all n locations
atgatagagacatagctggcgcacctagctgtcatatttcccgctaatgactcacggaggatttcggngcaaccggaaccttccgttgaaaatgttaaggtgatcaccacgaggggaggtaactccactcaggatccgccatatcctaactctgcaggaacaaggagcagcagcagccaggaagcgtcgcctaacgacacggctgagatagaggaggcagctcagcctgaacgaattgtgccgcaggagtattgcgatgcaaggctgttgtcgttcccccagagacacaagaggccgttagtggacgagcagtttgctcgttttcttgaggtgatccaaaagatccacatacacgtgccactgctggatgccatgcaagtacccacctatgcacggtatctcatggataacctcaacaacaagacgccactacncacaactg

SEQ ID NO: 61445 - DNA, 430 bp, Oryza sativa
  unsure (1)..(430): unsure at all n locations
agcttgccaccagaggcttcatattggtgctatgtttttgcgggatctttggaggcaagaattgccgctgctgtcgccgggctttctggcttgataaccccaaccaacaatgttcttaattgcactntgccagaatctacccacgggcgcgcctgctgccagaactgtttacaatatgggcagaacggatcggcgaatacgtatacaatgaccggcgcatcttttttaccgtcgaggagccagtgggattgttccatccgttgccacatttcgcgtccggctggtgcgtaaattttcttttcgataagtgtgttactcagggtttcacctttctcgtgtacatgtaaccagagatagcgtgcttaccatctggagtcaagtagatggtgacgcccatatcctgatactttccgagataacctttcatttc

SEQ ID NO: 61446 - DNA, 445 bp, Oryza sativa
  unsure (1)..(445): unsure at all n locations
ggcgacgtcattaatcgatgagtacgccctgctgggctggcgcgccatgctgactgaagtcaatctgtcaccgaaaccaggcctcgtggatcgcattaactgcggtgcgcacaaagatatggcgctggaagatttccaccgcagcgcgctggcgattcanggctggctaccccgtttcattgaatttggtgcctgtagtgcggaaatggcaccagaagcggtactccacggattacgcccaattggtatggcttgcgaaggtgatatgttccgcgccactgcgggcgtaaacacgcataaaggcagcattttttctttanggctgctatgtgcggcaattggccgcttgcttcactcaaccaaccggtacgccaccaaccgttgtctactgcggaaagttctgtcgagcctgaccgatcgcgactgcgtccaataattacaactg

SEQ ID NO: 61447 - DNA, 397 bp, Oryza sativa
  unsure (1)..(397): unsure at all n locations
gcttgcttgcatctggacagctaanaggttctgcagtcaatggtagctctcatggggaaaatgatatgaatgagaattcaaaagtttggattgattcaaattcatgctgccttgcactctactcaaaactggatcaatatcaagttctgatgctgcaatcacctattgctcttccaaggctgtgaaggtttttttttcttttggttttaattcataccacgcctgctgaaagtttcagaagaacggggatagaacattntacactagaagtgtattttgttcaaagattccttttggttcattctatttattttaggctttttatctatggaaaatctgctatctgacattaaaagccttatcatttattaatctatctctttttttatttcttcta

SEQ ID NO: 61448 - DNA, 364 bp, Oryza sativa
actcaagcttagggatgacgttgtcgatgacatggtagctgccgttcttgacaaggaagcggacggagaaggagcccttgagcagcgcctcacttttcagcgtccaggtgttagtcgacgactccttgagccccacccagtacttgccacccttctccttgacctccacctcagagatggtgacattggtgacgagctctagactagtgtcgctagagccctcaccgaccttgaaggcaagctcagtggcgcatgagccggaaggaggacaacgaggccattagcaagatagattgtttgttggtgttgtctttcttggttcttgaagggtagagggaaggatcgatatgtttggtgatccatg

SEQ ID NO: 61449 - DNA, 456 bp, Oryza sativa
agcttgcaccatgtcaggagctagacgctgtcgtctctcctcgatgatcctgccagttaagctaaaagcagattccgatgatatagtagaaacaggaacagtcaaaacatccctagctaatatggaaagaataggataggtgtggttgtgctcatgccaccagttaaggatattgaagtcatcatcgtattggttgacagtgtcactgtcaagataggcaaacaactcagatgcattcatgttagcagtagaagaaacagcctgaatcaaagcggtagcagaagttctcctagaaaatgcaccagcaccaagtccagatcctgcactggcaccagcatcaccaagtccagaacctggactggcactagcaccaaatacagaacctggactggcaccagcaccaaatccagaaccttgactggcactagcaccagcattaccagcaccaagtccagc

SEQ ID NO: 61450 - DNA, 444 bp, Oryza sativa
  unsure (1)..(444): unsure at all n locations
ctatacaaactcaagcttgaatgaacttgagagcaaactgtggagagggaatgaatatgtgttgatttgtngtggatttccctctcccggccggttggcttaagtagtgcacccacaacggtcaaaactgacctgtggngcctactagccgtttgtcacaccctgaagttcttctcccaagcctagagtaattaataaatggtctcaagaaattacctgtgtaaaagcaagagagaaaccctaattgaatgaattcacatgataatcggaaatggtatgtggaaattttcttgggttctacatgtcaaaatatgctaacaggaattttagtnggaatnttagagctctagaagataatttaaccaattaaaaatgagcccgagcnaatatttatacctagaaatcatgttccctttcttttcttttccctctttttnttctaat

SEQ ID NO: 61451 - DNA, 472 bp, Oryza sativa
  unsure (1)..(472): unsure at all n locations
agcttcgacagcagcaagtgagctcactgtgacatccagagctattctatagctgtaccaaagccacacgacaggatgaggatgatctcaccatgagtcggccaccggcgtggtctgcgcggcggcgaagatggcctgcangcagtcgacgtggccgtagtacgccgcgtggtggaggcaggtcctcgcgtgcaccgagtcgaacatcaagatctggtgcgaaatcgtaactgttactgattttttcaaacagaattactacagtattatcagtatactgattntgcagttcttttctctcacatttgcgtcggcctggaggagcttgagcacgcagtcgatcttgccgtgcatggccgcgagcatcagcggcgtctgcagcataagcagaagaagagcatagcaaggtgagaaaacataaggacaagacgagatctttctttntcattcaaaatcaaaatatgatattttc

SEQ ID NO: 61452 - DNA, 429 bp, Oryza sativa
  unsure (1)..(429): unsure at all n locations
tcatgcctggtagacaagcgttgaatgctttcacttatggtattaatagccccaagtaccgggttgaagtattcgttgggttgcattccacaataagcatactgtggatggaagaaagcatttggatcatgcccaagaggaggaggaggtgctgagcttgagctagctccaggatgagaggaggacgccgccctatgagcacggngagctccaagctgaaggcggngcttgtactgcttgtgcttcttcaaatnttgcccagcagccccaagcttgtcttgaatcaacctcatgatgtaaggggcataatagattccctgagtaaaggtctccttggagatggcaatctcttgcatcatgagagacacantatcgaactgaccgccctgaatgatggcatcgatgacgtgccaagccacccccctaata

SEQ ID NO: 61453 - DNA, 357 bp, Oryza sativa
  unsure (1)..(357): unsure at all n locations
agcttcaaccatgcagaagtggcttttttatatcacaacacaggagtttattgatatgacatctaccatgttaattcgcacacaccgcataccttgtttcatcccaaagggatattctcaccaaacgtgcatctgcatcctatactatgtccttaaaaagaagcanaactaacagaggaagcaaacacctgaaattctatcggtcttgatgggtagaatctggagctggcttggtgtacttatccgccaagaaaatcaacgatgacggtgcaaagggatgttggaaatgccgtggcgtcaactcccccaacgcgccggcgtgcagcggggcggcgaatggtgaagcggctgggagcg

SEQ ID NO: 61454 - DNA, 441 bp, Oryza sativa
  unsure (1)..(441): unsure at all n locations
tcggcgcacaactatatttgcgggacaagaaagaaagagtcaaagccattgatatcactgcaagactatcagcaattcctcgggaaatccaaaatatagaaaacactaagctcaaactagagcaaattctgggtgtcctcgaggagtctttatttctggctttcgtcgatctagcagtgatcatacaagatcatatacttcttgttcagaactaaatccgcattcttgaaaacaggaagaaggcattgctggaagaacagcaatcgctcttcgtgatagctgcccttttaagctacattttgcagaaaaggacttangaaagaatgaaaaaacaatcaggtcttcttcttcaatgcttgcgcgtcacaacaaacttggagctgattcacagaactaaagcaggtgtatgttccgataagctacctatatcactactcatga

SEQ ID NO: 61455 - DNA, 418 bp, Oryza sativa
agcttcataagtcaaatttcgtatatatgatactgcgtctgcggagtagatcggcgatgtgggcagcggcgacggtcggcagcagctacagaggagatcggcaaggcgggtgttgctggcttcggtggtcctcgaggtggatcggtggtcttcggcttcagcggttgtcgttaggggcgaggcggcgacggcgtcagcgtccctgattgacacaatttagtttcttagcccaaacatctaggcattatgtaccaagcaaaaaagaaagatagtaggtcagcagatcagagaaccatagttgtaacccactgaattcctgaaaccaaataagtaaatgtacagaaattaaatcatcaagttttctcacaatctaattccaactgatgatatatcatcatgcaactaccatctgatcatg

SEQ ID NO: 61456 - DNA, 292 bp, Oryza sativa
  unsure (1)..(292): unsure at all n locations
tatacctgttatggtttccacatacaacaaggagaatttggctatgtatgagacgcggatggtttngcagtctttcaagggtcgaggcagtccgctaaagccagttgaacctgatcagtatttggacgcatagaagagcgtagtaggtcttgctgacaaaatgcaatcttggaccttcgatgaagtgccaaatgagtatgaatatggcaagccgttcttgccgtacaacttgatgtgtgaactaccatggtcaatgagggcaagtgagttatgtctaagtgacttgtacttg

SEQ ID NO: 61457 - DNA, 383 bp, Oryza sativa
  unsure (1)..(383): unsure at all n locations
tttgattaactccccaagtataaaaatgaactgcagttacctcaccaaaaccattgttatgaggcacatgatctgctccggtactatcaccaaacaagcctaaaacaaagagtggcattggatctatgcccagaaccccataacttcactagagaagcctctcatttgataagacagtgattatgaaaaactaaactacctcaccatccgatgatatagattatgccgatctaacggtcagaagtgttcttcatgtatggatagccatgtctttttttttaatctagctntaaatgttctaaaatttaggcagggtcaactgatccacatggtcttttgatttcttctagttggctgttcccctgtcttcctccatggaaatg

SEQ ID NO: 61458 - DNA, 352 bp, Oryza sativa
  unsure (1)..(352): unsure at all n locations
tcanacggtgccatctgtagactggcctggtagcntgtgttgtacgagaattccgcatatggcaagcttttgtcccaagctccaccaaaatcaagagcgcaagctctcagcatatcctccaagatttgattgactcgctcggtctgaccatcagtttgcgggtgataagccgtgctgaagtttaaacgggtccccaattcttcctgcagtttctgccaaaactttgaggtgaactgactacctcggtcggatactatcttcttgggtactccatgtaggcacatgattctcgaaaggtaaagctccgccaacctttttgccgtatatgtggtatgcactggtatgaagtgag

SEQ ID NO: 61459 - DNA, 453 bp, Oryza sativa
  unsure (1)..(453): unsure at all n locations
agcttgctaaaatacatgcatgtgtgcatggatgaggtggagagagagtagtancaggtagtttcatgaattttgtgaaacacactgaaggcgtacattgaaacatatcactgttacgtatgaaacatttagttttaacagtttgaaacacatgtttttcttttgacataatatgatcatatgatatcttgttgtaaagatttaattacaacgaatacaacggtgtgatcggttcgtagatcggataagtaatttagaagaaaaaatatttaaagagaggagaaaagaataaaaagaaacagctagtcatacctgttacggtgacagggttcttccgatccatcatgctgtcgatttgcagcattccagtggggtagatgagacgtccgattattccatttcgtcggacgtgcgatataaagcatttttccaactattagctaacaacatttt

SEQ ID NO: 61460 - DNA, 391 bp, Oryza sativa
  unsure (1)..(391): unsure at all n locations
tgagctaaggagttgttgcttcagtgagcaagctntagctcgcgctatacggagtatgccttccctgagatacgtgtgggtacagggctacaaggcttctaagactggtcacgatctcatgctcatggccaggcccttctggaacatagagtttacacctcccagttctgagaatgcaaatcgaatgagagaagatggtgaaccttgtgtagatagtcaagctcagatacttgcatactactcccttgccgggaagaggtcggacttgccacgatctgtggttcctttgtatcctgcgtgactgtaaataccgatatggtatctctctgcttcgntcttgcctcttgccttttttgggtgatatgttgatatgtgggtattggatgggtct

SEQ ID NO: 61461 - DNA, 455 bp, Oryza sativa
  unsure (1)..(455): unsure at all n locations
cagtgtggcaggcgtcatctcttgccggcttgtggntgctggcggcgtcgccctgggtgcctctgcgagcgccaccctcggcgcgttttcgcacgcgcccaccgcagctagacgcctccgcgcgccttgcgctacttgcggccgcctgtcgaggaagaggactccctctttcttccgtcatactgacaagcctcccactgctcccgagtgagatggagcttcccaccaatggtgatagaccccgagagaagttgtggctcatcgccgtcgacgaccttgatgcgacctttcgccttctcgattgacatcgtggagaggtccagcaaagactcgatcgagccgagcgatctggctgtacttctctgggatgcagcagaagagcttctcgacggctctctccttcgcgtaggtggcgtcatcgtactgcaccatcttctaccacanagtgttgagac

SEQ ID NO: 61462 - DNA, 403 bp, Oryza sativa
  unsure (1)..(403): unsure at all n locations
ctactccactgcattttattgcctgaagaanaaaaatcaggcctcatttaattccgcgcacgattgcgacatgccaactacgatgaacgtactcaagacccttgctcttaatgaatatgttcagggaccaccaagaacacggcctcatgtgtttgtgtgtttctgaagcatgtctgtacaattgtcccaagcatgaaggttttttttcccttggcaaactggatagctgtggacctgtggtaacttctgaagaggaaagaacagtaataagaagaaagcacgggcctttttcattgtaagtggatttttgaactattcattntagtctcaagagagacactccgaggggttggtgtgtgaatcacctaaacgctcttgaagcacannaaaaaacagagaagag

SEQ ID NO: 61463 - DNA, 429 bp, Oryza sativa
  unsure (1)..(429): unsure at all n locations
agcntaagcatagaaacggcgaagatgtttaatattctctgaggtgtcgacgagagtaccgtttccgctgagtcgaaggaacctggccgggtgacttcagagatgataaacggcccctcccattaaggagataacttgtgccgatcccgcgtagtttgaatatttctcaaaaccaggtcgccgactaaaaaggcacgggaccgaacattgcgattatgataacgtcgcagcccttgtaagtatcgagccgaccgaatcaaagctgcttcgcggacttcttccagtcggtgcaagtcatccactcggtcctcttcgtagcgttcttcacgggagatttcgaatgcgcatagactcgaattcaacttcactcggcaacattgcttctgccccatagacaaagaaaaaaggtgactggcctgttgcccgact

SEQ ID NO: 61464 - DNA, 426 bp, Oryza sativa
  unsure (1)..(426): unsure at all n locations
cttgtattgtgagttattngcataactctgctcgcatagttgttgttntgacgtatatctcgcgttcaaaataaatatatgcatttcattccctctctattaattgagagcacgtttattttgaaatgattcacaggactgacctccatttgcctgacatgccgatcatctatgctagtgatgcttttctatcactaacaggtacttgaattntgttttctagtatataatatgcattatacagatattcgtgatgtaatacatttcagtgccatgttctatgactaatactagtattgtactcccttctgttattgtgaactgtgatgcccttggctcagtgagtctgtgaaactgattgtgatatatttatagtttcggttctgctactacataactcaaattcttccatgtatgttgggatgt

SEQ ID NO: 61465 - DNA, 457 bp, Oryza sativa
agctttggatacatgcatagaacagctagatggtgtttaacaaatattttttagataagttaaatagggattaccacaaactaagccagggttaagagtatgactgaattttcttaagaaatacacaatagtttagcaaaattaggctacaaatagacacgccttgaaactaataaacatctatgaatcagatcagaattttttcattcaaaagtactagcaagatctattgatgcttaatctcagccttcctcttatgtcacagcttgtccagtgcaattttcccatctccctgtagaaacaaaatgaggttagaagttagaacctattgaagaaggcatcactacaataatccatgttcctatacttaagcaatggaaattcagaattgctttattactcctactagttgggtgggcatccaaccatggtcatttttgatgtaatcgagaataaa

SEQ ID NO: 61466 - DNA, 327 bp, Oryza sativa
  unsure (1)..(327): unsure at all n locations
tgactgtcctgagaggcttacgcccaaacttgccgactatttcttcgtggcgaatccctttggtgaacgcggcgatgatgacgtcgtcggtgatgtcngagatcttgttacgttgttcagaaaatcgccggatgtaatctcgaagggattctccggacttctgaatgacgttgtagagatcatattgtgtgccgggacgctcgaaggtgccttggaagttggcgatgaagtggtcgcgtagttcggcccaagatccaattgtaccacggggcaatccatggagccaagatcgggcggaatctgctaaagccaccggttaataattcg

SEQ ID NO: 61467 - DNA, 444 bp, Oryza sativa
agcttctgctggtctctggtatctatctatatttggccggtcggcatatgtaactataaagtagttgtaaatttgaatcgctttcatcttatttgtatttgctatgcataacaatgcttaagatgaaaatgtgaatctagtgcacatcttgggaactagattcacatgaatatgagttaaggatatttgatatatcatagatctttagccattttgtcaagtcacctgaatatgtaacacatctggtcgctgccttcgtgtggtttgacgggcacatctcaggctgaagttgactggcaggctaaaggcccggcaatgtctctagtatccttctctcgaggcgtcggatgtttcattatgtttggttgatgacttgaattattcacttcatacctcacatatattgagagggcccgagaagcctacgacacctggcctcctatc

SEQ ID NO: 61468 - DNA, 367 bp, Oryza sativa
  unsure (1)..(367): unsure at all n locations
tctcanagctggcttcatcagagaagttctccacccagagtggctagagtggctagccaacccagtcatggtgcgcaagggcaacgggaagtagagaatgtgtgtcgacttcaccgatctcaacaaagcgtgtcccaaggatcacttcccccttccttgaatagaccaattggtcgactcaacagccggttgtaagtttttaagtttccttgacgcttactccggctaccactatatcagcatggcataaaaggacgaggagaagacatcattcatcacgccgctcggtgtattctcctacgtcaagatgctgttttgattgataaccgcaggagacactttccagcgcacggttcaaggggcactc

SEQ ID NO: 61469 - DNA, 449 bp, Oryza sativa
  unsure (1)..(449): unsure at all n locations
agcttgaaaccctagttgnaaacatgtcctattgtccatgccagcctagaaggcctctttttttattctctcttgattcatatgttcaatttgaaattttgaatgctcaacgtttcgttcctgcatatcgttttacacgcttatattttctaaaactatgtttttctatatatatatatatatatatatatatgttgcttaaaaatcatactaatttattttccaaatttaaaataattaatatttaattaatcaatcatgcgttaaccgttcactttacgcatcttcttaatcttcttatttcccatcctctcanatactccaagntctcattntctactatagnactatgttcttatttttctctttttattagatgctttctaaccaatgtattnttttcaaaagatctctatacacaaatntcttaaaaaatattaaattatttt

SEQ ID NO: 61470 - DNA, 394 bp, Oryza sativa
gcttggcatggaggtccacaacaagctgcttctcgtctgcggtgaggaggccacgcttgaggtcagggcggagatagttggtccaccgcaaccggcagctcttgccacagcgcagcagccctgccaacttaggcactgctcgccagcagcagcggccatgtgtcaggatgaaactgatgagcttcttgttctcctctgccgtccatggccccctcttcaccttcttcttgtcacagcacggctgcctccccatttgctagttactgcagacttgcaccaaatagatggaatcctgtataaaatgaacactctataaattctagtgcttgcacatgtccagtgagctgcaaaactcctgtgcacaagcgtcagatgaaagggtggtgacagctct

SEQ ID NO: 61471 - DNA, 346 bp, Oryza sativa
  unsure (1)..(346): unsure at all n locations
acacatagaatactaagcttgcgtggcagcctgtcaggcaagcggtgcatggctgatctgttaagccaagtgcatatgcttcatatcatatcatctcatgcgtaccctttccctcggctaatccttgtgaattatacacgcgcttgattcattaattcatatgtgtcgngtactactaatcaccattcaccaagcaagcatatttatatgctaacaagagtttttttagagacgtacccaacatccacaaagctagctagctagatcctcctcttctctgcactctgctagagcaagctcgatcgatcgatcagtgatatttccccttatccaaattcagcacaaa

SEQ ID NO: 61472 - DNA, 455 bp, Oryza sativa
  unsure (1)..(455): unsure at all n locations
agcttgccacagaatgggctagcctgcgccatcatgatgaggctggtcttcaaatcaaagtatgcatctcacaagttgacttgcggcccaacgggcacgttgtcagctgagggggcagtgaactcgcggagtgtcttctcggccatactctacaagctcggtgacgcggggatggttggtttcttggtcaggtgatttttctaactcgcggcttaacattctagaagaaagactctggattgtctttgaaattttccggcaagttgaaaccagatgtgcactaccctattttcacacganaagtgaaaacaaccaaggttagcctacaaaggacagtgatatatacagaggtggtgtgataaattattagcttatagtaatctctttattaatcttccccggcaacggcgccaaaaatgcttattggtatttcttaatgatactactagaaatat

SEQ ID NO: 61473 - DNA, 361 bp, Oryza sativa
  unsure (1)..(361): unsure at all n locations
tgccagcggcaaacggtggcttcgttgatggtgcgaccaanagacaaaatgaagatcatgctattccgattccattcctctacttttctcggtcagtggacatcggagtgacgccggcggcgagtccgagcggcggctgtgcttaggctgctactgcatgttgagttggtgctcgattctaagtgaatganatgcatgaatgcaatcctatgggctcaagggtgctcaccgaaccttgaacgaggcgcgggaaagtctggacagcggcagcggtgaagaagatggtccggcgatggtgtagagctccgggaagacggcaacggctcgatccactcatcgaatngacatgcatgtgntttca

SEQ ID NO: 61474 - DNA, 454 bp, Oryza sativa
  unsure (1)..(454): unsure at all n locations
agcttctagaagggtcgattgtttgttacttgaacagagaaagggctggtatgaataaggagaaataatggatagagatccactaggatcttgcgcaaacctaatcgccgccgccggcagtgtcgaatcctacgaatgccaatactgttctgtttcttcttgacgacggcgtgtctagcggcccatgtgcatccggcccgacaccctgacatatgcattgatgatggactgtatgctggcccctgcacggtgcgacaccctgaacttttctggtcactagatcatacgcctgcctagctttgcccgctgtctcgttgggccgtggccgaaanngaaaactttgtatggcngcttgcgttctcgggattagtgctcgcatctttattatactctaatcttgcttatggtgctcgatcgagttatcatatatcttatatcatccctgataatatcc

SEQ ID NO: 61475 - DNA, 273 bp, Oryza sativa
  unsure (1)..(273): unsure at all n locations
tgtaacatggagcataccactcatgaagtattctacgcatgtgagacggatgacaggggtgcgccgggctgcacngcgcatgggcggcgaaactgcgagactacgggacgaagaggatggataggctttgagcctggcggcgctgggctgatcggtcatcctatgtgatgaagagagcggatcgctggggcggcaaggccgcgttgagcggagcacctgtggacatgacaggttagcgagcaatatatatctaatgttagccgcttagtgata

SEQ ID NO: 61476 - DNA, 433 bp, Oryza sativa
  unsure (1)..(433): unsure at all n locations
agtccgaggcgtcgcgagcgttattttaattggtntcatctcgagcggtgattgcttcgcaatatcgcatgcgtcagtcgaggcgtcgcgattcaccgactccaactcatgagcgttcaacgtttggatggccgtggagaggcggactgagcgaccgaggctgcggagacgcgaggcagcgcatgcgcaagcaggcagcaatcgccaatcgagcgggcgagcgggagcggtggcgtggcgcgctcacgggcggcaaccagcgagggggagggcgcgccggcgagccacaagtggcaatgcaagggctcgagcgtgaccggaaccanccagacgatgccgacaagtggtggatattgattatgcattcgccttgatctgctctgatgttgaacgcagtatttgcaactactttatctcatttgatctttctttg

SEQ ID NO: 61477 - DNA, 347 bp, Oryza sativa
  unsure (1)..(347): unsure at all n locations
gcggacaatagatagcacaagttacaccagaagcagaacaaccgagtatttcactcttgggataacatcttgacgacgatgtaccatgttgctactccagtgtcatgtctatggtctggacgtccatgtacgttgctgaaatggtggatgtcaaatggtgggcagaggtagtgatcacgtaccatttatgctttgagaattgctccggtccaacaacaaatatatcgagataccggtacctcatactatcaaatcaattttgattggtggatctagctgaccaggatgtgcattgntagatccaacgatcggaaacgaattggaccatgagatatcggtacctcgag

SEQ ID NO: 61478 - DNA, 476 bp, Oryza sativa
  unsure (1)..(476): unsure at all n locations
agcttgtgttgctgtgcatatgcaaagagtatcaactaaaagtaataacctctgtagaccttgttgaacgctagggtgaatgtatgatgctctgttgttgtacataaaacggttacaaaagcaactaacatagtagaaactacacagtgcttcatgttgactcccagagatatatagttaggagttgttatgcttgacgttgattntcccttttttttgttttatatatggacagttgtctaacaaatacaaactaccaaatcaaagtggagttaaacaaacgccatgtgttcctctntcagtagaacatgaaaaagcatttcattcaacataggccctttattttattntatttaacacgaacactgctctacgtacttaataaagtcttataaacaaataaattcttataaagaaaattcaaccatttgatntaactaaataggagctacaagaaatatagatntactcatagc

SEQ ID NO: 61479 - DNA, 450 bp, Oryza sativa
  unsure (1)..(450): unsure at all n locations
gcttaatactccctccatctcanaatgtacggatttttaggattgtatcgggtattaataaagtacgtagaactaaataggtgaagattgtgactggttgagaagtgaaggtaggtgagaaaatcgaatggtacggtggaggattgtgattggttgagaagagaatgttggtgaagtggttatattttgggacaaatcttatagagctaaaagttgttatattttgagatggagggagtagaagatataagtattttgcagattaactaagacatatggcaatgttttttaccctgtgtgttgagtacgaaatactatctctgccgccatcaaaattttgccctttctgttttttcactggtcccgtaatatttgtgtctcttttgacactgtcgttgattaacgaccattggctttacttctactagtgtacgtgatttgtcacacgta

SEQ ID NO: 61480 - DNA, 228 bp, Oryza sativa
aaagggaaaaagaaaagagcaaagagaaaaaaaaaaaaaaaaaaaagaaaaaggagggaggaaaaaaaagaaaaagagaaagaaagaaaaagcaagaaggaaagaaaaaaaaagaaaaagagagaaaaagaagagaaaaaaaaaaaaaagagacggagaaaaaagaaaaaaaggaagaaagaaaaaaaaagaaaaaaaaaagaagaagggggaaaagaaaaaaaaaag

SEQ ID NO: 61481 - DNA, 426 bp, Oryza sativa
  unsure (1)..(426): unsure at all n locations
tgaatcgcggatcccgcggatcaatagactctcaacataatgctcaggcagatgagaattacatgagagtacaaatagcctgtctttatataaggtacatcataaacttctgtcttttattacttgaagctggatcatcgtcttcccgcgacagatcatgctgacatatttcatcaatgtgccgctgcctacagaatatacagatctacggatttaataattaactagccaagtgatatgggcatacaagaatggtagtgttgtgcacaataaaagttatgtgactcantcaagatagactaacttctatataaacatgacagaagagatcatgcactctttataaacatgattaaacataccatcgctcagttgcgacacactatgcctacattgatcagttggaacactgatatacaactgatg

SEQ ID NO: 61482 - DNA, 472 bp, Oryza sativa
  unsure (1)..(472): unsure at all n locations
tgcctattatccttctgcatagacaagttttatatataagtatagatataggctatgtctagatttatatacaaaagttatctttttttttacgaagaaagtaggatatttatgatgcatgagtagctctccttctctaaataagaaaaaaaaaaaagcaaatggagtcatcctataaaaaanaaaagctaacatcgtgagtttgttcactgcgccaccatagctttatcgttaaaaaaaactatttgcatttcaacccttttagtttggctattagtgtccatgctataccaatttgtgtcttggttgactagttacataaaagaccctatttttggaaaaataaaatagttactatatgttctttcacccactttccgctctatatatattagaaacgatatcctattttctcccttcttcacttatccaatccacaatttcacacctctatcccaactcatttccaata

SEQ ID NO: 61483 - DNA, 422 bp, Oryza sativa
  unsure (1)..(422): unsure at all n locations
agcttcagggttggctaaggctacattcttttctctggcttgggaactcattccctccgcacggaaaacggagcggtccattagcacgtgattaattaagtattagctaattttttttcaaaaatggatcaatatgattttttaagcaattttcatatagaaacttttttgcaaaaaaaaagtaaagtttagcagtttgaaaagcgtgcacgtggaatacgagggagaggggttgggaacaaagagcaacgaacacagcctaaagcagattgaacaccgaattgtataccatagactgatgacaagtttatcctttcagtttatgcgtttatgaaaatactatagaataaagtattcagaaagataccagcactcacgacaacagttggnagcagcaccgggccttggacttaatgcaatgg

SEQ ID NO: 61484 - DNA, 298 bp, Oryza sativa
  unsure (1)..(298): unsure at all n locations
tagcaatgcactccctccctaatacgccggcctgccccataaaacttccggcggcggcggcggcgattgctgctgctgcagctgcaaggtgggaggaggtggctgatgcagcgctggagctggcggcgatctgatgtggccccagtgcggcagcggcgacggccgcggcggcggaggttgagcaccccagaacggcgcgccccagaatggtgccgggtaacacggcggcaccgtcggtgggctccagaaaggtcgctgtcccgccgggggatgctgcgcgaacgcangcgctcccggg

SEQ ID NO: 61485 - DNA, 464 bp, Oryza sativa
  unsure (1)..(464): unsure at all n locations
agcttggtcgatctcaccggatcgaatagatggtgacgatgattccaatctcgttgggagacgtactctggccgggttgaatcttcctggtcggaagtcgtcaagtagcttgttgttggagaatccatctcttaaacccatctcgtcgaaatcctgaagtaccaaaatccccctacctggcgcgccactgtcgacgtttgatgtttcgactacggtatttggacagtatggggatcgtcggtgctaggatatacgcgagactgaggtaaaagagacggagacggngatttttatacaggttcaggcccctgagctgtcaggtaataactctacatcctgttggccggagccggagttgcttttattcaccataatcacaccagtacaatatgtgggcagcatatctaactggtgtccacatgttgatctgaaggtctgactcgtagtcgacaacagggtagtct

SEQ ID NO: 61486 - DNA, 426 bp, Oryza sativa
tcctttagtagatcaatttccttaaccgaatatagcaagaatccgacaactgacaacttgataaatctcatcggctaatctcaggacttcgaagcctatgctgactctaagctgatgattacttcgggcttaccaaatttcactgttaacagatgccatataagaactcagatgcgagtggaggaagcgtcaaggtggacacgttacgtgttaatcagcttgtgccgaatcgtgctattgttacatatgtatatgcatctggatagagttggtttggaggtcgagtcggccagtcagaccgcaggcttgccggtctgattgacagcaccttgccagtctgaccgttctcacctgtcacagcacctgtcatacattgcaatcatcatctcaaaacacttcgcaatatctcaatattaaaccataatt

SEQ ID NO: 61487 - DNA, 419 bp, Oryza sativa
  unsure (1)..(419): unsure at all n locations
agctntaatcttttcttaatcaacaaatccacgtcggctacacgtcggaagtcggcgcccgctgcgtgcagctgtctcctccacgtgggccccgtccagcctccagcctctcagctggcttgtttcgtctttctcgcgggccgggcgctgctgctagtctggcccacatggcagtggggcccacggtgtcaagctgggcccaggtgcgctgtgctgtgcgaagacatggggaggcacggtacacggttgcatccatgcagccgcacacgtgtgcatacctgacctacgcaaacacgatcaagtttggttttgattctttctagctattggggatcgattctcgaataaatgtctgtngtacactatactcgngctactttaaaacgtagtataaagtatttctaaataaattataagta

SEQ ID NO: 61488 - DNA, 363 bp, Oryza sativa
  unsure (1)..(363): unsure at all n locations
ntgcctaagggctgacccagcatggtttctcaagagtttatatgcatctagaataaacacatgaataccacacagaccaccataacgagccgacacatagatcaaacaatttgggcctgggcattacgttgataggtgcacacacaatcatgcatacatagattntataattatagagtaaatttattgaaaaattgactcttcatgcctattaattatgacatatttagtaaaggatcgaacagaaaattatacaagcaagtgaaaataacaagagaatataaacaatactacattgtaaaaaataagaatagaatccagaatgaaatgttaatctatgaaacagagggaagagttatgata

SEQ ID NO: 61489 - DNA, 467 bp, Oryza sativa
  unsure (1)..(467): unsure at all n locations
ataacaattatgggtntagtgtgtagcaactatatagaaaaaaggataggataagtgctaacccacgggttgccgtattattgctgggttaccatatcgagtcaacccataaactcatttatctattatataaaacactcgctcccaagcctctacatagctccttttattaaaactggtggacccaatatttttaaccatcaaattattaattttcaccattaaatttatctccaacaaaactaatctgttcgttccctcatcttggcatgtttataggaaacgtactgcggcgcacctatgtacgtatttcctcccccatccgactctcccttctgtccctttcctattttctagctagcaatcaaattattaattntcaccattagaataatcttgagagaataaaatatgtacgttcatctcatcctgacatgtntactaattaaaaaaatctatctattata

SEQ ID NO: 61490 - DNA, 340 bp, Oryza sativa
  unsure (1)..(340): unsure at all n locations
agctgagcttgctgagggtagatactacaggtcgaatatgtatcaccaacctctacagcgaactactgtaagtnttaaaacgatcaaagaggtcatgtgaatcagcgtgaaacgcctaataaatccgtcgattgttctcggcggattatcgaaacggaaactcaataatgaacccacaggttaccgctgtttcagcagcaggcagaacgacgaaaatatacgatgtgggctgcatgcggattaatctggtgcgaaaatcacgaggatctgacaacgacgtcgagatctgtggaacacgtacgtgtacgccgaggaaatggcggcgtactctgaagatgct

SEQ ID NO: 61491 - DNA, 402 bp, Oryza sativa
  unsure (1)..(402): unsure at all n locations
catactgtatcttctgaagttccagttccaatctccccacgttttccgatcctttctggacctgtccggatattttcctcctactggggtacccttcttgctccgcgttcatgctatctgatagcgcaggatagttctcaacccgctttgtcaatttgttgttgtaattgatctgttccaagacacatccctcggtatcgagtagctgagtgctgacggtgttgtattcggagttcatgggcgatttcccgtttgatgggctccccattntccgcttcagctccttgatgctcacttggatgctctgcaacctctgagcatcagaagagagcttctccagtacattgttgctccattgctcatgaggctctacagatgatgtcgacacctcaagcttattga

SEQ ID NO: 61492 - DNA, 467 bp, Oryza sativa
  unsure (1)..(467): unsure at all n locations
tgagacatgcaggaagcacctggcgaccacctcctgtctactttgtcaacaccagaatcgcctcccacaccaggaaacgaccacctccaccttgtcgatggtgccccttgtcctcngcccccacactctcagcctcgcatcatcccctcttctctgtcctcaacgaagacaacgccgatctcgttgtcgcagtgaacttccgtttgctgacctcaccgattcggatggccccatgacctgccgatctctctcactggtgcccccaccctggtgtatgaaggggctgatggatttgatcatctggtcaaaagctgcccatctctcttgacagagttgatggccaaaagcttactgntcagaatagtgtttgccagtgccactgctgaaagtaaaagtctcagagtattaaactttggatgctaactatttgagagattttgagtgatcatctgtatctgatgatacag

SEQ ID NO: 61493 - DNA, 342 bp, Oryza sativa
  unsure (1)..(342): unsure at all n locations
ctgcagcttagcttacatttattatccttctccgccactggttgttctctcgtgcctaacatgtcctctcacttgccactgttttgcttgaagaattctggagagcacganaggttacatctgcgacgcgattgtagcggtgattgatcatttggggaccgtctcattcaagctcgagcaacagctgcaggagaagattgagatcacacaaacagagaaaaagctcaacttcttgaagcaggtcaggacatccggcgactgaacctatttntcgtgatttcgcatgacataagagtcagtgtagttacagaaaatacactagtacctcgcacatgactagta

SEQ ID NO: 61494 - DNA, 407 bp, Oryza sativa
  unsure (1)..(407): unsure at all n locations
tcatcgttagtggttcagctaacgggaaccatatgaatatatgtgatgcaaaacctgctacgcgtgcctgcgagattacaccggcgccgacgtgattgacgatccgaaattgtcacgtccgtgacacagcagcggcaccgtcaggttgcgactaatcagagccgacggcagcagcagcagccaacgattcgagccaattaaaattcccagccctacaggaatccaacgcgcatactactactgctgctggaaattccactgctgctatggcaaaacaccaaaacgatttcgcgctccatccgatgattactccccggatcgacgcgcgcgccatcgctttcaccanaaggctggagatcgcataaattaacgcatgaacgacgccgcgtgcgagcgtgtgtacgtac

SEQ ID NO: 61495 - DNA, 427 bp, Oryza sativa
agcttgtggctgccaaattaaggccatgatcttctatggaaggaggcgaggcgactggccgaatttgaccgccggttgcacattttcgcacgctggcacgagcctcgttagcctaagccgccgctaaatcactagctagaggtggtgatggatctggaagggcacgacgaggatccagtggagaagcacatcagcgatgtaggtgcggatccgatgaagaagctcctcggaggcatcggcgggatccgataaagaggggatagacggcggagttggctgaagaggaacaagctttcttgaggagagctcgtccctcttcggccggtgctgccatcatcttcaatctgcatcctcatcaactaagtcggggagatcgaagcgaacagaatgatgtggaagcggcgagatatgcaaaccagggggagag

SEQ ID NO: 61496 - DNA, 456 bp, Oryza sativa
  unsure (1)..(456): unsure at all n locations
tgtagccctttctccccacaacacaatattgcgtgtcttattgctatgtttgcgtgtatataananaaatcacacagggagtgtggtgtattgagtggttagtctataacacgaaaaatagctggcgtactggaattaagggagctagcatagtaaaatgatatgttagtattaaggtaaatatcttggtggtttgtggctgacatggatgatataagatgtcaaagttgttagagagcctcagaaaattagctaggaataatatacacaatacacatttatggaagagatctaactcagcattgcggatgtagacgttccttttacgctataccgtctttaatgcgtgtctgaacggttgtcacagattatatttcagtgatgatgtcaataacatctatgatgttgtcatatagaacaggaatccatgtaacagccaaaaatcatcaatgtaat

SEQ ID NO: 61497 - DNA, 292 bp, Oryza sativa
  unsure (1)..(292): unsure at all n locations
aaagaaaaaaaaaaaaggaaagggagaagaaggggaaagaaaaagagaaggaaaagagaaagaagatagaagaaaagaaaaagagagaagggaaaagaaagaaaaaagagggagaaaaaagaaggagaaggagaaaaaagagaaaaaaaaaaagggngaaatgagagaagaaaagaaaaagaaaagttaaaaaaaaaggaaaggaagaaaaaaaaggagagaagaaaaggaagataaaatgaaaaaagaaaagagagggagagaaggggaagaaaagaaaaaaaagaaaagg

SEQ ID NO: 61498 - DNA, 367 bp, Oryza sativa
  unsure (1)..(367): unsure at all n locations
ntgactgtgannattgcagaaagttgacctgagcaagctggatatgactgcattatggagatattggcgtcacttcaatctcgtaagtaatcattcccagatcaagctccaccagttgaataaaaatataccatgaaaatggtgttctgactacgtgctgaacaggatgctagccctaacccatccagggagcagttagtggatgctgtccagaggcactttgtgtcgcaggttgataaacaagactcatctctctccaatttctacacagcagctntgcataaccatgcttgattgacatcttggtcgtctcttgtgaaatcccaattgccatgttaatgcaattggatgagttgcangtcatcgt

SEQ ID NO: 61499 - DNA, 209 bp, Oryza sativa
acattcgccacagctgacgaacctatggatgctgaagaacggtaacagaccattgagaacaaactaactcttattcccacgtacgagagcgcccatcaaagtgacacattgcggcacaccaattgagaagaccaccctgagactggggggacacgtcaaacaattccaagaagaagatgctggaaaccacactgggaggaatttaccac

SEQ ID NO: 61500 - DNA, 435 bp, Oryza sativa
  unsure (1)..(435): unsure at all n locations
agcttgttgatatatagttcctcttagtttaaatggatttactacaattgtctcttctctatcttagaaagctagtatcacattttaataagatttcattttgagcttaccatatttcctatttctgctgagacacgaaataagttgctgtactatcatgcatgtatggcttatatcatggcccaacagcattgtatcactaanaggggagacatggaaaagaaacatcctcccaagtcatgatccgattttgttgtaccaaaaagaattgaaaaagattgtgatggtgatgacaataaagcttttggtgttcatcgctacagagcttgcatatcaagaaatgtgacaataacaacagtgtaactaatcttctagaacaataaaagtttccacaggcaaaananaaaaaacagagctagcaccaatgattctctc

SEQ ID NO: 61501 - DNA, 296 bp, Oryza sativa
  unsure (1)..(296): unsure at all n locations
tctaactgctntgctccataccatcagcgtatgttatgttacagtttatatgtacagagcttttataacggtatgtataaagtcgcgcacagcgtgactaatgtggctagtaaatatgataaaaataaggaaacaaaaggtagaatagcaaaattatttccgtattgtttaccacttatanttttatatttatttggtatcgtttcaaaataggtcattcgagagaacatcggagacgagcctcgatcggtcagaaatttccaataccattttcgccctcatgcaacacaacacac

SEQ ID NO: 61502 - DNA, 424 bp, Oryza sativa
  unsure (1)..(424): unsure at all n locations
agctntagctaccaatattattcttataatgtttaataattctaatattaaaatcacagtaaccagaatgaaccggtggtttaacaagagcaaaagaaagcggaacgtagctcagctcggttcaagatgctaaatagttcaagtaaaagaaaaacagcataaatggaatgttgtatatgacccgtgcaaccgtgctagttggagcaaacttgctgtcttttgtggacaggctaactctcctaccacctctttttctggtatatctgcaagaggcatgtcatataacaagtttccttggctatacttgcaccagaggaattaaaaagaatgaatgtgcagtttctcaaaatgtctacttttaattactaattgccaactgctcaatcccttattggattacagctgcctgatctatgagtagcat

SEQ ID NO: 61503 - DNA, 418 bp, Oryza sativa
  unsure (1)..(418): unsure at all n locations
tgtaataattaatgctccacttattatatactaattgttggtctcgtgtcacgtgcctccaaaatccacactcaattgctgaatcgaacacacccctagtccgggagggttgttgggctatgatttttaagtgccatgcgaaactaacaaactatttatacatgattaattgagtattaattattacatacataaaaattatttattttatttattttaaaaaacttatatattgatttttatggaaaatattgtgtgccttgtatgatttctttgtgatgtttcactcattgggacttaatgttctatancagtggttgtggtactgcaagtagtattttctgaatgttgtatttctctacaacattttataaaatgaaatgacacgtttagtatgtaatgaacattgtttttactc

SEQ ID NO: 61504 - DNA, 400 bp, Oryza sativa
actttgcatggaattcaggatgttttccccaataacaattagacaaaaatcaatgacaaatcacggggtgcggttgccaggccaaacgacgaatgtgaatttgtgattgatgaggttgatccaacccggttatttcattattcttactatctccctttggaagataaaaatactgagtctgactacggtacaattttcatcttgaatttccaatcagaatttagttttaatcaaattagccacgtagtctgcagcccaaaacgatccagcttccgtgcagcaatagccgtgtgtatggccttcagtttcgacagacaaggcaaccccaggagcacgctttgagatctgtcaattctcggagcgacaagttaacataagcaagatggtcatgatcgtaagt

SEQ ID NO: 61505 - DNA, 372 bp, Oryza sativa
  unsure (1)..(372): unsure at all n locations
gttgggttgctgacatccaaggggctttcggtcctggttcttgttgaatacctggatccatntaggatttagtagaagaggtggtgttgattcaagatgtccaagatcagcatgtgtggaaactcgttgcacatggtatttacacttctcttataagaaactaattcgagaagnttcatattaactcgcttctctttgttatctggtctatcgncgctgcgtataatcacaacacaataactagaatgttttgtagagttgattgggataattaatctaagtaaataaaatactgtagactgcagagtacaatatgatcatgcatccatgatatgagcgttgtacattgcantacanctaattaatgtatct

SEQ ID NO: 61506 - DNA, 402 bp, Oryza sativa
  unsure (1)..(402): unsure at all n locations
gcttatntatttctcttcatttctatcacaatatgatggactntacccaggatgaaaatggatcagttattaaatcttggatggaaatttcttttacctatttccctgggcaatctcttattaacaacttcttcccaacttgtttcactataaaataagataatacaataacagtaagaatattttcaacacaaaagtcctctcaaacaagagaaagaaacatacctttttcatagatatttcgaatatgttccctatggtaactgggttcatgagttatggtcaacaaacaatacgcgcagcaaggtacattggtcaaagtttcataattaccttatcccacacaaatcgtttacctataacgattcactacccctatgaaaaatcaattacatcggagcg

SEQ ID NO: 61507 - DNA, 398 bp, Oryza sativa
gcttcgacaaggggttatatatcgtctttgagcaaaaagataaagatcggatagattcgaaccgcaattgcaaaggtaatcactactatgccagcccaaatcatgatcttcaccaacttggatttggttctctcgcgaaaatcgcgagttgcagagatgagaaccatgaaaagcaagatcccgaataagaaaacagaaaccgaggaaaccacaagagtgaagactagtagagtctcgtcttttgtcattctttgctcctttttcactcaatgattcattcgaatttcccgacccaaaattctatatgtctattcatagggcctcgttgctaagtgctacaagatctagtgcactggaactcgtggttatggacccgaatcctttagtatggaacattg

SEQ ID NO: 61508 - DNA, 455 bp, Oryza sativa
  unsure (1)..(455): unsure at all n locations
agctntgtatatgcttgttttcatctacataaagttgttttttggtatcaagttttaactgtccttcattattacaggtggatatatttgtcaatgagctttcaattgacatccttctttatgtggctggcaagttaaatgttatgggcccatatgctgtcaaaagctcagctgtctttcctaattgctgcaaggtttaaatttgaccattcatgcatgcattttaacattctgttagagttttaaattctattntgagatgtgaataaagattgcattgatatttcaaaaaatgattggagctgtagactttaagcttttttgccatatcatagattctgatgcaatatgttatgtaatgcttctggtcttctgaatttcctgtcctcttcactggcattcttctagntataccagttcattctaatcttctgactgtatcaacataccctatg

SEQ ID NO: 61509 - DNA, 434 bp, Oryza sativa
  unsure (1)..(434): unsure at all n locations
ntgattagtcaagcataacatggtcaatctagagagtacgtatttttaagaacgaccatatccttgtgagtactacacgagggaggggcaatatggaaggtaattccatgggcctaacttctacaccttccgttcaagaanaaccccaaatttaatcctagctacgaaacttaacacacatgtactcacattcatagttaggattgattttttttaatgggatgggtggaatacctctttatcttgagaaaaaaaactaatggttaacttaaaacctctctgtcttgaaaaagattatataactgttaactacgatcatgagagtaatataaatagatccaataaaatttatgactgtaggatatataatgagtaagagaactcttgaagccacaatgaccttgcttatttttattggcctactatttctatac

SEQ ID NO: 61510 - DNA, 452 bp, Oryza sativa
  unsure (1)..(452): unsure at all n locations
agcttatcaagaggagagcaggacctgtgtgtatatatgagattntggggctcaaaatatttgtgcttcggattctttctatcaatggcaattccgggctgatgtatattcgtttagtgcagcagatatgcgtcggccaattttaaagactgcatgtgtttctgaagttttccgaatattgatttttggagacatttttgtttgtgtgtgtggttgctgaaaatctatctgttgttgtcgccaagaagatactgcattaacaaaatgtatatggaggatcagaattatatacagaatcaccttttgcattgccataatagctgagaaccgctttcattaatatgcaatggttgcattaagtacatgaacatcgtactagaaacttgcacaacaacatcgagtctatattgatattgtgtatgtcatcttcaggaaatgagcgggctgacaat

SEQ ID NO: 61511 - DNA, 286 bp, Oryza sativa
  unsure (1)..(286): unsure at all n locations
gtactatatatagagagatgaanagactgagatgtctctttttttataagaaaacaatattagtgggaggtgggcaagaagtattaaataaaaccttttggtttgtgagccaatggtaagtcaagacagtagaaattgatttattttgaacaaaataaatactctaaaagttaaaataatttgtaatctgagagtatgtcggtgacatggggccggtggtatcgtgactagaggctngggtagccgcggtcacccacgtggcctgaccccctcggggggggggggg

SEQ ID NO: 61512 - DNA, 301 bp, Oryza sativa
agcttaacacgcaagtgtgtcacattattattcactgataattattatctagaatattgtaaatcacatacaagtgtgccacatcatcaccaactagtaattattatctagagtattttaaatatcatgcaaacatgacatataatttataattttgttgtatttttagaactcaatatcaagcaatgtcaaatcattatctccacatcattttcacattatttaaacatatacatatatcatttgtataatatataacatgcattcatccacatatcttacaacaaagcacggggtatca

SEQ ID NO: 61513 - DNA, 322 bp, Oryza sativa
agcttgcttctccatgcaatcaagataccatcgttgcccccaccgaaggaactttaacaaaattgttatcaaaatcagacccaagcatagccaagatagtgaaatgaaggaagattgtcatgtttatagagttgggatgatctatgtgacaattaattgtttgttttttaaaaaacaatagaaattttgatagagatggaaatatttgagttgcaaatatgcgtgtcatatcaggtattatatagggtgtcgcatggagtgttcagacactaataaaaaaaactaattacaaaatccgtcagtaaaccgcgaaacgaattta

SEQ ID NO: 61514 - DNA, 356 bp, Oryza sativa
  unsure (1)..(356): unsure at all n locations
ttcgccgatcagtgcaatgggttccatctccggcatcgacgacctcgtcttcccacccgggcagacatttcggttcggcagcctcgacttcatcaccaacaacttcggcaagatttctctcctcgactcggaatcagaccagtcgggagagaaccagctttcggtcccgtttggattcccgaacgcggctgaaagctacttcaagaccatctcaaccgagtcggcttcaaaccactcggccgagatcgcatcttctccaacgacaccagatcaagatgacgggggctacccaccagtcctgatgaagctccnncgacgattagcgggccgtctcaccacgacagcgtctcattccg

SEQ ID NO: 61515 - DNA, 432 bp, Oryza sativa
  unsure (1)..(432): unsure at all n locations
agcttctgatgataattacctatcttcatatgggaaaaaccatgaaaggcaccatcggccaaaatgacgtggcagcgccgcattggttctcgacaacaatggcgttatcgctccagttttcatgttgaacacacctgaatcacgaagaggatcaacagattgatctgacttcacatagtcacacatgaaatagatgctgtcctctttgacttcctcacattcttctgaagagacagacttagagcaatatttgccaatgaaaagcgctctgcggcccaatgtgttgagccttctccactgacaaggttgcacagtgaagtctgcctcaaagacatcaaaccagcaagtgcatgcagtctccaagagatcatcacattttgcaaatgggcgtattngcatnctacgcctgaccaacagcaatctaccatcaca

SEQ ID NO: 61516 - DNA, 357 bp, Oryza sativa
  unsure (1)..(357): unsure at all n locations
tactacagaagaaagcttacgccagaagctatcttacagaagaagccagcttacggcgtaggccagcttacaggagaagccagcttacgacgtaagccggcttacgacgcaagccagaaggttcaaggcttacgatgcaagcctctaccctcctncgcctataaatagggcccacaaggtccaaggcgaggacaaccgatcttcggtctcctgtttctcctcttatagcttgtactcaaatccagaagaaataaagcttccacttgctcatattttctgtggtccataactctgtggttgtctgcttgtgtgctgatcaataaagtagactggtttctcaacaactctcacatataa

SEQ ID NO: 61517 - DNA, 374 bp, Oryza sativa
  unsure (1)..(374): unsure at all n locations
atttgttcatgcatgcatgatcacactgctgcctctactgtcaggacattatatcttatgacaatatataggccatgtttagttataaagttntttttcaaacttccaactttccatcacatcaaacctttcatacacacacaacttttcagtcacatcatctccaatttcaaccaaatttcaaactctgggccgaactaaacacagccatagcagtgtaagccattcaaatgtttgagtttctctagctgctatataggcttatgccctttacactgcagggacgtggcgagttacctcccgcgccacattggacccgtacatacgtggcgacgaagcgcggtgctctgcttagtcgctcgtcccttatctgg

SEQ ID NO: 61518 - DNA, 374 bp, Oryza sativa
tattaatttgttcatgcatgcatgatcacactgctgcctctactgtcaggacattatatcttatgacaatatataggccatgtttagttataaagtttttttccaaacttccaactttccatcacatcaaacctctcatacacacacaacttttcagtcacatcatctccaatttcaaccaaatttcaaactctgggccgaactaaacacaaccatagcagtgtaagccattcaaatggttgagtttctctagctgctatataggcttatgccctttacactgcagggacgtggcgagttaccttccgcgccacattggacccgtacatacgtggcgacaaagcccgagctcttctagtcgctcgtccttatct

SEQ ID NO: 61519 - DNA, 404 bp, Oryza sativa
  unsure (1)..(404): unsure at all n locations
aagaagaaaaaaaaaaaaaaaaaacaaaagnnngaggnnaatgagctcgagacctgaaacnnnnnnnanggnaaanaaaaaaagagggagaattttatttaaaaaaaaaaagagggggggagaaaaaaagaagaagaaaaaagaaagaaaaagaaagaaaaagaaaaaaaaagagaaaggagaaaaaaaaaaagaaaaagaaaagaaaaagaagagaaaaaaaaaaaaaagaaaaaaaaagaaaaagagaataaaaaaaaaaaaaaagaaaaaaaaaaaaaagaaaaaanaaaaaaagagaagaaaaaaaggagaaaaaaaagaaaaaaaaaaaatgaagaatagaaagagaaagaaaaaaaaagaaaaagaaaaaagagataagaagaagaaaaaaaaaaaaa

SEQ ID NO: 61520 - DNA, 426 bp, Oryza sativa
agctatacctgttttctataagaatagatattatgttttctcaaattgtaatgtgcaaacctacaaaaataaatagagatgaaaatctaacaactaaacgaaatctaaatatagcataggatacacaaacatgatttgcacaggagcaaaacttcagactaaaatcgcataaccttgtcaaagcaactggtccagtgcctccttcccctctttgtcagagacagtcactttagcagctgctaccgagaattgcactgcctgctcacaaaagggtttgagattcctgcacattagttgtaacactatcacaaaagtgaatccgaaacaactacagaccagagcgttgttgcacaatccagcaaatgatcaatgacttgctgaagacgtaactgagcgttgattttcatgagagcttgaggtggctcc

SEQ ID NO: 61521 - DNA, 403 bp, Oryza sativa
  unsure (1)..(403): unsure at all n locations
taatagatgagataaccacagcactcgtactaatcatatgtatttatgatcttgagtatcactatctcagaacactcaaacgaaagattacagctcgaacacggtaccattttacagtacagcgcataagaatccctcctccttgaaaacttatttggactcatatntttatttatacttatacttatcagccaaaatgtaaatttttaatttttaatttggagcttattttgaggttttctcatcacagtttatttttcggttgttacttttagatcgctaaacaagtatattaaaggtttattcacacatactttttgtttgaaatatgccggaataagcaaacgatgggccggagatgactcactgtcttttatggcgttgtccagatttaacttttatt

SEQ ID NO: 61522 - DNA, 270 bp, Oryza sativa
tttgcccacaggaataagaatacgtactatgaccttcatacatttacctccgctgtgatcaacaaagagtgtgctgcaaaagcctttttatcagtgggtgtgagcctcagtgctattatgcattgtggacctgttctacgcatagatggaacttatatgacgggaaaattccgacgtcagaatattgacagcaattgggtgtgatgggaacaaccacattctacctatggctttcgcatttgtagagagtgagaacactgcaagctggta

SEQ ID NO: 61523 - DNA, 354 bp, Oryza sativa
aatcaaagccgcgtcatcacagagggactccacgccgagtgtttattcaacccagtcatggtacagaaggccaacgggaagtggagaatgtgtgtctaattcaccgacctcaacaaagcgtgtcccaaggatcactttcctattcctcgaatagaccaactggtggactcaatagccggttgccagacgttgaggatactcaacgcttactccggttaccaccatataatcatggcacaagaggatgatgagaatacagcctctatcacgcccgtccgggtattctgctatgtaacatgccgttcggactaaaacccgcggaaacactctccgcgcacgggctaaggtgcctta

SEQ ID NO: 61524 - DNA, 369 bp, Oryza sativa
  unsure (1)..(369): unsure at all n locations
gacctatgaaactcagcttggtangcctcgcgtgaaggagagtgttggaaaataaagtgaattgtccgtcttttctcatcagattaagcttttaggttaaactgctcaataatgtcgccgccaacgccaacttcgattccgccaccaccgttggaatttaatcttgttgccactgccgattcgatcaatttctccgctctgctcgattttgatttcttcgctggccactgcctgattcagcctaccactgcggcactgcctctagcagtctagctacctctggantttggccccaacataatagtatctccgttcgatttgattntatcgccactgtcttgatttgattcttgccgggatgttggagat

SEQ ID NO: 61525 - DNA, 356 bp, Oryza sativa
  unsure (1)..(356): unsure at all n locations
tntaattcccatcctgatgctcgttggtcgacattactttttcaccactatgcttctcttccattggagctagcttctactgattgttaattaattactgtcaaattagctatagtttactttgcaaatcctacgctgacttcgagagatgctgcctttattagtggcagatggcagtagttcaactgctatgcaattgccactgtccttgtgagaggacatgaaagcatatatgcaatcagaaagtaataaggctgtggaagtctctgcagtctgtacctaagctactgtataaaatatcttaatgaagctgaagagtagaagctacattctnctangntctttctggattggca

SEQ ID NO: 61526 - DNA, 390 bp, Oryza sativa
cgcatcaagcttcatagtaaacatttttatgttgcatttcagacttaggatcaggtgcacacaccatgaaggagtatgtgtgcaacagttcagacttcaatgtaagaaacagatagttatgtttgtcttcattataacaatgtccaactgcaaacttgaaaggttgaatatttgttaccatcaggtaactatactttcaaaaacttataattataactaatatcaacaaggtgttgactacgatgtcgtgccactattgtgaaacaatggtgcatctcctgcaaatgataaaacaaagagagtaaaacaatcgatccagcttggtttgtacactacaacatcaagggaatggtccattacacgaatatacggaaggtgagaggttacttt

SEQ ID NO: 61527 - DNA, 314 bp, Oryza sativa
taatgtagatggctcttatgatccgaatttgagaatgtgtcactggcacgatcttgagagatgagaggggaactgtcatcttttcttcctgcagaatttttggaaggtgctctgatgcacgggaaatggagcttctagcatacaaggaaggaattgctttggcgattcaatggactctaaaaccgatcgtggtggaatcagactgcttggaagcggtacgcatgctgcaatatgcagagaaggatttgtctaccctggcctatataatcagggagatcaatgctcttatgtctagaaatatggagaatgttatt

SEQ ID NO: 61528 - DNA, 394 bp, Oryza sativa
  unsure (1)..(394): unsure at all n locations
agctttgcacattcttagctggtgctgtctttgttggtctggggatctgattctacagaacgaacttctgacatttccattcagatttcagagcgacagtttgaactgtgtaacaactaaccttctgtccttgttacctctagcctcacatccaccccagtgaatacgcaatctgagtctttgtgttggagatttcgtttaattacaaattaaaaagagaggactaaggtttagtctgtaacattaattaccacacttgaaacgacgccttacatctaggcactgccactgaaaggtgggttcccttttctcctcttatgcaagaatngttgaacatgttaagaataagactttgaaactaaaaacttgtaagttgggtttatcagaanaaaat

SEQ ID NO: 61529 - DNA, 336 bp, Oryza sativa
  unsure (1)..(336): unsure at all n locations
nggttcttgagcatatagaaagcattgcttttgaacggataaagtgacaaattgcgaacattttggagggagcataatcctttaaatctcgtcgctgcagtatgagagaggatcagatgcacgttatgacaaacacactttaaccctacttccagatgaggtttatcttccgtagacctccaagggatgaccttatcatttnttgcatctgtgttcatgatacagtaatggccaattagatcacatgcaatcgccaacagttcaatacatgaataaatactacttcatggcttgaaaaatacattgacaacctctacaagatactaacatcagaaa

SEQ ID NO: 61530 - DNA, 426 bp, Oryza sativa
  unsure (1)..(426): unsure at all n locations
tgtcagacacacagctatttggctgatcagccatctcatattctgtcttaaaagaaaacattangttggagcccactcgctagctagtaaatacatatactccgttttataatgtaattaagggtgtttaattntgttctaaactaaattcctctaacttgggaactaaattatataagaatagttaaaacaaagatcactagtatggccatctctagcattgcaacaccatcaagacctanggtgagaagtataatatatgtacgactgtcatttgtcacacatagtagacatgccgtggatgtttggcaattcatagcnaaagatcttacatcaccgtcgaaacattatgtaattaattgggttaattggatcatgctattataaatttgtgtataaaaatgacatacaattcatctgtcatac

SEQ ID NO: 61531 - DNA, 453 bp, Oryza sativa
  unsure (1)..(453): unsure at all n locations
gcttgacgcacaagcggcgcggggtcgttttaatggctgggtgggctatcaactgtttgtggtgtagttgtgcgtcgtggtcgcctataagggtgtttccttcgtctcaaaataagattaatattgacctatcttatacctatatattagtacaaatttaaatgaagaggataaaatatctttactttaaatcacagtacaattatttcttatcttatttactcccaatatataattattctctattcttataaactctaatataatagtttctaaaaataaacttgctttgagataaatggaaaggaaccaaaaatataattattgggacaaaggcgatagtatatatgtttggtagccacgttgtgctacgacttcgtgtcagatctatgattngatcagcttattaactcaataatgtttggtagtatgcaatacacctgtggtctacat

SEQ ID NO: 61532 - DNA, 443 bp, Oryza sativa
  unsure (1)..(443): unsure at all n locations
atatagctgccccgctgactntntaatatagtcatggtgcttttngggtttttaagcaattgattggatacaatatcgttgcttttcgccacgtaagtgtgcatctttattgaccaatattatggcttacgctgattatatattgtggtcattctctaggcggttggtaaatcctctatgagtttatntactcggattttacaccacatatgccatatatttccaggtgtggtgaaaccatgtgtcttctatggacttaagcacatctgttaaagcagtgtgcgcatggcgtatgcccaatactttggaaatttctttattcacaatatacaagcttctntatagctattttgctatattactcatcatattttacacagcagttggtatatcactcggatcatgttatttggaagagtcacaccgcatatgctatatattga

SEQ ID NO: 61533 - DNA, 393 bp, Oryza sativa
agcttgtagcgcagcatctaaagacaagtgttatgatggagttaagacatctatccaattaatagcacaagtttttagattaatttgaataaagttagaacattaaagtaaaaagtaagtaaataaagtaaaccaagcttgcaagataagttgaaacaaggtcacaaattttgtacttttgaacaacaggttccaaaagaatataaaagaaagttataaaatcaacatgctaaatttatttcattgcagcaaaataaaacaatggtgtaaaacatttgctgttaaatgagccattagtacagttatagatgtacagtactaacaacactagaagtaaatttgaatgagaaccactaaaagagattatgaagtgcatgtgctattagtttggtt

SEQ ID NO: 61534 - DNA, 313 bp, Oryza sativa
gtggacgaggttaccttattctttatttcacttggactttctgaagtccatccagacattgggttcgagatttctaacttggaatcctagctgttaatgttgaaattgttaaattctttgcaatatatgtgatatttgcattgttgatgaagaattaaatcaaccagttcttttactcctgcagtttaataggactccaattgaagttgccgctaatcgatgcagaaaggacattcgtaaaatgttgtttcctttaaccttaccaatttcaacactgcctgattggagtatcgatggagttatctctcatgtg

SEQ ID NO: 61535 - DNA, 370 bp, Oryza sativa
  unsure (1)..(370): unsure at all n locations
ntgtgaacggttaaacgggtactgaagactgcgaatctgcttctagataaacaaaggaagaacatgtgtagcctactaatttatgccattttgttgtggctcttcgtgatatgatggagctgacgcatcagtttcagaaactgttgcgtcaaaagaaaaggtttcagacactggtgtatctgcattctgttgtgctgacgctcaatactatttctcactggaatgttatatacttctggaatattctgttgtgctgacgctcaatattatttctcactggaatgttatatacttctggaatattggtctagntttaatttccctctacagacgatatgatgcttattaatattagcagtatctgtaaagt

SEQ ID NO: 61536 - DNA, 249 bp, Oryza sativa
  unsure (1)..(249): unsure at all n locations
agcttgcttatgccctgtagctctcttatctctccttcaggngcaagcatgtgcatgccatcgaggggaaaaaaaatgaacagtagtagtatcagcaataacaaaagatcctggtagtgtaatgtagtgactttcacagttcgatcatgaacacattgatcattgatcatgctagtgatcaagctaagaaaggtggctttctcatatggacaaagctttcattggttggggtgtgtaacgacatgagag

SEQ ID NO: 61537 - DNA, 392 bp, Oryza sativa
  unsure (1)..(392): unsure at all n locations
tctcacttagaggcactggtctcgatctcttattattcttacatttnggctctgtttgacatgtctcatacaatgagagagaaagagaaatgaagagaacatgctgtctttcatgcagatcacaggagaattatgtgttgtcctcttgctagattggcatgaagagggcgttgttgcagttgagtgtatcggtcgccagatacgtatgtgcactgattttgatccttgaaattgacttagtcttaataatctatctggcgtatactcatttctccaagtataactggactaaaagtatttgcattttcttaattaccgtaaatttctgatgtgccatttaaaagaagacttcctatacatacttcctcattcatatataatgcacacttaat

SEQ ID NO: 61538 - DNA, 417 bp, Oryza sativa
  unsure (1)..(417): unsure at all n locations
gcttgccaaccgctactgggttcgccttctttcttatgacgagatgaccaggcatcagctccatgggtcgaacttttttgttgtaagttgacgaagtgcttgtggtgtacttgtgcatgtgctcgagcgcttcgactcttactccttccaagagttcgagcgatacttcgcatccctcttcgcccccagagaacatcacccttggtgagttagcccctagctctgctggggtcattgcctcatcgccataaagaagcataaacaggctaaacttggttggtcttgtgggggtcgtccgaagggcccagagaaccgatagcaattcctctggccatttgcctttcgctgcccnctcgagtcttttctttaatgcttctagcatcttgccatttgtacgttcggccgccccatttgact

SEQ ID NO: 61539 - DNA, 384 bp, Oryza sativa
  unsure (1)..(384): unsure at all n locations
taagcaaagccttgttccacatgcattctttccattgttaaagggttatgtcgtgaatgctcgacctttcatctgatgctggagcggctntgctagttgttggactcgtcttgagatggtttcttttcatcctggtgggtagcaacttttggtgctgtcttttagaggttgtggacactgttatcttgtgggatgtcaccttgctaaaatgtactcaaaccctgctgaactatgtaatatgcagtagctggtttgccaatctttttcacaaaaagagaaaaaattctgatgtctgttggataaggtggagcttcctgttaacatttgtttccgattccctgagtgcttttctattttataccatagaatctctctgaactggac

SEQ ID NO: 61540 - DNA, 369 bp, Oryza sativa
  unsure (1)..(369): unsure at all n locations
agcttgctgcctcctgttgccaaagctagttaaatgaaaacattaaattagtatagctggacggtttttcttgcagccttatgttcttctcttcagctcatgaatttctatttatcataggtagaaagtggcaacaacattagtatgagctntccagtcaaaaaaaaaaaacacattagtatgagctagcaacacttttgagtttacatgttctgaaaatgcataaggatttcagattagtgaaattaagtattctctagtcaaatatattggacgttgggaggacaaaacttagctctcccaacatcaattatatttgactggagggagtatttgnggttttattttttaaatttctggtggtacatg

SEQ ID NO: 61541 - DNA, 359 bp, Oryza sativa
  unsure (1)..(359): unsure at all n locations
tgttcttgctggttgtctcacctcattaacagtgagtattctctactaaataaaatcattcatcagtatagggtcatactttntgtgtgcttatttgtgttgaattttaaaaatacaggtgatgacggctctatcagtttcacttggttgggttgcgccaaatctggtatgtcactgtaagatattattggacctactataaaattagcacatcaagtcttttgtttactatgtctaaaggctttcacgtattcttggcacattatgtatacatataatttgtcgaaatatgtgttttcctccacctggactgcatccacattggatcagaccctgtcaagtggcccttgtgctaaaca

SEQ ID NO: 61542 - DNA, 434 bp, Oryza sativa
  unsure (1)..(434): unsure at all n locations
agcttgcaagataagttgaaacagttggttataaggtcacaaattttgtacttttgaacaacaggttccaacagagataaaagaaagttataaaatcaacatgctaaatntattttcttgcagcaagattaaataaaacaatattggtaaacttttgctggtaaaatgagccattagtacagtaatagatgtacagtactaataacactggaataaatnttgaatgaggaccattaaaagagaatatgaagtgcatgtgccattagtttggtttaattaaaagagaaggggaggagaacagttctacttttccaatatntttagagggcttctatgggtaaccatttggcataacctanggtcaaggatgctctgataccaacttgtcacgcccggaattctatccaaattccaacgctacatgtgtgtgaacc

SEQ ID NO: 61543 - DNA, 313 bp, Oryza sativa
  unsure (1)..(313): unsure at all n locations
ctttccttgaagctgggtttagcgactacatgattatgccaattatgggattcaggtcaatcatcgaagtctacccttgaagaagttgctgattcttccatgagcaatctgtgtgtgttgcttgggttggttgtgaaaatgtgatcagaccaatccaataagtgtgtggtgtagccccantcaaataagtgtgtggtgtagcttcatatctatgtattcgcagatctacttaatttgcctttgaaaacttcatgaaaatagtacgaataatgtatgtaccccaggacataaatattcgctcacctctgatggc

SEQ ID NO: 61544 - DNA, 439 bp, Oryza sativa
  unsure (1)..(439): unsure at all n locations
agctggtacctgcatgtagcctctttatttttttaggctgcaggcgtgatatcaattctggtaacacgttgagcttagagagtntatagtcgcgcccgaacacaagccacaaacgtagaagtgagagttaagtcagatcagggacacaacagtgcacagacgtacgtggtaggcaaaacaaggtgaaaagaaatcgcaccatagtcgtcaccgcacctcgccgttctattggcgatatcccactttccggcatattttcagcggcaatcttctttccaaaatgcactgtatggttgttgcactttagcccgttagccgcagctaacaggtacccagcctttcgtgtgctcaaggtcgtcgtggcttgctgacacaagcagcgcaacaagcgttctttgcatcgccatgatcggctccttgtaaagtcaatacccggagc

SEQ ID NO: 61545 - DNA, 376 bp, Oryza sativa
  unsure (1)..(376): unsure at all n locations
tgttcagcaaccaagcccaactagaaaagaagatagtcgtttatacgaacttgtactttatacgaacggaaattagttaggttaagtagtgaactcaccagttcctgatagacgacggcatcacttttgttctcaaatgtgacagagccgtccgggttgaccttaccccttgcccgcgcccagttgcgagctctttgttcanggatgtctganaacggngcagggacattcgctgctgcagcggctgcatcttcttgggcccatattgcctccttgccgatgtaccctgcggtgcccagccgatgcgggtgctcattccgctgntgcagtacgcgatgtgcctcgcttgaatccctaaactcttgggtgggcctga

SEQ ID NO: 61546 - DNA, 386 bp, Oryza sativa
atattgtgaatgaagaaatttctttattattgggcatacgccatgcgcacactgctgtaacagatgtgcttaagtccctaaaagacacatgggttcaccacacctggaaatatatggtatatgtggtataacatccgagtaagtaaactcataaaggatttaccaaccgcctgaaaaatgaccattatatataatcagcctaagccataatattggtcaataaaaatgcacactttcgtggcaaaaagcaatgatattgtatccaatccattgcttggtatacccaaacagcaccttgactatataaaaaagtcagcgggacagctatatagatgcttactgtgttgacccttttaagatgcattgcaccaactcctaaaaagtta

SEQ ID NO: 61547 - DNA, 434 bp, Oryza sativa
  unsure (1)..(434): unsure at all n locations
tactaagctttttgcagtctcgcaacctagtagagacagagactactgatcttcactatgacnattcccaatcaccaatcataaaatgaacaactgagttagtacttgccttaattagctataggtgcatgggttccttggattgacaattaccattgcaaccgtgtttttgtcagcaagagcctgcactccatcaagatcaacctcctagctctctgggagaagatcaaagtacctgacctccatgccactgaacacgtcgggcaccttcatagaacagatagcctggccttggggacaagatgttggcacgctaggacaaagcagatgatctcaacatcattggctggtagttcatatggcaagtcatgtgatacgtatcacacaatatacctggaattcacttgaattntatgagttttaatgcagctatg

SEQ ID NO: 61548 - DNA, 421 bp, Oryza sativa
gatggctaatccacatgggtgatcatgagctaacagtaacctatttgttatatatacagcttcccagaatcagctcgctgagtatgaacagaagcttttcggacccaatgttggcgcacctgctcaatcgtcggttccaactgaaacatttcgtcctcttggatttggtttcccacaaacggcaggtgacatccaagcgcccgtattctaccagcagcccgtgccgtacatcttctagcgagtcaacccaagtaatattcctagtaattttacttatggagcaatggaggccaacactcctatggacgacaatggcgcgcccgcaccaacttcatgtgataacccgatggacagctcataacaagtcataacttataagaagacctgacatgttcaatctcctctgtagtgattagtgaat

SEQ ID NO: 61549 - DNA, 417 bp, Oryza sativa
  unsure (1)..(417): unsure at all n locations
ntattatataggaattaaaactgcaattgttctgatctgaattaaaacacttaanaaggcaagccaaaatccttattaagacagccatatcatacgcacatgatatcgaccgtcaactgaccccaaacaagcaacctaaacacacaaactaacaagcagaaactagacaatcgataaactaatgggaaaacgagcctaatgctcggaacggctcctgcggtcggtggagtcgaaagcgtcctcctgctcgtcacctggtccctctgagcgactcctggagcctgacagatcagtctcgccgctgccactgggagtagcggacaaccaacctccggtaccactggctgaacctctggcggctgatgctggagcgaaggagagagtgaacgcgggagctggagctggagctgaagctgg

SEQ ID NO: 61550 - DNA, 390 bp, Oryza sativa
cataataatcgcaccaggatagccagcagccaatgtacatattttggagagagctcataattcaggttcggcgaactagctgagtgcgtgatatatatgtactacctccgtcccaaaatataacaacttttggccatttatctggacaaaaatatgtccagatacatagccaaaagttataatttgggatggagggagtaacttttaccttcttaaaactgtcccatccgcagctaatgtatataagagtttctggccacgtttcactacttccttccaatggtgtactatcaacctgaacagctgcctctcttgctcttatgatccatggcctcttctcatctttgacctttgtaagtgtactgtgtccatgtaccaaatatcactatc

SEQ ID NO: 61551 - DNA, 475 bp, Oryza sativa
  unsure (1)..(475): unsure at all n locations
gacctatnaatactaagcttgctggtgggggcgcatacgctctatagctcgatcgtctcgggttggcctcgatgcctcgggcagagaccaacaaccctaaagcttgccgtagcacgccgaacacgcacttattgggggtcagctttatgccggcggagcggagacgttcgaaagtttccgctatatctgatagtaaagactctcggttgcgcgtcttcacaaccgagtcatcaacataggcctcaacattgcgtcctatctggctacccaaagaaattcgagtagtacgttgaaaagtacgacctgcattctttaacccgaaaggcattgtcgcataacaataagtttctatgggggtaatgaatgcaagtttttcctcatcctccctagccatgcgaatctgatgataaccacagtatgcatctataaaacacaacatgtcgcaccccgcagtggagacgacaatctgatctat

SEQ ID NO: 61552 - DNA, 414 bp, Oryza sativa
  unsure (1)..(414): unsure at all n locations
agcttggattggataatgtgatatgcggctcccttctacacaacagtaagaatctaccacataagattgagttagcctcttgcaccttaatggagtattgaagtctcttggcctatcatgtagcctatatgcaaagtactccaatggggtcattttggtgcatttaatggcttgactacgtgctgttgtattgtaggtcagtttctcatgataaccatcctctccatatgggaataaaagaggatattgcattgacataaacttgcaatggttntcatttatctgctgcaaatttgaagaacggtcttgtattataatatcccgtcctacatcagttgatccaatatcacccacaattagaccaacaacttcagaagcaaccggagcactgtaatatctccatgtgcatccctt

SEQ ID NO: 61553 - DNA, 440 bp, Oryza sativa
tcatgtcctcttgtggtgttcatgcgtgatgtgcatgcgtatataagtttaatggagtgattcgtccacgtggattggagcttatgagatgtgagcatttgactcgatgatcagcggctagttcgtcggtgctgcgcgatcgatcatatctcgatccagagcttaatcgtgtcaatcttgttgatagggcttgaaggagaacatgtggatggcaatgatctcaaattctcaggtcatttgcgtaaacgccatcggcggcactccggctgagcgagccgacaaggcgcgccacctcctcgcggcgggcgcggcggagccggtctagcgttcgtccggcaaggagctcgtgcaccgccgcccagctccttgcccgctggctgccgccagtgcagctgctccctcacgcgccgtccgtggagattggagaagggaggagagag

SEQ ID NO: 61554 - DNA, 400 bp, Oryza sativa
actaaccggcacttgctccgatgagcttgcttcttgaggtaaggacataagagcaagttttgctgcagcggattcaccctccttaactgtgtgaaagtattccggactttcaaatgctttgccatctacagtcactactgacttgaaccgagatgcatgacctggaccttcccgaattgtttggtacgaaggcaacagattgcccttcttctgagcataaatttgcaactgacttttgtaagaagattggttttctgcaataagaaaaatcattcatatgagaaatatagagaatattaaagtgaaaaacaacaattttcttacaccatgccagtacacggtgctcttagaacccgcaactacaaatgttacctattatatactaaaagccatcaaacat

SEQ ID NO: 61555 - DNA, 425 bp, Oryza sativa
  unsure (1)..(425): unsure at all n locations
tggtggtcttcttcctccctccataaagatcttaacatttattaacgtagaagtcaaagacaaacatctaagtcatatacaagactntaaatcccgggcatctcactatatcatattttttttaccaccaacaaccaccgccgggtcatcacaacttatccttcacttcacctatccaactattgttgtcgatgttcgtcctaccaatgatttgttgttagttcttaggattgcttagctcatagttttgtgtgggaacagagcacatcatccactaagacaatagtgaaaatgctgatgctcttgtggcaccagtggcaggagaagaggctttatggaagcggccatggtcacaatggttattgaggttgtcatataactttatggaaaaactgtcatccataactgactntcctctattactt

SEQ ID NO: 61556 - DNA, 411 bp, Oryza sativa
gagcttgctttgaaggaagaaaagagggtgctatattctctgctctaaaagctcttagaatagaatatatgcgaagaataagaatccattcatttatgaatcgatatgcgcaatagccatagccgaccatggataccgatattgattataatctacttggaggcgagacaagacccgcctgggattgaatcacggatgagggaccaaagcgcgttgcaactgatattaacacgcccggggtcatttcagtaaagaaatacctttgttcctggtcggagactcgcaaaacaagctatcaaaaagatgcgaaagatccaaaccaatctttttctacggctgtaaaacacaggaataagatgcttcacggcatctgatccggaccaggatgctatgatacctcggttgtgggat

SEQ ID NO: 61557 - DNA, 407 bp, Oryza sativa
  unsure (1)..(407): unsure at all n locations
nttgtgtcaccaaaattccaggatcaagtatgtgcgattatatattatatacagcgagtcgtagtcaagtgtcgaagcaacttcattatcatgacaacaaaaatattcatccgtggactcaaatacaaaaaacgggtataaacacagtaactatgcaacggcacgattttaatgtttcttttcctatctgacaaactatgctggacgacatggactcaatacatttaacaactgaggcagcaacaaattaaagcttttcttgtgtaaatatgcatcagcaaaagctcgccttgtgctaccagcaaggtgcgaaaattcatcgcggttattctacaaactatgtgaccaccagatcctctgcagaaatgagcctcanagccatcctcatctctatgggatctcgtcct

SEQ ID NO: 61558 - DNA, 410 bp, Oryza sativa
  unsure (1)..(410): unsure at all n locations
tgctggtattctgaangcacttgattcattaacatgaatgtatagccgtcggattttgtctgggcgtcctcttgttgctcctaactgatcgactactgtaagaaaattctcttctgcagatttatacctgataaattcaagcatcgaactatgaactctgaaagacaacacctcatcattgtaatctgtatctacaggttgaaccacactcctattgacaagctcgttgaaataaccctntgcaacatgctcagcatcttgcccatgcatgctgctcgcaaaaccttcagctacccattgcttaaccaaatcatcttttctgatagtgtaacccgttggatatatacccagatatagtaagcatgtcttcagataattcggaagatntatgtagctaaggtttaatgtat

SEQ ID NO: 61559 - DNA, 415 bp, Oryza sativa
  unsure (1)..(415): unsure at all n locations
agcttctaagctatgtagacatcgggcgtggctttcacctccccctcgtgctgtcgttgtcggcttcgcctccccatacagagtaccgttgtcacctctgcctccttgacatgcgaagtggccgatggctctcccgacgcccattaatgttgttgtagccgccgcgaacctagtgcaccacctctttcatgctntgttctggccttttgggagagagagatggaagggtaagaagtgggaaacaatagaaaggggttcacaggtggagcccaggttctttaataatttgtggctgactaaaccgtcatgtgtgataaaagatcgcttccgattgggctaaaggttattttccgatttgaaaagtccggggcgtaaaatttttgtttttcaaggataatttatacaatcaccatat

SEQ ID NO: 61560 - DNA, 212 bp, Oryza sativa
atacgatcccatagcccggatgttacattcattggtgggggcattaccccctctcctaacggtttacatccggggaaaaaattttgatgcggtacccaaccgcttgcccaatggtggtaaaatcggtttttctattcaaaacccggccgcacgcaaaaataaattggccgaaaaaaataaaaaacaaaaaacccctaaaccctatctccttg

SEQ ID NO: 61561 - DNA, 391 bp, Oryza sativa
agcttcctgtggtagagcagctccaacttctttatggagtattgacaaatctacagcattacatgaagttggggagctatgcaccaatatctgtgtggaaacttagcagatgtattccatttagttaagaaaaaccttctgagaatttgtagcatgtccagtgcatttgcactttaattttgatgtactattcaattgtaaactcttggttataaataagattattgccaattctccattgctacgctatgttcttgttgacatccaatataattctggaaaaagggacagatatttctgtcttgatatataaagagttcaataaaaatattataatctttcgtgaagcgcaccaaaaatggttttactataatagagacaggaaagcacg

SEQ ID NO: 61562 - DNA, 439 bp, Oryza sativa
  unsure (1)..(439): unsure at all n locations
tagcccaattatatatgtggaaatgggaagtggaaatgacaatgaccccttgatcatgagagtatgaaagatatctaacacgagtcacataaattcgacaaagctcaatataatgtcaagcagtcatatgtataacaaggttcatcaatgatatacttgcatatggccttggtaggtataagatgaagtcaattggaggattgagcttttaaaacaattntattttgaaaacaaattcccaagagtcataacaagagttgcaaggattcccttcatcttgaatcatctcacataaagcaattacttagatgcacaaggttccctaaacatggatggttgttcacaagcacaagttcagctgagaataatgaatatacaagatcaatcacatgaagaatttcattagttggaaaatttatctttcacttatgcttgaacc

SEQ ID NO: 61563 - DNA, 366 bp, Oryza sativa
  unsure (1)..(366): unsure at all n locations
agcttggcttgactacacgtacacattcactcccttaccatattcaggggttaaacgattccggaggagcaaaggtaacacaggtttgtagggtttcgttttccattggctcatatgcagattcttgtgattgcgatgtggttcctatgcaagcttgttcacttttgctggcccgtccttgggaacatgataatgatgctacacaccatggtaggagtaataaatacactnttgtgcataatgggaagaaaaatactttgctacctttgacccctgctgaaattgtagaagctgataaagagcgagctgctaatttgaacttgatgaatctgaaatcagcaagggctaaatctgttttcaactaaa

SEQ ID NO: 61564 - DNA, 288 bp, Oryza sativa
ctatatgagctccgattgaagagatcgagctccatacggtatgtatcgaatccggaagaaatcgaactcggctatatggataaaagcaacacgaactctattctgacccaatcctcaacgattctctttgattattgggggaaaagaaagaggagaacgagaggaacaaaacccctcaaaatcccaaaggaattgggctcggattagggcggaatccgagcgggaagcggcggctaaggttctggctctcatcgcggtggacggaggactcggaccggacttacatgt

SEQ ID NO: 61565 - DNA, 388 bp, Oryza sativa
  unsure (1)..(388): unsure at all n locations
agcttatgagaattatgattgcctttgtctttgtcaactaaatgactatcatctcttgtggaggaccgctctttcttggagctcttctttggtgcatctctttgatcatctttcgatgggaccttcactttaactttcaagatatctatcttggagatgtcttttggcctatctttcaggttgtctttcttggagacctctctttgcatatctctcatgttggcctttctacgctcttcccttggcgtatgtctcatttcatccttcttggaaccctcccctggnttatcactattatcctttttggagccctccaagggcatttctctgacatcctttctgctgttggaccctcttcctgattccagatgataggatttaccattac

SEQ ID NO: 61566 - DNA, 432 bp, Oryza sativa
  unsure (1)..(432): unsure at all n locations
tcaatatgaatgccgcgcatggatagagttctgagaatgctattgtatctattaattacgatattttatgtaaattctttagagataaatgtgggtaaaagtctgtcgtaaagacttatggtatcttagagattgttagagataatagtcgtgtccgatttggacatatcttgtaattcttgggtataaatagaccccgagccctatgtaattattaacacacactatcaatacaatctcggcgcatcgtcacccttttacttttgttttgcttcgacgagttcttgcttttgggttgagctgcatcggcttcgatcttcaacaagaggtaagacttgctatggcggcttgcgttctcnggattagtgcttgcatctctatatactctaatcttgctatgaattcatcgagttatcataatcttaataactt

SEQ ID NO: 61567 - DNA, 423 bp, Oryza sativa
tgaggcaactataatagaatggttgtttactgtctgataaaacaggcatatgacagattctactactaactacagaaaattttcaaaatgaccaagtctatgtagcgcatccatgccacaataataggtgaacatcgcagacagtaatttagctaacagtgaagaaagtggtaacagaaatccaacctataaaggtctgtacaaaagcatcataatggaaatagatataaccatacatcagtcttacccactggaaaccaaaaaaagggcagccactagagcaccattaatattaacgatttactctgtgcaaaatttagtgcttaatgcctcaaagacttagcaaggcggtttcttttctttttcttttgcaggtttatccaaccataaatgaaaataacacgcaagaatattccccaaaac

SEQ ID NO: 61568 - DNA, 438 bp, Oryza sativa
  unsure (1)..(438): unsure at all n locations
ggcacagtagatgtggcagctgcacctgcacgcagcctcatcaaccgatgtgattattgcaaggtttcatgaggatttttacaaccctctctactcgagcggcaggacatgtactactcctgggctgcaatgatcctgtgatgctctgccacgctctctagctactcgttagcatgcatgtatgtatcgtcgtcgtcttaccccccaaattccagccgtgaaaccagacgatggaccaccggcgaaactagctnttctatacgttggaagtgtatgagacacaattctcttggcttgaaacgatatcgtaagcttttaagatgaattgattggttagtggttaccttcacagatcaagaaaccgaatgcaattgggaagaaagggcgatctatgaggcaagggagggtggaggggggtacaccatgatgggggccatg

SEQ ID NO: 61569 - DNA, 370 bp, Oryza sativa
  unsure (1)..(370): unsure at all n locations
gctttacttanattacttttatatgtctaagaagtaacttagggaaatctagaagtaatttagacatatcataaaagtaatttgtgagttttcatcaaaatataatcatgtgagatcttgttgtaaagttttaattggacaataacagtgtaatcggaatttaaatcggatgagtaacttaagagaaacttctataagaagaaaaaaatacatagatattgagtgtactagtagtttttttttggaaagaatggtgtctctttttagcactatccagctagcactctcggtgtagttgtgtccattgtgatattgtcacactcagaacaaacaaaaacgtttatcacaaaaagagagaattaaaacattc

SEQ ID NO: 61570 - DNA, 429 bp, Oryza sativa
  unsure (1)..(429): unsure at all n locations
agcttgtttatgggcatgaggcaatactgctctttgatattataatcggctcatggaggacagagttacaaaatgggttgacagccgatgaatattataatctcatggctgatgaaagggaatacttggttcaatctatgttgagagcccttgcanaagttaccaagaataaggaacgcattgctcgacattacaacaaaagattggtgcccaaatctttttcggatggtgaacttgtttggaaattgattttgccaatagggacttgagataacaaattcgacaagtggtcaccgaattggaaaggaccgttccaaattcataaggttgtgtccaagggagcttatatgttgcaaggactcgatggagaagcttatggatgagcactcagtggcaagtactttgagaaatattacccaaagtgttggg

SEQ ID NO: 61571 - DNA, 452 bp, Oryza sativa
  unsure (1)..(452): unsure at all n locations
tcagagaaaccttctgttaaaagttctcaaactgtcgaaatctctcctaatgataacaacgatgctgaaaataacacttctaatgatggttggctatagcattagtttagtatatcccatggttaacaccattagtagaatagcattgctaacacttcttttgcactgtagagcaaggttactcagtttttgtgaagagtttgcctcacaatgtgacagtccagacggttgaggaagagttcaagaaatttggcgctatcaagccaggtggcatccaagttaggaacaacaaggttagtaattgttagttttgacccgagtcatgttatttttttgacactttnttaccataatatgcagattgaccggttctgctttggttttattgagtttgagtcccagcaatctatgcaggcagcaattgaggttggtctttttccagactggtcctc

SEQ ID NO: 61572 - DNA, 446 bp, Oryza sativa
  unsure (1)..(446): unsure at all n locations
cactgaanaaggagagcatgattcgtcaaatgctagaaatgtcctggccacactagttatattatcctcttcctcatgcttgctttccattttcttgtgagcaatgatttgatattccgtggagtcttgtcgcgtgcccgtggtgccaacgttacagcgatgaatgccggtggctgacgaggagggtggaaaaggatgcagttgcatggcacagtcaccgtggggaagctgggttggtagcggtggctatgtagggtaacgaggatgtgggtgctgtggctgcttaactgttactcaggtgtaccgagacgatatccatggaccaactaccataggtgcaggaactgcttctggagaatgcctacgtgtcccgggttacgtcatcatctgagaatgtcacacgctacttggggatgaattgtgcgcacgtgggctaaactcatgct

SEQ ID NO: 61573 - DNA, 429 bp, Oryza sativa
  unsure (1)..(429): unsure at all n locations
cagcttcagggcgccattctcctcaatgagcgtgttcctctcggaagggaacatccccagcagcagcacggcctgagcagcggcacttccagcaagcgacgacacacggaagcccgactgcgcaagcttntcgcgccagctcccaaacttaacatcgccggtgcgtgctggaccgcccacggctagcacattgcggatctcccgtgacaagagttgttgctccacgacatgccgctccgggctatcctcgctgtaactcgcatcaagcgagtcgaacaatgccgaatagtagtggatggcctccacanaacgtgccaggaaggagcctgagtggctcagatcctgctccaccattgttacaacctttggcgccaacctgatttgtgcgggccacagagtcaagatcagtacacaaatttattatgattc

SEQ ID NO: 61574 - DNA, 471 bp, Oryza sativa
  unsure (1)..(471): unsure at all n locations
tcatatcgatgtagttccgtagtgatgcagctcttgatacattatccatgttgcgaatcatggtcagtgttgggtcagtctgtggctcagatctgttgcttggtttcaacaagttttttgttccaccagaaaccgatggtccatctgagctgtcaagctctgaaaatgcctgaagaaacataacataccagttagtgttttaaataagcagctaattgtcagaaggattatatacaaaactgtgcatgtatcagtttcatgttcttctcattgcaaaacaatttccatgtactttgcaggagtcgtaaagaagagaagatggtcgaaagtgacactattcttgtttaacatacaagcgagcaatgcaaattttggcatactagtttccaacaggtgacactgcttctgctttctattcacaatgagtgtacgtcatttcaatctaccaatnggtgcatcttacattacaac

SEQ ID NO: 61575 - DNA, 367 bp, Oryza sativa
gttccactcttgttctgcacctgcttgcagcaagcagaaataaaactgttacaataacacgagaaaatcgtgtcataaagcaggatgaactaagacaggtgcacggcatccaaattctgtcaatactttggtggcctacactcatttactgatgtcttatacagaataacactgaaaacagtaaccgaaaaaagaaaagcagtatgatgagtcattgaagcctgtatatgcctgcatctcatggtggaaagctatcttgggcagttttgacacaagaacaagtttgggggtccctgatctaaacatacatacaatagaagtgcgagaaagtagtcactcacatgtgaaagaacgatatgctgcatct

SEQ ID NO: 61576 - DNA, 473 bp, Oryza sativa
  unsure (1)..(473): unsure at all n locations
ngagcaaagctcanacttagtagcaggaactggctttgtcatcatatcagctgggttatcatgagtacttatcttgcataccttgacatcaccttcggcaatcacacctcaaataaagtgatatctcacatcaatgtgctttgttctctcatagaacatctgatcctttgtaaggcatattgcactttgactatcacaaaatatattaatgcaagacgtaactccacaaagctcagtgtacaaacctctaagccaaatagcttctttacaagcttcagaaatagccatatactctgcttcagtagtaaataaggcaacagttgcttgcaaacttgccttccaactaacagcacatcctccaatagtgaaaacataacctatgagcgatcttctcctatccaaatctccagcaaaatctgaatccacataaccaacaagtccatctctagatctcccaaactgcaaacaagcac

SEQ ID NO: 61577 - DNA, 400 bp, Oryza sativa
agcttcttgatagccttctcattgtcgatgctttgtatgtaatctgttccagcattgttattgcataacttccagttatatgtggtttcatcatctgaagaatttgatgctgcttgagattccttctcattctttgactctgcatcctgtgttttaaatgacccgttctcggtgtttgactcctttagaagctctgattgagccccatcagggaatacctcattggactttgcaccctgacccttctccccactttcatccactgtctcctcaatttgtggctggtcaggcgtgtcctttgagccactgccttcagccttctcttcttgatcatctttcctctcaccatcagattgctcatcatctttcttctcctcactcttctcctcgtcgacgccat

SEQ ID NO: 61578 - DNA, 469 bp, Oryza sativa
  unsure (1)..(469): unsure at all n locations
ntacaccagagaccaaaggaagccgagaccttntgcccaatccaagctattattaggagcattctgctttcagagaggagacgatctttgaaccttcgatcattgcatttntaaagttatcctatcttctgcgtctaatatatataagataataagactccctgcttaatcataagaaaaatgggacatctgttaatgacagaatctaacaatggaactgttataaaaaatatatgactatacatatactcctctattttagtatttagatattacaaggcgattacagatttggacgagctagtagtatttatgagagcgcgtcagctgtgcatgcaagttcatgtgccgcccactcatcatcggctttttcactagcgagcaaccccacaggaacagagaaagctagagagagagagagtgagaaaccttcttccattactactagtctactactctctcgctcttt

SEQ ID NO: 61579 - DNA, 419 bp, Oryza sativa
agcttgtcaacgtcttgaatgtgagcccccttgctccaaaatttgttggggtcatgtgaatttgatgcttaaaccaatttagtttgccatttatagatctgataagcttccggccctcagtaagattctttgacagcgattggtgtcagcagagtgaagataccaatgttgaatattgttctataaagagcggaatttctacagtatcaactctgtttatattttataacgtgccttgctcttgagcatcttttgtagctagaaataccaagggcagaaaccttttatcctaatctggtcaaaacattatccctctttattgaaaatcttctaagagtaagaataaataactcttttccgtgagtatctcgctaactatattgaatgtcaaacttgcattttatcacgtacagacatat

SEQ ID NO: 61580 - DNA, 485 bp, Oryza sativa
  unsure (1)..(485): unsure at all n locations
gacctatgatactcagcttccatttcaggtactcataaaccaacaagggtgtttttctatctatgcagcatccatgcaatatcacaagatttcgatgttgcacagcggaaattgtcgcaacctctgtcacaaactggcttgttccctgatgagatgattgtgaaagttgcttcacagctataactctttcatcaagtagcttaccctgccaaggtttttacatgtgtattttgagcatagacaaatgttgctaaaacacagcacttcaatgccaaatcagataaatttataaccagctgcagttgtacataattaattatggaaataaagaaccttatacactggcccgaatccaccttcgcctagaatattttgagaactganattgtctgtggctatgcttaactcagcataactaaaaacgtcaggtcgtccaaccacggtgtatagttctgcatgttatttttagcacagatgagaagagt

SEQ ID NO: 61581 - DNA, 438 bp, Oryza sativa
gtcacctgcggcatgcaagcttatctggtctactagtttcacagtattctgaacactccaactgcatctctgttcttcggattccccttgtagatgggcatcgtcgcctcgtcgagatcaaccaagaccgtgcacagagtgtacagtgttggacctgaaatcatgctcacgttcatcagttcatctcacaaccttgcaatctactccaaacactcagcatttttatcaataacggaaatcgattcagcatgcattgagtgaagaaatgaaagatgaaaccaatcacctcacctgtcatgtagatcgggtacttgtcatcggtcgtgtccccgaacagcgacagcgccttcttcttggtgtccggcgagagctccggcgctcttctctccctgctaatggagttctcgtcctgcacctgcaaattcacatgggtttagt

SEQ ID NO: 61582 - DNA, 464 bp, Oryza sativa
  unsure (1)..(464): unsure at all n locations
gcaggctgttatggtttgcttgatggaatgacatggtccctacttatatgaccactgtgaaagatcctctnttcatttccttgtagaaaaataggatatccctttggactctttccatggggtaaaagacaattgtgatgtcatccacaacatccttgtctgattgtgctttgattatatactagtatgagatttggtgtgctaatattatggtagatacgtttgggatattatgaagtctcgaggagagagtacaaggtactattcacatttcaactttgacaatntttcttctttcntttccaaaaataagaataagtactttaaaagataccaaattatcaaagtgtataggtattaaactttcattcatcatagactaaccatataacaataattattgtactggtcaaaatttgaaaagtgatgatcaatggtaacaaattatctactacctctatttc

SEQ ID NO: 61583 - DNA, 415 bp, Oryza sativa
  unsure (1)..(415): unsure at all n locations
tgcagatctctcatcgatgatggcaatgcactcaatattcttttcgncaagactctggacgacatgcagatccctcgcacggaattaaagccaagtaatgcgccctttcacggagtcattcccgggctatctgctacaccactcggtcagatcactcttccggttactttcggcactcgggagaacttccgcacagaaaacgtctgtttcgaagttgctgatttcgagacagcgtatcatgccatactcggacgcccagcgttagccatgttcatggctgtcccccactatacctacatgatgatgaagatgccaggtcctcgaggagtcatatacctgcggagcgacatcaagcaagccgttacttgtgacaaggaaagctgcgagatggcccacacccgcgagatcacgctcg

SEQ ID NO: 61584 - DNA, 376 bp, Oryza sativa
  unsure (1)..(376): unsure at all n locations
gacctgcggcatgcaagctngatgcttaatgcaaacggtgtggtattttgactgcggataggatctgttacaaataaaattgtgagaataataaaacaagcactgacaaaatccactgagatcgtaataaactattgatgcataacacaatgtctgtaaattaatgctagcttaaacagcaccaagtaatatttgtgaagaatgtaatccgcgaaatctatgttccaccaacacaaagaacacaaactatactatgtttcgaccattaaaatccatgacactggcactgtggatataaaaagaatatcaaactaacccatccttgtcaaaaatacaaaatgtcctaagttaacaaagctaacacattaatatctta

SEQ ID NO: 61585 - DNA, 461 bp, Oryza sativa
  unsure (1)..(461): unsure at all n locations
tggagactagaagaaagcgagtcagagtntatgctatttgatttctctcagatagaagatgctactagcaacttctcggaagataagagacttggagaaggaggttttggctccgtatacaaggtaaaataaattagatatatacacacacataaaaatcttcaatacatgtttacttgaagtatgaactacttgaactttgtttgaaaaaaaatgcagggccaattgcccaatgggcttgaggtagcagttaagcgactggctgcacattcaagtcaagggcctggttgagttcaaaaatgaaattcaacttattgcaaagctacaacataccaatttagtaaaccttcgaggatgttgcattcaaggagaagagaacttactaatatatgaatacatgccatacaagagtttagacttcttcaatcttgggtatgcttatacattgttntcaaaaaatg

SEQ ID NO: 61586 - DNA, 401 bp, Oryza sativa
agcttgtcttcacatgatgacctattattaatccttttacatctcggctcctaacattatttggaaagaataaatctaaaattattttggtgttccatgccattcttctgctgccaagctcaggtgggccccatccagaagaacatataggaaggacgccataccaatgtgactgtgtgttccaaaaaccacaaatgtcctgcttgctgtcatgtttgccaaaggagaccaaagctgtgtggtgcctagacaactgcagcccactccaatagcccctggcccaagacatgttgtatggatcttgtcttctcaacagaggatcacgtgaccagccaaaaagacacggtccagttgacccaccgaacagcacggacgaacgaggaaccgttcccatatctcac

SEQ ID NO: 61587 - DNA, 462 bp, Oryza sativa
tctatttctcatcacgttcaccacatgggcagcataagttttgcatgaaatgggatcagatgcagtctacagaacacggtacacactcggtcttctatatttcgctggacgatagcaggtaagcatgtaccaagccatccatatacatgtgtcatgcaataaagtagcttggtctccttgtctatatttctatcttgcattcaccacgcccttcaccccagctaacctaggcaaattaaaacatattaactccctttgtgtaaacttttgggctattaatattgtaatatctattggtacaagcatttattcatgcatatacatgattttgcagaggaatcggaggtagttgacttctgcatgctaggatgtgcttcgtctgtgtgcagcaccatgagcactcgtaagcgagaagaaacatcaagctaaattaccattgatttgcaaccaaaaaataaatat

SEQ ID NO: 61588 - DNA, 289 bp, Oryza sativa
tatacaccaacaaaaagttgtatggtacgtagaacatgctaaaaaaaactgagctaagatattaaggtgaagctaacacattggaagtgaatgctccttcctgctttagacgacgccgccgcctagccagatctctcctacaccggccatatctacacattgagaagcagcagctgcaacagcaggagcacccatggctggatcttggtcacgggtcgcggacacgggggctggtggccgggatgggtacaccgggcgatggcggcgtccgcgagagggcatgcaccca

SEQ ID NO: 61589 - DNA, 450 bp, Oryza sativa
  unsure (1)..(450): unsure at all n locations
actctttctgtcacccccatagttcaatattagattcatatgtcaaggatgaaatcacgtgacttcgaaggtagagtattctgattcacacagaacatgcatcagattcagatatatctcccctaaggctatgttctattgaggttgaaagagaaaaaatttctctagtttttcacatacttctcaaattgctaaacaatgtatttntcttaaaaaataatataaaagtgttaacagtgaaatttggtaagcccacagttaccatcggcttagagtcagtatccgcttcaaagtctagaatcagtcgatgggagtcaagtcgccacgatgtcgtgttcttggtggagtcggatcaatctaaggaagcttatctagaagagttcgagttcaagaacgatgcgacatgacaggtatctattaattacgtatagcttgttagcttcttttatc

SEQ ID NO: 61590 - DNA, 417 bp, Oryza sativa
gctggtagttgtacagtgttaaaatgtatttttgtctagaacatgtaacagttgtgctgttgcaaaaaacagatagaaaacttgcaaataccaagttgtgttttcatataaaaacaagttctgtgattgtgagtagagaagataaccaaagcttacaatgtgaatgtaattgcagagaatgaaattgtagtgtaagcattgaaactgcaagcaaaacactaattaactcgagtgttacctgtgttctaattccattactaattgtatccccttcactgaccaaaactcatagtcaaccttgagcaggatgagctgctacagacccatggaagatgtgctgcaatatgaaggaccatcatatgcaatgtagagctacttggttttcttcatttagtgaggcctacttataaagtgtta

SEQ ID NO: 61591 - DNA, 463 bp, Oryza sativa
tactaagcttgtatacgagtatcagagcgtagttggttaggaagcagactatttcttgcattcctgcatattagcgagtataaagcaaatgtccctcctgccatagatacagaacacggtttcattaaataaaaagattaaccaaaagtgctgtgttttaatctactcgtagtgacctagtagtacataatgagatataccttcttcatcatcgtttccccataaagcaatgagagtatacttcagcaatggtattagaatcagagtgtatattacaagtgagagtgccccaagtacatactccttcgaagtaatagggtacttgttgaacattacatcgaaagcatacaatggactggtaccaacgtcaccgaagacgacacctagtgtctgaacagccagcacaatactcctgcctacggtaatttcctgaaagaaaatgcatgatcgagaaatcagtaga

SEQ ID NO: 61592 - DNA, 331 bp, Oryza sativa
ttattatcatagggcatattcttattatctaggggagctccagtctatgctagcaagttaattatatcgacctagaaatcattacatgagctaagttcttctaagtctatgtggatggggatggaactatggatccactggtcctaacaagtgttattgggaactatttggagctaccatgcatatatatactcatatatatgtagcgcgtaaccactattatgcgtttagtacctatactaccaaattgaagccagagctatggcgtgaacagagggagccatatatcactctactaggttgaaatacctcacgtgctggaactatagaa

SEQ ID NO: 61593 - DNA, 465 bp, Oryza sativa
  unsure (1)..(465): unsure at all n locations
ntagcaattggcggcagtagggaaatcctgcactattcagtactgggtgggacacacattaaaagagatggattttgtttgagagttttacaccgtgcttactgtttgtagttttgggaagttagattaagctctcttaaaggagaggatatttttattcttatatcacattagatattccaaaaaaataaattatgggattgaatttcgatagtctgttggtgatgctaatattacgaaacagagggagtatgaattaaccgtctcatatcctccctagcattgctatatctgattctatattgctatattatggggttgttatagcattgtcaatattttagttatactactcacaatcctaaatttctagggttttaagcaaaaatcagtctccaatggtaaccttacaaacaaactgctcagaaccctatctccatcttcagaaatctcattctccacaag

SEQ ID NO: 61594 - DNA, 382 bp, Oryza sativa
aacgtcttataacctaaaacagagggagtaatttccattgaaagatgccatcttcataagatgacactacaccatgtcctaaaagcaccaacagaacatctgtcggcagaggccagctttcacgtcatcttatctgtcggaaaagacctttaccgatagaaagagtgtgtccctgagtagcctgtcgttaatggaatccaccgacagacagtatgacctagatatgttagctttcccgacagacctatctatagtgagatacaacaaacagtcagacaacaatatcaatcattgcagtataattagtattttgattatttgatagcatgggcgagagaccattgtgtactcttgtcatccccaaataactctagaacgcgat

SEQ ID NO: 61595 - DNA, 397 bp, Oryza sativa
  unsure (1)..(397): unsure at all n locations
tcttggcgtgcttcatgtangagcttccctccaagatgtgctccatgatggcggcggcctcgatctgtcctggatggtgcttgagcttgtgagtcacgtggtccgtgtactccggcttgcccgtcatcacctcgcagaacaccgccgaaaggacctccgcgaggatggcaagaatgttatcctcaaagagcaccgtcgatgcaaggccaaagcccacggcagtgccattgaccatggcaaggccttccttgggctgcagctcgaagaagccgccctggatgccagcaatcttgaacgcctcagcggcgttcaccttgctgtcatctggtgcaaccgccacggcgttctcgcgcccagtgacaatgccggcaatgtatgacagcgggacgaggtcacc

SEQ ID NO: 61596 - DNA, 397 bp, Oryza sativa
  unsure (1)..(397): unsure at all n locations
gcttaacgtacattagcaactcctcgatatcttacatggagtttagatcagctttctgtcgttctgcgctgctacttgtcctcttggttttgctccccctttcagctagcgcatcaaccaaagtaagatgcatgcttggggcaattttatagtagtgctggctactacctctaatttcttatgcatgtcatatatataccaacaaattaagagatactaacatgcataatagatgtataatacactgtcacattctgtttggagtttgtatagaggttgtccgttgcagnggtgtctatttctctcttctctcttctctcacatcactatgtagtattatgtggtatctcggatttatgtttatacgcccatagtattgctcttagtgtcctctctc

SEQ ID NO: 61597 - DNA, 464 bp, Oryza sativa
  unsure (1)..(464): unsure at all n locations
gcagattcgttctagtaggataaggataagtcacattctattaaaatcctttatatntacgaacggaaagagtatttcgttgacgaggtagttnggtttgaaatggacacacttccttaacaaatactccaacttggttagagcaagcaaagattcatgtgaccttatattacgagataaatgagggaaaagcgaagagagagagaggatataccaactctcataacaaagataatctcaacacaaactctaaaaattgatcaaggcaagataccaatagattaaaagtaaacaaataaagaaaatttattacaatgtattagagtaagtgtgttatacatatcacctcttaattaatgagtacatgatgtgcacaacgttagagttgactatcacctgatctattataaaccctgcactcgtactatttcgcaagagtcattagttatcgagttgagcatggt

SEQ ID NO: 61598 - DNA, 450 bp, Oryza sativa
  unsure (1)..(450): unsure at all n locations
ntacgttntcagtaatgttaggacgctactgaagttcctgtaacatcgcatcatagaattgcatctctgcatgatctgaggtaatgcgtctccttacccaggtagcagacgtttggtcctgtggtgtgacactgtacgtgatgcttgtcggttcatacccgtttgaagatccaggtgatccgaggaatttccgcaaaacgatcagcgtaagtgctccatttccctctgttcatcatccaagccttttctacaccttgcttcaatggtgagtctgaaactctgaatatgcatgccttgttccacttgacagagaattcttggcgtgcaatactccatcccggactacgtgagggtgtcttccgactgcaggcgccttctatctcacatatttgttgccgatccttcaaggtacttaatttcacacactttacctcccagtttaagtgagaa

SEQ ID NO: 61599 - DNA, 411 bp, Oryza sativa
  unsure (1)..(411): unsure at all n locations
agctntataaagcatatgacacaacttcttctttcatattgaggaattttatcaattcctagaccatactttgaattaatgcaatcctcaaagcagaaagcaggtaactgtgcttgcaacaatcttaagaattgcaatgagttcagctctaaggtccgcagtttttgctgatctgaaataagatgcactcatcatattttgagctgaagagttttgagtactgaatcatgcaatttgtaaaattccaatattccagaccaccagtttaactgagaactagcataatgcctgtgttgcaacggattttttttaaaatagctcattacatatattttaaagcctataaaaatatagtctaatatattatcatcatactaattcttgctgtactttctaggtgactgttcagtt

SEQ ID NO: 61600 - DNA, 469 bp, Oryza sativa
tctctttttatgcaactatttcccttctgttttaaagattatactgtggctgatgtattcatctttgcacaaattacatgttatgctccagtatattagaagaaaacacatagtattatcgtatagagaaaatagttatacgggaatggtataacatacatatataactattactatatactggcaaataaggactgacctattttcctcttatccaggcaaaccaaactaagtcactctctgatctccagcaagttaaccttcctccattcctctcccattggaatatcacctgctatgaatatgaccaaacaagctagcttgtggtgcacctgtggtgtgtgaatctggaggacatattgatgctatatgtgttgtggttcattagaattttatattgaatatattgcacgcatagagaatatgtgccttatgacaaaagatacttgtgcgtgttctcaatcaatcg

SEQ ID NO: 61601 - DNA, 434 bp, Oryza sativa
aagtcacctgccgcatgcaagcttgtgacttgatcgaagttcgtggcttgaacgatatgtccaaagacatcaactctaaggcctacttcgcaatccatccatttgcttcgcgattgtgaagtatatctccgagtggaaacgatgtgaccaccgtgaccgagttactttgaaagtagtgagataatttcctgacggttattaagacaccatataataacttttgaacctgaggatatcttgtcttggagtcggctaaaacttcgctaacgaaataaattgaacgttggactttttgaatatggccttcctcttcacgctcgacaaccaggactgtactcacaacctgtgtggtcgccgacacatataacagtagcggctcttgtggatgtggcgaggccaaaactggtggagtagtgagaagtttcttgaagtct

SEQ ID NO: 61602 - DNA, 421 bp, Oryza sativa
  unsure (1)..(421): unsure at all n locations
actatctgaaggtgcatnttactgattacctagttttgttttaagctatcgggccacagagcaatttataagactgttacatattcattatttataagatcttcacgtacatctagattttgcatggctcttgctgaagatatcctattctacaacttaaccatgatcaagtatttctaagaccttcccggcgaaaaaaagtatttctaagacctatgctgtactttgtgatagaacacttacaatatggtctatgcattgacaaatatacttagtggcccagcattttttgtcttattttgttcatgagtggtccattaagtgaatagctgtaataatagcccgtatatattattagctgtgtgtttattcttattataaatctggaataacccgcctacaggagcttggagttaactgt

SEQ ID NO: 61603 - DNA, 434 bp, Oryza sativa
  unsure (1)..(434): unsure at all n locations
tgacaacgataacacgttgaagttttcgagggatgttggtgttatctgngtacaagtagtagtgctcaagtggcttgggttgatgttcaaagtggacagtcggtgtcttgctcgttttctgcgatgcctttggtaacgatgatgtgatagctgtggagtcgaagctgctgtgtcgctaggtgacaagctcggcaacgataacacttgccacgcgaagtcgaagcctttgtgtcgctttcaacaagctctttatcgatggctggtttgggcttcgccattctttcttttttcgcggtgttggtagcttatgttagagtggtgtggttttcgtccagtttttcctaattaactgcgcattgtaaggatttgtctcgttttcttctctaaatgagacacattcttctttatataaaacgtcggcaacggtctgactg

SEQ ID NO: 61604 - DNA, 374 bp, Oryza sativa
agcttagagaaaaccttttagctatgttattaatttgcatggctgtatcaaataggtgccggttcttggtaagaacaagcacctattgttctgcacagcacgagtccacattggtgctcgtttctttgttagtggccttggtggcggaagggtcatatgtgccggcaccaatacttctcactcaggggaattagacaagaaacaacttataagtgtcagctgggttggctggatgaaagtttttttaatagtggttgagaacatattaagcgtatattatatattatgtaacatcgcaaaatattatagagcccttgaaaacaagaacccacttctttatttcaaataacttgtagatacaggaaccaacaatt

SEQ ID NO: 61605 - DNA, 438 bp, Oryza sativa
gtcatgacaaggcattacctaagccgacacatggttactatatgccgacgagaggggtcccagaccaacaacaggttatgttccagaccatactgtgccaggaagcccaggggtcctccccgacaccaccccggcgaatgcacatgtctctcggcatcaaggctcccctgataagctagttactcagccaggggtgtcccattccacccatgtggtcgtactagtcttatgtttggatgaaattccaaggaaacggtccttaagtgcaagagcgggaaaccgtacacccggttcgtatcccggtccgcggttatggaacttcatttatttcacaagcaccgacccaggtgttgggttttccacgtctttttgtaaacccacgttttacccaagaagtttttctgatttaagtttgaagacgtccggcgatactcgcac

SEQ ID NO: 61606 - DNA, 312 bp, Oryza sativa
agcttcccggttagctcgcttttatctttttcgttgtatttgtaatcttttctatttttgcaagacgtggatctgtatgtcaacaattgtcgttcgtgtaccctggatggttctggacagggattcaatgcccattcagcttagaaattctggttcgacaatttctgggcctgacaagttggatcagatccgaccttcgccgtacgacaagtcaactggtaaccctaatagccctatgaaccccttcttatatgctaatgctcctttgcacttgcaatatcgtttgcgaaaattagactctctcactctttg

SEQ ID NO: 61607 - DNA, 464 bp, Oryza sativa
  unsure (1)..(464): unsure at all n locations
agatgaagagganatcggtgaagatgttgaccaagctatattcgatatgagtgacacagaaagaacaccatcggcttcacccaagcaaacgcctccaactccttctgcccacgttcattntacaagagtaagtacctctctctgacttcttctgaaattacctccctcttcggctaattacccatagactntgtagttgcagaagaagaaaactgctgtgaagaaaaaaccagcagcaacaattgttaaatcggctccaccagtaagatgtccttaattcttttacttaatcaatctcaaccgattctatataacacttgtctatttcgcagcctcctcctccttctcctcctgtacagcaatcatcaagtgatcagactccatcggctgtggggagtcatcacgtcgaagaggaaaacaaccagctgctctgctatcccagtagtttcctttgctccacaata

SEQ ID NO: 61608 - DNA, 302 bp, Oryza sativa
  unsure (1)..(302): unsure at all n locations
atttttggagttatanatgatggagtaaaaaagtagttgtgtgggtagtgtaaattttaaaattgatggagatttgattaaaaaaaaagaaaaatgattgatggatattaaagttaaatgttaaaattgaaatgtaataatgaatatttgattattgatataaattaaatattataaaagttaagttatatagaagtgatgnaagtataaaaggatattttttttaaaaaaaaaatatagattaagaggagagagatatgtaagtttgatnaagaaaatgataataaatgtagtgagttata

SEQ ID NO: 61609 - DNA, 470 bp, Oryza sativa
  unsure (1)..(470): unsure at all n locations
tgcgacgtcattaatcgatgagtacgccctgctgggctggctctccatgctgacttgagtcaatctgtcaccgaaaccaggcctcgtggatcgcattaactgcggtgcgcacaaagatatggcgctggaagatttccaccgcagcgcgctggcgaatcanggcttgctaccccgtttcattgaatttggtgcctgtagtgcggaaatggcaccagaagcggtactccacggattacgcccaattggtatggcttgcgaaggtgatatgttccgcgccactgcgggcgtaaacacgcataaaggcagcattttttctttagggctgctatgtgcggcaattggccgtttgcttcaactcaaccaaccggtaacgccaacaaccgtaggttctacggcggcaagtttctgccgtggcctgaccgatcgcgaactgcgtaccaataattcacaactgacggcaggtcaacggt

SEQ ID NO: 61610 - DNA, 471 bp, Oryza sativa
  unsure (1)..(471): unsure at all n locations
ggctatattatgtattggtagaggaaaagagagagcaatagtacactagtaccaatcagcagcccgatggatcggtagatagatttggggcattctccctttnttatggccttggccctacatatgtacattgttagaactacttgtgcaacagctattatgacttgcctctccctccaatgactcttactataaagttatagcctacatcatgattcactaacaattattacatttatattttttaaatagtacagatacatacatagtttccgtgtacgacagaaaactcgaatggcataagatatttcggcttaacccccaagcaatcccatgcgagtctaatcttgagaacagatccaaaccaaaattatatttatactgcaatggtatgaaaagaaacaaaaaataacttaccctctcaaggcagagaaagtaaaaccaggtgaatcatacaaaanaatttgaatc

SEQ ID NO: 61611 - DNA, 416 bp, Oryza sativa
actaacatcaggggtacctgtttcttgaactataatccccatgtgctctgaacgtaacgttatcagcagcgagaggagttctggcgttcccggggtctttagaaagaactgattgtatgacaccatgtcatcgcaatcaaggttcacaaacaagttgacgtcaataaatctcatatatttacttgcgcctcggtaaatatcacaattgcccttcgcggcataaatttgcctcctgcgcgaggacttaagaagaaccactatacagaggtaccatctttgctagataacttaatcagctaggtctatgcccatacgaggattgcggtcgtactcgtatgttcttcacatgtacttggcagtcttatgtcgggtggaacattactagccacccggaaaataaccgtttctaccgtact

SEQ ID NO: 61612 - DNA, 290 bp, Oryza sativa
acaacctaacacatggggacacgacgggaacccacataccacccaggagaaaagcatagcgagccggcagagcacccatactataacacaaaatagcccaaggcaaacgacaggctacaggagaacacacccgggataactgaataagcactgacccaacataacaaggacaaaactccacacgggaaaacacaaaatgacaaaacaatggcacattacacacacatgtacacaaacctaaatgaaaacgttccacacacgcaccaaaaaaacgtggaaggaaaaaacca

SEQ ID NO: 61613 - DNA, 356 bp, Oryza sativa
  unsure (1)..(356): unsure at all n locations
agcttctagaagggttctatatgagggagactattatatagtgtatgtgggctggtagggaagaagggagaagtaaggggagagaagatcgacaagggttcttgcccaaactctagtcgcccgccgcccgccgtgtgccgatagccgtccgattggccagttcttgttcttgtttcttcttggcgacgnggttgcctaagcggcctcatgtgcagtccggccccgagaaccctgacatatggcattgatgatggacggcaggctggcccctgcacggcgcgacgccggcagctttcctggccacgagttcgtacgcctgcctagctttgccggctggcctcgtgggccgtggcgga

SEQ ID NO: 61614 - DNA, 420 bp, Oryza sativa
  unsure (1)..(420): unsure at all n locations
ttggatgactatctttctaggtttaaccaaaatttgagtganctggatctgttgattcttcttatgatgctaattatccacaatctgagatttctcgtcactttttgaatggtcttgacatgtctatttgggagatgaaagttacatctattcaagagtctgttaatatgtctactttgactttggattcgctttacacaaaatcgaaaacacatgagatgaacgttctttctcgtaaagttgattctaagtcgagtgctttggtttcttcctcttcttctttagatgttgatgcttcttcatctaagccttcttttcttgctttatttaatgccacatccgatgataaactcgaacagatcgaggaggaggatttgactttggttgctaacacagatgctcgagctataaataatatca

SEQ ID NO: 61615 - DNA, 426 bp, Oryza sativa
  unsure (1)..(426): unsure at all n locations
gcttggttctgcataggtgcgtgattacttttatttttncttnggacttcgggcttctcaactaactcatcttcacaggaatcatccttccatgagaaaaataattctagtgcagagacgcttgacaacatgaataggcttcacatcttcataatcatctttcatccgatgaaggttctacgttcaaattccacggttcatcttctaattcgaaggtcctcttctggcgaagaacgagcttacgattggtgtctttgcgatactaggcaaaacgagcttctgtatatttcaacatcctggcggtgtcactatcttcaggttgagacatgtgttccatttaattcgaacatcttctgtagcctgaaaatttcctcctattgagcatgcttttgactcatggcttgagtcttgtaatcagcgtggagg

SEQ ID NO: 61616 - DNA, 469 bp, Oryza sativa
  unsure (1)..(469): unsure at all n locations
ntcacttgacaactcattcttaacatctgtgatctatgtgatatcatttcattgggcttccaccatggaaaaattattttcctccagcgatccaaaaagttctttataatacatagatatgtttttttaactgtacatcacctattgtgaaatagaaacaaaacattcttcacacttaagatatcactattacaaaacccctaaatggcgccggttgggaaacccccttaggtgccggttgaccggcaccacgaaggcggcacagatgagtttttcatcggtgtcggttttacaactgacaccaataacaaatgtagatactagttgtggggttcccaaccggcaactaagatgttttcacgagccaaaaaaaaggctcagatgcatcgagcagctcccaatcacctaaatcaagaacacatccatcaacacatttcaccattcatccagcaacacatttcaccattca

SEQ ID NO: 61617 - DNA, 462 bp, Oryza sativa
  unsure (1)..(462): unsure at all n locations
nggagttggtgtcaatntgagcagcctccaattgaccattgcgatcattggcgaccctaacatcctcatcaaggccttctgcatgctccctcacttggcgctcaaaatgttgtatgatgcccctcgtacgtggtgaatgttgagggtgctcccccgatcctcctgtcatggttaatgggaagaaacaattcacaagaaatatgtcctatcaactattggagctaggtgttgtccatctccacttctaccaaacttgtgcaaacgagttcttacatgttcttactttgttatgtaaaaggcgttggcaaacagcaagaacagcaacaatggttagtagtaccggaatttaattttatttcacataaaaaattaatttatttcatttattntatttccacaaattatgtcaaaattttctgcactnattatttattctcattagtttcataaaatgcacatact

SEQ ID NO: 61618 - DNA, 405 bp, Oryza sativa
  unsure (1)..(405): unsure at all n locations
agcttatataaaatgtagttagtaaattcatttcttaacaaacatattatcaaaatatatgttatgttaaattgaataaaactaatttagtgttttagattttgttaatgtttcccatgtgatcaaacttaacaaaattnggttaaaaaagtcaaaatgacttttaatactccctccgtcctgatttttgagggatgtgacacatcctagtactacgaatttagatatttgtagttgtaagatgtgttacacccctctaaaattgctcgcttatatagtgggatggagggagtataaaacagagggtatttcataccgaaggaaacctcaaaaactggtgttgccatatgacaacgttcaagagattgataaactgatgatcgattgcgacttggagaatagcag

SEQ ID NO: 61619 - DNA, 466 bp, Oryza sativa
  unsure (1)..(466): unsure at all n locations
tcaaatntcttcacaaaagaggngaggtcatgccattatttctagtgaatttattctaatgattatatacaaatcggaggtgcctaaaaggttagcaacttcatcctccaatgttttttttttcatattacatttggagctatgttttgcacacttttttgtctccaaaattttgttgttagttgatgagagagaaaatttgtgtggagaagaaagaatatatagaaatttagtttatttgctaaagaaggttttataaaatagttgagatggaaaatatagtgaaagttaatcttgaataatagaaaacaaagtataatgaaaaattaaaataagtacaacacattaatattagtttaaaactttataaatagtaaatatataattattcagtgtaatatttcataataattgtatgaataatgatatgtcattattgtgtgactgttgaaagagtttgtaatta

SEQ ID NO: 61620 - DNA, 416 bp, Oryza sativa
cgcctttatccgtgcgcgcgattcttatttgccatgcatcaactgcggcgagaccaatccgcctgatctgcatggtggccagtgggattgcggccatttcaagacaggaggtgcttaccctgaactgcgctttgaagaacgcaacgcccataagcagtgcaaatcctgtaatgccggagctggcaagtacaccgccaaagaggcgaccgtggcgcagcaataccaagctgggttggtcgctcgttacggtcagggatacgtcaactggctcaatggtccccacgaaatgaccaactaccgccgtgaagacttcattcggatccgggatgagtaccgcgacaagctcaaagcactgaaacagcgggaggcagcatgaaaccaatgatattcgatctcaagctacctcattgggcttt

SEQ ID NO: 61621 - DNA, 472 bp, Oryza sativa
  unsure (1)..(472): unsure at all n locations
ngaatggacaagacatcacgggcaagaagagatagcacatatatacatctttgtgatgagctttccactatgacaaaacatcaaatntatctctattaggaaccaacagggatggttcagccttatatttatccaagtcacttgcatcacttccactatccacacttaaggcgtagacataattcatgaaatcagaatctgcttcttctatggtatgaatttcttttggttcagcattgacagtagttgttggtgcaatattaatcttataaaaagaagcatattcttgataaaattgattaacaacaccggtaaacttttccatatgaacatgatatgattgcttcccatacagcctcatcatcttatactctactacctgtcttaaacctactgtccaagatgaagtttctccttgggacatcgttcataaaacctagccgagccaatcgagcccacagtcgacgctatc

SEQ ID NO: 61622 - DNA, 389 bp, Oryza sativa
ctctcttgctttctgtactggtatcctcaataatggatgcactgtcagcagctatttacagtctactccctccgtcccaaaaaaagtccaattcatgtgtccagattcatccctagaattgggcttctttagggatggagggagtagatgacagaagcatttatgaattctagctgattcttttggagtggccaatgacttagtggaagttcagcatctcattccaacataacgacaagatataattttggcaccaatctcacactaatgaagcaagcatttggaaagtagagaaatgtgatattgaagtgtcctagttcctaagatcaagcgatgccaatcaaattcagatgtcctatcacatttatttcatcttatgcctgtttcta

SEQ ID NO: 61623 - DNA, 338 bp, Oryza sativa
  unsure (1)..(338): unsure at all n locations
agctntctaatttgcattttccagctgaaaaaatctgncaattatgtaggtgacataactccgagggaaggcttttgaaaggacaagctccggagatttccacgtaccgtagatgcttcaatttcccaatactcttcggtagctcctttgtgtgggcacacaaaaccacgcgcatatgctgaagtttactacaccaatggtccataacagaagctagactttgcttctgtaaagacctgtagcacagtagagtgcgcaactttgtgtgcttacataggctcagcaactgagtacaatcaaaggctatgctatggagtacgaacagatgacgaacactc

SEQ ID NO: 61624 - DNA, 56 bp, Oryza sativa
tgctcgggcagctggaggaggaagaagacatatatataatggttggactttagtcc

SEQ ID NO: 61625 - DNA, 379 bp, Oryza sativa
agcttccatcaaactgggataagtgcctgttcttgaaaactggttgccattcccgccagaaagccaaaaacataagcgataatgatgttattggtctgcacgatgccaaaaaagaatgccatatagcagcacatcccgagcatgattaaagggcggcgaccaaagcgatcggataataatcctgcataaagcaagacacttaatcgaccaatgcccagcgatgagataactatcgagacacccgcggcattagtctgccaaaatgtcttcagcgaggccatattcacgctcattaaaaggacgcccataccatgcaccaagtaattaaaatacaacccaagtgcggtagggaaatagggatttttcataggttctactt

SEQ ID NO: 61626 - DNA, 232 bp, Oryza sativa
gcacacatagaaactcaaccgcacacaacacagcacacacacacatggatggatgcattatctctctcctgcagaattcagtcttcagtgtaagcagggagacagagagttcaatggaaatttttgcatgaccagaatgagagtataaatacgagcgaagaattcttctgataggtagggaattttgtattataggtgagacgaatcattttcttatgtgagttgtgatatg

SEQ ID NO: 61627 - DNA, 398 bp, Oryza sativa
gcttgctcctctgctgctgttcggcggccactgcgactccacgttcctctacagcgtgccgaagagagcgctgctggcgccaacgccaacgccaacgagggtgggcgacggcggcgtcgacgacatgatgagaggccaccgctggtgggccacggcgcagggctggttgctcatggcgcaccgcggctcgccgtgcactttcctatgggaccctttcaccggccgccgtgtcgggctgccccccgaccacgacggcaccgtcctcgccgccgaaggcagccatctccggaggtgcctcctctcatgctgcggtcccatggacccgaccagctgtgtcgtggtcgtcatcgacctcgccgacacggagctctggtattgccgccccggcgacaaccact

SEQ ID NO: 61628 - DNA, 415 bp, Oryza sativa
  unsure (1)..(415): unsure at all n locations
agccacattcattctgggctatagggttgtgaaatatgaatatctgaataagtccttcacgaacgaaatcgacttccgtgccatcaataaacggcatcgcttgcagcgggacaaacagcttcgcgccgtcgtgttcaaacagcagatcgtctttgtccggctcgctaacactgtcgagcacatagccaaagcccgcgcagcccgtttgcttcacgcctaagcgcacgccgaccatacccggctgctttgccaccagctcacggatgtgtatcgccgctgcgggtgtcagcgttaagccttgccaggcgaaatcttgtgggttaaaggttcctgaatgcatgtccatcgatttacctcacttcatcgctntcagcgtataacagcatgttagtgataatgattatcagttcaaccc

SEQ ID NO: 61629 - DNA, 398 bp, Oryza sativa
tgctggtgagatgcagagatgggacgattataatgatactgtaccaaagccgagcagaagaccagaattcaagcaacggcgaagaatcaacaaaggaaagttacttactccatatcatatcgtttttttttaaaaagagttactacatcataaagtgttcactattagtacatgatcagttgatcaccttgttgtacattactattcagaaaggaaaagtctatacatactaactttttcttactaaattctaacactgatgtgtcatgctatgaatgtatctagatttttcataacttccatctacctaaatcaaacggttgagatgattgttagtaaagatttagtaagaaataattagtatgtgtagcagtgttcattcagaaaacataaacagt

SEQ ID NO: 61630 - DNA, 446 bp, Oryza sativa
  unsure (1)..(446): unsure at all n locations
aattatttgtaagcaagctcacgctatcttactgcatggaaaatacggcatgttgctcaggatagcaaccaaacatgcccctagtatgagacatggggtacatctgtatggctaaaaatattgcatgtataaaaaacggatgaaaaaacacttacattaattcaaaattaagttctaatatttaaaagagtgaattgtaatttgggccacatttattacacgaatttcactttggatcatttttaaaccaatcttttcactttagatgggtaattttgcaattttttcggtttggacaatggcaaacaatttcttcagcacgcatcaacaatctcaatcaaattggtttggatacatcagtgaactntctcatctatatgcaggtcatatgtttaccagaatggagggtagacatgaatagtaaagagagttgggtggtccaaaca

SEQ ID NO: 61631 - DNA, 296 bp, Oryza sativa
  unsure (1)..(296): unsure at all n locations
accacaagcagctgagaacaagccatgctgcaatgcatatatgtgaaagaagagccattccactagcactaggcgttaccacctcatgtagacaataaacatacaatgngaggcgatatcgcaaataaacggacaatccaccaatcgggcactggcgataatcacacttacccacagtgggctgagaacacttctttacctgatcaaagcacctcaaaatccacaatctacatatgggaacaagagaaaaggctgcctacagaaaacgggcttggaaagacccacccatgggttgc

SEQ ID NO: 61632 - DNA, 401 bp, Oryza sativa
agcttggaagtagagaccggaaggtgggccctgttgtaacctcctgacgtggatgtgacacgtggcggatcatggttggtcccggatttcactggacctcaacatgaaactgcctttgcctttcactcgaaggctccggaacggtgagttgctttccaccactgaaggcgtaatttgttcttcgaagacgtatttcgtatagaggaggagtagttgatgaagatttgccgaaagtgcatgggtatttccgggaaagtttcttcctcaaataaagctgcaaacagcaagcgaagggggaaagaaacagtagcgatcctgctgccgctgccctcctcatcgtcctctgctcgctgctcctcgcttttcccaccaccaccaatccgcaaaaccctactctcctc

SEQ ID NO: 61633 - DNA, 494 bp, Oryza sativa
gacctatgaaactaagctgtcaaaccaggttggcatccttgaggaagtgcacattatctatatactgaagatattcaagggttggcatggtagtaggctcatctatgcgtacactgctgctactaagcttgtagagatcgaaccggatcaatatagcatacgatatgagagacctcaatttttgaaagtagcctatatctccacaagtatgcttaatgtttaccactcttatgttgcatgactgtagttcgagactacagagttcaggcatccttccaagagtttccatgtcctgttcttgccagaactgcacattcacaactaaatagctgaggttcggtagaagcgacgagttcatccatgctggcagtctagttagttgcatgcatgctatggacaggtatcggaggtgctgggaggagacaaatcctgtttcccatgttacaccctttcccaagtaggatttaccatgaagttccacaagctggatcttg

SEQ ID NO: 61634 - DNA, 352 bp, Oryza sativa
  unsure (1)..(352): unsure at all n locations
agcttaaggcaagtaacagctggtctttatttattntcacatacattcttgagttcttataggatttgttgctagagggaaacctgattccacagacaacatacgaagcagaaaaaagccttatgcccattgggtctggagagtaaaacgaatacattcttgtaggaacgattgtatattggactccctccatccataaaagttacacatattacttttgacaccaagatcaaggagaaattaaatcaccttggatgttataaaatcaaagaatgaatgcacgcatgcaacctatgagtatttagatgactccttgggttctaatcaaatatttaatttatctcttcattta

SEQ ID NO: 61635 - DNA, 421 bp, Oryza sativa
  unsure (1)..(421): unsure at all n locations
agcttggcaacatggatctggggtgggacaatcataagcggatatatgggggggtcccgggaccaccaaaaaatcctagcccaatgcatatatacatatgtaaaaacaaaaaataactcccttattagtaaattatgatgcacagtcagtcaacttatacttagattcacatttgaagaatttatacttctaatcttgttaatcttgttagtatttagaatatttaagagatatattatttggaccacccataaaaaatcctaggtacaccaccggggacaatctcgagcttctcccctctccggatgatggatcaagacttgggctccctagatctgaagttaactcatcacatcaaatctagctgttggtgatggactggaatgggacggagcanctcaagctcaagcttgtgttgggg

SEQ ID NO: 61636 - DNA, 400 bp, Oryza sativa
  unsure (1)..(400): unsure at all n locations
tacgttgtggtttagatgaatgcgaagaatctaaataattgaggtttttatgtgggcttaacaaagaaattctggacatgcttgattgtcaaagatatacatctctttctcatttgttacaacttgcttgcaatgctgaaagtaaaatagaggaggacatgaagaagcaacatgctatgtttttgtcttctattactaaccatttgcaggaagtgcataatcatgaaaaggaggagagagacatgatagagccttcagttccattgatcacactcaaagtcgaggcacctccattatctgaagagggcatcaaaggtaaacttaatggtgctgaaattaataaaggtgagtgtgttgntaatcaattgaatatgtccacttttcatgctatagcagagca

SEQ ID NO: 61637 - DNA, 419 bp, Oryza sativa
  unsure (1)..(419): unsure at all n locations
gcttcggatgtgcatcgactacaccgaccttaaaaggcatgtctctaggatccttaccccctgcctcgcatagatcagaacgtcgactccactgcggggtgcgaccttttgggttttctagatgcatactctggttaccatcaaattcccatggctagggaggatgaggaaaaaactgcgttcattacccccgtaggaacctattgtatacatcaatgcccttcgggtaaagaatgccagtcctacttttcagcgtactactcgaatttctttgggtagccaaatatgacctaatggtgaggcgtatgtcgatgacttggttgtaaaacgcgaaccaagaaactctactttcagatctagcggaaacttttgagaacctncgctctgcccgcataaagctgaaccccgataagtgtgtg

SEQ ID NO: 61638 - DNA, 241 bp, Oryza sativa
  unsure (1)..(241): unsure at all n locations
tctaacatggagcaaaccactcatcaagcaaactactcatgtgagatggatgaagggggtgcgccgggctgcacggcgcatgggcggngaagcggcgagacgaggggacgaagaggatggagaggcagcaagccgggcggcgctgggctgagcggtcagcctaggggaagaagagagcggagcgctggggcggcaaggcggcattgagcggagcatcggcggataggagaggggaggatgg

SEQ ID NO: 61639 - DNA, 417 bp, Oryza sativa
agcttaattaagtagccactgattgttgctccctctgctactcagaacttctccagagactccagagaggcattcagctccaggcaagctcaccagctgcaagcaagaacccagacagacatgccgtgcctactactcctagtactccctcgtgccaaaaaaaatatagtgttgtattggttatattaaacatttgaccgctcatcttatttgattttttttatgattagtaatttgtattagatgataaaattttaatgattctttatgtgtgactaattattttaaattattttataatttttttaaataaaacgaacagataaacattggacacggatatgtacagctacacttattttgtacggaagtagaatactacctgactggaaatgcacgtgacattcgttaacagat

SEQ ID NO: 61640 - DNA, 168 bp, Oryza sativa
atttttccacccccgattacccacaaaatgggggcttctcttctttcttctattgcgggtttgctctttcgaacttaaaaatgtttcgccggatattaaacatctattggaatagcttggatcacctaaacccaaattccatagttcatattcccaatttcatccatg

SEQ ID NO: 61641 - DNA, 318 bp, Oryza sativa
agtactcctgtttagcacagttcagagaattcgatggcatctcttatttaataaaagtcagtgagcttttctcatccatttggtatagacacaaactgattcgatgtaagctgcataaatcatctattcaccgatttcactaatttaacaggtgccaaattctagtgcctggaacatgatgcagagaagtgtgctcactgctctgtttcatcgtgaaggtagatagcaagttattaaatctgtcaaatcccctctgaacattatatgtatatatagtatatcaagttatcacattcattatctaaaaaaaatagtata

SEQ ID NO: 61642 - DNA, 219 bp, Oryza sativa
aaaaaaatatattgcagaacacagctggttaatccaatgagattttgatgactggaaaataacttctgagcaatacaatgctgtcacgcaaaagaacagaccactcttcaataatttaccttgtaacaatgaatgccaaacatggaatgagagtaaaggatggtgaaaaaaggcataccaaaccaagcattgtcatgggtccaagcacatgttagatgt

SEQ ID NO: 61643 - DNA, 390 bp, Oryza sativa
agcttgccaccagaggcttcatattgttgtcatgtttttgcgggatctttggaggcaagaattgccgctgctgtccccgggctttctggcttgataaccccaaccaacaatgttcttaatagcactttgccagaatctacccacgggcgcgcctgctgtcagaactgtttacaatatgggcagaacggatcggcgaagacgtagacaatgaccggcgcatcttttttaccgtcgaggagccagtgggattgttccatccgttgccacatttcgcgtccggctggtgcgtaaatttctttttcgataagtggtgtactcaggttttcacctttctcggtgacatgtaaccagagatagcgtgcttaccatctggagttcaggagatggtga

SEQ ID NO: 61644 - DNA, 462 bp, Oryza sativa
  unsure (1)..(462): unsure at all n locations
tacatccggagcagcacagccattgttcgcctacgttctgtggaacatcagtacaagatcagcttagatgaaacgagaatccacaacatattctgacaaaaggaatgcaaattgtagaagcacatgtgatgtgtactagtacataactacttcagattttctctgaacaaagcacatttacagactggtaggggaaaaagtttgggataactaactataataacttcatcattctatcgtatgttgagagattggttgaggctattcgaagaagaaagtgttaggatttacatttgtgatcattgcagcaaattgctggtcagtatggaaggcccataatgatatatgatttaaagacactgtcattgttggtaacttggtcctaacatgatcagttttgaacgcaagagcgtatactgtgttatactattctactataaaaaggtgtngtgttacggatac

SEQ ID NO: 61645 - DNA, 334 bp, Oryza sativa
agcttgaactatcttagagtccacctaattgctagagtggagtgcaatcctccataatcttgacatgacattattaggcaaacctagctgcttctactgccgattccctccagtacacatattgcaaaactcttcaagttccaaatgatagattttgacattattttgggtgcaccatagaattagaaagcataatactccctccgtcccaaaatatagcaacttttagctatgaatctagacatttacttgtccggattcatagctgaaagttactatattttggaatggagggagtaatttattctacttgtggtagagaaaattaggcaag

SEQ ID NO: 61646 - DNA, 457 bp, Oryza sativa
tgagatgaattatgtaaatgacaaggcagaagaggtatgtctatttgcattattctttcttatacatgttatagatcttatattacaatataaatattaatttgcagtcaatgttgaagtacaacgatgattatggcttcactgatttgcaaaaatcagaaaatgaggtaatatataacaaataaaaaaaatatttttgtaatgcatatgatatatatataataatttattggatgttctgtagtttgggcagcacaattttcaggtaaaagaagagccaaaaaatgaaagtagtgatgattatgaaaagaacaatcatcgctaaacaaagaatgagagatcatacatgagatctacaaacagatcaaagaacgtatgtttaattgctttcttacataacaattcgtaaagttgttatagtagtacactaataatgatgttttataggaaccataca

SEQ ID NO: 61647 - DNA, 412 bp, Oryza sativa
agcttcgtcggcctagggctacctacatcataaataatataatggaagcattttagagggtggatcatgcgactaacaaggaacaaccatgccgaattgctgtactggctgtctgaagctaagcccgtatacgaacaccaacacaaggccagccaaacaattgaatgcactattcagcggacaataggagtatattattagtgtattgctcagttgaagacttgtagcctcatcttttgcactgcaagaagtactcgtgttactcatggctaaaaactcttcacgtcagtttgtctgcagcacgtgcgtgtgtgcaggtttatctcagtttctcacacgattacggcgatgacgaccagaggcctttctcttctctgaccgtctttcgatcgcatccatctgcattcgtgca

SEQ ID NO: 61648 - DNA, 453 bp, Oryza sativa
ctgcagcaacttagctaatacacttatgcacctctgcttagtaaaataattaagcaggaaactgcataagttacagtattgcataagctagtgcagtgactattagtgtgacatcatctgaggcgaccggtcggtactgatgaataatgaaggcgaccgtggcgatggtggtggtcgtgctgctcgtcgcggcagcgtcgttgcattgccgcgacggaaccgcggcggcgccgcgccgcgtgctgtgagctgacggcggctgcggtgatcagtctgagagcaaggtggaacataaattcggctgcacgaacaacgataacacacccccttctggtgtctgcccgccgaacgcgcacgggccgtgattaatatgttcagctacacgttgtcgtccgcatcgcaaagttaatactcctatattaattaattaatccgtatagattaatactccta

SEQ ID NO: 61649 - DNA, 411 bp, Oryza sativa
attctatggtgatacggagagtattattttcatgttcttggggccatatctgggtcttttccattcgaatcatctaggaaatattattatgtgattaccttgccatttcatgatgacactgtggcaacacgcttccattcagatgaaatacaattcacaattatttccattaacgggctagctgtaggattgatcgatcatttagagctaatcttccatattataaaagataatcaatgatcccttccatatatttatacaagcttttatatttggaatatggcatttgtgaggggtatgcgtacatgatgtacatcacgtacaccggctgggctggagcataggcgaccagtactatacaagtgtcatattatattcagacgtgcatacaggtgcatgtgctcatgttat

SEQ ID NO: 61650 - DNA, 265 bp, Oryza sativa
tgatccccttcgcgatcatcgcgacgggcatgaaggccttgcggtctgagaggtgctcgatcatatacctctcctgctggagcagccgctcggtcggtgtcacctcaagggcctcgcgctataacttcgtgggcttcacgagcacgctcgtcttgaccgcaacctcacccaccgccggcgacgaggtggagcgcggctgcggcggcggtgctgcaactgcaactgcgatcgtggtcggcggattattggcgcggcggatgcgtac

SEQ ID NO: 61651 - DNA, 396 bp, Oryza sativa
tgccagcttatgacaacgcgaacgaagatgataaattgtatcttattcaagcgacgcattggaccacctcttttcctggttctggcattatacatagctcgagcaatacagttatcaaccaaagccaaatcctgctcctcgatttgttcgagatgagcatcggatgtggcattaaaaacagctcgccaagaaggcttaaatgaagaaacatctacatcccaaaaagaaatacaagaaaccaaagcagtcgacttataatctacttttctagaaagaacaatcatctcatgtgtcttcaatttggtggaaagtgagttctcaagcaaagtagacatattaacacactcctgaatagatgtaacattcatcattccaatagacatatcgagaccgttc

SEQ ID NO: 61652 - DNA, 470 bp, Oryza sativa
  unsure (1)..(470): unsure at all n locations
ggcacattcgctggccaaaagcgaatcctaaacatgcacgttttgcacacactttgagtgaatgtgcggtctgcggcttctctgtgcgtgtgagtattgatcgccagtcgatcataaacttgcagtcgtagtagcaggccagattctattttaactacaccgagagtgctagttggatagtgctaaggagtgacaccctcctttccaaaaaaaaaaaagctagtacactcaatatctatgtattttttttcttcttagagaagtttctcttaaattacttatccgatttataatccgattacgtcgttgtgttcgttgcaattaaatatttacaataatatctcacatgattatatnttgatgagaaatcacaaattacttttatgatatgtttaaattactcttagatatcattaagttacttcttaaactantaaagtaaatcagtaagctaaaagtaattacatata

SEQ ID NO: 61653 - DNA, 357 bp, Oryza sativa
ataattcactaacatttcttctactactttattccctcaccgatattgtggaaataccagagatatgatttacagaacgattaattaacctataacaaatacccaaaactattcatcagagaagaaattgtagtaccaaacaccaatacacacgcattgtgacggcggtttttcccattcaaaactttggagtgttttattggtttgcacctacaaccaactttggttatgcgacgtataaacgtggtaacgaacccatccaagctttgaattaatttggaaactctttgtacgaaatggccccttgttacacggcagcagccatttgcgtcttgtacgcatgaaaccttaattaat

SEQ ID NO: 61654 - DNA, 346 bp, Oryza sativa
  unsure (1)..(346): unsure at all n locations
tacaagnggaagcaggacatgccggctcacatacgtaatagggtttacacgtcggcgcgcggctgccacacggaactctgcctgtggctacgcttacacggattgggccgccgagaagccgctgctgcaagtgaactgatgagagaactctgtcgatcgaaggccatccgccacctcggcgttttcaagtccatcagcagctatctactgacgaggaactctagccatcggcgcttgttgctgatcaattcaccagcacgcacgagcttccgtatatacaactttagagaatccggctggaagtagtgaataacgcgtgccaatatttctgttatgctggaatgga

SEQ ID NO: 61655 - DNA, 471 bp, Oryza sativa
taacacaatcaggtaagttttgcccatggtgacaaatgatatggacggattgattgaataaatgcgtgctgtgaatggatggagcgtatatcgaagacatgaagggccggggtatatatacaatgaaaatattcctactctggtcacataatgaccttgaaaagtaaatttcatgcatgcttaggatgcacttgcatcttctcttctctctgtgtagattgttcttcctaattgaggaagcgagaaaatttcatactttgcgcgtgcaccctcctccgttcaaagatatggttgcagcattgcctggattactgccacactactagtctactacagccagcttccacaaggtgccaagtcacatttttgagccccactctggtcctccactggaaaataatatgaaccattgatctcatttcatcgatgggttaagatctatttatattaccaccctacttagtgatagta

SEQ ID NO: 61656 - DNA, 396 bp, Oryza sativa
  unsure (1)..(396): unsure at all n locations
agcttcagccggagtcatgtgattgtattgcacctaagtacagagttaatggtcagtatcaaatttcgattatataattaagtcgtatctgcatggccaaataacctaacataccaagtagcaaagaacaactgttgtgctccgtccacgtccagctttgcagtgaacatatgtcaacttcccacacaaagcatttccttccaagattaaaacaacataaataaatacacgagacaaacctagttaaaaatcacaattgcaacagcacaataggatctctacgaaattaatgaacttaaatttttgtctacctccccattagaggaagtgaatatcacaacatgcacgaanagtaaaaatgtagaagagcaagcagagcaaataaggcagtaaata

SEQ ID NO: 61657 - DNA, 432 bp, Oryza sativa
acctgctgcatgcaagcttgacgagtagtctatacaatgtcttctgttattataagttgataactggcacgtcaatgtctatgtgtttggctgcttgccttggtagttggctaccaaatacttgcctgggtactaagttggtttgctatgctactaaaatttggtgacagtataatacttgtctatatatgtactgaatgttagttttggttgctatgctactaacaaaattcgaacactatagtagaaatttggtgacacttcattaggatactacaataagcatgttttaatactcgtatctatttattcaactcacaaatcataatttgatattaaactagaacacatctttctcatctctaccctaccaaatgttggttggggaagctaagtcctacagctaaattgaaattgtgccaataggaccca

SEQ ID NO: 61658 - DNA, 472 bp, Oryza sativa
ctttcagtttgcatggcttgtcggtcttgctcacccgtgctctagcaagactggtgatcgtgaagtcggagctactacattgacgaggtgcgacgtgtgacaacgatgacatgagtccttttgagttatgcttcggcatgggtcgaggcgttgtcctgacttgttcttgacgaaggtgttggagtcacctgatcacgtgggtgatggtgtaatgacgagcactagcagcttaaacctgccatacttgagccacacacatgtgacatatggtattcgtaccccatcacagaccaagtcatttgtgaagggcaataaaacacaatatgtgagtcatgtgagggtggaatttacacccgcgtgatcatagggcgtaactcttagggaccctgtttagatgggactaaaactcttaagtccctatcacatcggatgtttggacactaattataaatattaaacgtacactattaat

SEQ ID NO: 61659 - DNA, 419 bp, Oryza sativa
agcttatgtcatttagctagactacacaatattttatacttattactatcatcagagaagcccacaacaacatgaaagaggttcactagcagtgggtataaaatttctatttgactacacaactgcacgaacacattttaacacaatctatggttggcataatatgatccatctaaccaatgaaccgatcatttcaatgaacgttaatgctctttaagaggggattagtgtgagatatagatttactcgagaagaggacagtctttttacatcgaggcactatcattgctctgatttcacgatcatgagctcgatagaaggggcctaaaaaattgaaattatgacgggatgatgcagtcttggtcactctgacaataataatcccacacagccaacacagttgtcaaatgatcttttaa

SEQ ID NO: 61660 - DNA, 414 bp, Oryza sativa
  unsure (1)..(414): unsure at all n locations
taagatatcggacaacgatcatggaaacgctgatgggaggtggcatggacaactcctgctgcagcttggccacggaagaaattgatccgcttataaatattataccaacgctagatatatgtgtgtgctttgtgggtgccaacctattttggtgtatggtttgcttgtgtttctcggctgtgagtttttttttctcttccataacatgtctaataataaaacaataacaaaaaagctgcattattaggaaccgctttgttctactgaatgtctgagctgagcctgaaattgtaacgatgtgaaaagggcaatgtaatgtaatggacatcaaacgttntctcatgttcggcagtgtcgggtaggattattatacggcatccttaagagtctccaagacacaaagtcaaactagct

SEQ ID NO: 61661 - DNA, 380 bp, Oryza sativa
  unsure (1)..(380): unsure at all n locations
aatttccaccatccttctgtgatgacatgattcttttgcctgttcattcggctagagaagctctaattggtgggccaaccatctatcgatggatgtatttatttgagagacaaattcactgcctaaaatcactagttcggaatatggctcgcccacagggttcaattgctgagggatacattgcagatgagtntatgacattaagctctatgtacttggatgatgtctagacaaaacacaatcgtccaggaagaatacatgacacatccattgtgaacaaatttaatttatcaatcttcttctgtgctggaaggcccaatggttctcatataactcgagatcttgatatgcttgaatcagaacaagctcatatttatatt

SEQ ID NO: 61662 - DNA, 377 bp, Oryza sativa
  unsure (1)..(377): unsure at all n locations
agcttgngagagcggcactatgactttccttattgagaacgatcactaatacatcgttttctgaaagggcactggcgagagcttatccaacacgccgggccaaatgcgcaagttggaataatcaatgccatgctaaaaggaacattcactttgtgttcaagattgcactgcttctttagaatagggatttattgagttgaagaacatttcttcaggcacattttgtggtggatatgagaaaagaacattcacttggacggcctaacttcagttaattctgattcaagttaacctgaattgactgaaccataaaccccgtttcaacacacttctgtggtatcccagattgactattcaactcacactatcactatcgt

SEQ ID NO: 61663 - DNA, 460 bp, Oryza sativa
tagcaagtgagagttctggatgtacgaagtcaaattcttgtggcacgtgatatctgccacaggagtcgctgaggatcccgaaacagtgaccgccgtcaccgaatggaagcaacccaagacagtcactcaaattctcagtttactatgattggcaggatactaccggaggatcatcgagaacttctccaaaatcgctcaaactatgacacagttgttgaagaaagaagagaaagttttgtggagcccgcaatgcgagaaggcgtttcaaactctcaaggaagagctggtttcctcgccagagttaatcttgccacatactcgcaaggatgtcatggtgtactgtgatgctactcgccaaggatcgtggtgcgtgctcatgcaggatggtcatgtggtaacctatgcctcacgtcagctacgaccatctgaaggcgactaccctacccatgatttcggagta

SEQ ID NO: 61664 - DNA, 327 bp, Oryza sativa
  unsure (1)..(327): unsure at all n locations
agctntggaggggggtctcatgcatcacattctgctgctcacgggccagactgagctggcagggccacaagcgaggaagaaaagaggaagataaaggctgtgttttgattcaaaattttctcatcaaacttctaacttttccatcatattaaatattcgtacatatgtattaaacattaaatgtggatgaaaaaagaaccaattgcacagtttacatgtaaattgcgagacgaattttttaagcataattacaccatgatttgacaatgtgatgctacagtaaatatttgctaatgatggattaattacgcttaaatgattcatctc

SEQ ID NO: 61665 - DNA, 446 bp, Oryza sativa
  unsure (1)..(446): unsure at all n locations
tcctaattcccatcctgatgctcgttggtcgacatgactttntcaccactatgcttctcttccattggagctagcttctactgattgttaattaattactgtcaaattagctatagtttactttgcaaatcctacgctgacttcgagagatgctgcctttattagtggcagatggcagtagttcaactgctatgcaattgccactgtccttgtgagaggacatgaaagcatatatgcaatcagaaagtaataaggttgtggaagtctctgcagtctgtacctaagctactgtataaaatttcttaatgaggctgaagagtagaagctacattctcctaggttctttctgtattgtcattctgcactaaccagctttgatgcatggcatctttcagaatattagttaacatgtctcttaagcatgccgtgaaatattttcaattcca

SEQ ID NO: 61666 - DNA, 418 bp, Oryza sativa
  unsure (1)..(418): unsure at all n locations
gctggnttactttatatacttacgcttttactctgattttctanactttattcaaattaatccaaaaacttgtgctattaattggataaaggtcttaactccctcctttcacttgtctttagatgccgcgttacaagcctgagtacctgtttggtgttgagggttttgtccaggagttgcgtacgatgtcctttgtcattggatttgggactgctcctttctatgcccagattcctcatgatcgtcatgaagagaagtgccgagtcaaagtcaccttgaacagtaatagtgaagatatcccctcagtgatgtttgaagctggaggaagaaactatatccatgcatgtcaagaggtggcaaggatcgccatatgagagctccgtgatcgctacagtgatcaattggccgacactgagta

SEQ ID NO: 61667 - DNA, 474 bp, Oryza sativa
  unsure (1)..(474): unsure at all n locations
cacactcttctgaagagaaatatgtcactaatgtgcttagtcaaacattgttagttgtgcatacaacgtctgcgtaagaaggaggcttaattggacgctaagtgtaccaattcgatccctttttgtagaatagacgccgacccattggagaaagacactgcccgtatattcacaacaatcgtgttcaagaaagtccgtgcacagatatggctaattgctggactcgaagtcataagtgggactaatcaagatggttcgtcactgtatgttgttggtttgaaggacgataatgaggtgtgggatgaagtgagggttactattaaaggccaggcgttggaaggtgtggaatgtcactgccggaagatggagtgcgaagacatcccttgctcacacatatttgttgtactcaagttccttggttntgacaccatccctcgttgttgtgtcctggataggtggacaatgtgagcaatg

SEQ ID NO: 61668 - DNA, 389 bp, Oryza sativa
gaatcagctctatctaaatatatcaaagttcacaccgatgcaaaccgatcaacagatgaaacgatttccacaatgaattaaactacagtgcactcttttttttttacaggaatgaccaaaggaggccatccaaatgacattaaaattgaggggaaaaagttacaagacagcaaattatgcatactaagtgcccagctaatagaataaacaataacaaaatagaacgattaaacctctacaaaaacaaacaacgagatttaccaactctaatagcacaaatgaactgattggttccagtaagggctaagagtagtttcagtcaatctaaatgtaaacaatcacataatcacaaagtcacaacatacgtagaaacaggataaaatcagatg

SEQ ID NO: 61669 - DNA, 469 bp, Oryza sativa
tatatgcaagaattctcagattgatgctaatactgtgtgttctcatgaggtgcaggattgactgcctcaccagcacaagcaatgaacaatcaccaataaacaccattctggcagcatactttgggcccccaaccccattaagttcatttccatcaaacttgatgttggttgggcctgtggggatagcatctgaatcgacacggtcgagtcgaaggatctcattcagccaagcagaaaaacggatcagcaaacttgctagccaggccacttcagagtctgagatgggccttgtcatccagtacacattagctagtgagtgtgtccatggccttggatgcttacgtgcgaatacctcaccacgcccatggtgctgactgcattctctctctaccaagttcatatgctgggaactttcaatgtgttcacggaaaattttcttcatctgggagttaattaattccagagtctg

SEQ ID NO: 61670 - DNA, 356 bp, Oryza sativa
agcagccatataccatgcgagcctgtcttttttaactcatggcacacatgaacaacccttatagtgtacggaacaaaatcaatatttattttagaaggaaaaatcaatattcagtctcgaaaacgaaaacatcatctctttggcccttctgcttatgtaagtagcggtaatttgtcctgcgaaaacacttgaaaacagaacataaaaagctttctaattccatgaaaaactactacaaaatggtattgatatgaatacattctcaccacacctcaaacttatactaattacctgattcttattcattaaaaaaaagctgaccttatacttaacatatggcgggaactatttcaaat

SEQ ID NO: 61671 - DNA, 353 bp, Oryza sativa
tgcatcaacaagcttcatctgtaccctctctttacgccatacctctgccatctgcaacatcttcttttcttcctccacctcatttctcatcttcattgattcactcttcaaggcctcaacctcagctctgtcttccgcaatctccttcgctaattcgacacaaacctcctccattaactccctagccttccggtccttttcataaacttgcaaatatcgcttcgctgctgatttcaactcagatagctcactgaccaacttggaattcatgatttctgccctttgacgatttttcctctctcggttcagttcctctttaacagcatctaagatgtttctaaccttataattct

SEQ ID NO: 61672 - DNA, 475 bp, Oryza sativa
tcttggacgggaattcagcgcggtactcaccagtatccgatgaaccataggctatcttgcaccagagtggatatctggacagcctattacctacaaggcagacgtctatagttttggtgtcctgctcttcgaaataatatcagggcggaggagtacggagaaaattcaacatggaaaccatcgatatttccccctttatgctgctgctaaagtgaacgaaggagatgttttatgcttgcttgatgacaggctggaaggaaatgcgagtttgaaggagctggatgttgcctgccgagttgcttgttggtgcatccaggatgatgagatccacaggccatcaatgaggcaagttattcacatgttggaaggtattgtcggcgttgaattgcctcctatcccggcttcctttccaaacctgatggacggttatgatagtgatatatattctgtggacagttgatattggatctcttca

SEQ ID NO: 61673 - DNA, 378 bp, Oryza sativa
  unsure (1)..(378): unsure at all n locations
ctgcaactatcagtcagctttgcatgccccattctctttactttggacttcacaccaatgagaaccaagtacgtttgtgaagactgctctgaaggccatgagtctgctgagtcagcacgttggtacaagttcatgttcaacactgtaccaatctacaatgtttcgaggtgcatgtatacatggntcaaaacatagtgaagtttactttccaacgcaactgacggtgcatcatttggacttcccaagttggagttattgccaaaatactgaacaccactccagaagagcaacagccttgcgaacccacttcagaagccatttcgtggaggccccttcacatttttagtcttttatttccatctcaattcacactatcta

SEQ ID NO: 61674 - DNA, 471 bp, Oryza sativa
  unsure (1)..(471): unsure at all n locations
tgcagntagtttgaaatgagaatgaaatgtaatgcacagatattatgtggcatggctaggctgcataaattcgattcaaagttcaacagaacaaaggaagttttttttctcgtgaacctttttcataattaggattttgagtatcatgaacataattaccagttatgcatgctggctatctggagcttttccagtgttatgattacatgtgcaatactatactgcaaatatcaatgaattaacattttcttggtgtacttgtgtctgaattgtaggtaaatagtgtcaggctaccacgccatatctcanacaaaaaacacttctgtggcactgccttagttgaattttcagaagaggatgaagcgaanattgttttggagaataatatgttctttgcaggggcaaatctggnataaaactaaagtaagccactaacatatcctttttgcatgataatcatacatgtggaat

SEQ ID NO: 61675 - DNA, 355 bp, Oryza sativa
tagcttttgtttcgctcaaagcgtgttattgatatataaaaaagagaactgcttagtcactacaaatcataactgcttagtatgtgcagcccatgatcaatctttcggaagcactagtacagttttcacgcccggtttactttgaccaactgcctaccgaccacggactacctgtgctccctccctcagattccgcatcgtcaacgtcccacgccggcgcacgttcgtgtcatctggaagatttcctcgacgacaaagccggtctgcctctcgtgtgaaaaccggccgttccgcgtcttcaagtcaatactttacatgtcgcgccttctagcctactcattgcgcgatctcgctc

SEQ ID NO: 61676 - DNA, 470 bp, Oryza sativa
  unsure (1)..(470): unsure at all n locations
ntggtgccaaccaaaacgggttttcatggcatgacatgatgactggttcatacttggtgctcgggcccaacatttgtcagttcagctactacaaacaaccgagcatcccgtctagctgagaagttagtctgaaagatattgccatcccagtaacagtaaaatcattatggccttgcaggacacaaccgagctttcccagggttgagcagtgattctgacattatccaaccctgaggtacagaaaagaggatgttgttaagtcatgcagcaaccgtttcattcaagtggcttatccacaattatatctagtagttgggatgcaagggtcagtatttatcacaaagacaaggaatagtacctgttctctagctttcttcttgaaagttccataagaggaagaaacaatnttgcaggactcagctatgtgtgccatgaaatccatgttacatgggtttccataaggatctgat

SEQ ID NO: 61677 - DNA, 369 bp, Oryza sativa
ctgcagcttgggaaccgaagttcgtgggaagcccaagcccaaaaggccatctagtggcttgtttgtttgatccattgagaagtgagcttgtaggagatttgagatggactttttgccaaaatgaggcatgtatttccgaggctagcaattcgtgaagtgttcaagaaacttaatttctcgtattgcaaaaaaagcgacacaaaaaagtcttccttgaatatgaaatggattatagtgggagttaacagaaacacagttaaaaagagactggtaaatcgtcgatcatcttagctttatgtagctttatgggaaatttggggaggagcccaatcgtagaatttcaactggttcatcacatatatagaaact

SEQ ID NO: 61678 - DNA, 435 bp, Oryza sativa
ctagcagtgtcgccttcatcgtcgcttaaaactatctttctcttgtgagaatttggctggccgactggatcatgagcacttggttgagtttcagaccgaattcttggtccaccgctcccttgcccagtttggtggtgaggagatcggcgttgagcgattgggggatccgacttcatcaaagcaaattcctgggcgtgatatcctctatcgttaactgattcaacaaacagataatattgtattttgagaaaggctgagatgtgtgagtgcataccggtggaggagggttgaatgcattgaatggcacaacgggcagcagatgttgatagctgacaacaattagcgttgagaagatcttgtacattctttctttcatgaccttatagtcaagagaatatggatcttcccgatttggatcatgcttgccatcaaact

SEQ ID NO: 61679 - DNA, 242 bp, Oryza sativa
cgccttcttttggaacaaagacaggtggagacaagtctcattctccgaaaaaaatttttatgtttcaacacgaagtatggtaatacacttctatattatgtagaaacaagatcttaaaatgaggaatgacctaacaatttactcaacaacatggacgtaaatcttaactccttcatgataatttacaaactaacttacaccgttgtttgcccacgtaaaatactgaacccttactatctaaa

SEQ ID NO: 61680 - DNA, 469 bp, Oryza sativa
  unsure (1)..(469): unsure at all n locations
tccaatagttgattgtctagatattgtctttcttttcatacttatggctgcatcagttgagtttgacctcataagtcgtgtttagaactatagtctctagcctgcttcttggttgctgattagagtagcatcggtgtttcagccgatcttacctgatttagctttatgtcttatatgctcaattgttatgctaaatctgccttttatgttaagatcctattgcatttaggtgtattaagctctatgtttgatatattttactttctttaatatcttaatatagagtggtatcggagtattagccgatacacgctatatctatctgatgagcatcggtggccacctgtatgacgcactgccatcgatgtccgcaaccatggtcggccatcttcgtcaccaaccaccgtcccanaccctagttctatgtaatattgtcatncgagtaattgttactcacaccatcaagccc

SEQ ID NO: 61681 - DNA, 420 bp, Oryza sativa
  unsure (1)..(420): unsure at all n locations
agcttgcnaaaacatacacaatgttcttttttattatgtgccagcaactattgtagaaagcgccagtgaaaccatctatgcccgacgctttttcctttggagagtttttaattgcttcccacatttcatcctctgtgaacggctcatccatgctatcatcttggattgtacttaatcctaatgcttcccaatataatgtgcacccacactgtcttcttgtccctaagattgaattgaagtgggcatgaaggggagctgctttgtcctcatgtgtgtgcagggtatttccatcttgctgcaagcaatggatgaaattttttcttcttcgagcattcatctttatgtggaagaaccttgtggtaacatcaccttcttttagccatttaccctagatgcttgcttcttcctcgctttccaccc

SEQ ID NO: 61682 - DNA, 371 bp, Oryza sativa
  unsure (1)..(371): unsure at all n locations
agctccgcactctccgcacagatcggtgggtttgggagacaacaccccncggcatttttaggagtactgtgcccacattggcgttcgacgccagctcactgtgctctacttttcccaacagaacggggtctttgagcgagtgcacccatccgtctatgtaacggcgagcgacatgttcaagcgaagcatttgccggtatgttttaaggggaggcccatactaatgttggttacactctgaacacggtctcttctaaaagcgtggagggcgagaacccctacgagcttttgaatgggtgcacgctcgttgttgaacaccttcggtcattcagctgtgtctctaccgtaaagagtctatccccgggctcaaat

SEQ ID NO: 61683 - DNA, 408 bp, Oryza sativa
  unsure (1)..(408): unsure at all n locations
cagctgtagccggtgaatgtaaacaacaagtggtattcatgttatgtgaactggtccgtgtaagtcagaacaccacaaatctttagtccagaaagaaacaatagagttgagtaatatattgttgaacatttcagcaccgagagtgcacctgatggtttgccacttgntctgttctgaacttctaatggtttgtacttctgtatgtatgttgaaatttgatactgacctcacaaaagaagtcttgtgggtgaccgctggcatgcaaaattagtgacattcctagtcttccattgcgatagaatcagttctacagatgaaattagtcccactagactacagtgtcatcatctgaccctcttattcctggtcttccattgtgatagaaattgataaacttggaatggttct

SEQ ID NO: 61684 - DNA, 459 bp, Oryza sativa
tttggcagccgcccacatattatgggccaatagtaggccttggaacttcatcttcataatcttccacaagtgcctcatacattctctatgttccactcctggataaacatcatctacaacactatctattcctttgcatgcatccgtactaatgaccaaacctacaataagagtatattaagtggttagtcaaatatgaattgaaatgatggaggatgcaagatacaactttaagaatagacataccttttggagtaccaatagctgtcttcacattctgaacaaaccaagtccagctttccttagattcggtctcaatcaccccatatgccactggaaatagcctgttatgaccatcaattgcaatagccgaagccaactggcctctagacacttctaatcagtgagttgagtccatagcaatgtaaggtctgcatacttctcaaaacacattgatac

SEQ ID NO: 61685 - DNA, 363 bp, Oryza sativa
agcttgttcgtcagtccctggcgtggacttgtttctttgagacccctcgtgccgagcccgcgcctgtggttcctcacgagggggaagccctcggcgttggtagcacggaggatgcgctgttgctcaccttccgtcctggcccgtcgcagcggtagacgagcagttagtatgcttgcgcgtgtgttctttctcgtttgacctcttgttggagtcgtgtggggcatgggtatgccggtgtgtggcataactgtgtcggagcctgtctttattttatttgcttaagccactcgaactttaatgaaccaatttaatagcagcaattaattcaagaattatagtagtcgcggatggttagctataatt

SEQ ID NO: 61686 - DNA, 468 bp, Oryza sativa
  unsure (1)..(468): unsure at all n locations
ngtgccacagaacgttgctttcttgctctattatggattaatgcgaaaagattangggctagctcagcaatcgtctttccttgcagccatctgtcactccaaaacttggtatgttctccatttccaaggatagttttgacagccacagcaaaaagagagtggacatttttgggcacattgatggataaaccggcccaaggcctagatgagtctgttttatgcagccaaagccatctcatgcgcaaagcccaccccatcttttctagattaagaataccaagtccccctaaagacaggggtcgacacactcgatcccaagagaccaagcagtttcctccatttgcattgtcactccctttccataaaaaaccacggcgcctcttgtcaatggctgtaagcacccatttatgaagatccagtgccatcattgcataaatagggatggctgaaagaaccgccctaacagct

SEQ ID NO: 61687 - DNA, 370 bp, Oryza sativa
  unsure (1)..(370): unsure at all n locations
agcttgcagctntctcaaagattctgtaatggtgaggaggacttacctgacttacattggctctctggatgaatacagctaacccgcgcaattatcaactccccctcataattttgttgccaacccgtaagttgttaatacatatgtgcaatgcatcgagcatttttcgtacttcaataacatggcgtggaatagacctctctacttttcaacccagaaagactctcctaacccttcagcgcatagtctctaaacgtacttccttggaaatatccgcattcgactatatgcttccccttgactcgcttccatcgcacgcgtactctcacattcactttctgacctgtctcataatattcctctttcaaag

SEQ ID NO: 61688 - DNA, 463 bp, Oryza sativa
  unsure (1)..(463): unsure at all n locations
acctatccacgaagctagttatagctgtacatttgtaatttccccttttgaaacttatcaaattcatagtctctctttttttttattgataaggagagttttgtgaaaaagaaagaattacatggtgtttagggtccgatcctgaaaacaagcatgggctcctcatctctctgaattggaagctccgctaggttggtggctcccatcgtggcgccgtcccctttatctataataggatcattatcggtgtgcttgtcaattgttagaaaattcttaagttgtgttggttacactcaaatggtttattgcttgacttaatgcacatgtgggtcctgcactcatatatcattntaagaacaagaagataaataaaggaaaactacgatttttaacacgtcatgaacaagttctatctttatttttaataggtgatgatattgattnttttgacatatcgttagtc

SEQ ID NO: 61689 - DNA, 236 bp, Oryza sativa
  unsure (1)..(236): unsure at all n locations
agcttattattggaatataaaagtagntatctatgatttataagctaaatattttctgtctgggtatataaagtactccctccttttcatactgcaagatattttagctatgttctaaatcatacttaggataattgactaagtttaaaaaatacaccaacatctataatatccaagtaggttaattaaaatctacgactatatatgtgtgaccatatatttactgggcatcacag

SEQ ID NO: 61690 - DNA, 385 bp, Oryza sativa
gtccttctatgctgcttactagtgtcatttttcttgagccataattgttaccactactggctaggacacgagtagaccagcaactaagggcaagtgacttgggatttttattcagcattactatctgtcattggatagtgtaccactcatatacatatatttggccttcctagctccacatattacttctaggcagcacaggttcttatccctgcaatcgctgactacgccttccaggtattctttgctttgctggtaagaaccttataagagcttggttaggaactccatattgctgagaatcgttgagaagcaccactacacctgcgtagttgattattacggataaccttcacctttttgttactgtttggtggttaatgtc

SEQ ID NO: 61691 - DNA, 433 bp, Oryza sativa
tgaggcatgcaagcttcttcttgaacacccacttgcaccccacatgtttactaccctaaggtcgctctgtcacctgccaagtcccgttagcgataatggaatccattttactacggacagcctccttccagtagtctgcatcatgagatgcatatgcttctgaaattgacttaggagtgtcatccacgaggtacacagtgaaaatatcaccaaaagacttagccgtgcttttgtttttacttcttcgaggagcttcactgacattctcctcaaagacaagctcatgtgtatgttcagtttgctctggtggcgtgattgaaccgggaattatttcagaggcgtggttcgaaccactatgtggatccttcattgggaaaaagctctcaaagaatgtatcatcacgagacccataattgaccaacatgcatgtccg

SEQ ID NO: 61692 - DNA, 458 bp, Oryza sativa
  unsure (1)..(458): unsure at all n locations
tgaagtggatttgtagtagcgtcgtgcaattgacagaacattcagcttgacatatcttatcttttattatccgcagttggagcaatgagatcgatcgatctcactaattccagcacagctagctaggggtaggaggcatcagagaacacaacaatattgtgctgctcatgaatgtttgttctaccagacttcaaagacatgggaaagggcctcttcagacccacgtaagagcacatagatggttgccgatgaagcatatgcaaatattgccctgtggctggtcttggctgagaccatcggctggctcgtggttggtgcgatgcattatgaaagtggcagttatatgggtgagatcgatcgaagacacatgtgggtataactccgatagaggaacgcgaggctctgattgcatgtgtcgccaccacgaccaacacggtangcgcgcgtgtgcgatggtg

SEQ ID NO: 61693 - DNA, 369 bp, Oryza sativa
  unsure (1)..(369): unsure at all n locations
tgcaccttctagggtttagggttacaggggattttacatggttgttcttatgaaagggacatttacatgggtatgcagtgtcatttgcacatatgggcctttaatgggctgataggctgggcctggtctatggcaaacgggcctaaaaggttgggggaggcctgttgggcctccttgatgccgaactcgtcatagcgaaatctttgtagttcgcccgagatgccttcaaccgagatgcctttactttcggagtaccgacacggctttccagccttcgccatcttctcttatggctatcgccataaggcttccgctgaatggtcttgacgtctttggcttgaatccttactgatactatggnttcggcag

SEQ ID NO: 61694 - DNA, 466 bp, Oryza sativa
  unsure (1)..(466): unsure at all n locations
tctctgtatgcagcanaatgggattggtgatagcccgtgtatgcatgctcaattgctgaatgcatacagaaagctcatatgatggatgcttgagtatatcgatgattttttagaccctagtcgtggaggttcacaaatgtggagtgtatgtacgccctagttcatttacatccctgaccgtttgttagttgaccagttctacttgtcttggtggttcgatgaactcaagcagaacttttaaattctagaatttgttgttaagactatttatttaagaatcaatagattgccgaggtgaattatgtttattgcaataattgttgctttcgtcacgatttgtatcaaattttgttggtattatcgcagaggcgatgacgggaactctaggcaaagttgtggtaagcatcaattgaaccggtgaatgtgatgtgaatggtaagaatttctcatggctgttgttatgttg

SEQ ID NO: 61695 - DNA, 393 bp, Oryza sativa
agcttaagatacctatgcgagttcatactctctggaggtggcatgaccacaactcactattgcccattcgtgacagttgaaattcaaaggttgatttttccagccaacctcattcttctcgaatccaaggatctagatgttattcttgaaatggattggttgacaaggcacaaaggagtgattgattgcgttagccgcaccatcaagttgactattgcgaagggagaagtggtaacctttcaatctccactacagcagaagccaggggtcagtctaaactaggccactggtgaagaacagaggcagcagtggagaaaacctctattaagttggaggatattctcatagtcagagagtatccagaaggttttccggaccatctgacaacaatgc

SEQ ID NO: 61696 - DNA, 459 bp, Oryza sativa
  unsure (1)..(459): unsure at all n locations
ctaagctaccgcctatcctgatggcatttaccagtggttattgacggnttccatcgcctgcttttccagctcactgcgctgaatgcgtatattggctaatgctgtacgtaatacgcctgcgataacaatatgctatggttcctgccccagatcgcgcatttccagcacaactttaccgacaactctgcacatttctcggtacagttcatcctcttttgtccgatatcccattctttatacctatttatcatgccaactatcatcatatatcaatctaaccaattanacaaaaatcacacaaaatcagacaaataacgcgataaattattttaactgtagcaattgagcgatgatatatttatacaccggatgaactntcacttatcctcacactgacaacttctgcaccagacgttgcgcaaacagtgaagtttttgcgttaccttttctctggaacgt

SEQ ID NO: 61697 - DNA, 326 bp, Oryza sativa
  unsure (1)..(326): unsure at all n locations
cgtatggtgaatatctttggatgagtataggaataataatgtatacatgaaacatacaattagctaatactccctctcgtccaaaacgtagttaattttagagttcaaacattgtcccaaatctagaaacatatgacatgtaaaaggtagcttttgccactaaactatatggactaccactactatcccttagccctattatagtctgggcctacacctcacccatcccaagataacatacaagtcatacatggtctctcatatattctgcgacggtgggagtattcattttgtattaanactttccgcgcaccaaaagatgccat

SEQ ID NO: 61698 - DNA, 471 bp, Oryza sativa
tcaatctttcacgaccgacttcaagtagccagtatcctacgtaattcattcttctccttgcttacttttcagggtagtctcggctaattcggctattaaactaagcctttgactagtatggtatgaattcctaaagcagttcaccgtgtattagcttcccccttgctttcctggcttggccactagcaagaacagcaaccgactctacttaataaactgctgccacttccggggaaaaactctaactcctaactcaaacctaactaacaaaatcggcaattcgtaatgctctcttcctttccagaccccttttcaggagcgcgcgtgactcgatgaaattccaagatcaaccattcccgaggtcgtgcggaagctgctaagtggaagaagtccataggttcagtaaagaagaaggaaggcgtactataagctgaacaaacacatttgattcaaccggcagaagttcacgag

SEQ ID NO: 61699 - DNA, 464 bp, Oryza sativa
  unsure (1)..(464): unsure at all n locations
tgtggatacggatgancaaagcgtataaccacgttgctttccagtgccccaattcaccgtaccggcgtgcgtgccgctagccccgctatacgattatgcaatatcgtggcatgcaccggcggcgtcacacgtggtggtccaggagcacggccaatttccgaaggaaggaaaaaccgggccaaacggcgcgcatgcgaagctgatcggaccacatcgatcgcgtcgatccatggaccataccagtttgccacccccattggggtttggtttgttaatttctggtcccggctacccagccgttcgatctgtacgtaccccttggcttggctagtactaatgtggaacttactttcctctcgagaagaaaaaagtcaataatctgacaatatatagttcgtgagacaggcaagaagcaaactctctctttctcgatccgagaaaaattaaactgtacagtatttgta

SEQ ID NO: 61700 - DNA, 403 bp, Oryza sativa
  unsure (1)..(403): unsure at all n locations
agcttggttagcttaatttttcccttctctgctttcagccaagtgaacacaacacttatgctgatatagaggctgcttacaaatgcctcattgagaactttggtgccaaggaagaagaaataattctttatggacaatctggtggaagtggacccacagtagatttggctagtcgattgcatcggcttcgagctgttgtcttgcacagtcctatactgtcaggattgagagttatgtatcctgtgaagcgtacatactggtttgacatatataaggtttgttatcctcttttattccatgttgatttagcttgatctattatttcttgcatgctgcccttttctatattaacactcaactntccctcggtatccattgacttccagaatatcgataaaatccc

SEQ ID NO: 61701 - DNA, 463 bp, Oryza sativa
  unsure (1)..(463): unsure at all n locations
tatctactcaaaggagcgcccggaaattattagtaatttccgaacttatttgtaaataaaatcctcgtccaggaatcagccgagatacacatactgacaatttaatatacaaatccatcataataataacgttacatacttacaaaagaaaagaaaaaacagcagcggaattaacggtctagcgatggcttctgctccactcccacaggcagctcaactggggtataagccaaacgtcttctccttctggatcctttatcttcaactgaggtttgatgattattgcaagaatgagcatatgacatactcaacaagccacacagcaagtatgcaagtgcacaacgataccaaagaatggcataatataggctcatttgcaaagcagcatttagcaaagatttaagagaagtgaaacagtagaggtaataatcagagatnttaatcaacactgaacagcacaccc

SEQ ID NO: 61702 - DNA, 462 bp, Oryza sativa
tcccttgctgcctgctgctggccactccttgtgtccactgtccacagatacaaactccattcgtaatttcgtacggccggtcgggttacatctagtgcaggcacgaacacgtacagactcccctgatttttggatctatttaagccgagctgagtgaaccaattggccaccacccaccacggctccaaaaccgctgctttcctctaggtgatcttgctcaaattaatccctggttagtctttctctaccttgttaatttgcatccacattattaatgatactaagcacgctgtttcatccttaatcagcacaagcacgtaagctgcgcgtacggtcattcggattagcaagttgctgatgataattagtccttgttaatttggcactcattatgctacatgcagatcgacgagcttagcaacacctgcatggcgaggagttcatcagctctcgaatccatgg

SEQ ID NO: 61703 - DNA, 381 bp, Oryza sativa
agcttgtgccactcggttagaacattctactattcaagcaaccattaaccatataacagccggcatacatgttgaaaataccacgtaaactgtcgataaattatcatcaacttgtcacattatacaagcaagcaagcacccaacatcgactttattctgttaaggttctcaattataactatagaatctagaaaggcgcagccaatgctccaactctatcgcggtgaatgaggcgcaactctgagccatgctttagaaacacaatgcctgaacgaaagagagcagctcacatcagcgagtataaaagagaatgtgtaaaacataagtttaaaaaattcatggtactgcatatgcttaagatagaactttcttatgttactg

SEQ ID NO: 61704 - DNA, 453 bp, Oryza sativa
  unsure (1)..(453): unsure at all n locations
ctgtggcttgtatctagtgtgtgatgaagctgtatttatattctctttagtgcatgggtttcatgaacatatacatacatgaaggagcaattntctctccagtgaccagagacaagcagatcagtatagtttgcagatttagcaagcaccaacctacacacatctacactaacatcaacttatatacagaggatggcaaccgaatcacctcgagcttatcgcctttctctacgatatcgatcttgagcatccagtctgtctcctgcttcttcaggttgcacacattctccgcgatcttgatgatctcgatctccggcacctacgcacactcccacctcaacccatcaacacaaaccaccacaatcactcgcaaattcaccgaacccgaaacgaaaaattagtaccttcttcgttgccgggagcgcctgctgcttcttcgccacctgcgccgag

SEQ ID NO: 61705 - DNA, 359 bp, Oryza sativa
  unsure (1)..(359): unsure at all n locations
gctgcagctngaaatatctcttctctttttttcacgctgagtattaaaaataccattccatggagaaaatataacctacaagattgagcactttaaaataaaaacaactccgcatcattaatacaatatacagaaggctcactaccttttattgtacgatcgtagagtttacaagctctggggcccggagggcagactgcataccaacccccatggaagcaatgatatatggggctgtttttttttggctaaagaaaaacagaatatcncatcggtataacttaatgattaaacatatggagtgatggtatacctatccaaaatcaccatttactggagtttctttaaagatgttccgc

SEQ ID NO: 61706 - DNA, 444 bp, Oryza sativa
tgccgaacttgacaatattggccctatgtcttaacatgctatcgggtgatatcccatttaacttcttcagcctttctcttcaactattaagcttggaatacaatatgttctgcaaggtattgccacaaaacattagtgatatggtacctaatctccaaattcttcgcttggattacaatatgttccaaggtcaaatcccatcttctctaggaaatgctttgcagctaacagaaataagattggcagacaactactttaccgggcaaattcctagctctttctgaaagctttctaaactctcctatattattcttcaaaataataacctagaggcttctgatggccaatgctgggagttcctacacgcgttgagaaactgtagtaatttataactgttgtcactggctcaaaatcagctactacgagaaatacccgacttcaatg

SEQ ID NO: 61707 - DNA, 390 bp, Oryza sativa
tgcttgagtgtgtgtgagatatgagctgctatttcctactattcgataagagcgtgcatattcttgtgtatgatacttggttgctgccaatcatcgcgggattgcgcactgggtaataagatggtcttgctctaggtcaacatctacaccttcaacaatatatgtcgactgctgcactttatgtttctgaagttcatgactctcgtcttggacatattgattgtaatttaccaatctatgatggaaagtatgattccgctgcatacattaattgggagctagccctagaaaaacaatttgatgagtatgactttttcttatgctcaaatgattaacggtggttgtaaaaaatgaaccggttctgtatctatttggtggcttactgtgggg

SEQ ID NO: 61708 - DNA, 418 bp, Oryza sativa
  unsure (1)..(418): unsure at all n locations
agcttgcanaaaaaaaagtcacttaacatcatgtcaacagactntgaccataccatcatcgtgttaatcatgaatttttatgataatcgcgcatcgataattaagttgagatcaaagttttttatttgcataactatgctggttattcatagagcgagatgcacgtttgattaattggttggactacttacgaatcttagcagtttagaaaccacgtctgaataactggttatacacactaaagaaacacctagattatttaaaattaattattatttttttctgacgagcgggcaatagagcacgtagagtatgagaagtgctatacgtactactaacgtatgtctcacctcatcaaactaatcacattgcttagattaattacctctgtgggttcaggttatgatcgtacggacta

SEQ ID NO: 61709 - DNA, 127 bp, Oryza sativa
ccccaactactaaactttcataaatcttgcggtgacctatgcgtattcaatgcatgcaacattgtaatagacactgttgtcaaaatatggtctctcccctgaagagaaagtcgaacatgccttcccc

SEQ ID NO: 61710 - DNA, 413 bp, Oryza sativa
  unsure (1)..(413): unsure at all n locations
agctntccatgaagtgcttgcactcccatattgtagttcgtatgaagtcgcggcggtcgtcacatggtgctttccttcagtccgaatccaaaccgcacgaatactctccccttttgatcatctccatcattcctgagtaaaacaagagcccatgcgtctccggggtataaataagatgaacatgaactcaagaatgaagtcacctgatagttgagttgatgtgcacaagcgcggacaataggaccatgaagttgtacttgtagagacgtggatgtatcgatggtgttgatgtcctcatcaattcctgctattcacatagtactatatagttttcttcttgatggaagtgtcaaatacttactaggaagtccccgtgggtaatcaccaaatgttctagtatgagtaaatctagt

SEQ ID NO: 61711 - DNA, 444 bp, Oryza sativa
tcaacagctgaaaggaacatcagcggaaggcgttgccaagggatgatacattatttctgataattcatcaggaaacaaaccagatatcattctcatcggcactggttctgaacttgagattgtagaaaaagccgcaaatgaacttgagaaagatgggaagactgtacgagtagtttcactggtttgctgggaattgtttgaggagcagtcggagaaatacaaggagagtgtttttccaagtgaagtaacttctaggatcagcgtcgaggctggggtcacatttggatgggagaaatatatcggagaaaaaggtaaagctattggtgttgaccgttttggttctagtgcgcctgctgggaaaatatacaacgagcttggtttgacagtggaaaatgtcattgcaacggccaagtcactgtgaagtatcgtttgctttaatgagca

SEQ ID NO: 61712 - DNA, 421 bp, Oryza sativa
agcttagggatgtgcaatgcatcaccggttgcatggccgccctaagtcggttcatatcgaggctgggagagaaggcgctacccttatttaagctcctcaaacgctccgggccgtttacttggacggaggaagctgaacgtgccctcactcagttgaaggcgtatctcagctctcccccagttctggtcgccctggagccaaatgaacccttgctactctacttagcggcgaccccgcaagtggttagtgcggctttggttgtggagcgcgatgaggacaatcctcattccgcgcacccccaccctgtgctggcttggcccgggagagagcagggaggagaggcccccgagccgaacggtggcccaaggcccccgacgaccggagcaggccctctgcccgcttgtcagacggtgccaggtgc

SEQ ID NO: 61713 - DNA, 438 bp, Oryza sativa
  unsure (1)..(438): unsure at all n locations
cgaatctgaaggccttccttcacagtggtacgcctactttggagccctacaccggtgccaagggaccaaccatcatgctatcttttaagaaaaagaaaggctgtgcttctgcttgtcaaattcttttctcctttgatttctggatgaatcaagtatgtttccatagaaattaccagaaatgaaaaatcccatttgaatggacacctaggttattggagtagttatatccatggaatacaaaggcatcaagcctatgaggctatttgattagcctgggagttggctccgagactgcttgtctatgcgatcttctctatcttnttgatgaaaaggatatgcatctccagctntcctctnttttccccccttcatagaattggttcttgttttgctagttaaattctttttctcatggtttgtcattatttcccttttgag

SEQ ID NO: 61714 - DNA, 414 bp, Oryza sativa
agcttaataagtggatgccgttgatatatccgtgatgaaccctaattaccaagttaattagcgctgaaaatgttacattttgtacgtaaccgtggacattaacactatattattgaattctagcggatgagggccaccatatgtactgacaacatcgctactgttcggaagatatatatattcccagactttatagttccgtgcagtgatttttcgattcaaatccgtttaaagttttatctgagaaaaaataagtgtcacgtactgtgctctgaccgcctagtttaatacagtactaccatgtactgtagtgacatacgaaatacattcactgcggctacagaaaataatttaatttgaagacgactaaatacattcgcaaagatggttcgaccgaccgcctctaacaaaaag

SEQ ID NO: 61715 - DNA, 445 bp, Oryza sativa
  unsure (1)..(445): unsure at all n locations
tcatgagttccaacacgcataacaacttgctgtgcttctacttgcatccatcatacaacggcatctggcaatcttccaccaacttactaaacttctcataatctctgtcgntgtcctctgcgtcttcaatgtcatgcaacattgtagatagacattgagtgtccaaatctatggtctctccacctaaaggagaaggtacgaacatgccttctcgagctgcggcggtgttctctacatcctgatccaacacttcttcagctgcgacatcaggcgcctcttgctctccatgcttggtccagcaggtatatttcttcatgaatccattcattatcaaatgagcatgcacttcatccttgtcttcgatcatctgttcattcttacagtccctacatgggcacaacatgtgcatgctcatcctactttntctgtcattatccgcanatgt

SEQ ID NO: 61716 - DNA, 416 bp, Oryza sativa
agcttaataagtggattgccgtgatatatccgtgatgaaccctaattaccaagttaattagcgctgaaaatgttacattttgtacgtaaccgtggacattaacactatattattgaattctagcggatgagggccaccatatgtactgacaacatcgctactgttcggaagatatatatattcccagactttatagttccgtgcagtgatttttcgattcaaatccgtttaaagttttatctgagaaaaaataagtgtcacgtactgtgctctgaccgcctagtttaatacagtactaccatgtactgtagtgacatacgaaatacattcactgcggctacagaaaataatttaatttgaagacgactaaatacattcgcaaagatggttcgaccgaccgcctctaacaaaaagct

SEQ ID NO: 61717 - DNA, 434 bp, Oryza sativa
  unsure (1)..(434): unsure at all n locations
tcatgagttccaacacgcataacaacttgctgtgcttcgacttgcatccatcatacaacggcatctggcaatcttccaccaacttactaaacttctcataatctctgtcgntgtcctctgcgtcttcaatgtcatgcaacattgtagatagacattgagtgtccaaatctatggtctctccacctaaaggagaaggtacgaacatgccttctcgagctgcggcggtgttctctacatcctgatccaacacttcttcagctgcgacatcaggcgcctcttgctctccatgcttggtccagcaggtatatttcttcatgaatccattcattatcaaatgagcatgcacttcatccttgtcttcgatcatctgttcattcttacaagccctacatgggcacaacatgtgcatgctcatnctactttntctgtcatta

SEQ ID NO: 61718 - DNA, 170 bp, Oryza sativa
caaagggacgggtagaaacaaaacccccagacggaatgtgtcatgcccacaaaaacgagagacaccgacagaccgcaattttcgccaccccaaccgacagacaaaaaaccaaaccaacaagaaccaacgccgaaacgcaagccagaaccaagcccccaacccggaaaaaa

SEQ ID NO: 61719 - DNA, 411 bp, Oryza sativa
  unsure (1)..(411): unsure at all n locations
agcttctagcaccgctacttgccacacgttaagatgtgacattctcagcaggtcagacagatcttttacagaggatctgagcataaacgggagtggttcctcaggcgctaggtctgaggaaccatcgagcaacaaaatgcaccaaacaagggagggtatggagtattctaatgagcggtggtcagagatggccgaggccagtagcagctttaccggctctgatcttacaacagaggctggagctgccaattcaggtggatccgacactggtgctggcagtattcctgatagtttcgaagaacagatgatgctggccatggctctntcgttggctgatgctcgggccaaggctagttctccaaggctaacttggcggtagcatttggcagtgctttattctttagctgggtc

SEQ ID NO: 61720 - DNA, 443 bp, Oryza sativa
  unsure (1)..(443): unsure at all n locations
tgacanatatacaatanaacagaaacagagaacattcttttctattttgnggtcgaaccgcagcttatggtacgatcgcggacactcctcagcattggcatacagctatttcaggaagctgccaaaaacaactagcatgagtgaaatgcacacatcctttgatgacgatgaaacaagctactatgcatgtccccatcgtaccagtggaagtaagtacagccaccggttctaggaatgtgaaggaagaagagcaaatccctgaggctcagcttgtccccatccttgccctcgatccctgcaaccgaggccgcccagcccttgacgaccccctcgcagcgcgcgtggtcgccatcggagctcgcaacctggagcaagttcactgcaaacaaacgaaacatgcaaaacgacacgcgcaaatcagcgcatacacatacatagctacc

SEQ ID NO: 61721 - DNA, 417 bp, Oryza sativa
agctttccatgaagtacttgcacgcccaaatcggagttcgcatgaagtcgtggcggccgtcagaagttggcgctgccctgcagtccgaatccaccccgcgcgaatcctcttccctttggatcctctccatcgttcctgagtaaaacacgagtgcacgagtctccgaggtataaagacgaggaatatgaactcaagaaagaactcacctgataatttagttgacgtgcacgagcgcgggtaataggaccatcatgctgtatatgaggggacgtggatgtatcgatggtgttgatgtcctcatcaggtaagctagctacacaattatattggcgtaagtatgaaataaagtccgtattcagataatatgaatgaagtaaaatacggaagctgaatgaagtaggtttctttacatacttt

SEQ ID NO: 61722 - DNA, 444 bp, Oryza sativa
tcacatcctctattgtacttaaaacaatcatcaaccatctttggccaatagaatcccgctctattaagtaaccatttcatcttggtgtaggatcaaggaagttaactagaggggggatgaatagcggttttaaaattttttgtctgaaaccgagttttgtatgcggaagcataaatcaaaacggttttgcacaattcaaaacctaaacaactagtctaaactaagtgcacaaagaagcctatgttgaggtttgcaagcctaggatgattttagcacaaataaactctagtatgtaaacttgctcaaagtaaattggcacaaatataaattgcacaaaataaagaagacaagagacaaagtatttttccacctgatgtttggaagtttgccaaagccaacttcaccactcaaatcaccaaacatccaaacctctcgtcaacagat

SEQ ID NO: 61723 - DNA, 436 bp, Oryza sativa
  unsure (1)..(436): unsure at all n locations
ccttattttcagctntaattaactaaccacatcattgttcttctgctaataacaacaaaggtgagtggtttatgattattcactttaatacaccaggtgaattccttctgccatgcaggcagggttggacagaaaacacgcgaaggaattaaaatgcctggaacgggaaaaatgaaacatgtcagtttgactctgcaggttgagaacgacctgaaacatcagcttagtattggcgcattaaaacctggcgcacgcctgattactaaaaatctggcggagcaattaggtatgagtattacacctgtgcgtgaagcattattacgtctggtttcggtgaatgcgctntctgtcgcacctgcacaagcatttacagttccggaagtggggaaacgtcaattagacgaaatcaatcggatccgctacgaactggaattaa

SEQ ID NO: 61724 - DNA, 417 bp, Oryza sativa
agcttatttaacatagccaactctactgctattgattggcaacttcatcttcacagctgaccatctctgttgctgctaatcgtcattaccatcggttgcgtttactgtcgccgactattttcttcatcctcatgattagtggatttcatcatcgttgttgatgcgcgtctacgtctttattgtcggcctgcctccgccgccgccggctggtatcttcgcatccacggatggcttattatgcttctactgatggccgtcttcattttcttcatcgagcgcctcgtctgttattgactgattattttgctgccatggctgcacaactttgtcaccgttgctgggcgcctttgtcttcattgctggctgacttgtctgctgccgactagtttcttcgtctccatggctatgcaatttcat

SEQ ID NO: 61725 - DNA, 454 bp, Oryza sativa
ctttattaaactcgttcaattacgtcaaagtgatacaactatgctaagaacactatcgacctctctataacaagtatgcgcctagctaaaacacacgcaaaccaatttaaaagaaaggaggtccaagaagcattaaggaccatcactaccaagagtaaattgccaccaatttacctaggtaagacactcattcgccatctcctgcaagtgtagactccctgcagtaaccaactcctgcgagctcgactttttagtataacctaggtgcgtaaccaatgtatagttaaaaatagctccatcaagggagaagaaacaacttggcagcttcttctaaatctgattagagtgcaacggccaaagctacggagcagcctctatcgctttccctactgttctggttgaactaaggcttcggctgagcgacctccttcttcgagtattcttagcttactat

SEQ ID NO: 61726 - DNA, 419 bp, Oryza sativa
agcttctagaaagtgcccaattaccaagatgacttgataagttaaacatacatcactaacaaatctgctccatatatgcttcatccaaatacatttgtttcagtgaatgtatgatttcataaaaaattcaatttagctgactaattaggagttagattgcatgatttctaactaggagttaagccttttgtcagttttaaggactatttggtctgaattatgtctactgtaatgatgtgggccacttttacaacacaccgatgatctaaaagtgccactaaaattcatgcatctagcgtagtacactaaattaggagaccaacacaagcacaaataggtaccagttaattcctaaattcataattattaaatcatagaaataactgatacttcagatcaagtgtagcgatatatattaa

SEQ ID NO: 61727 - DNA, 446 bp, Oryza sativa
  unsure (1)..(446): unsure at all n locations
tgatcgggaacaattctttntctgtcagttgtgccgacacctgtctaccttccttcgtggcgagacgtangaacttcgataggatcagtctcggccatgtaatcgatacaaaactcaatggcttcctcggtcgtgtaaccttcaatgatgctcccctctggttttgctctgttccgaacgtaggacttcagaattcccatgtacctctcgaatggccacatttctctcataaaagctggcccacatatttttgtttgcttcagtaggtgaacagtgagatgaaccatgatatcgaagaaaactagtggaaaatacatctccaagtgacacagggtactgacaatatcggcctgcaacccatctaggtcttctggatctataatcttctgaccgattgcattgaagaaggcacaaagccgttggatcgtgtgacggacttgtggtgg

SEQ ID NO: 61728 - DNA, 422 bp, Oryza sativa
  unsure (1)..(422): unsure at all n locations
tgcagcagcagcntatggattttagacacgaatgttttatatcaaattgtttggcgcctngataagcgattcaattacaaaatcctgatacaatgacatactgtcataacaataataagcacatggaaaatgtgtgaacaaaaagataccaaatggcatacgatttcaatacaagcgtgcacgacagcaatacaaaattaatgtaaccccatcaatgttcaaattaaaaagggatacaccttttaagtgcaaacctccaacaaccattaaagatttgaactcagataaattccacaggaaatacatagaacaaggacatttgaacgctatttgtggtcacctacatattgcaataccagcaacaagcattgctgggggtagattaaaacaacagccattggtcagcccaaatcccaaaacaa

SEQ ID NO: 61729 - DNA, 370 bp, Oryza sativa
caaccctgcgatatgaaatgcgaacaaagactccatcagtactctgcattctaaccagatagttaatcttagactccgttagctcatactctcttccaaattgatgcggatggttatctgcaggcacacttcgcggccattcacaatgaatcgagacattataatatgagaaaaaatccctatgtgctccgggttcgctcaatcccttatgtgcacttgaattttgactcatctcttatatgctcccgagtatttattttgatctcctctatacccatttcgttaattgaccatgagttgacctaaatgtttttcacattgactgtattgcccctttgcacataagtatagaaaagagacactatagtca

SEQ ID NO: 61730 - DNA, 420 bp, Oryza sativa
agcttaagttgaagtggaggaggagaaggcacattatccacctatgcctctaaggatacacaccgctctttccaaggatcacccaattgaccaagtgttgggtgacattagtaagggtgttcaaactcgatctcgtgtcgcttcgatttgtgaactttactcatttgtttcttgtcttgagccaaaacatgtagatgaagctccttgtgatccggattggatgaatgctatgcatgaagaactcaacaactttgcaagaaacaaggtgtggactttggttgaaagacctagagaccacaatgtcatagggacaaagtgggtctttaggaacaaacaagacgagaacgggttggtggtgagaaacaaggtaaggttagtggcacaaggtttcacacaagttgaaggtttggacttcggtga

SEQ ID NO: 61731 - DNA, 446 bp, Oryza sativa
  unsure (1)..(446): unsure at all n locations
tgaatcanagtgggaaggaccatacattatcaaacacaagtccatgacgggatcttttcgcctagcgacactcgaaggcgaggagttcgaccattcctggaacgccgcctccctcaagcgcttttatgtctagaatgggtggcacccaaatcgccaacttgtaaaaatgtacatactgtcatgtaagcctttcggcactatataagcctttcggcaagaaaaaaaaaggaaaaaagagaagagaaaaagaaaaaaaaactggatgtagggctattatccaccatggaggcccgaaccagtataaaatctttgtgtcctccgccttctttttatttcttttcgtgtgattgataatttgtggaaaaaccccaagacaaacgcctgatcagcgaanaagaccaggggggcgaaacgaatcggccgaagcattgctcgccgaacgttga

SEQ ID NO: 61732 - DNA, 448 bp, Oryza sativa
cggacacatgatactcagctttcccagccccttttatcaatggactcctgacgtctactatagagtgtggttcgttcgacaaattcctacctctatatctatctctgaggtgtttgggttttgcaaaactccatagatatgcagaagagaaatgctatccccactccgaccaagacagaacttttaccaaaagtttattgtgatctttttgttcaaataacaattaaggtgaagcagggtcaggaacaacgaatctctttatgataaacagatccattttgcaagctcgttattacgggtagttcctacaaagaatcggactaatgacgtatacaatgcttgaattatcgacgtagatgctacatagtgggttctcatccttcagagactacgagtgtaataggagcatccgttgacaaaaggatcaccctaagatgatcatctcatg

SEQ ID NO: 61733 - DNA, 416 bp, Oryza sativa
  unsure (1)..(416): unsure at all n locations
agctntntctctaccaatccgggatataattattcatcagcaccacaatattccacagcactaaatctctccccgccaccccgtacctctgataatggtctaaaatcattgaagccacttgcgacgacgttgctcaataaggaaaatttggcgtgaataatattcaacaccagtgcagcatcatcattacatacttacagccgccgactaccgctttcgatatattgactcaattttccagcctggttaaaaatagcgaccagctcagtcgcaaatatagtgactaccctaactaagcaacaataaggaatacactatgactgttcaaacaagtaaaaatccgcaggtcgatattgctgaagataatgcattcttcccttcagaatattcgcttagccaatataccagtcctgtct

SEQ ID NO: 61734 - DNA, 445 bp, Oryza sativa
  unsure (1)..(445): unsure at all n locations
ttcgagcgaaaatgtgcagntattcagtcgntttcttatcgctcaccattattcttttagacattcatcctatgaaactgccgcaaagttggtggtgggaactgaagttgcgtagagaagggttcaataattgagtcaaaaaaggaacgcggccgtcagattaaagccgcgggacaaagtccataatttccaagagttgttgaatttcgcagcttttttgaaagcctttgtatcatactaacaagtaaaaaaggtttaaataccaaaattaacctgtatttttgataagtcttaccattgtacgatttacacagtttctgctcctccttgttgatagtggaaagggtgcattgtgcacttgcgtaaacatttatgacgcgttgatgtccattggtcacatttccttgtaaggggatcgacttattngcggcgaggcatcattcgt

SEQ ID NO: 61735 - DNA, 419 bp, Oryza sativa
  unsure (1)..(419): unsure at all n locations
agctnttagtacaataaacatccatcaattctaaattgcattgcacatatagccaggggaacgaatcatgccattgacctaagtatacattaccttgtactctctcctgatgcgttcaacatagatatccaaatgcagctcacccatcccagaaataattgtctgcgatcaaaatttacactttaaagttcacaaatgatagatttagaaaaatacaacagataacaaaacaaacctctccactttctggatccagacctacacggaaagtaggatcctctttctggaaacgattcagagcctttgaaaactgaaatgttattttaattaattatttgtcacatgtatggtattaaagttaatatagcattcttgaaaatagaaaagtagatacttgtcctccagaatctttagatata

SEQ ID NO: 61736 - DNA, 436 bp, Oryza sativa
tcgtacttcaacggcacggactatgccgcttggaaacatatgatgaagatgcatttgaagtttattaacccatctatttggagaatagtcgaaaagggctatgttttgcaaaaacctgaggatcccaccaaggaggatgacgagaacgagcacaagaacgctcaagccgctaatgcaatacttagcgccttgagtggaagtgagttcaaccgcgtggacggtattgagagtgccaaggtgatttgggacacgcttcggaatttgcatgaaggcacggatagtgttcgcgagtccaaggtggagatcctcaaagggcaatttgagaggtttgtgatgttggatggagagagcccaagcgacatgtatgaccgtttgagcaagatcgtcaatgagatcaagggacttggctcaaggacatgaccgatgaggttgtggt

SEQ ID NO: 61737 - DNA, 417 bp, Oryza sativa
agcttatctttatgtcaccagataaccttgttaacctgttagctaagaatttaatatgccaatgattcttatatgtttccattgaaacatacatatataaagcaaaattatatgtgtgtgtgagctaattgggtcatatactatgaatggaaaggaaacacattttgacgtggttttatagtttctagtacataataactccaaaaccctagtgtgattaaataggtatgtgcggctatagttggtacatacagggacctgaagttacatccactgtctaaaacaaatttaggaagggaagcttgaaaatattgtttcttcagcaaaagcaacataagaactatgcaaaaaatatctcaacatgaagtaactcattgtatattgcatcactatattcatttttttaaatttataaat

SEQ ID NO: 61738 - DNA, 432 bp, Oryza sativa
  unsure (1)..(432): unsure at all n locations
ntcanatgagccaagccaagctaggtttctagctcgttatgataacgagccaagctgagccagctcgttatcaccaagccgacccgagctggcttgctatccacccctagataagtgctatagctttctaggatgtactgagacgctacaaacaaaaaggctccaccggattatagctggacgccttgatggagaaatgagcttgcgcaacgaaaaacagagcagtgcacacacttggcctcggacttcgacgaggacttgaaaagcttcaagtatggcataacgatgcctaaatttcgcgttacaccagaagttgatgaaggatttggcttgaattggtggagtgtatgcacgcatagtgctcgatcactgtcatgcacgaggccgtgcactttggcgcgtggacatctatccttcggctgagcaaggggc

SEQ ID NO: 61739 - DNA, 418 bp, Oryza sativa
  unsure (1)..(418): unsure at all n locations
agcttggnttactttatttacttacctttttactttgactttctaaattttattcaaattaatccaaaaacttgtgctattaattggataaaggtcttaactccctcctttcacttgtctttagatgccgcgctacaagcctgagtacttgtttggtgttgagggttttgtccaggagttgcgtacaatgtcctttgtcattggatttgggactgcccctttttatgcccagattcctcatgatcgtcatgaagagaagtgccgagtcaaagtcaccttgaacagcaatagtgaagaggtcccctcagtgatgttcgaagctggaggaagaaactacatccatgcatgtcaggaggtggcaaggatcgccataggagagctccgcgatcgctacagtgatcagttggccgatacggag

SEQ ID NO: 61740 - DNA, 437 bp, Oryza sativa
  unsure (1)..(437): unsure at all n locations
ctntgaacggccacccgggccaacaactattaaactgttatcttggcctagctgatcccatcagctgcaggttttccaaacatcgaacccagtttcacaacagcaatttcacaagcagtagtcaaacaaaactacgctaggaatcacctcacatccgcccgtgaccgtgggcacggctgttcgaacagtttaatgacctctgcagagggggtacactttacccacacgacattactaacccgggtcacccagcccgtggggatcagccacgtcgggagacctccaagctttcatgacaaggcatttcgaaagccgatgcaggtttaccatatgccgacgagaggggtcccagaccaacaacaggttaggtcccagaccatactgtgccaggaagcccatgggtcctgcccgacaccaccccggcgaatccacatgtc

SEQ ID NO: 61741 - DNA, 413 bp, Oryza sativa
  unsure (1)..(413): unsure at all n locations
agcttntaatttgcatgtggagatatatattctaatgtggcaaccctatggccagagaatgcataatataagcagatcggcacaagtattaccttgttgatgataacctctgtttaacttttccgacaatcaagatcacaataaggcaatatgaagacaccacctaagatgtatcggacatcaaaatgatggtttttttttttggtgagatgtacccaagcagtctaacccctgcgatagattggaaaacatacagagtgagaatgtttctttgcaagacacatttttaccatcatatattttaattccctgatatagcctaaggacacaaatgattaacagttgtctgtagcttaactctgaaatgtctttttttttgatcccccatgagcacaaaaaagcaagcaagtgta

SEQ ID NO: 61742 - DNA, 438 bp, Oryza sativa
tgaattcgatccatgtcacatatcaaatatatctatctattatatactaaaagtccattaaacatcctgtaaacgctcctaagccgccacgtggcgcattacaaacgctcctagatcgccatgtggcattctacaatcccaccatcgattttcatttaaattggtggacccattatcttacaatcgtcagattaaatctatttaaaaagtttatgctttctatatctgagataatccgtccaccagaaatatttacgtatgtacatggaaatacccaaatagtacgtacgttactttggatgaaaaaaaatatataccttggtactgtttatttgaaaagaaaacaaacagcgtacgtggtaggtacgataaaaaatataaagacaaaaaaaactgttcacctgggaaaagacgaaggatacgtaccatataagcacg

SEQ ID NO: 61743 - DNA, 414 bp, Oryza sativa
agcttcaaacaaatggtaacaacaaattgtacattctctatttagtgacgatagtggcaaagtggcctctagatatcactactgaggaaaagaaaacatggtagccatttgatcaaaacggatgcagatttcaacagcaagtaaccaagcacccttccaggagtcaagaggagccacaccactagaggtatagcctgatcttagctcaaacaactagcaacacgtaacaacagataaaaactgtccatgtaattttattgtgcaaaacaaaaccaacaaggttattcagttagtaagcataacccaccatatgagtctgcaaaaatttcccaatcacaaccacaagaccactccatatgcatgataacaccaaagtaccaaatgcacagacatgaacagtatatcatataatct

SEQ ID NO: 61744 - DNA, 440 bp, Oryza sativa
tgcccccgcgagggccgaagaagcctttcccggcccatcaagcctaggggccattgggccgacgatcgcctaacggcccatcaagagtccatgaacctctattacactatgtacccatgtaaatgtccctttcataagggtaaccatgtaaattcccctgtataaccaaaaccctagtagtaagaacctgtaataggggctataaatagtctcatagggccatgtaatagggggatccaagaaaaattctctaatcaatacactttactttcaaccactgttgagtaaccacgtctttcgacgtatgcagttgtcgtttcgacaacagctggcgccgaccatggggatctccgagcgaaaccactgagagcgaatgccaccgaagaatgtcgtaaaggagaaggttacaaggcgaaaggaaagcgacgctggggcggata

SEQ ID NO: 61745 - DNA, 351 bp, Oryza sativa
agcttgtgaatggcatgaacaaagcagtgatggagatcatgcgtccatctcaggcgaggcaccttcgatctgttgtactgcctcactccttcgatcctctccctcctcaccattgtccctctcaccatggccatctcaagatcaccaaccaatatatatatatatatataacctgtgtttcagtcttcagtgttcttcagttcttcagagaaatagagagagaaagatgcacacgcatgcacacacaccttgtcaactcttgagagagagacatataggactgaacttatatatggctgcatccaaacactcgacaaaacaaagaggtgctcaataaatggacttgtgatc

SEQ ID NO: 61746 - DNA, 448 bp, Oryza sativa
  unsure (1)..(448): unsure at all n locations
ntgccgatatgtgagacccctgcaccggtgtcccccgccggccagccttcgtgcgccgaagaccgccacgcccaccggcagatcctcctcacacctaggtcgcctcctacaccgccggccgcgcctctctgcgccaagccgacctcctccaccggacgcgcctctcgcgccaatccggcctccctccatcggctgcgcctctcgcgccaagccggcctccatctccgccgcccgtgcctctcgcgccgagccggcctccgctgccatcggctgcgcttctctgcgccaagccggtctccgacccttccaccaaacgatgccgcgcagaccagaagcagccgtctcccacgccctcggctaggcgtncgaggccgccatgccttcagtgaccgcagacacggtcaccaccaccgcagtcgctggtgccgaacgcccagccacctcgccg

SEQ ID NO: 61747 - DNA, 415 bp, Oryza sativa
agcttcacaaattctgttcacgcacttgtagctgttgcctctcgtctccaagtgttggaggcaaaggcgtacttcgatccgcaggtcgaaaagttctttctctagcccccctaatcatgttcctgttgtcgtgcagtttacatgtttgatgaaatgcctgagagaaggccactactttgcttaccttctgttcttgattcattgcatgatagattcgtcttcatttcactttttatgaaccttcaaacctttgttagctgatcatcaaattcatcaatatatgtatgatgatggggaatcttcccctgttcctctaaaaaaaaatcttgtttgacggagattctgtgggattccactaaactttacatgggttcagtagtgactgcggacgatctttggagttccctttgttagt

SEQ ID NO: 61748 - DNA, 443 bp, Oryza sativa
  unsure (1)..(443): unsure at all n locations
ntataatagatataataaagtattgataagccatcttcatatttataataaagttattttatgctgaaatgttcgagcgagaagcatttttggttatatgcaaactcgtagcagtccaatccaaaccaaaccatggtctgatttgcaaatgttttgggcgttagatcgaagatggacggtcagattgaggctcangatgaagatggatatttgcagaatagcccttttcattctttgcaattttttttacttcagtccctttactctgtcctttactccttcctgaagaaggcggagaagctccggcgaactccggcaactgcagaggagaatctccggcaaggggacgcctacctattcctcctcctcctcctcctctacagttccagttcgatcgacacggccaagaaggcgaggccggcgacccgcagtctccgcgtccg

SEQ ID NO: 61749 - DNA, 422 bp, Oryza sativa
agcttgagcggtagactatagcagaggcgtttttcttcaaccaagtgacgctgctcttggggcgtgtcacccagatgacttcatcgtggcggggcttaaagttctccctgtcactcatgaattcggagaccatgtgtgatctaactcaacagttgacagttaacggtaattggggtggaccatccttcccttgaaggaacgcgagatatgggatagacatcttcgatggttccaaatgacttagcatgcaagttattttcagactttctctctggtctcaacatgaactggatccatggctgaccggatggggagctctgagagattttgtgatgcaaaccttggggatatatagattatatacgggacgatcggagattgatactccccccgacactatctgttcatatggttatataaac

SEQ ID NO: 61750 - DNA, 336 bp, Oryza sativa
aactagctaattaaatcttgcttaccatgtcatgtttgacatttcgacaaacgctgtagggagaacctattttaagttcaacttctttcaaatgagatgcttgtcaaccttcatcttctgagttgacgtcgcacctaaattactgaacttctggttgctgtaaccgaccatgctattttctttctcttacagctcacttgagttatgaacgtcttttacgaatgacaagctttgcttaagagtggtatggcctcaatctccaccactactcaagtgggaggattcttattatgacttgacattatctcatacctatctcacctatctctatactac

SEQ ID NO: 61751 - DNA, 419 bp, Oryza sativa
  unsure (1)..(419): unsure at all n locations
agctntcaaaaaagattgactaatctaaagaataacaaaaaaagaattccattgaattgtatttttattgatcaattagaactgccttctagaacgtataattgtctcaaaagggccaatatccatacactattggaccttttgagtaagacggaagaagatctgatgagaattgacagttttcgtatgcaagatggaaaacagatatgggacactctagagaagcatctcccaatggatttacctaagaataagttctagttttaaatccattgcaattttttcctcttcttctttttcgagttagaataaaaagaaaaaataaaacaattttgcatctttgggacaatctatattttcgcgaaatggatcataataaaatagattataggtatctagggaagattcacttggaagta

SEQ ID NO: 61752 - DNA, 411 bp, Oryza sativa
agcttcaatccccagctcacgtcgtcgcagtgtctaacgtggggcaatattgtccccgtgtccactccgcgcttcgccttgcaatcgtagaacagcggcgagtggaagcacagcttcattgacacgttccgtgcgcacggtgggttcggcaccgccgtgatgttcaccggcttgtacatcatccacggactcagtccgtcgtgcccctgcgccacgtacccgaacgtcgaccagccgttggtcaccagcacgtctgacaggctcaggaggtacattttcgcccacgccttgccgtcgtgcgacttctcgccgaagtgctggtactcctcgtggctcggctggagcacgcttacatgctcgacggtcgccgtggcgcgctcccagtacatagccttgacgcgctcgtagaac

SEQ ID NO: 61753 - DNA, 427 bp, Oryza sativa
ggatcttaagcgacgcggctgcagcttgctatgccacagaattttttatctcttgaatatccttacatgagtagaactgatgattcttaacttttcttctttggctgcacagtgtgagctcaacattatgtttcatctggagaaggtgcacttcatgctggaagagatggtgatgaatggttgcattgtcgaaactagtaaacagaacatcttggcaccaatccacctgatggagaaaacttcttagaaaaatgctatccagcaggggagtgcctcatactgttctgcttatcgccaccgactctgtgcttctatagatttttcatctcaatgtgtaaccatcaacgatttccatgtgcatagactattaaacttgacctgataagaaataatgagaatatgacagatgacgtctctgttctttaat

SEQ ID NO: 61754 - DNA, 405 bp, Oryza sativa
agcttgaaaggacgattagttgagccgggtctatcaccgtagccagccggcgggaccaaaactagccgctatggaagagccagcacagggggtcccgggcttcgacgacacccggagctcaactgcaagagtcctctcaggagtagaccgaggcaggtggcaggttcatgagcgatccccgcgcttggccatgaagggccatggggaagaaactcgccttgacccggtcgtcaccccacgccgcctctatgatcgtcgtgtggatctggagggactcggaggggttgatgctaccgtggtacctttcggtgaggctgggccgaaactttgggggtcatcggtcattccgaagactcgccataaagacctggccgccagccttatccggtgaagatgaggggggct

SEQ ID NO: 61755 - DNA, 441 bp, Oryza sativa
  unsure (1)..(441): unsure at all n locations
taacanatgaatggaagaacaatgcaagtggcgagtatcttaatggaatgaagaacagctaaagcaagtgtgcttcaaatcgcaaaacaagtgggatacaatttatgaggtgagacaaattcagcgccataattccgtcagaccttgggtattctgaacctctaataatcttcttattctatatatccggcattggatttagctgtacatgtgtacacagtaataccttccaaaagagctattgtggcattgtcatggcctcatggaccatcccaaattgctcactacacacacttactagtggtggtcagtctcaatccaccaccctaaattcaagggttctgctaagactgtcccctcttcttgttttctgctgcttgttccttctatttgtcagtattctgcagaacaaatgaagtgatccaagacaaggctgctgac

SEQ ID NO: 61756 - DNA, 421 bp, Oryza sativa
agcttcagaaaggatctctttgacatatttcttgttcacaagtaaatatgagcatctcatcgacaacgtgctcacaaaatcatgtaatgcatgtttttcaccaagtttcgttagcaaatcaacctgcagattacaaataatattcaaatatagcagcatacaagtaaatcaaattaggtaactgaaaagcaataaaaaaagtcaagtatacaccctttttttcatatgaagagttcatattggtcaagaataatgcagaaaatacaataaaataactattatagaggcaactatacctgactacatgcagcactggatgagataaatggaaccacaaagaagaaaagctagtgttgcaaacaagctaaaagaattctttttcttaacatatactgctcttttttctatttcatattgcaag

SEQ ID NO: 61757 - DNA, 440 bp, Oryza sativa
  unsure (1)..(440): unsure at all n locations
tggtgcactntntttatgtgcctttggactaattttgattatacaatttcaaaattactttatttgtattctgaattttaattaatctcatgttgtgttgatctagatagactcttctttctatattccttatttttattcgcaattttagttatttctaaattatattcttaattgattagggttcttttttacatagtatttagaaaccgtttctgtcaccttactcattttccttccctcaggccgtgttcccgtggtaaccactatcttactactttgtcatcccttgggtccttctcacagctccttctatagaatatttttaattggtaatcttatatttttcatgtgtcggtaatcaaaagggaaccctcgcgagcgaatatgttttgtttagcaaatgcttaatatagatatatttgtcggtatttaaaatt

SEQ ID NO: 61758 - DNA, 396 bp, Oryza sativa
agcttgtgagagagagggaaacagatgatgggagcacgaaggtgcattttattgagctcgggggcggaggtcgtggccgacggggtggcaacggccggcgacgtgggggaagagagagggggggcggcggattggaaaaccgaatccgcgccgattcacgggtgcggcgcggcgcgtgcggagtggatgagtggggcggggatagcggtggcacgcgcgaagtatgcatcgaggcgcgcgggcggagtggctatgtgggaagaggcaacgactggcggttgctggcgaggtggctggaggaaggggaaagggatgacaggtggggccgtgggttccacctatctgcgaaggatggtgagatgagttctgataaaggattcaaagtatactttgtaa

SEQ ID NO: 61759 - DNA, 441 bp, Oryza sativa
  unsure (1)..(441): unsure at all n locations
tgttcatacaaaattntatcagatctcgcagaactaaatcaaggaatactttactagatacggagttttgtaactgaacagcagatgtgaatatattagatagatttcagtgtcaaagaaatgaacttatttgttgtgatacatgaatgatgaagatcctaaggtcgaaaattttcaaatattcttttttaactgcccagagcagagcaagaaggaactgaactgaaagctgttgatctgctaccatttctagactttgttcgacggaacaatctgcagatggaattcttctctattggctcaaaccggtgtaagagactcacattatgaatctgaatcaaccgtaccactcatagaaacgtcaaacgctaattntatanttggtatctccagcaatattgtgattgccagttctgcatttacagatttggtcacctcaat

SEQ ID NO: 61760 - DNA, 406 bp, Oryza sativa
  unsure (1)..(406): unsure at all n locations
agctnggatgtttcttccttgatgaatgccaacaggaaggatacatgggctgattgcagccgagaagatttccctgcatgattggtatacttcatggttgatgtcttcgaatctgaagtccactgggtgctcaagttgtgcagagtcttcataaaggaaccagattctagcatctttctgaaagtcttcatagaagctacaaaactaatccttgagcagttcagccgatagttttgctccggcattagttggtgtagaagcgtattctccatatgatgtgcatctccgatgagtacgctcttctccatcatcatctacaattggctctagtcttgggaattcagcttctaatacggatggccgattgacaaccttcatgactatcaggtttaaccaggtttgtagt

SEQ ID NO: 61761 - DNA, 420 bp, Oryza sativa
tgccgttcgccttgggaacgaccaccgggttcgccagccactccggatggatgacttcacggatgaatccggcctccagaagtctcgccacctcctcgcggatgaaggcttgacgttccggggcctgccgccgcactttctgccggaccggccttgcgcccggccgcacggcgagacggtgctcaatcacctccctggggaccccgggcatgtccgctggtctccatgcgaagacgtcagcgtttgcccgcaagaaggagacgagcgcgtcttcctatttgtcatccagaagaccaccgatccgtgtggtcttggatgggccgtcgcccaaggcaacctccttgaccgggacctcgtcgcatgtggcaatccgctgcctccgggcggtgggggcagaagggccaagcctctcgtcaccac

SEQ ID NO: 61762 - DNA, 404 bp, Oryza sativa
agcttgtcattgtcgtactatctttagttttctcccaatccacatgggtcgatttaggcctataaaccgacgatttagcagccactgcccctagggtcattgccactaccatgccgaaaagcaccgccacaatagtcatcaccctcaccgtcacacagtcagatatggatgaaaagtttccactagtagccactgctcctagggccatcacctgtaccaccaccatcattgttcacaccaacacgccgtaaagacaatactgtcccatcatcactcagtcaaatctaggtgtagaacccccattggtagtcattgtccctaggctcaccactatcagggagccacacaaaaccgcgcgattaccatgcacgggaaccttttcagtttttaaaaccacggtatct

SEQ ID NO: 61763 - DNA, 427 bp, Oryza sativa
  unsure (1)..(427): unsure at all n locations
tagcatgagtaacgtactaatattatgatagagttgtggaaggaagtactgtgctcaattgttagcgcccttatcacgataatactatgtgtgaaactgaaatattgaccactttattggaataatttacagtcgagtggtagtgcttagtgttagcctcgaaggagactgaccatgataagagtatggagtatgaaatgttgattggctgtgaggcttaaggggtatatattctattcagaatagctgaatgcccgtgctttgctatggataaaatatatttttcatgaagtgtgctacccattgtttgctataggaaatattcatcttattttaattttatatgttgctatccattntgatttgattgtttttaatgttaagaagctcaaggagtgatntgcanaatttacaatgcgagtacttg

SEQ ID NO: 61764 - DNA, 413 bp, Oryza sativa
agctggcatacgtgtatacaaactttatacatgcgtatacaaagtttatatttttacgtatacaaagtttgcatacatacgtattaaaaacgaaaaaaatacggaaagaaaaaaagaaaaacgaaaccgaaaaaaatacgaaagaaaaaaaaagagaaaccgaaaagaaaaaaaaaagggaaaacacggagctcctcccgcgcggcgcgctgtccggcgcccctctccgcacgtgacacgtgtccagtcgcgcggagagaggcgcgcacgactggtcaccgaatagcagtttcgtgtgtaactaccacaatttaacttgatcaggttttgcatataaacaaatagatattcaagtttatcctaatatgaagatttatcgtgttccacttttgtaactctttctacacaaaaga

SEQ ID NO: 61765 - DNA, 388 bp, Oryza sativa
  unsure (1)..(388): unsure at all n locations
taggtgtgtntggcaaatgggatttgagagatgaatggctatggtatgtttattaaatgggatttgagaggtgggattgggaaagtgaaatggatgaatggctaggattaaatgaggtgtgaagaatggatgactatgatgcaatattgtcttttggagggtgagatgttatttctcaatcacatttgtcaaacaaagccttagttggagggggtaatatgaagtgaactgtattatataagtggatgggttggatgtcctaatttaacaatggacttttcatataaagtttagaggggttttcagacatttcttttaaaatatatggtgtttttttattaagtttaactgattccccgatggatttggatacaccatcgtgctcttc

SEQ ID NO: 61766 - DNA, 463 bp, Oryza sativa
  unsure (1)..(463): unsure at all n locations
tttacgtgacactataaaactcagctnttatcattctggcatcgagctattgtgccgcaggacctcccctacagtatcgtcaccgcagtagagtttaaccaccaaattcgggatggattggtgtggttcctctacgcctaggacaccagaatatcgaaccatgaacgaggaaaggcatgagagaaatattggctagtaattgtgaagccccaattcttgactggaagggacaccaaaggcctctgccctccctctctatctatccaagagatggaagggcagagcttttttttggttttttcatcttttcatcaaagagttgaacaatgaagatagatggcaagtgcctgatcgatttgatcaggtcgtgtaggaacaaggttcanatcgttcgttcgttaggatgcctcagctgcatacatcactgcacttccacttgacacctatntaaacggctcgtctc

SEQ ID NO: 61767 - DNA, 418 bp, Oryza sativa
agcttgagtgaacttatccgtcagtaacgtgtcttaaactttggaacggcacgactcctatgtaattgttcacctttttaccataaagaataagccacgtcatcatccacagtgacttcatgcctattctatcctggaaaagttagctgatgtataatattataaaagcctttttaggcatcacactaatatcaaatccatatgttactagcattctttttagtgaaaattgacgtaattcagctatttatatttagggcattattcacaccaaaagaatggagtagtgtctaaccgcatagtataacacaaacatagggggctagatactttctagtcgttgtctaaaaggcaaaatagaatgctgccatcctttagttgtctctggcgaggacatggatcctacgtagtactgcaa

SEQ ID NO: 61768 - DNA, 352 bp, Oryza sativa
actcagcttatttagactgcaaccaactacaatgcctctattaccaggacatctaagaagcagggtgtctttgaagcttgaatcacatgtcacacattcaaagaaaaatcctaataacataatctccattctttttttatggtcaagattgaggtcacattatgaggactgaaaggattctgttacatcttattcatgacaagaaactcgcagtgaaacctgattgcgtggtttggtaccagtgctcacagctcaaaatggcttacaagtcactcaagaatgatttgcatgaacgacctcttcgaaatgcaaaatttaaaggtcatacccctttttgccgttcttttctgca

SEQ ID NO: 61769 - DNA, 407 bp, Oryza sativa
agcttgccctgctgtcatcgccacgttgtcgctagctccgctgcccccgccacgagctagctcgatccggccgccgggaggctagatctgccttcagcgtggtcggatccagcgcctttgccgccgtagccatacccgccgtcgtcgacccagccgcgtctctgacgacaccatcgccttttggctgtcaaaccttacaattcgaatttaaaattccaccccctctctcgaactgagctattccgatgataaatcactaggacgacataagacagacacataacctacgtaccacaatttcttcccgccgccgtctacatacctgccgccagccgccaccccgccagatccggccgaggcggcgcggatctggcggtcaccgtcgccactgccctgggttgctcccc

SEQ ID NO: 61770 - DNA, 337 bp, Oryza sativa
atgctgaccaacgcggccacctgtctttacgccggattagcagatcttgaatatcccgagaatttgaattagattttgttatgactccgactatccgaattgtggacggagtccgtgtcgcgccacaatatatagtacagcgggagtgcgtcggcctttgtcgcatcgcttctggtctcgttgaactcttctgcgctattatccgccacgtgactgaattaatggattctaaattgctttgcgactggattgggtgcgacactgtagcctatacgtcagcatctaactacatgacatatgatgttatatcttgtgagataagcgtgcatcacttgta

SEQ ID NO: 61771 - DNA, 403 bp, Oryza sativa
agctttatgtatatgctcgacagatgatgttgttatcacagcatcatgcttagcatcggcgttggcatctgcaatcactggatcaactatctatgtcgactatgggctcaatacaatgcgacttgcacttgacagccctacactatccacatagacgtgtaaactattctcctggatggatccgtttggtagcagatggtcattatgccccaactgaagctcataaccctatgctgatatgaaaatgacgaaagatgggattttgaacatgcagactttctacaaagttgagatactgggttttcttcgttatggactatgctagcgatgagaattaacattgtatgagtacagttcgatgattgatcttatgttagtactagcctcctatgatctgatctga

SEQ ID NO: 61772 - DNA, 443 bp, Oryza sativa
  unsure (1)..(443): unsure at all n locations
tatcctaataaaataaaatacattntataagacactactactatattatttgaattaattgtacaaaacatacctgcctgacgatgtcctccatagcggagatcttgttcatggcgagggacatgtgccccatgaagccgccggcggcggcgacgtcaagggcggcgacggtgtccgagagcgactgcttgatgccgtccatggcgtggctgagggcgtcctccgtccccttcgccgcttgctggagctcgtagatgctcatcagctgcccctccgacaacggctccacctgcttaagcatcacctgcatgccaagaatataattcacttcaattaattaatccatctcagattatttccacacattatttttgagagattattaattgatcggaaatatatatatatatatatatatatacaccctgcagaacatggtcttc

SEQ ID NO: 61773 - DNA, 416 bp, Oryza sativa
agcttggagggcccgcgacgtggctgatttctaccggctgcgtgatccggaatagtcatgtcctgctggtaaagtgtaccccctctgccgagggtaactaactgttccaacagccgtgcccacagacatttgcggacgtagggagattactagcgtaattttgtttgactactgcttgtgaaattgctgttgagaaaagtggttcgatgtttgaaaaatctgtaactgatgggatcagctaggcccgggtggccgtttgaaaagttgttggcccgggtggccgttgaaaagctgttggccgggtgccaaccttgtttcaattctaaaagactgatacattgcacatactccgaccggacgagacgcactatctcattcgtgtcgtttgagaagcactcacttagttgtttcaaaaa

SEQ ID NO: 61774 - DNA, 340 bp, Oryza sativa
tgcatctaagtgtggatgaccgaatctcatcacacaacttctctacgacagagaccatctctacttacgtactgaggaatgtgctacacccggaataattatatcctatggcagacactgacatgtatgctatccctctcgcatcattctatcactgcacacgcttacaaatcgcttgtaaaagacattttgtactctaaatgatgatcgatgatgatgacgatgaagatgaggataggacactgtcgtctgaacgaatctaacctatgctgaatcaaatacacgggacagacgactcctattcacatgcaaccagaccatcgctacacctattgcatct

SEQ ID NO: 61775 - DNA, 413 bp, Oryza sativa
  unsure (1)..(413): unsure at all n locations
agctntccaatggtatataactcactatttattaaaatatattaatatcaaatgattagattatggtcaacttaaaaatgtgctaataaataaaattgatattgtacagtagagtagatgtcaaataaatatatttaacatgttttgtcactgtagcaaccacataaactaagtataagtgatgtctcaaatgaatggatgtataggaaaatactagtacttatttaatattcgatggccatataattaaacccatgacttataggttagttaaatcaagtttagcctcatattttgtaactaaaatattaatactcatagataaatctttaacttgtttatgagaataataacatagctagatgtggaggaatcaccaaataatttaatcaatgcaataccatatagaatag

SEQ ID NO: 61776 - DNA, 438 bp, Oryza sativa
tctgatgaattcccaaccaaacatcactagaaactcattctctatcgaattttgctactttgaaagacatctgtacataaaaatggggcctttttttaggcttttgataatcatagtactggcatgtttagagagctccatttcctttgtttcatcatcatcatcatcgtactactagcatactgctagtattcacatgggagccaaagcattagcttcaggataaagaatcaaagatcgttcagatactaacaaagagtggatctttttggtatactgctcaatcaccggtgattttcatactgttctacctgcgaaggatacggctgccgttatagtcgtcgctggctagctgttgcgcggttgaggcggctggctcccgatcgttggttgggttgggtcaagtcacgtggagtcgctgtagagccgtagaggtgg

SEQ ID NO: 61777 - DNA, 416 bp, Oryza sativa
agcttggagaataagaatgcacgagctgtttcttgtggagctcgtcatagtgcaataataactggtacctttgactgtactagtatttttcccctagaaggaatttgctatcctatctgtctaatataactgcatattaataaaatgctcttctcatgctcatttaaatcaaggaaatatttctggcaagggtttgttgaataaacccaattatccaaacaagacctttagggtttgttgaagaggtagagattatactcgatcccttagaaagccatgagtattttagtttaatctgtctgccaaccgaacgtactgagcctaatccccatataagcaagccctattgaatcttcctagatattctgatgtgtaatcatattatgagtcactgtagttattagcgtattatcagt

SEQ ID NO: 61778 - DNA, 436 bp, Oryza sativa
  unsure (1)..(436): unsure at all n locations
ttcggcatggaaatgcggctntttttggtgggattagttttaagctacgcttttatgtagtcaggtctagcgtcgaagaaaaaggtctggcccacggaactgaagttcagattagattacacattgttaatttgacaaaggaataagtttacttgaggtccttcaatttgcaatcgagtctaaaattcaatcctgaatcgcaataccagatataacacgccactcaacttacaaaacaggtgtacccgagatccatgggcaatatagcgtccagttttgactgatgtgggaacacatgttagctgccaactcttctttctctcttccccatctctcanattctcaagcattcaagtggcaactgatgggagggcaatgagcggtggtcaacaagagggtagtgagcggcggagagatgagccacatccaacatgga

SEQ ID NO: 61779 - DNA, 417 bp, Oryza sativa
agcttgtggaaacacggcagatcagtttgtgtaaaccagtttattctttctaataataaaataattttgcaggattgagagaaaatacttctcattttctgcccgcacactactcaaactattaaacggtgtatactttacaaaaaaatttctaagaaaagttgttaaaaaatcatattaatttttttaaggttaaaataattgatactcaattaataatgcattaatggttcatctcattttgcttatgttatcaatcttctcctttttcctactgtcaagtgctccggacaacaaaaaccttgcgttataacaaaagtgagaaaaaaaagttattacaagaagatgtcatgaaaagactagcctacagacaacaaacgccttgcgttgtcataagagctacaacgtacctactag

SEQ ID NO: 61780 - DNA, 437 bp, Oryza sativa
  unsure (1)..(437): unsure at all n locations
cgaataagaaaattcagctagagaactaatggggaatattcacaaagaggaaaaatggggattgaaaagagtcgatttgagttgaatcaggtatcaccaacataagagagggaggcacacggctgggaggcctagctgctgagtctatccccttccaatggcggcaacactagaggactcacagagcagcgacaaagatggaagctcagtgtcggcggaaggcttgaccaccgtggctcgacggggtggcatcgccagcggagccctggaccactgaggcaccgattgcagggcgacgacggagctgcgacgctggtgggagtatgcacaaccagggcgagacggngtagcggcactggtggaaaccctggaccaccaggatactgattgcggtgacgacggcggcggaagtgcggatgatgacggatggtgcagca

SEQ ID NO: 61781 - DNA, 419 bp, Oryza sativa
caagcttgtataattaatactcaattaattatgtgctaatgtcttatctcgtttcgtatgccactaaaaatctactcattctatctaaaaatactcaaatcgtgtctttattcctaatatttaagtttttttaagggacaaatggagtacttccattctttgaatcgaacacacccagaaattttatagttggatcatggaagagagagttaaacacaatcctttctctagttctatactagcattgagatttaatgcacaacaaaacatctcaattacttttctaattagaaggtttcatcttggtaagtggtcacatcatatgtatactggtcacttaattttagtttattttgaaacgaagggagcaagtgataagaatggaagtactaccttagcaaatgccatcgcatcataat

SEQ ID NO: 61782 - DNA, 432 bp, Oryza sativa
tgaatcaaagtgggaaggaccatacatcatcaaacacatgtccaggacaggatcttttcgcctagcgacactcgaaggcgtggagttcgaccattcctggaacgccgcctccctcaagcgcttctatgtctagaatgggtggcacccaaatcgccaacttgtaaaaatgtacatattgtcatgtaagcctttcggcactatgtaagcctttcggcaagaaaaaaaaaggaaaaaagagaagagaaaaaaaaactggatgtagggctattatccaccatggaggcccgaaccagtataaaaatctctgtctcctccgccttctttttatttctttttatttcttttcgtgtgattgataatttgtggaaaaaccccaaggcaaacgcctgatcagcgaataaggctagggggcgaaacgaatcggccgaagca

SEQ ID NO: 61783 - DNA, 411 bp, Oryza sativa
agcttgggagaggcaagaatgaagatgatgggagagtcaaggatgatgacgtgaacaagaagaagaacatgaagcagaaggagaagaagaagcattgcatgcagtggttaattcaagaactcataaaagtttttgatggatctgaagatgaagatgagggcaaaggtaagcaagttgttgatctagcttttattgctcgtaatgctatttctcatgttgatgaatctgatgatgataatgaggaaaagcttagttatgatcaattagaatatactgcttacaaatttggtaagaaacttcaaacatgttctattgcacttgatgagaaggatcacactattgagattttaaatgctgaaatttctagattaaaatctttgattcctaaagatgatgaatgtaaatcttgtg

SEQ ID NO: 61784 - DNA, 430 bp, Oryza sativa
  unsure (1)..(430): unsure at all n locations
nttattaatctcagacaattacatcaagttgataaaactatattaagaaacttccagcctctgcataattaggacgcacacagccaaaacacacacgcncacaaaagagtttgtaacaagagaagaatagcagtaaaaattaggtagcaccaatcttcaggctagaccgtcatccatatccctaggtaaaacactccctgaccacccactccaagcgcccatacgtcgcttcaactaaatcccaagagccaggcttctaaaagatagtctagggacgaaaggaagtacatagttaaaaacggagctatccattaacgcgtgattaataagtattaactatttttgaaaaaaaaaattcaaaaatggatcaatatgatttttttaaacaacttccgtatagaaacttttaaaaaacacacactggttagca

SEQ ID NO: 61785 - DNA, 408 bp, Oryza sativa
  unsure (1)..(408): unsure at all n locations
agcttgtacagtttgggaaggggttttttgagagaaaagaagaatctacttcaaccgatatgcccttaggcacggccatacataacatagaaatcacacgtggaaggggtgggcaattagctagagcagcaggtgctgtagcgaaactgattgcaaaagaaggtaaatcggccactttaagattaccatctggggaggtccgtttggtatcccaaaactgcttagcaacagtcggacaagtgggtaatgttggggtgaaccaaaaaagtttgggtagagccgggtctaagtgttggctaggtaaacgccccgtagtaagaggggtagttatgaaccctgtggaccacccccatggnggcggtgaagggaaagcccccattggtagatnaaaacccacaaccccttggg

SEQ ID NO: 61786 - DNA, 419 bp, Oryza sativa
  unsure (1)..(419): unsure at all n locations
agctntggatgaacagcccagaanatctgtgtgccgctgagccatttcagatactggtatctaggaaaaggtaaaggaagaggaattgtttggtgatggcaagaagttatctgattatgtatgccattttaatcttgatatttgatcctctgaaataatagggagaatgattgatttgtgacaattgatcatcactgtcttacaagccttttttttcccagaaaaagaatggacaagaactatctgaatactagtactatgtagtacctatttaacttcttttcaagaggatcctctttgttattaagaaaggattattaggttttgctgagtactgaagttattataaatatgcaagcttttctttatatttcagccaaccaaaagatataggatatattattttccaagttaattta

SEQ ID NO: 61787 - DNA, 213 bp, Oryza sativa
ataaaactaagctagctggcgtcaccgtcagtttgactgtcagttatttttttttaaactttgtcagctgtcgtgggttatgttcaagagattggaacggtgtgtaatagaagttgatcgtgtgtgcttgttgagaacttctctttgatggttacatcgttaagcggttgaagaaattctagtagcgtttggtgcagaccattcgtctagggc

SEQ ID NO: 61788 - DNA, 417 bp, Oryza sativa
agcttcggatgtgcatcgactacaccgaccttatcaaggcatgtcctaaggacccttaccccctgccacgcatagatcagattgtcgactccaccgcgtggtgcgaccttttgtgttttctagatgcatactctggttatcatcagattcgcatggctagggaggatgaggaaaaaactgctttcattacccccataggaacttattgttatacgacaatgcctttcgggttaaagaatgcgggtcctacttttcaacgtactactcgaatttctttgggtagccagataggacgcaatgttgaggcctatgttgatgacttggttgtgaagacgcgcaaccaagagaccttactctcggatctagcggaaactttcgaaagtctccgctccgcccgcataaagctgaaccccgata

SEQ ID NO: 61789 - DNA, 450 bp, Oryza sativa
  unsure (1)..(450): unsure at all n locations
acctataaaactaagctcagntttctgctataatctttntgaagttagtacaatcgctactattgaaatacaacaaataagattgtactaacctcgatatttaaaattaaagcaacttacttgcccacagttatcaaatacatcagcactccgtcacctaacttaacagatgctcagcaccattagacctaacaacttgtctagaatacatatgaatgcttaaaaaatcatctaactactcacacagtttggtcagttcgccgaatgatgtcttcctatctggatgccttgctctcttgttcatactcctcattccttgactgatgtatccattcctcctgtcagaaaggaaaaaaaaaacaatcataacatcatacttagaccatgtgttaattttcctttttccatgggcttgtcaactcgaagcttaattcctactgttaaatccta

SEQ ID NO: 61790 - DNA, 419 bp, Oryza sativa
  unsure (1)..(419): unsure at all n locations
agcttgtaccagttgngaaggggttntttgatataaaagaagaatctacttcaaccgatatgcccttaggcacggccatacataacatagaaatcacacgtggaaggggtgggcaattagctagagcagcaggtgctgtagcgaaactgattgcaaaagaaggtaaatcggccactttaagattaccatctggggaggtccgtttggtatcccaaaactgcttagcaacagtcggacaagtgggtaatgttggggtgaaccaaaaaagtttgggtagagccgggtctaagtgttggctaggtaaacgccccgtagtaagaggggtagttatgaaccctgtggaccacccccatgggggcggtgaagggaaagcccccattggtagaaaaaaacccacaaccccttggggttatcctgcg

SEQ ID NO: 61791 - DNA, 421 bp, Oryza sativa
  unsure (1)..(421): unsure at all n locations
agctngcacagaattcaacatttgcaccattggacattccaaaatgggaccatgacttatttgtgggaccaaaggagagcatagtcgctgacgtggaggtgaatttttaattaatgtaaacaaatattatcatgcttatttcagatctaacttttagttattcatggtaaagatgaaatttgtgtacccttctgagacgaagcagcttacaagagactggattctaatgaaagctgataaagggtggagatcttacaaaagccgtttaaagggaagatactttaatcctgatgtgaggactctaaacgatatattaaaatatgtcccaaaaggtgtcaatggatatcaatggcgtggtcttgttaaaatatggtgtcaagataaacacaaggtgacctctccattntaatgctaaacatac

SEQ ID NO: 61792 - DNA, 446 bp, Oryza sativa
  unsure (1)..(446): unsure at all n locations
ntgctaaatggacaattaaagaagagatgatccctggtttccctttggttgctgctgcacagtacacatgatagatcatcatcttgtttggcacagtgtcttctatccaacatatctcttgtattcaatctcttgtacctggaagttggtcataagtgttgcccattgaatctgccgcattacacaggcctgaaaggattcccattttgttttttgtttttttaagttatgattatttcttttcaaatctgccaaagcatgatacagatttgttgaatggagatagttgctaaaagataagctaacatatcttgcgttgaatacagagagaacatcagttctaagctaggaatcagagataaatcagattagtctgctaaaatagcaatggagacagtactctaaccagcggtatttcgtcaaacaaacggttgccagtgatggtg

SEQ ID NO: 61793 - DNA, 421 bp, Oryza sativa
  unsure (1)..(421): unsure at all n locations
agcttatgctttaagaaatgtgctgctctgcccctgcaaacacgttgcattaggaaatgtgctactctatagtgaactgcggaattaattcctcaccatgttttttctttggggatacagactgcattgcattgagaaacgccattatgccaatgaaaatttctccatatgcttcctatactggttcacatagtgttcaacactgtaagttcccgacagctggaacttacagcatcctcacttcctgtgcccatgttctgaaccgttccatatgcatttcccacttgatgttatttcaaattgctgtgttccacttttgggccatatatctggcagtaattcaaacaaatatagttntgccaggagttctagctaacgtctcttcccggtccttgagatcacatctgcttggttttgcatg

SEQ ID NO: 61794 - DNA, 453 bp, Oryza sativa
actaagctgcctcaatgaaaaaacattgtaacaaatacatgaaagaatattatttataatcctaccaatagattacagtttaaatatctcaggattcaggactaaccattttatcgaatgcatcagactgcacagagttcccgagctgaagttcacgatattttggtccaggcttgagaccaatggcagcagccttagcagggtcaaactttcctttaagttctggcagttcacatgcataaatgatagcagtattgccaggcttcaagttggagtcattcaagcaactggcttctttattgtatcttggtttgacaaacattgcggatattcgaactacttcgtcatcaacaatgacagtagcatctttagattgggaagaagatacattttgttccacaccacagctatgtgtgtgaagcattgctctatttgggataaaggatctcattg

SEQ ID NO: 61795 - DNA, 385 bp, Oryza sativa
  unsure (1)..(385): unsure at all n locations
agcttaatgcttatactaccccatgtttttattttgntgcccttatccccacctgccgcgctatcatgaacatctgggggggaaagacatgaggggtgagtgttatctgtcccaacataatgacccctgtccatatatacccggaggcatgagaattccctcatataaattttatgccctccctatcagagcactactcggcggcgtgacatacacctctcataattcctatgccctcatttttagaacagccacctcccgcgacaccttatatgtatgatgaacagtgagcgtatctctaaagcgatggttttatatgactccttatgatggatagactgagccccatcccatgtcttgttggatgatattaacttagctccac

SEQ ID NO: 61796 - DNA, 433 bp, Oryza sativa
  unsure (1)..(433): unsure at all n locations
tgcgtgctggcggcggngtttctcacttaagctcatctaatttcttctgtagacggtacaccctgctctacagcttggaaaactcgcctctaatctcgtaacagaacaccttgctctccaacttgcaaagcttgcctcgactccagacctacctgtcatgagctgctttctctcgctccacacctactacatccatagcactaagcatatgcacagcatgtggcacagcggcactatcctctccatcaggacagatgtaagttccataatcttgaccatgaggctcgtggggatggtactgtaaaactgacgactctagctnctctaccaagcgaagacgcaactcttcgatggccaccacagctgcttgctggcaagcatgactgtactttctgcctccagcttcgaactttatcgacggatggtcttcatg

SEQ ID NO: 61797 - DNA, 415 bp, Oryza sativa
  unsure (1)..(415): unsure at all n locations
agctntatctttttatgaccaccatgagaaatattttcataatagatgccccctccataaaaaaaaaaccccaatcctaactacgaacctgtacatatacgtgtcaggttcgtaagctagggtttatcttaaaagtctaagttatagtataaagcactggtctggtggtggtccatactgaagccgatgtgctactaccgcacaatatatggggaaagtttcgggtggggaaccccctctttcaatgaaacaacggaacctcgattgtgggccgtccgattcgaaatgttcgatccagatcattcgttcttcctagccaatatattttgcagtttactccccgcctccgcagtgcattttgtacgttaccccgcttctagtctaaaattcccatcctttctcctccctgtccatc

SEQ ID NO: 61798 - DNA, 440 bp, Oryza sativa
  unsure (1)..(440): unsure at all n locations
tcctttgcatcctccactcaaatctagagcctatcttgtgagattgagagattagatgagagtgtaggagtgttttggagatggcttgacgattagatttgtttgagcactttggataccttgtgggctgtcacttgggcttattactcttggagatcttctcctagacggttaggtgtcgcctgtgagcttccaaagatcttgtggatgtcccgggaaagtttgtgaaggttttcctcacctccgcaaggaaacgaggtaagtgagtaaagattcttgtgctgagttttcagaggttgtactaggtagagcaacttgcacttgtggtcttttctagaaggaattntgagttggatcttggtggtcactcaattctagaaaatgacctagaagtgttgagttgaaggctgtggacctcttctgggatctttgcataagtg

SEQ ID NO: 61799 - DNA, 404 bp, Oryza sativa
agcttaaaaggcttgctggaacgtattattgaagatactttccttgaagagatgattctggaggttgatcaaaacaatgtaagttctgtactgtttttcaagctataagatcagcgtgctagtattagttattgctgttcagtaactaattgttctactcgtgaagaatttgatggcactggttatagaatagcagcatgtatgtggtagaagttggtcctaaatgatgtttcactttcagtattaccttcagcaatagatatgaaccaatttggatcctctgcagtggaagacctggatccgatatgaacaactataatgatgttatttacaggctgtttaaaaatgtatagtttagaggctatatacttttgcgctttcacccccaacttattgtcctcttt

SEQ ID NO: 61800 - DNA, 432 bp, Oryza sativa
tcagctgctcctagcagcggcccaacagatggtctttgtagtttgtttcctggccttggtggtacaggaactgctggtaccaggccatctggtctttttgggtctggatttccagaattggatcaaatgcagcagcagttaagccaaaaccccaacttaatgagggaaataatgaatatgccaatgatgcagaatctcatgaataaccctgatttaattcgtaacatgatcatgaacaatcctcaaatgcgtgatatcatcgaccggaatccagatcttgctcatgttctcaatgatccaagtgttctccgccagacccttgaagcagccagaaaccctgaaatcatgagggagatgatgcggaacacagacagagcaatgagcaacattgagtcttctcctgaagggtttaatatgctccgacgcatgtat

SEQ ID NO: 61801 - DNA, 437 bp, Oryza sativa
tgagggtcggcacatcataacggaagtggaagaagatggacgtcctattgccccggccgaagccgccaagaactatgtacgtcacagcggttgggttgtgcgggataacgtgcctgtcagtacggtgtactggcgaagaataagggcacgcggagatcatgagagctttgtcccagattcggagaaagagatgctgtggaccacaatgctcgagacattcacccttcctgcgggtacagaggacaaagtgaaaaggtggactctgaagaaaatggcagaacagtttcagagcttcaagggagatctgtatcagaagtatatactgaaggggcagacaccgaacttcgacacattcccaaagctaagggatcactgggacgagttcgttgcatataagacaggtgaacaagggcaggcgatgatggaaagaaacaaag

SEQ ID NO: 61802 - DNA, 417 bp, Oryza sativa
  unsure (1)..(417): unsure at all n locations
agctntgtgaacccagtattttagcatgtttaacttcatcacgcatttgtattgttattaatttgcaagtggtatgatcctgtggttatcctgtcaatgacctcagtttaagatattatggttaaataaaggtctacaagtggtagctatgtcaactactctgtgttgtgttacatgtctagcaatcatgagtagaccagcaattgagtatctagggaaaataattttgggcatgtactatatatctaagataggcaaaatacaggtcacactaagatcatcaaccgttctattctgcgtggtcaactcacagaaatatgtggggtgtacttggttaatccacaggattatgagccatcatccttctgcactccacaactgaacaacgtanaccataaaaggaagcaacaagaacta

SEQ ID NO: 61803 - DNA, 262 bp, Oryza sativa
  unsure (1)..(262): unsure at all n locations
tgaccttatatagtactaattntctaagtattaataagtagattcaatgtatgaaaatatcgttgagttaaagtgtatgcaataatagaaaatagtggctggtgttgttcgaagatagatcgatgtgcaaaactaaatattttattgatgactagaggacatataggtcctttaatttcaaaaaaggaccgagaatatgaaatatgtatctaaaatatattttaataccattttgtaccagttgggagtagattacaatggg

SEQ ID NO: 61804 - DNA, 51 bp, Oryza sativa
acactaagaaactcaattggcttcttaaaatacagatcaaaagttgtaatt

SEQ ID NO: 61805 - DNA, 409 bp, Oryza sativa
  unsure (1)..(409): unsure at all n locations
agcttctgctgcttctctctctctctctgtgtctagnctaccagcttgctgtatattattaggtgcaacaaggcagcaggcagtggtggccaacaatagacaattggacaacctgtttcctcctcttcggctctcctcctcctcctcttgccttctcttcttcttgttcttgcccaatcctagtagaagcgcctaacttgtcgtttgctgtggcttgggttttgagagccggaggaggcaggattgatttttccatgattgggttttcttgattgattggcgcctgctgctgcggtgcggttggtccaaaaaccgggatttcccggcgcggaatccggtcatccaagaggtgagatgatctttctttccttgccctgcttctctcgcgggtctttaggcgttcttggcg

SEQ ID NO: 61806 - DNA, 433 bp, Oryza sativa
  unsure (1)..(433): unsure at all n locations
ntaccccttgtctgagatcaaaaccgatgcaacccaactcttaacaagaactcgntgaaagtaaaagggtggcgatgtgccgaaaatatattgtattgatctatggagatagattacaaagaccccatgtgtacatatctatacccatgggtagatactagtccttattggacaagacataaacttttctaaagagaaaagaaaagatacaagtcctaaagacactaaacacactttcgtaaaaataaaaggaaactaactaactcttcctaattaatagataaattgtcatgtcgcatcctccttgaactcaactttttctggataagcttcatttaattgattaattttcttaaccgaatccactaagaatctgactgccgacgagtgacaattctcattggccaattncaggactctgaagccaatatgg

SEQ ID NO: 61807 - DNA, 413 bp, Oryza sativa
agcttgtgatcccgtattctgagttaattttcttacctaaactcaaaccattcggctcttcctcttgtgtagtatatatctgttgacctgctgctgtcctggaaggtttgcttgcttttgtcaccatcttttcgtttctagcggtattgcatcgattgatccatctaatccagcatgttacccagggaaaaacttggctcgaatcagcggccgcgcgtgcgtacgtgctctttggtgcgatcggatctgataagagtcctggactctggacgtgtcttgttaggaaggaatcccgtcgacgaaggctgtttggtcggcgtcgctctcgatctcacgggctcactgtacgtagtacgatgcagagcagttcatctcatggcttcgtttgactgacaacgggcgatgatcggtta

SEQ ID NO: 61808 - DNA, 356 bp, Oryza sativa
  unsure (1)..(356): unsure at all n locations
ccatttttcttcaacttcgcaacaccttccataaatccattacaatttttttttgactggtaatcccattaccaattgtcaccacatatatattgcatctatatgactatgatctanggtcactaccctagctagctccatgcattttggcaacggcacatgcaaggcagaaacgatgctttacattaattcagagttatctgtccttcgctttagcggaaattttacgactgaatggtcgagagataatgtggtaatgattttcctttagacatgtaggctactagtgggatttcagggatccacagaggccacangctagcaatgcaagagctagcactagagggagaacctct

SEQ ID NO: 61809 - DNA, 419 bp, Oryza sativa
agcttctcttactgaaggggggaaagatttatctttaatgagtacaaccatagtactcagcaagacacacccacaagtgcaacataaatgcgagggagtacaaggggtaataatataggggttaagttttgcagtaaacagcatttaaaagtcacttagttgcccaaagccattttataaagacgatcctagagctacgcagtattattaatcaaggccgtgaacccacacgaacctgccttaacccaaggcctacgatgattcagaccgaactggcaacccgaccctgggtcccagctcgtcccaagccaacccaggccaaccattccacattttagttattaagcaggttttaagaatttaaaacactaacttgggtacattgctaggcttgcccataaccgagggcgcggctattc

SEQ ID NO: 61810 - DNA, 454 bp, Oryza sativa
aaactaagcttcacgccggagctgaggacgatcgaacacctctttcgcattattgattgatatgctcgaggtgaagaggacaccaagcgaagacaagagatacaagccgaatatgacaaggcagcttcagccgcagcggccactgcacaggccaacgcccaagctcaggtccaagcccaagttgtaagttcagcgcccgtcttggttcaccctaccgctccggcgaaccaaggacagcatccaaggccgaaccaagccccaatgacatggaagaaattcaggactgagcgaactagcaaggcagtgatggcggttgaagaagtgcaagccctccgcaaggagttcgacgcccaacaagcgggcggacaacaacaaccttttcgcaagaaaatcaaggacctgtactgcgcttttcatggacgctcttcacacacgaccgagcaatgtcgaaata

SEQ ID NO: 61811 - DNA, 458 bp, Oryza sativa
  unsure (1)..(458): unsure at all n locations
actataaaactaagcttntaagcacgatcacatccttgctaacagatggactttttgataaaatatggtgtgtagcgcgtgtcaagccggaaaacaaattggagctcatcacccggtcaagaacgtaatgacaactacaagaccggtggaacttctacacatggacctcttcgggccaattgcttatctaagcattggaggtaacaaatatggtctcgttattgttgatgacttttcacgcttcacgtgggtgttcttcttgcatgacaagagtgagacacaagcaatcttcaagaagtttgcaaaaagagcccaaaatgagttcgacctcaagatcaagaacattcgaagcgacaacggcgaggagttcaagaacatgtgcatcgagagtttccttgatgaagaaggcatcaagcacgagttctcggctccatattcacctcaacaaaatggagtag

SEQ ID NO: 61812 - DNA, 372 bp, Oryza sativa
agcttataacctaagggcgcgtgcacgttcgattatgttcgccgtaagcgaataacttctagtgactgctgactataagctgcttaattatcaaatggttacgacaactctatgatataaacctatggcccactgtgcctacacatctattagatagaatctgtgttatacagaaacttaaatggtgcactaggaaagtactcaatgcttaagatggctgtaacgagcgaaacatatgagcccacaaattgcatgaattccaagagagatgtagcaaagtgggctctatcatgcacatggtgtgataccacagactactactatacttataaagcttatcatacgtatcacaacatattttaatgcaataat

SEQ ID NO: 61813 - DNA, 427 bp, Oryza sativa
agcttcccactgacaataacctgtggaccatagttcagcatatcaatacataagtagagcaggaatccaagcaaaaccatacagctttcgttttgcatgagagtacctcacaggccttagcaccactctccataacaaacctgagcacaccatagcacgccctggcaaaagaaacaacagatttagtcagacaaaaatcataatacataaagagaaacaaagcatgcttgtagagaacatcctaaacagtacaagctattttagattggaagtaaaagagattaaaattaaatgtggccaacaggatcacacgttagaagccaattaacaaagcttctcagcagagactacctagttggctcaagtaatctagacatcttccgacacacagttggtacatggtgacctatgtgctttatagatgacg

SEQ ID NO: 61814 - DNA, 448 bp, Oryza sativa
  unsure (1)..(448): unsure at all n locations
tgtgaagcgtgccctttatnatccataatggttagaggtataatatcacacctaaaggcttattcattttgataccattttcaaccataccatttttttttacaaaggtaccaaaactctggctacatttagtcagactgttgccaaattttagtaagtacatatgaaatcttgccaaaatttagtaacattgccaaaattttggtaacttaccaaaatttgactaaaatttggccataccaaaacttggtaaggttgaaaatggttgcacaataaacaagccctaagtcttttgcttcataatgatcttgacgataaaaatgtattctatatttattttcatgcagattttaaaagaagaaattatagtacaaaactccaaagaggactaaatgcgtatatacttcctccgtttatcaatagatggtgtcactgactgtcgaataca

SEQ ID NO: 61815 - DNA, 415 bp, Oryza sativa
  unsure (1)..(415): unsure at all n locations
agcttcaactagaagcacagagcattcttttcaccacacatccagatgctcctgtggggggtgaggaaagttctgtcgtcagaaaagaggtagtgggatttctgtgtatctaactctgtcttttcagtttgtccaactgctaattntcttttacttgaataatgcaggttggtagtcagagaaacttcaatttcaccattaaagatcaccttcagctgggaaaagaacttgatttgtttgattttgatgcagctgctgaggtataactgccacaaatcaatgttaaacataactttgcagtaagttgttcaatagcacagttatatttgaactggacagaagccattacctgaacactaactcaaagatgatctacaattgtagctcctatatgagcagttgtacttcttttcac

SEQ ID NO: 61816 - DNA, 414 bp, Oryza sativa
  unsure (1)..(414): unsure at all n locations
agcttgtcggtgtatcggcgacaacgcactacatgcatcgtgtgcaaacttcgggctacagcgtgtaaagacagattgctttgtcgctagcagctgcaatacaaatatggtttagcatttaggacataaaattgaataactaaagtggttatagggatgaattttctttcacatgataactaagcgaatggaggagcctcgatagcatcgacaatgggatcatctgtaatcattttttgctatagttttcagtctcactactagcttgttgggaacatgtgtcagtaccctgatttgatttcaaagtctagttgtactagtattcaaatctcacctctggtaagcaattactaacactgagagtaatgcatttactaacactgatgagagtaatgcatntactaacactgagta

SEQ ID NO: 61817 - DNA, 456 bp, Oryza sativa
  unsure (1)..(456): unsure at all n locations
tagaatactcaacctctggactaagaatttgtccagaatcatgctcctcttgagtaactgtaataaaataattgattttcttgatcttctagtagaagagagaaacctttctttatttgaatggaatttcaaggaggtagttaaacatcgtatcttaaaacttctagaattctggaaaatatattggaaaaaatgttgtactaatagatggatgatgctgggagaagaaaacaccaagttctttcaatctattgccacaggaaaggtacagaataaacacaatttctcaagttttgaatcatagtggtcagatagtttacctgcatgatcaaaaggcaaatttgttctatcaaagtttcaagaataggatgggtatctcttgctccccaacaatggactntaatttgaatgagctnttttcatagaacagatttggagtggttgattgacatgttc

SEQ ID NO: 61818 - DNA, 398 bp, Oryza sativa
agcttctcttactgaagaggggaaggattgttctataatgagtacaaccacagtactcagcaagccacaccggagatgcataattaatgcaggggggtacaaggagataataatataggggttaagttttgcagtaaacggcatttaaaagtcacttagttgcccaaagttattttgtaaagacgatcctagagctatacaatattattaatcaaggccgtgaaccctcacgaacctgccttaacccaaggcctacgatgattcggaccgaactggcaacccgacctgggttccagctcgtcccaagccaacccaggccaaccattccatattttagttgttgagcaaattttaagaattaaaacactgacttgggtacattgctcggcttgcccata

SEQ ID NO: 61819 - DNA, 436 bp, Oryza sativa
  unsure (1)..(436): unsure at all n locations
ntctnttctttntcttctgaaagccaatcatcttcttcttgctttccaagggtgtgaggagagaagttaaaaggagaggaggagataatgttgaggagaggaggagagaggagttaaaggagaggaggagatacctcgatccgatcgcgcatgcctctccaatctccgcgtcgatttttttttccagttggtgttaccaaccgggactataaataaatctttatggtgatctttttttccggttggtgttattaactaggactacaaatagatctttagtccgttactaaccggtactaaagattaaaaagtaccttggttttaaaccgggactaaagatatttgtagtcccggggtttaatacaaccgggactattgtgaaatctggtcgaccgaccaaagatggtttctccaccaatatcagctcgtcacagat

SEQ ID NO: 61820 - DNA, 415 bp, Oryza sativa
agcttatgcatctcaagcagacagaaccattacaagcagacaagcttatccaacttacacactaccacatgcttctgaagcagacaacactattcaaccacacaatatccacagccagaaagcaggtaagagaatctgcctccttaaaccaatgcaacagcaggagataattctcttgcacatgatgatgctacctacatactattagcctagtgggctagggagaaagttcagaagttgacagttttggcacattgctaattgttcatagacatcaggggtgaagaaaaaaacaagcatgaaaaatgtgtggcaattctccacctccttccattttcattgccaggtttcctcttcttttttttttccgttgtgaaaagtcagtcaagattaggaaatgatatgatctgggatc

SEQ ID NO: 61821 - DNA, 443 bp, Oryza sativa
  unsure (1)..(443): unsure at all n locations
ntagctcctagtaaattgcatcatcgaacatgatcatatgttatcgcaagtgcatcatgtgaatggtgttcattcatatgtcttattcaccattggttggacatgccatatgcaggaagaggagctacacagacactgcaaacttcaccttgcgctgtggcgtctgccaaattggtgtgattggtcaaaaggtaagtgatgctcttaaaaacacaaaatgtttttgtttataccaatccgtgatgaccatgaactgatcaaagccttctctcttggtgcacaatacaggaagccgttgaacatgctcaggccactggacatgtcaacttccaagaatacaaatgactgtacaagataaaacctgtgttgtaacttgtaaaacccatgttcatttgttccaattgataattcttctcgggttggatatggtatagaactgtatt

SEQ ID NO: 61822 - DNA, 436 bp, Oryza sativa
  unsure (1)..(436): unsure at all n locations
tattntcagctntaattaactaaccacatcattgttctgctgctaataacaacaaaggtgagtggtttatgattattcactntaatacaccaggtgaattccttctgccatgcaagcagggttggacagaaaacacgcgaaggaattaaaatgcctggaacgggaaaaatgaaacatgtcagtttgactctgcaggttgagaacgacctgaaacatcagcttagtattggcgcattaaaacctggcgcacgcctgattactaaaaatctggcggagcaattaggtatgagtattacacctgtgcgtgaagcattattacgtctggtttcggtgaatgcgctttctgtcgcacctgcacaagcatttacagttccggaagtggggaaacgtcaattagacgaaatcaatcggatccgctacgaactggaattaatgg

SEQ ID NO: 61823 - DNA, 407 bp, Oryza sativa
agcttgaaaactgattgtgaacttacttttctgtaaggcacatgcacatcttggttctgtgtgcagacatcaaacatgaggtgtttaatgctattgttgtttgttgcttgctagttatcacttccctcattcatcccttccaaatatcagttgagataatccaatcaatacaatgtgggttgcagaaattttagttcgatctacttatgagtttttatgatgatggtcactatgttgttattgacagtagtttttcagtggtgattggtgattagaaagcacatgaagtggcaagttagtttgcgcttatgctagaatatggccttggtaaagagtacattcggaggctggtggactaataatctagtagagcagtcatctggagtgtgtgaggggaaacctctttc

SEQ ID NO: 61824 - DNA, 433 bp, Oryza sativa
  unsure (1)..(433): unsure at all n locations
ttctaggggtacatccggtccccatggctcgttgagtatctcaattgccagcagactcgggctattggcatatctgtagattaattaaggtgaaaaatagcgttacaagaaaatcatagatttgtatggtgtgtttaaggatgatggtgaattctgttaagagacctggaagcgaggaaatcaatgatttgcactgtttgggtgatgcttgtatcagtggtgccccattctagtgatccatcccttgtggcgctatgctcccaatggttttgtgacccacgagcggcatgcaagtccacaatgacaccaatattgtaattcctatatacatgtgccaacagttcaacaaaaagtttagttaatggtaaaaaggtggaaaatttgcttgaactttntacaagcctgccatttcaatgcacattagcaatgtaag

SEQ ID NO: 61825 - DNA, 418 bp, Oryza sativa
agcttaacatgcttgcctctgaagattaagatctttatgtggtacttgcttaaaggggtagtgttaactaaagataatttggcaaggagaaactggaatgggagtttgagattttgtttctatgtgaagaatggaactattcagcatctttttatggaatgccattttgcaaagtttatttggagagctgtacagttctcttttagtctttaccctcctaatagcatatctcatatttttgatgattggcttctgggggtggacaagtaaaataggaaacttattctcataggagcttctgctatatgttgggctctatgattgagtaggaatgatatgatttttgacaaatcaccatctgtttcatatatgcaggtaattttcagggcaacgcactggcttaggtcttgggcactgc

SEQ ID NO: 61826 - DNA, 366 bp, Oryza sativa
  unsure (1)..(366): unsure at all n locations
gaacggtatggaatggatttgtctcgtcgaggcgaacgtatnggcgcgagggcttggtcggcaatgctccgacgagggagatcggccgacggccggcatggggaggagagagagaagaagagcttgagcttggatgtgtgtggaggaaaagggcgacctcgccgggtacttatatgcggcaaaaggcggtgatgcaaggcggttccagaggagaagatcgaggagaacttcgcgacggcgccgtggaaaagaagaagtcggcgccagctctgtgctcccattggatgtcgacggcggcgcgagcacgtggcagctgctgctgtgttgggtggcggaggaagagcatcacggcacggcgaccgtggc

SEQ ID NO: 61827 - DNA, 417 bp, Oryza sativa
  unsure (1)..(417): unsure at all n locations
agctntgcatttcgatgtttaagggaaaattcattattccttctatattatgagtatcttctggactatatttgcatgcctcaaaacaagataaaaagtgaattgattggaacttctcataatattatgttctgtctctgtagtcagtcgaagtatttgctgttctgtttagtgcaatcatgacccattcttcaatcccctaatctgattgttttcaccatttttctgttgcaccttatgttttagtgttatggcatttctaatctgtagttcagtagtttatatttgagaaaaaaagcccagtaccttttgcaattaaattttctactaattagaccaaaaatttcaaggcgtgatagctagcatacttgctttccttacaggccacatagttattattttaaatagtgcaatttc

SEQ ID NO: 61828 - DNA, 183 bp, Oryza sativa
ctaaaacgcaatcaaagctcacaacaaatctatcatgctaacataaatacatctattcgtttcttgttcaaatgtacgtcaaggctaatgacattcacggaagaaatctttgactggttggtcgactgacaaaactattgtttactatctttagtcgaataactattttactagagagattca

SEQ ID NO: 61829 - DNA, 417 bp, Oryza sativa
agcttatctctaagaatccttatattctggaacttatatagtggtcatatgtacaacagtatctgcgaaacttcgtttaatttgagtcggagactgtttttcaatttttctacctagtttatttggctgggcagttatttaggtgcaccctgtttctctttttgcggagcatttattttatacgtgagggtatgatagacacgaagtgaaggacggcgagtaaatcaaagagatagccatttctcggttgggggcaagattaaaagaattcaatatgtcagttgaaggggcaagcagtaatctacaaaatacagttccttttaaatagcaggattgagaaaatagaagaacaaaaaaataaaacatgatgaatagaactgttaaactgagaattacaaaatatataccaaaagagag

SEQ ID NO: 61830 - DNA, 435 bp, Oryza sativa
attgatctgactccaccaagaacacgacagcatgtgtacttgatgactcccatcggctgcttgcttcaatcggctgattccagtactctaaagccgatattgactctaaaccgatgatgacttcgggctttaccaaatgtcactgctaacacatatatgtgtgcctagattcattaatatctatatgaatgtggataatgctagaaagttgtataacttgaaacggaggtagtacctcataattttgcaagtagtttcaggcaaacatagtagagttggctttcaactagtacctcataatattggtaggacagtatcaatcctcactctccaggtagcagagagtctactggcgttcttctccatttgtaagtgttgttaattctgtcatccatgtgatgagacgggtttaatctgatctctgcaacttataga

SEQ ID NO: 61831 - DNA, 424 bp, Oryza sativa
tgcaagcttagctgcgacgttgcccgcgctgatgactatggagacgagctggccacctcgggcggtcgtcgtggatggcaaccgcaaccaccccaccaccatttctttatttttattcttcatattttacttttctaaaattgttatacttttttttcatggggatgtataaattttttttaccgaaatttaaccggtgcttgagttctaggaggggtacttatgtcaatacggaaatatagtacacataaaacgattaagaatgtatatcaagtgcacaacatggcatggatctaatttcaaaagtgttgcaacggcatggttgtaaataaagaaatagtaatgttatttttcaacactagcaaactgtataatttaattaacccaaaactatgaaacgttagacttgggccctgatcgagag

SEQ ID NO: 61832 - DNA, 417 bp, Oryza sativa
  unsure (1)..(417): unsure at all n locations
catatccaatcacctttcatgaagtattaattgagaatgacagcggaccatagatgaaaccttcacaggccctgaattattcaaccattgcatatgtgaccggtggggatggcgacgtgtttgcaggccaagcttctcaacaagcaaagcactaacaatataatattgttgcagctctcaccatcaattataaatttgcacacctgccgtttcactttgcatcgtgattgaaacaaattatggcgttgcccttgctcagctgcaactaattgagtagaaagaactcgtcgaaccaccaatgactggtctggtgcattcacactataagcacgcacggtggaagttgtagcagacccatatgaactatcatgtcggggcgaaataagagcctncaaataactaatatcaacaagcaaa

SEQ ID NO: 61833 - DNA, 316 bp, Oryza sativa
agcttgcaactgcgtgtgagactgcaggagtgattcttctttttagggcaagtatgaccgttgtcagaacgtgatacgtccgaactgcccctgatacgccatctcgagatcatctggagcgttcacgcccaactctaggatcaaccgtgatcacgggggttcgcctgacccttcgcctgcaccgcaacatgagtcccgcctcccggccgtgggagctcctggacattcgtctgcgcttctccgggatgatcaggctgcacctcatcggatggagagaaggtcacaagacatgcttgcttgtgggccccacaccact

SEQ ID NO: 61834 - DNA, 423 bp, Oryza sativa
  unsure (1)..(423): unsure at all n locations
gcttctacagcagacttgccaaagaacattacagcatgagctgcagtctcttcgatcaattgatggaacaaagtactaggtgtaacatactccttgacaatatcagcagaaatgccctccacaactttagctgtgaaagatggccacgtatcattcatggagcgtgactgaccttctttcaacaaaatatccntcattctggatcttaacctcataagcaaccatgaccgatgtgttaccggatacaacaacatatgccgcaagacaagcaggagtcttgacaggagtaaagcccatcttgtgagtccagatgcatttactcctaacggaggctgcctcattttctctacggaggaaagtacaatattgatcaaatcaggcttttctggcccagtggctgaatggaatgccaccaatagaatt

SEQ ID NO: 61835 - DNA, 409 bp, Oryza sativa
  unsure (1)..(409): unsure at all n locations
agcttaacagtattgtgccgcagatatactcagtacttaataatggctcccatgagtggcgtgctgtaccacgtttctgcatgcctcgtattggccaagtctgcgaggctttgaattggtaaggaataaaaccctccctgtttccgatccacccgtccaattaaatcatgcttagtggccgattcaacgcctgatcacggaggagaagggagggggaagcatcacgcgaaattttaagtgtgagatggcttcccctcaccaaatccccagcctccctctatagctntgctatgctgactacttcctcgccatctccataaagcttagcttgcccctctcgctcgcgtctctgtctctcacgcacgcgcaccgtgcagagcgaagaggagagggggctagctccgggtgc

SEQ ID NO: 61836 - DNA, 441 bp, Oryza sativa
tccaactatggtcaattggtccccttggtatgaccactgttatgtcagtatactaaaaactatttgcaggtctaagcaaattctgggtcagaatgaatcatttgaatacatgatatattcctcttgcaggttggaggttggagtcaagtgtataaaggattaactctcgtcactatagcaggcgcaggccatgaggtaccactacaccggcctcgagaagcacttatattattcagacacttcttgcagaatacacccatgccaactcaatagccacttgaagcagaatgatagagtaaactacgacaatcatataaagtgctaaagtgtttttacattattttttaatttgatttgattattacaacatgatatcaactatctctactaaatgtatgtatgtttcttactagctagtagggaaacctgacaattgtactg

SEQ ID NO: 61837 - DNA, 417 bp, Oryza sativa
agcttcaagcagtacacatgtttaatttatatccgattaagcacagaattttgtccataagactacaactcctagttggtagtacattgcttcatgaaattcaaaatttatgtaatttactgagggacactacaaaatcatgtcgctgctgatgcctgatggacaccacaaaatttatgtaatggttgtaggacacccgagataatactttatcatttttggcaaaactaggggagagaagtcttaaaacgataaaattaccctcagccctatccacttcagttccatcaggaccatcacctgcttcccagcactgcttgccagctctcgctgccaccgccgtcgcctagggttagggtctttggatggggattagggtagggtgcatgtgggtatagggttcggggttgcgatggt

SEQ ID NO: 61838 - DNA, 436 bp, Oryza sativa
  unsure (1)..(436): unsure at all n locations
ttgcccttaattctcttatttcagagtagtacactagctatttctgcgtaattgatcgntcccaatctcaattaccgcagaaatacaagtgcaaagtctcaaagacattcaacgcggaagatcaaaataaggacaaattaaaattaaggaagacaaaatatgagtttctggaagatgaaacgatcgatcaagtgtatatatgcagtaatatgatcgtatgtacatgtcccttaatactctataagagatcgatcgaagcaaagagagactgaaaggaattntctttctctgaatttgtactaggagagcaagaattattagcaccaaacggaacaactaattcccctcatcactgcatctgcatgcgtaattaaacatgtatatatatgctaaaaactagctatatatgtgcatgtttagttagagagagattaaa

SEQ ID NO: 61839 - DNA, 418 bp, Oryza sativa
  unsure (1)..(418): unsure at all n locations
agctntntcatgcaccatggttctcacttttcgcaaagaagaaagttgcaaggtgtgatgccttgtttacgtaatctttaaagggaggcgtgtctcctgaacgggctcccgttcttcttcagatcagaatatataccagatcgagctatttctctgagatgctctgagaaaggttcaggtttgtgcatgaaccagagcaaaggaagccaaaaacaagatgcaagagagtaataaaaaagaagaggacatcttgggcctgcaaatggaggtgatcactggacctaaccagttgacaagaggccctaaatgaattagttattgcaggccgagtgtcacactgtcactgatggatcagatcattgactagtttcacacaattgacatctaagcacaaaagaaagaggcaaggaaatgagag

SEQ ID NO: 61840 - DNA, 435 bp, Oryza sativa
  unsure (1)..(435): unsure at all n locations
ttcctctcgtctctctgtgatggtgttgagttgttntgagtaaatgcttccagccaggttcaggtggcccctaaacctgcagagaaaaccatcctgataagttaagtcattttcattctggataaataaatttcacttgtgcacatgcaaacagcagaaagatgactgaagaacagtagtgtgctgtttgtacttgctgttttggcatgttttggacaccctctctcaaattaatgcaaatatgcaatgatacgcaactctgttgcgtattcgagagaatagcagtgacaatgttgtggagaaaacccaagtggctagactgagcagtattacagattttagcagtgtccaaatggcctttaccaagtcaaggtggctagctaatctggttgctcaatatgtggccaaatttgacttgaaaagtgaactagatag

SEQ ID NO: 61841 - DNA, 414 bp, Oryza sativa
agcttctcttactgaagggggaatagatttatcaagaatgagtacaaccacagtactcagcaagccacaccggcagatgcatgattaatgcaaggggggtacaaggggataataataggggttaggttttgcagtaaacagcatttaaaagtcacttagttgcccaaagctattttataaagacgatcctagagctacacaatattattaatcaagggccgggacccacacgaacctgccttaacccaaggcctacgatgattcagaccgaactggcaacccgacctgtgtcccagctcgttccaagccaacccaggccaacctttccacattttagttgttaagtaaattttaagaattaaaccactaacttgggtacattgctaggcttgcccatattcgagggctcggcta

SEQ ID NO: 61842 - DNA, 436 bp, Oryza sativa
tgcttgattgttcaacaacattcaacgaagcttggtctcttcgggtacctgctactccatttgatttacagattacagatgattattttgtttggcttgcaatatgaaatagaaaaaagagcagtatatgttaagaaaaagaattcttttagcttgtttgcaacactagcttttcttctttgtggttccatttatctcatccagtgctgcatgtagtcaggtatagttgcctctataatagttattttattgtattttctgcattattcttgaccaatatgaactcttcatatgaaaaaaagggtgtatacttgactttttttattgcttttcagttacctaatttgatttacttgtatgctgctatatttgaatattatttgtaatctgcaggtgatttgctaacgaaacttggtgaaaaacatgcattacattg

SEQ ID NO: 61843 - DNA, 401 bp, Oryza sativa
agcttctcgggttcttggtctctgcccgatgcatcgaggccaaccccgagaagattcgagctattgagcggatgcgcccccccagcaaacttagggatgtgcaatgcgtcgccggttgcatggccgccctaagtcgtttcatatcaaggctgggagagaaggcgctacccttgtttaagctcctcaagcgctcggggccgtttacttggacggaggaagctgaaaatgcccttgcccagttgaaggcgtatctcagctctcctccagttctagtcgccccggagccaaatgagtccctgctactttacttagcggcgaccccccaagtagttagtgcagcgttagttgtggagcgcgatgaggataatcctcattctgcgcacccccactctgtgccgact

SEQ ID NO: 61844 - DNA, 429 bp, Oryza sativa
  unsure (1)..(429): unsure at all n locations
tctaaacgggtcgatttatttgaatggttactatagnttgttattntgaaacgaactttataacagttaatgtngtattcgttgtacctcatattaattgtcataaatatcggatactatatcagcttcctttatttttttaaaaaaggtcagatgaaaaagaacttgcgtcttggccaataagtgtgtgtactcgcgtttagtaggagcgctagcacaacacccactggaatctcacatagcaggagacaaaggaagagcacacacctccaggctcgctcaaccagcagagtggacatgactgcacacaatggacattctcgaacagggcaaaaatcgttgggagcggcacggccaagtgacaacaatggcttaagagtgtcgcccacttcaaaggccaaagggatgatgatgattgatgaanggaaa

SEQ ID NO: 61845 - DNA, 414 bp, Oryza sativa
agcttcttctcggtgtgagagatcccacccttcttggacggtggtggtcgacaggaggacgacgaagatgaagcgtaagatgttgaagcctgtccatatcttgaagtggatggaaggatctctgactccagccacaggtaagacatgacctggcatataccttcctcaatctccgcctttaggttccggtaacctgtaggtgccattgtcagacaggatacaaagaaattaattaatgttcagataggatttcagaaaatgggagaaatggatgttcagatgattacctttgaggcgcaaccacccatgcatcaattcatgggcaagaatggagcccgttagcagcctgcaattgtatggaatgtttatgacttcacacaaatgatacacgaattgtagcatttgatttacatg

SEQ ID NO: 61846 - DNA, 433 bp, Oryza sativa
tgaccgttgcttttgcaatgaggaatgggatcttgctttcccccaccatgttctccatgcccttcctacaaggccatccgaccattgccctcttgtactgtccaacccgcaaggcccacatcgtccaaggaccttcaagtttgaaaacttttggacacgggtcccggggttcaaggacaaagtcaaggatatctggagccaaccttcttcgcacactgagcctatgcaccgcctgaatcaaaagctgcaacgtacggcggtcggccttagagattggacaaaaggcatctgctcagaggctaaattgcaattccatatggcactcaatgtcatccaaagactcgacgtggcacaagagcacagagaactctcccccccggaaacgcgactgatggcggctctcaagcggaaagtcctacgactcgcttctata

SEQ ID NO: 61847 - DNA, 419 bp, Oryza sativa
agcttatatttaaacctaaagcatcaaggtcttttaagacatttgcaaccaaacgtaacagtaaaatgatggaaaatgtaacggtaggggcatggaagggatcaaattgaaatttcaggggtatagaaggggtcgggtaaattttaggggtatgaaagggatttagtgagttttcagggatacacagggaatttactctattttaaaaatctttccatgccgtaggattgagacaatggagtttgcttgtcagaataatttgtgctatttatcatgtagtgtattgtatggttcgatatagctatagtagaaaataaaaggtttgcgtataatggtgtctttgacatgaaggagaaatgtttaggtagtacgcagccataactatattggttccatataagtagtagttgttcgaacaa

SEQ ID NO: 61848 - DNA, 430 bp, Oryza sativa
  unsure (1)..(430): unsure at all n locations
tgtctgcgtcaggaagcctgttgagaccgtcccaatagcattatctagtttcttgccattttatgacttgtcgacttgccaatgtacattgagttgcctgttgtctgtaaaagaattgcttggtggaaaattttcagctcatttgttcgcgtaaaaaggcgaggtgggtattacatgatggttgtgatttttgtaaatacgcaaaacgaagggaatgggggaaatggttcgtttccatatgaagagaagtggttcttatgacagaactcttacatagcaacagacctttntaaccatgtagcattgacattacaggatttgttgtcttgaactggtggttgtcatgtagtttttgatgtgaaagggtggtgagaattctgtttttctttgaaattactccgtacaccctatgggcgtgggtggtcaccct

SEQ ID NO: 61849 - DNA, 420 bp, Oryza sativa
  unsure (1)..(420): unsure at all n locations
agcttctccacttcatcaagatcttcaactgtttcaccaatatcgntctttggagaccgatattcttgcaccctcttttgtaaccactctaaattagcctctttactcattatacaaatttatatggcttagccgtgctacactagccggctttacagaggtaggtacaaatttgccatcggagatactaataaaatcatagctagaaagatccctccccgataagcattgaatattcccatgacgccactcaaaagtagcattggccattgcaacctcggccgatgtatccgcttgaacaatttcaacatcatcgccgtcccattgaattaaacattgatgcaaggtagaaggcacacaacaattggcatgaatccaacaatgacccaaaataacattgtagttaccttgcacatcgac

SEQ ID NO: 61850 - DNA, 347 bp, Oryza sativa
tggtacttactgaaacagtgcatctgcaggcacaaccgtatatcgtttctcaaaagctatgctagcgcttgacatgaagctgcatggaaaagtgtctatggatcgggcgcacatgcgaactaggaagaacgggtgcccaatcttgcaccagaacgtctgactgagcacgaactcactgaactgcatctgcagaatgctcacaagctgctatctgcaggtagtgcggacagccccattaccttggagattcagaaggcaatccagtcgctccagatcagccgcggagggagcctgagcccttctcaaaagcttacctaagcgtgcgctgatgagctcaccttctgaat

SEQ ID NO: 61851 - DNA, 413 bp, Oryza sativa
  unsure (1)..(413): unsure at all n locations
agctatagccgacttcatcgccgagtggactgattgctaagaagacatgcccgtggagaagatggaatattggaccatgcattttgacgggtcaatgaggctttcaggcactggagcgggggttgttctaatttccccgactggagaaagactgagctatgtattgtggatacattnttctgcgtctcacaacgtggcagaatacgaggcgctccttcacggactaaggattgcgatctctttgggaattcggcgtctgatagttcgtggggattctcagttggtcgttaatcaagttatgaaagagtggtcctgccttgatgataacatgaccgcttaccggtaggaggtacgcaagttggaagacaaattcgatggacttgagctcacccatgttcttcggcacaataatg

SEQ ID NO: 61852 - DNA, 437 bp, Oryza sativa
tggtcaactgctggccctgatgagcagtgatcgtggctacccggatccttcctttctgagagcttgtggagtatgacgttgctgcattgcttcgtcagcttgaccactgttgagttgtgatccaaattcatttgcaaccagcttctgccctatcagagcagaggcccgtcgccggaggcttgggccggagcgtgcggtgttgtaacctcaccccagatatagtgaagatattttgctggctggcacccgtggtttttttctctcctgttttgggagggttttccacgttaaaatctcgtgtcttctgtgatcgatctattgctctttatcgcttgtttgcctatcgtttcctaacaacgacctccgttgttgggagcggtctcttgttggtgaggatatccttgaggtaacgtgcatgtgtaggcacttgcatagcg

SEQ ID NO: 61853 - DNA, 436 bp, Oryza sativa
  unsure (1)..(436): unsure at all n locations
tcgggcaatttggcgaagaaaaaactagtcggataaataacagaattaaaacaaatacaggttaaactaagtatattaggcataacaagcgtttcgttcttgtagagtagataattggattttgattgagttatttttctaagggaaaaaggaaaaggaggattcaaaatccttttttcttcggactttcccaaacacaaaatacctccttgtattcgcactctcaaatgagagtggaagaaattcgactttcatataatatcttaatagaattccatgtaatgatcaatgcattttttggattctatattattcgcatgtctagaatcctaccaagagaataccccccatttntatgtaattgaagtaggattgacgaataagaaataaacataatactgtttattagtgtcgcataaaacccgaaatggggcgt

SEQ ID NO: 61854 - DNA, 368 bp, Oryza sativa
catactaggatgcatatatgtggacactggccataaacgacagatcgaaaaacaaccaataacaagaacgagataaatccaatctgataataccaacacgttacaaatagtaagttggagctctaaataacaacgcgtgctgcatcgtataacatatgatttattgagacacacgctgccggtgaatcacccctatttctacaagcaaatcaacgaaattagctagaactagatataaccaatctaatataacaaataagaattgaatacaaatgataagcttgggttccaaattacaagagaatgagtggtctagccaacacctgcctgcaaactaatagcaacggctaatctttaatctaaccaac

SEQ ID NO: 61855 - DNA, 447 bp, Oryza sativa
  unsure (1)..(447): unsure at all n locations
gacacataaaactcaagcttagggctggattggcttgtaacttgcacatttttttccaacacaaatttccttcagaagttggatatttttttaagttggaaagcgtataattaaattaatttacaagtaaaataggtgctacctggtggatttattctttttaaattcttcataattaactacactctttggaatttcattgaaattttcaaagcttaattgctaattttgacaatacaaacataatttcagcatttattcttcagcctgcgaattaaaatttaccgttcgttctcttttgggtaagcgaaggtgaagtgttatttgatgcggattctggatgatttgttgtgtgttggacttggaatgtngcggacaaaaataggtgaggatggaagattaattcaccagaagaggtagagatatgaacgttaaacaatgaaatcg

SEQ ID NO: 61856 - DNA, 417 bp, Oryza sativa
gcaagcttgacacgaaagtcactgcatgctgttgcattcacatcatatatttcgacgccgggcactacgctgctgtcgagcgacgcccacgggaccagacctccctttcccctagcttccagcaacacaacaaccatagatgttcatttggctaagttgtcatgacagaagaagagagagggagggagagagtgagagagatgggatgaaactagtggataggaacgaatagattaccgttcattgactaaaacaaatctgagccatcggattgaatcggaggcctggatgaccaagatgtgtgtgggagtgggcatacgattttttgcctacataagatgcccgggcgggagcattctaaaaaaagaaaagaaaaagaaagtatctatagaactttcgaattttttttgggtcaaa

SEQ ID NO: 61857 - DNA, 413 bp, Oryza sativa
agcttcgcctaaaaaattcaaagccgttgttattatagccattgagctgacattcttttcaaaacactccaccataccaccgaggtagtatatacaggagtagtttgtaggaatacatgtgagcaattccactgttaacataaaaacctaattacttactaatttattttccacatagtggtataatttcttttaaaaattacaggtggaataagcggatagatgaaaagtctccgcttgcccaccccgtatacctaggctatgtttagtttacgtcaaaattagaagtttggttgaaattgaaacgatgtgatgaaaaagttaaaagtttatgtgtgtaggaaaattttgatgtgatgaaaaagaaaaaatatttcggaactaaacacggagctaatatcttgtgcttggct

SEQ ID NO: 61858 - DNA, 460 bp, Oryza sativa
  unsure (1)..(460): unsure at all n locations
cgcgacacataaaactcagcttgtcaggtactggaaatgatccggtgagtatagtacatgtgtgagttcattcgtttcttcttgtttatcttttctcatccatgatgcgcttctggaagtctgaaaccatacgtggcaggccttgcttcagagagatttttggctcccaatggagaagagatttggccttcgagatgtcttggtttctcatgtgtggatcatctgcagtattgggtttgaactcaacacgagcacttgggtcaattgtctctttcactacctacagaagtagcaggcacatgattgcttgtagaaagtagaaagcccaggcaagaacccaaagcattgttcatacaatgatcgcacgatagatggatttgaagtatgagggccgaacctgagcaagctctaacatggtaaattctccaggatttcncaagttgaaagggcctatatgctc

SEQ ID NO: 61859 - DNA, 416 bp, Oryza sativa
agcttctactcactgatgttcggaccatttctctccaaacatcactgctgacttgagcgtcagttgttaaaacctgtaagaaaaagggttataatgaagctcatacatgccttgagaaagggatcaatagaggagtaggactgtgtggaaaatgagattgatacagaacttacaccaagcattgttgccatatttggatgaatcatcccagaacctttggccattcctcctattttgataggcactcctccaatctaacttttcaataaagagatgataagaacaaagataatgtcaaaccaaataaacctaatgagaataatacgaggctaagaaagtcaaacctctgtctgtacagcgatgctcttgctaacaaggtctgtagttgtaatggccacagctgcagaatttgcact

SEQ ID NO: 61860 - DNA, 413 bp, Oryza sativa
  unsure (1)..(413): unsure at all n locations
tgtgagcagcanaagaattgcttatgtatgtacattatattcaacatggnggaacaatacctctgatcttttnttcctggtagcaacatgcaaagctaagttgccatttctgtcaggcagcatgacaatagctggatcagcattcactagtgccctaacaaccgcagcactagttcctttcacagccatgtgcaaagcagtctggcctttcttatcagtcctccgagcaagctgaggatctgcgtccagcaaagccttaacaatttcaacatgcccctgacggccagcaaaatgcaaggcgttctttccattcccctgtgatagctcaaccaacccagatactctctctagtagaagggtcactacctcaatgtggcctctaatcgcagcagttatcagaggtgtcacatatg

SEQ ID NO: 61861 - DNA, 411 bp, Oryza sativa
  unsure (1)..(411): unsure at all n locations
agcttgcctatgactacagaatctgcactgctctatctagaccttccttcgagcatttcaatggctgctgcagttcagccactgactgacactgccaaggcattccttgccaacaagtacaaagatttgaccaagtgagtatttttctattgaatgcagctagaactaagctatgaaaacaatatgattcactgaaggaacacttcctgttttcaggcttcaagatgaagcgatgaatattcctctggctggtattgaagccatcctatggagtaatgatctgcaggtggcatcagaggacgccatctatgattntgtgatcaagtgggcacgttctcaatacccaaaactggaggagaggcgagagatcttgggtactcgtttgttgccactggttcggttttgtcatat

SEQ ID NO: 61862 - DNA, 440 bp, Oryza sativa
  unsure (1)..(440): unsure at all n locations
ntntgagaataaccatgccactgctggtatttaccatctgattccaaagaatatcaaagcaaaatttggttagatgccaaataatgttttctcagatggttcaaaaatccatctaaattttctatctcggaaagggaattgttttaaaacagctaaaccaaattgtgaattaggctaccacctcacatttcatgaaatcataaaaatcatgttgagaccaaaacaaacaaaatggattaccaatgcatgtggatcaggagaagcattcccttggagaatttccgtaacttgtacagcatagttttgaagttcactatctggggtaccatatttcatatgaatcatctgcaccacataacccttgttaaaggcaaaaacatcataaaaagatgaattgggatgccaaaccattataattcaaagaaaaagagagaacctca

SEQ ID NO: 61863 - DNA, 443 bp, Oryza sativa
agcttggagtaaaatatttacagcacagtcatcatcacccacaaacatggtaacaagatctgtccaaaacaaatagcaagagaatatgggcactgggcaaatggacggcacacaaatattgcaactagaataaatctgtcgattttatgaaaagtaagatgtcaatggtcactggatagttttgtgtgtgtctgtgtgagagagagagagagagtgtgtgtgtgtgtgtgtgtgtgtgttttgcccatatttcagttagagatcacaagaggaagagggaggaagctccatcaagtgttctaacttgaaagctaagctggttacctctacttaccttgggtagcaaacaagcatattgtcaggcttgaaatcaccatgaattatgccaacgctgtgcagtgtttccaacatgcgcagcatctctatagtgtaatatatgcata

SEQ ID NO: 61864 - DNA, 406 bp, Oryza sativa
  unsure (1)..(406): unsure at all n locations
tctaccaccatgttgcagatgtgaactctttttattngaagctctgatggcattagataaagattttgatggaggatcagagttcctctgcataaaaacagctcagttcttcctgaccaatcctatttgtaccatgtatggtacaagaattattctttctgtttgatgattcatccatcctatcaggtttattctcttgtctggtgatatcgcgaanatcgcgcgtttgcgacatcctcgagacatccacatagcactcccaatcatactagccacatgacaaaatgaggggactgtaagatagattcagtttcccttcctttgtttggtaggtgacactggcaattattccatgatcatatgtcacagtttttgggtaggcctgtaaactgaaggagagaatgag

SEQ ID NO: 61865 - DNA, 440 bp, Oryza sativa
agcttcttcgcggcacctcgttgaccgtgttccctcttccgtccagcggagggttgacttccactagcctcctcctcctgattcccctccacatacctctccacgtgcccctcttggttcccctccgcatccctctccacgttcccttcctcgttcaagtactggtttggatcctcgttcccctcttcttcgttccagtactggctgcttccctccgcgattgtatcatacaatatctgttcctcatcgcgatcagccgtctgttcatacaagaaatagttgctaagtcatgagacatttttgctttaacaatcttatatgctaacaatcatatatgctaagtcatatattctaagtctaattgtcggatatgctaagtctaattacaaatctaataatcttatattaaaactataataatcttatacgaaaactcaaat

SEQ ID NO: 61866 - DNA, 470 bp, Oryza sativa
actaagcttgacagagaaagctgaatcccttttccaacaatccacacattctttctggaaaccacacactctcccctgctctgatctcccccacccccccccctcaccatatgcttccaaccaataagacttacactaacacatgactacttcagactttctctatcacacacacaagagagagagagagatagagatgtgtgatctcaagggctcttatctgaggcagctagctagagttctacattgttccttcttgacaatgtatggcctagctccagtgttctattgattgagagatcccatttggcatgcacacagccacacagaggggttatagttctgaactgtcttactgagattcagacaatgattgaggaaatataaatttggttcttcataatagaagtattgattacgaggcaaatcagaacgctcttaatactttggtagattgatatccgaatatg

SEQ ID NO: 61867 - DNA, 438 bp, Oryza sativa
agcttctgctgcagcttctgatggacagggagacgataatgaaaggggtgacttgcaagcagtcgaggcctatggttctcctcctggtaaggagaaggttgacttgcaagcagctaaggactcttctcccactgctgggaggaagggaaagggcaaccgtattatagggcatgaagcacaacataaggaatgcaacattcatgatgttaaaacatcaagttaacaagaaactagaaagccaaagaggaataagcataagaagaggccgatgcgcaagatggaggaatccacggaaaatctatcatgccgcagcggcagcagcccatcctcttctcatgatgcaccaagcacatcgactatagagggggagccaaaacaaccatctttcggagatctcgcgagcattgcacaagaccatgatgacattatgcatctgac

SEQ ID NO: 61868 - DNA, 437 bp, Oryza sativa
tctttatcatacacaccaagttgccagcacatgtgctccatattatccctttgacatggccgttctcgtgttgggggctcgatatactatggccattcccacgatgacaatggggctacagattccagttcgcggcaatcgacaaattcgctaagtggattgaagcagagccaacacgagaaatcatagtcgacaacgccataaaattcatcaaggggatattctgcagatatggatcgctcaccgcatcctcacagacaatggctcccagttcactatcggccagattactgcattgagctatgagtcaagatctgcttcgcctcagtatcccatcctcaaagcaacggacaagtctagcgtgccaacggaatagtactccaagggatcaaaacctgcgtgtacgatatgctcatggcctacgacacataatgggt

SEQ ID NO: 61869 - DNA, 434 bp, Oryza sativa
  unsure (1)..(434): unsure at all n locations
agcttgagctgaattataagaggctctagtgtactataatttataatagaataggaagagagtagagtagaagaagtcggaagaattccggagttgtcggtaatcttcttctatttctttattctgtttattactctgaattcaatataatatctttcctgagtaatttagatttatcttgtgagaattatctcttggttagttcctaaatagcatacgggattatttttcactataatcaactaaaatatagtgattgctttggtgagttataaacactaaagtagatattaattgcttagacgtggtatttaggtaaaattatccagtaattggtgtgtatcccacagtgcgtttgaggtangtgtagaggtggtgacagccctcgagatcacttaatcctccatgtccgggtacgtagtatagcgacatct

SEQ ID NO: 61870 - DNA, 119 bp, Oryza sativa
actaactggcatggtgtgtacgcttacgctgggccaatctgtttataatctgccattacctgtgtcatgcaatactcaactggtcaacaatggtgctataagtatcaacatgtcacaat

SEQ ID NO: 61871 - DNA, 406 bp, Oryza sativa
agcttatctatataaaatgtcgcagcgatcatcaactcacacacgtgaacaagcataaccccgtttttcagtccaaggttccaagttggttcctttgataatccgtaacccaccagcaacaccgactcctccatactcaaaccttttagcatgaattggctggattctttggtgaaagagctatcatgtaacacgagtaacataagggttcaggcccatcagattacgcaatctgcggcacagtcattcaaatcaaaaccaacaatggaataagacaggtaacgcatatttggcatagaaaagtaatatcacgaggtagcagcagtagtagtatagtcgcacctggtggagtaatctgctggggcaagaagcgaatgtacgtaccaccaaccacaccatttgcgcc

SEQ ID NO: 61872 - DNA, 459 bp, Oryza sativa
  unsure (1)..(459): unsure at all n locations
ctgctctgttccttttccaatccacgttatggaggcaggttgcccacctgtgatgccatgagcaagtatggtcctcgactccttgtcactagcttgctcgctgctgctactgtagagtaaaatattttcggtgacatatgtccgggtggatcacgatcaaataagttcaacagtgattattgagctgcaaggacctgagttatatttattctagttaaatatgttgcttgttcaggtaacaatttcgaactatggcgtcaagtcggagagactttcatgccgccaaagtaagcctctaattntcacagaacatgttattcgcagaaaaaaaaagacttccatatgtgagtaatttgttgctgccgtaatcctttgcaggacgtgcactactgtatcgtggtcgttccgaattttctatgataaggtgatgcattngctgcatgatttcttttgcctctg

SEQ ID NO: 61873 - DNA, 164 bp, Oryza sativa
aaatattagtagagaaaaaggaggagggggaaaataaaaaaaaaagatgcgaaaacaagacagaggagaaagaaaaagaaaaagaacaaaaaggaaaaaggggaaaggaaaaagaagaaaagtcgaagaaaatcccaacaagaaaagaaaaaggaagaaaaaaa

SEQ ID NO: 61874 - DNA, 424 bp, Oryza sativa
  unsure (1)..(424): unsure at all n locations
agctnttagttctaagtaggcttgnggtgatctactcagctatacacgaaataagatgagtcattagcatataaattaattatgtactaattgctacaaacttaaaatttaatttatattttttaaaaaaactttcatatatatatttttatgaaatatattgtttagcagtttcaaaaacgtgttaacagaaaatgaaggagaaaccaaaattaatagtacattcaaacggatccttagtagtcgctgtttcttccacaatcttcatatttttcaaacaacttaaattttcacttagattaaaacaatctatagttataaaatgtaggaaataagctataagccacaatctgtagatggctactctcagtcccgtactaagacattatgccatttcttttttttttcaaaaattaanaaagta

SEQ ID NO: 61875 - DNA, 377 bp, Oryza sativa
ggacatgaccacctagattcgattatgcattgtaaaataaaaaaatcttttctgggacaacatccatggcattagatctctcgcagttgtagttttcttaaatgggccaagtacgttccggaagaggaataagttcatatgatgtcccttaacttgtcaacgaattcgattttcgtccctcatccatataaccatacacaacatgtgcttcaactatcaaaaccggtgcagattaagtccctcgcggttttgaaggcggtccggatgatgtgacgcctacgtggctaatttgactcgtcttcatctgacgtggcattgacgtggcgcttacgtggcaattcattcataaaaatattaatacacgtgggacccacatg

SEQ ID NO: 61876 - DNA, 428 bp, Oryza sativa
  unsure (1)..(428): unsure at all n locations
agcttgcatagctcgtgcttgcccgggctatttttaaatttgtcgaaaaatcgacactcttgttcagaaagaattttcggaaagaacttttgttgaggttaaccatgccagcccccctagcccggggacggattatgaaagtttcaacaccttacaaccgtacccatagctgaaccagcgcaccttgcatttattcaacaaacgagattatattcccacgggctcgcgacctcacactacacttctcattcaccgtttccattcagaaatctatattcatactttaccccatctacaaaaataacatttttcacattaatgttacaattggacaccctgtagacaccaattcttaacacatggccaagaaagatggccagcaaacatgcataatccctacattntgcaaataattgtttgaacagatg

SEQ ID NO: 61877 - DNA, 447 bp, Oryza sativa
  unsure (1)..(447): unsure at all n locations
tcttccaacacttgaagtaaactggctacctcgatcttatactattntcttatgaacaccatgcatacacacaatccttgccatatacaattccgccaaacggcttccagaatatgtggtcctcaccgggatgtaatgagccactttggtaagtctgtcgactatcacccaaatagatgtatgacccgatgacattctgggtagaccagtgatgaaatccatccctattttctcccaccgcattctggtatctttaaggctgcagcaaacctgcgggtttctgatgttctgccttgactcgctgacaaacatcacacacagctacatactctgctatctcacgcttcatacttgcccaccacaaattttccttgagatcttggtacatcttggtactaactcaccaacttcctaacactggaaagcatacaaacgcatgcatttaca

SEQ ID NO: 61878 - DNA, 381 bp, Oryza sativa
ttaagtcactgcagctgcagctgaactacctgccgattttggtttttctctctttaacactgcagatataaagccatatttgggagaagataatgagttagagtccaggacgacctcaatgccataaggggaggatgattaggacattccttccaacgatacaaccacgcctattgcacagctaggacccaatgactaaagctcgagctcgtgaacttaattattaggtgaagtcatttctagctaatcatacacagtcttcttcaaattgggtgctactaaatggttgttgtgatctacttgttggtaagaatatgggagatgaaccaaatcgcaagcagcactttcagcgctgatttgatgaagtcaatgctcttcact

SEQ ID NO: 61879 - DNA, 357 bp, Oryza sativa
  unsure (1)..(357): unsure at all n locations
gtccaaaaaattgatactttatgggccccgtatactaacatggaattctatagagtttagttttacattatttttttaaaaaatataactatctgtattggatataaaaaacctttttattagtttaatataaatatctttcacacactacataaatagttatgctatcatctctgataagccctctctctatatcacgtaaaacactttttaaaaaactaaatataccagaaaaaaattcaacttgttagaaacttcatattgtgtaagagccacgtaaaattgtatatttttttgnacttctaagaataaataattgttatcttgatatcctaacggtatttgggatttttgaaa

SEQ ID NO: 61880 - DNA, 427 bp, Oryza sativa
  unsure (1)..(427): unsure at all n locations
agctnnttgatagaatatgtcagagtaattttcactattcagaattnggagcagctagatgatcataattcaaggacaaaaaggccaagcaaactttggtctcattactacattgagtaccaagctgtcaagctgtacaattcaaaaatattcaaaaagttccaagttgaacttaagaggacaacaagattacaattgattgaggtcgagaaattgaagacttatgaagtttttcttgcattgaatcagaaaataaaagtagtaagaagaaggaagtaccttgtaattgttgactctgaaaaggaggaatacactcgtatttgctcaaaatttgagaaagatggccttctttgctcccacatattgaatattatgcttcacctcaacattatgaagaatccaaagaaatatattatcgatcggtgga

SEQ ID NO: 61881 - DNA, 377 bp, Oryza sativa
  unsure (1)..(377): unsure at all n locations
tccatccgcaacatcgtctactctccagacactttctcgtctgcacctgcttcccctgttttcgtgctttcgtcttgtgcatgcaaccaggccccggagatggtggcgaatcaaagtgtggctgctgatttcctcaacaacctctccaccccgatgcagcagcctctactctagatgccgaagacaaagaagcgtcgaccttgccttaataaggtgactttctcaccgcataggcacagcgacatttagcatctaatgtacgcgcaactcaaaacttgaaacaattgctcaggaaattctctcaaataattntggtctgcttgatgttggcaaaccttctgatgaccgcataaaataactttatctgcagcagtaca

SEQ ID NO: 61882 - DNA, 395 bp, Oryza sativa
agcttgaagccttcataccttctctgtgttcggtctggacaaaatccacatgatccttagcatactcaattaaaggaagaataacagattttaccaaataaattaaagcatctgacaataataatcacataatttgattttgacttagttctgagcatagaaaggacactatgttacttccctcaaacatttagcatgctcaattttccagtttatttcccatttcatcttgtgtttgatatatactttgtatcctgtaattgttaaaatatttgtaggaacggtctgctgtcaacgcctgctgtatctgcagtaattcgtaaaagacaagtatgttttacaccttttttcattcattgtgtgcttcactatcttttataatattctaattcatt

SEQ ID NO: 61883 - DNA, 410 bp, Oryza sativa
gaacttgatactagcttgacagataagaactgcccgacgatggatgttttagcccgtgtaaaatgtagcaaatttatctgtcttctttggtggtcatgtcacctaatcgccatcggagtcttgtgccaagaagaaggaatactcttcggcagcagcacttatgctaaacccatactgacggtacgcagtgggagtcgatcccatggtgctcggaatctcttgcgcggttaatcgccaggcagacttacccctgaactttggggagtcccctgcttttgaacattacattcaacaatctcataaccctaggtttaaagctgtgagtaggcaaacatcaactagagatttagagaatgtttatcacaaggaagcaactgcacttaaagaactgtttaaacatgtattttctc

SEQ ID NO: 61884 - DNA, 389 bp, Oryza sativa
  unsure (1)..(389): unsure at all n locations
tactaactttaatgatanaccaaggcttcgattactattcgttggataccacccgttcgatgcgattatcgccggataattgggatcgacccccagctgcccggctttctggcttattggatccactgcatcgacgttgcaccggaactttcgcgttcacgcgggtcgtatagtcttctttgatgaaaacccgctataacacaataaaaatgacgcatctaatttactcctcatccttatagctggaatcgcgtgatgtgaaacggccacctagcggatgatataatttcgttttgttgcaacaagaattgcatgtcttgttcattaattgcccatcggtatgattaaaacacccggctggtggatcacgcctacgaccgggataagca

SEQ ID NO: 61885 - DNA, 439 bp, Oryza sativa
  unsure (1)..(439): unsure at all n locations
agcttgaaacactcgtggagttgagggtttatgctcctaaatcgctaataagncgcgcggtcggtttttggtccacaaattattttttcggtacgtatacggntgtatatgagtatatctataaagtttggtacatacatttatatcattttttatacatttgaaatgtatacgtaagtataaaaattatacatatgtaaaaaactatataaacataatttatatgcatatatactttgggtatatatgtataagcttcatgtatatatacaactctcttgatgtccggactagcatgtatcacatccttcaaaatcccttatattttgggacggatagagtatatagataaattatataataccttcgtttttaatagatgataacgttgattntttgtcacacgtttaaccattcgttttatttaaaaaaatatgta

SEQ ID NO: 61886 - DNA, 459 bp, Oryza sativa
  unsure (1)..(459): unsure at all n locations
tggacatcatcctanggatggatgggttggctaagtactaatgtcatatagattgtgccgaaaagtccatcaccttgcaaggacctggatgaaagcaagtccgctttacccctaacactcctaccgcaagtcggtctatcttaacctggttacaagtcacctcattggagtcggtgcccatagtttgtgaatatcccgacgtatttccggaagaattaacaagaatgccaccagaccgagagattgacgcgccatagaactggcacaggcaccgcaccaattgcaaaaagaccctaccgaatggcagctaatgagttagcagaagttaaaagacaaatcgaagagctggaaagtaaaggttgtgtgcgacctatctcatccccttggggagccccagtgcttctggttaagaaaaaggatggctctgaaagaatggtgatcgactatagagccctgaat

SEQ ID NO: 61887 - DNA, 435 bp, Oryza sativa
agcttgtttatggcaaataataacagagctattatgattaaatcacctatatgaaattaatcaatgacatatcccatataatagcatatagtgggagaggtgagcaacccttagttaaccaagcagtaaatagaaactattcaaataaatgattcaatatattaagatattgtgcacacatatattgtacatcccattatagatatatggtatcgtattaatttgcttgttgcatatattaatttagagggagtacgtgacgaacatgaatattagataaatactagttatacatcttgtcctcgtataattacagatcaactgtaaatttggattattcattgtaaaattatgtgatgggataatccgtaaccataatatgattaacctaaacaattctaacatacaaagcatgggtaattggctaacctttat

SEQ ID NO: 61888 - DNA, 400 bp, Oryza sativa
  unsure (1)..(400): unsure at all n locations
gctttcggctttttacaacaatgtcgtcaacataagcttcaacatttcaccccatctgcgagcaaaggactttgcaaatcaaccttgcgatagttgccccctcattcctcatgccgaaaggcatcctgaggtggaaaaatgggccgttgggagttatgaatgcggtcctggctctgtcgtccggattcatgaatatntgatggtacccagagtatgcatacaaaaaactcatgtgttcgcagccggcggcgaatcaaccagctgtcaattcttgatagcgagaaatcatccttgggacatgccttgttgaggtcagtgaagtcaatgcacatttgccatttgccgttcgacttactgaccggcacatggttttgcagccactcanggtggttaatctctt

SEQ ID NO: 61889 - DNA, 429 bp, Oryza sativa
agcttcaccacttcatcttcaattccatgaaaaccagcaccaaatctgtgctcccatcttacacggggcagcttctcaccaagaccaatacctgctggagacccttcgatacaaagatcaaggtgactacgtcgcaccaccgccacaacagaactaattctatgaccagattgtgcagcaccttggaagagacggatcacatcgctgaagccactagttttggcatataacttcaaattaaggccacaaggaggtgaatgtataatctcaacatcaactgtagcttgaactgcattaaccagcagagcaaacttcaaatccaatccacacttctcaccgtacagacgaacagttttggtgaatgatgttgatcttaaaatgttggtgaattcagtgcatccttcaatcaatgtgtcacctttgggctca

SEQ ID NO: 61890 - DNA, 462 bp, Oryza sativa
  unsure (1)..(462): unsure at all n locations
tgaatgcacatggactcatggagatggagatgctggagatgtgcatggtgcattggtgccatggtccatgcagcaatggatgtgaggtgagaggtgaaggctttgcatttgcttttgcttctcttggagatgactgacttcacttcacagtgtgggtgtgatcagagatggcactgttggagagggagatgggaggcaaatgaatatcaatatcaaatataattttctgaatgtttgtatatgcttttcttgcagcatgcatcatgcatggacaggggagatgatccatactctangtgagtccagatgagatgagatggttgcctcttgttgccaatatttatttctttacactgtgctggtacaatggccgtgcatggatgagccatcatctgcattattntttntgctgctgctgtagcacataactgtgctaggaatnttcttgagaagatgcatggg

SEQ ID NO: 61891 - DNA, 446 bp, Oryza sativa
agcttggcttcttaatcaaaggaaatctcctcgtatatactattaggtatatgttattttcatataccgtgaacccatgtataaaaagtatttcttatccttgacactgaaacttttattttctcgtaaaattatatttatcaaatacaactcctaaccataaattggatttattgtatatatattgaaattgttggttcagtgtattggaaataacggataatccatgtctagagtggagaatatcacatattaatactggactgatactttttattattttatattagtatagattagtggccatatacaaaaataagaaaacagcagtaaaacaaagaatgtgtttggtgccatgggcaaaagaagaatttcaaccttttcctatatatgcttgaatccttttttttttttaaaaaagagaagatatgcttgaatccttgaag

SEQ ID NO: 61892 - DNA, 260 bp, Oryza sativa
  unsure (1)..(260): unsure at all n locations
ntggtggctattccgattcggattatgccggctgcgaagtggttttaatagctcattcagtagttgccaaatgcttggtagatcccttgtgtcatggtcatccaataaacaaaactctggtaccctctctaccaccgatgcggaatatatttcggcgggtagttgttgtgcccaattgctttggctgaaacaaacatggttggactatgggatattcttcaccaaaaccccactcctatgtgacacgatagtgccattaa

SEQ ID NO: 61893 - DNA, 467 bp, Oryza sativa
  unsure (1)..(467): unsure at all n locations
acttcagacccggacctctaatcacctgcagctgcaacttgtcatatataggtttgttttttggctttcaagagctcttgttccatttctgcattcttcccctgcataaaatgtacgatttaacgccgttaaaactatcacatttcagtcaacatatgaaagggaaaaataatagtcctggaattgtaaataggaatgcttatgttatatcattgttcagctagcagagacaatgagttgaacactaaatatatatacaataattaaataacatcgtattgaaatattgataagtaaaattcataggtcatgggtctgaaattgttgggatctaaaaggaaaattgtatattcttcaaaattggaagtagtggactgaaaatgtaactagagctcataacttgaaacaaggacataaaataaatntaactgttctaggaggtggaaaacaccttagtaaagtatttt

SEQ ID NO: 61894 - DNA, 405 bp, Oryza sativa
tcatgggaataagtctgactttgacagtctgatgaacaatccttaagtacattatgatgggagacgtttctcttacaaggtatagaagtttgttattccagtaactactagtcttgctaacatcaataattgtttcattggtatatttacccaattgtctatccttcctacctgaaataatattaatggctctcatcctatgcgccccactaaacataatcatccacaagtattgcttaatgccttaatatcatattgcatttcgactattaatcactggtgtggcaagctaaacctgtcatgaccatggaatttgtaattgataatgaaatgtttttctttaatgctcgtctcgggaaaatgatataatgatgaaattatttatggaaacatcaaatggttagc

SEQ ID NO: 61895 - DNA, 434 bp, Oryza sativa
  unsure (1)..(434): unsure at all n locations
agcttgaatggtgtcaaaatgcatgccaatcatgatctggttactggctacctgaaatccaaattgcattttagagttagtattaataataagcaacttatttaaaattcctcttatgtgataaaaaactgactcttcatgctctctgatcgcagggatttgtgatatcagattggctaggaatagacaggataacgtcaccacctgatgcaaattatacttactctgtgcaagctggaataaatgctggtattgatatggtatgtgaatttctttcaagaagattagttcatattttcatactagctacaataagcatggtttagtttaattttagtcaacattcatatcatgatactggaagtggaactggtcttactactttntttttgtggngggaagtcttaatacttattataccaatattaagctgg

SEQ ID NO: 61896 - DNA, 409 bp, Oryza sativa
ggcgtggttcaagatttcttattaatgacgcgatatagttatgacttgaatgatgtaccactgtgccgtgtgccatgaacgtactaatgtttattaacgcgtacatcatccataaatgctcgagtctctcagactgatcttatactgctaccaatcacctacatgatttaatatgtacacagttcatgccatgtagctccgcaggcgtgaggcttattgtgtttccttaattaattgctagtcatcttcggagtgcaaaagacttttatttcctaaactttattaaaaattggtatagtggcccgcgcagattgcgcggctagtatcgttacattcttttatacaatatcatatatattgttatattttattattaaaatatattaaaattatagcataacttttaatt

SEQ ID NO: 61897 - DNA, 451 bp, Oryza sativa
  unsure (1)..(451): unsure at all n locations
tcccgcttgaccccgtaaccgtcataccaacgacactcttctctaccgctggagtatccagtgacaatcatccgcgggccgccctctttaaccgtaacttcctcactaaccataaagctcatactcgcctcctttnttcgagtgaaacttgttcaccttagttgaagatggcgaattttgcataatagccagtgcgagtattaatgtgcctgaccgcgcattttctctacggttttcaccccagcaccacgatgccccgatgataaatccaagaatcagatttaaaacagtcggtaatatcatcgccactactgcactttgctgcccggcgaaatgttcaatggcgtgatgcagcggcgcaattccatgtaccacaatcccaccgccgacgatgaacatcggcagcgtgccgacaatcgataacgctttcatcagccatggcgcgataatc

SEQ ID NO: 61898 - DNA, 404 bp, Oryza sativa
  unsure (1)..(404): unsure at all n locations
agcttcttcactcccataatattgctggggcatggatgagcagagagcagaacatgctgatgaaccaaaagaaaagcgcacaatttgagcagagcaaactgaaactctcaacgaatcgtgaaatcgaaacatcaacgttgcagggaaaatggtcccagccatccacacacaggtccaaaatctccaaaacactaaacgagacgaaactggaacaaatccacacacgacaaaagctatatgaagaaattctctccattatgcagtaagaagacctaaccctaaactgttggagcgcaaactgccatgattcctagcaactcctggaagaagatgcattatangatgaaggcgtcgccggcacgagatgaatgtggaagccacagcgataaaagagggaaaaaagc

SEQ ID NO: 61899 - DNA, 461 bp, Oryza sativa
  unsure (1)..(461): unsure at all n locations
tagacaaatatagttgtttctggtatattgattnttcaatattagttgacagtcacatggtttgtaattcttgccctaagaaaattgttgtacagttagcaaaagatacttaattttgacactaaagttcatttgggatcctcagtaataccttccattgtttttaatgcgtcgccatatcgtcgcgaatgcgcatggcgctctgctggctccatggcgtcctgacgacataccatccagcgtatggcgaccccaatccatgccaggagagaatagggggattatggcgaccccaatcccatgccangagagaagagggggttatggtgacccataacatcaccaaaagaaagaaagagagagggagagaggattccatcttatctggaaccctatcagcagcgacgacgtctcagtatccacgactnccataaccatcagctctggatgcggcagatctg

SEQ ID NO: 61900 - DNA, 383 bp, Oryza sativa
ttaagtcacctgaggcatgcaagctttagccactatcaactccatttagcactcttgttccaatacacctgaatgatttaaccaaggaactagtaacacaaatctgcagtgtccaagctccctaccgtgcagttaccttgggctgcccctgtcaaccacaaaaattacacataacatgacaaaaattacacataacatgttagtaccagtcatctcaaaggtcgacagatatctagctggttggatgcctccgtccacaggaggaagactaaccatgataaattctgtgatatcatccattccaacatactacatggcttgttgcttatggtcagataaattcattgaggcaatagataagcaaagacgtcccttcttttgga

SEQ ID NO: 61901 - DNA, 427 bp, Oryza sativa
  unsure (1)..(427): unsure at all n locations
tgagcaaagctcaaacttatcaacaggaacatgctntgtcatcatatcagcaggattatcatgagtacttatcttgcatacctttagcttaccttgcgcgactacatcgcgaacataatggtacttgatatcaatgtgctttgtcctctcatgaaacatctgatctttggtgaagcatatagcactttgactatcacaaaacaagttaatgcaagaatcaactccacaaagctcatgcacaatcctttcagccaactgattctttacatgtttcagcaatagccatgtattctgattcagtggtagactangcaacaacatgctgcaatgttgccttccaactcacagcacaactaccaatggtaaacacataacctgtgagtgaccttctcttatccaaatcttgcagcaaatcagaatccacata

SEQ ID NO: 61902 - DNA, 373 bp, Oryza sativa
agctttgaacaggagaatctagtttttctttacagattttaaacctattaacaaactgcatccatttcatatcggagaaacatcagtcagttcaataccatatcacactgccacggaagaaacctatgaaacgaattttctatatggggatgtccagaaatcagacggcataaacgattttttgtttaccttttctaaatggagatgtccctctgtgatgaggggaagaaaggagatgcgccggtgacagactgtcgatgacgaatgccgccgcgggacagggtggtggcaggccgggattcgggaggtggtggaggcacggaggagaccgggcatgaggcatgcgactgacgttgatccggcggcgcgccgc

SEQ ID NO: 61903 - DNA, 436 bp, Oryza sativa
actaagcttattaccaacaatgaaaggttacaatatattcttttcgacatcacttcgcctgattctgaggcgaactgggttcgtcatcactgctaatactatacataactctcatatgcgaaggaggtatgatgcatgctaaactataccgacgacgagcgatcacttcttgccgatcggatctattaaaatctcgccaaaagcaggcgatatctttgtggcgttcgacatgcgtcgatcgcagtcttctaggtccgaccagggtgtctacgcatccagccagccaccttaagaactttataactattgtcgtttattatcatttcacgatacacgggccggaacgaatacctaatcttcggtatgcccttgattgtaacaaacttcttgttatcactttgccaatccctaaatggtggccaaacgcaattctttt

SEQ ID NO: 61904 - DNA, 440 bp, Oryza sativa
  unsure (1)..(440): unsure at all n locations
agcttagnttgtactggagctggggnttcattnttatagttatgctcttttacccctttttaattnttttttgtgatctactcagaatgaagttcatttctgcctatctccttgccactcttgctggtaaccctaacccatctgcggaggatcttacaactattctggagtcacgtagttttactggataatcccctcaattgtcacatgttgtcatgatcgttattttcaaatgatggtaatgcccccatgaatatttagcctgcttgcaaaagtggtttggggttttagatggtgcttccgtgatgtcaagggattcattactccttgtcatatgttaagaggctaagattngcttgcttatgaaaggttgttgtcttcgttttccagataatgtttagtgttaatgttgaacattttgaggtttgaacacccttttt

SEQ ID NO: 61905 - DNA, 413 bp, Oryza sativa
aatctaagctttactggattaccaaccacctatcaccatgttaattgtttcatcgactatctgactaaaatagcctaaacctttccagcagctaaaattgcgatctggtttggagtgactgtcatggcgcctggcctcaaatgtgaatgtgcagactccagagcgaatggagcaagaagaaaggaattgagaaataagagaatgtgcaccgtcggatcagaacgggtggtggattgagcagaactgcacgcccgtcctttgctatccaaagtccgagatccgtttcccagtccacaacatcacatgctatgggttgtaaaacaagaagcaaaagatatatatacaaaaaaaacatcacatatgctttggccgaatataacggataggcacctgatgcgaatcattatcaactt

SEQ ID NO: 61906 - DNA, 438 bp, Oryza sativa
  unsure (1)..(438): unsure at all n locations
agctctgngctntggcagattataagatctgcgaatgcataatctgggtgctgccgctgcagctacaggaaagcacaattgaagaggcataagaaaaagtaaatgatctactcgattcagagtaaatgtatttgaaaattactactagaacagagtatggttttaactaacaagcatcagaaattcagaatctacatacaaaatgtactaccaaaacagtgctagaactcaatatcaatagcgctacatgcttaattaagggcaatagcttttttttttcttgaaacaggatagtgtaccttagttgaagtcaaacaatatctcctaacctgcatataaacaaataaactcaaatatcaaattagctgcatacgatgagaaaaatggttgcggtccacattntgcacatcatctactgttttctttcgaaactgattg

SEQ ID NO: 61907 - DNA, 447 bp, Oryza sativa
tcttgaatcccatttcctcatgagcgaagtctcgccagttgaaattgatgacaaccatggtggtgttgtataccctgatcctaatctggatgctgatggcaacagtgatacatcaatggtgatgagctcaaaaaaaaggaaaaaatctcgcaagtatgaccagaaagctctgctaacaataccttgacgactacgcagcaatagataaccataacatcagtttaatgtacctgcgtcgcaacctgttcaagaattgatcagtgaactgacacatttgatgagaaagttcttgggtcatttgtgagaataagaatatctggaacaggtcaaaggcaagacatctaccggctcgtgcaaattgttggtaagataagacactttcaagctaatctggctggtgtagcttcatgatgctgactttcccatatctgtgtgcatgcacaggaa

SEQ ID NO: 61908 - DNA, 431 bp, Oryza sativa
  unsure (1)..(431): unsure at all n locations
agcttcttcttgaacactcacttgcaccctacaggtttacacccatagggtcgctctgtcacctcccaagtcccgttagcgataatggaatccatttcactacggacagcctccttccagtagtctacatcaggagatgcatatgcttctgaaattgacttaagagtgtcatccacgaggtacacagtgaaatcatcaccaaaagacttagccgtcctttgtctcttactccttcgaggagcttcactgacatcctcctcagagacaagttcatgtgtatgttcagtttgttctggtggtgtgattgaactgggaattatttcagatggttggttcgaaccactatgtgtatccttcattgggaaaaagctctcaaagaagatagcatcacgagactccataattgtaccaacatgcatgtncggtacctc

SEQ ID NO: 61909 - DNA, 437 bp, Oryza sativa
  unsure (1)..(437): unsure at all n locations
actaagctgagctgaatataagaggctctattgtactatattgtatactattatatgttgagagtagagtagaagaagtcggatgaattccggagttgtcggtaatcttctcctatttttnttattctgtttattactctgaattcaatataatattcttcttgagtaatttagatttatcttgtgagaattatctcttggttagttcctaaatagcatacgggattattgttcactataatcaactaactatagtgattgctgtgcgagttataaacactaaagtagatattaattgcttagacgtggtgtttatgtaattgttatccagtaattgctgcgtatcccacagtacgtttgatgtatgtgtagaggtggtaacagcccttgctatcgcttaagtactccctgtccgggtacgtattatagcgacatct

SEQ ID NO: 61910 - DNA, 438 bp, Oryza sativa
agcttcacaattgtaggcaaaacctgaaaatgccagtggttttaacttgtgttataacatcgtaacacacatttactggaatgactaacgaatattgggtgaaaacgaaagaaatgaagtcaaacctttgcactaaattggtcagctggaagccaggaacccatcttcaacaatacaaccaatgctggtgcagcagctgaaccaaactcaagagcagatgccagcacagggagcaactattgacagagtaaccaaccgataagcatataaacaagaaccgggggaataatgggttctattcatgacttgaacattacctttttcaggactatctcacgaggaagctgctcagctatgttcggtagtttacggaaaaagctatctttctcaacactgtcctttaagttaagaacttccatgaactgtatggtctctact

SEQ ID NO: 61911 - DNA, 404 bp, Oryza sativa
  unsure (1)..(404): unsure at all n locations
tcccatatgaaaaaaaaaaggaaggaaagggtgtagtattgacctgtctaacttgaatgaagcaaataataccatggctgggaagtctatttgttacaagtccccgatgacttactggtggggacaatgtgtgattgatcgctgcttttagcacactgttggtcacataatggcattatcaatgcatccgcttgtttcgtgtgacctgtgctcgacatatacaaaaaagtgaatgaagccacacataacaatatttaatctcccacagtacgccggccttcctctccactcccaagtcattcccctaaccttcccaagccgacatgtctactccncttccccaccaacactggcacaacttcacttcttccgaccgtctgtgcagctctacctactctccgtcg

SEQ ID NO: 61912 - DNA, 431 bp, Oryza sativa
  unsure (1)..(431): unsure at all n locations
agcttcntcgctgcaccctgttgcccgcgtgccctcttttgttcaacagagggncgacttccactagcctcctcctcctggttcccctccacatccctttccacgtgcccctgctggttcccctccgcatccctttccacgttcccttcctcgttcaagtactggtttggatcctcgctcccctcttcttcattccaatactggctgcttccctctgcgaatgtatcatacaatatctgttcctcattgcggtcagccatctgttgatacaagaaacatctgctaagtcatgagacatttatgttttaacaattaatctaaaacatgtatgctaagtgtaactgccgatattagaaccctaccaaccttacgactaagctattacaaatatgatatatgctagtctaaggacgatattatacaaccctact

SEQ ID NO: 61913 - DNA, 415 bp, Oryza sativa
tatgaccagctctgaatttgatcatgacagatgacacatttattaactggacaaactggagttacttttgtttgatagcaaagtaagccaatcagttcgagcatcacctacatacatattttggaatttcagccttgatttctatgatcgacttgtcagatacttgtgttccagctttattcacaacccttccatccacaatgaccttacctgaaatttgacataacagagaatgctttattaagctgctttacatacaaaaatacttatgtacatggttaaaaagtcatagctgaaaggtgaaatgtgcaatttcctggtagatgtcatatgtggcaatagcatgagaaacacatctgagtacgcatatcatacaatcttgtgcagtagggagaacttctataagcgtttcact

SEQ ID NO: 61914 - DNA, 423 bp, Oryza sativa
  unsure (1)..(423): unsure at all n locations
agcttctggtcctgcttctccttactgtttctgcttatacctccagaaccactgtagaccagtgtatctgtatcatcatcatcattctcataaacacctgcagcaacaatacatattgctacagagtcatcctcatcaccaaacttattcatataatcaattccacccatgctaggtgcatgcaagccgataatgcatagctccatcctgaagtagaaaatatcccctacttcaactccagggacagctccaatcctcttcccaatgttagccctcagattactggccaacatgatggcaccagccttcaggtctgcacgtttgctagtctcttgtgtctcatccaattgaagatgcctacgccgcagtgcctcgaaggtcatgagaagcacnttccacaacctcctgggatcgctggatgga

SEQ ID NO: 61915 - DNA, 452 bp, Oryza sativa
  unsure (1)..(452): unsure at all n locations
ntaatgcttatggctattgatgtactcgctccggtcatttatatttgatattnggagtaaatgttgatcatattttcaaagcttcgagccttngaccattaattntatgttatttaagttcataaaaatctaataggtttatgatattatgatagaactcttcaagtcaaatccactcactagcctcaaagaggaaatccttgtttggaagacagcaggagttttcacaacctgcaatggcctagtgaataatttgtacgacacgcaccatgtaactttagtttactatgttggggactttcccatccatctctacagccagcatgctgtcgttgtaagcttcaaatgtaatgaactacccttccctcttaatgaaattggtcaaccgaatctttcggctgacctggtaaaanaaagctaataatttgagaaagatttatagttaaagtatc

SEQ ID NO: 61916 - DNA, 424 bp, Oryza sativa
agcttggcccaagcgcacccactaattatgctctatatagctccatcgcaattgctggtgccgcagttcagtggttgagagacagccttggaatcattagcacagcagctgatattgaaaagttggctgatactgtgcaggattcaggtggaatatactttgttccagcattcaatgggttgtttgcaccatggtggagggatgatgcaagaggcatatgtataggaatcacacggttcactaacaaggggcacattgctcgagcagtgctcgagagtatgtgctttcaggtgaatgatgtcctcagctccatgcacaaggatgctggggaggcaggagaagtgaagagtgcagaaggggagttcctgctgcgcgttgatggtggtgctactgtcaacaatcttctcatgcagatccaggtaat

SEQ ID NO: 61917 - DNA, 376 bp, Oryza sativa
  unsure (1)..(376): unsure at all n locations
tgcttcttgttccagatttgatctgatcctaaaatatgttactntgctttccgctctatcggaaaacgttctaacgtattgattccgtaattctatttcaaaaaagagtgagactcaatctccttatgccatcccacgctaccgaagtagactcgctccgtctatgtgtcctgaacccgaagatagagaccccagctagacctatttagtttagttgcctcgggtgagctgaactaccagactagttctttacaactcggccccggagccctctatctagaatagctctctctagatttcccagaaatgttaccagaataagttacaactgactatatcttcttttcccagcgacgcgccctcccactaagctctc

SEQ ID NO: 61918 - DNA, 425 bp, Oryza sativa
  unsure (1)..(425): unsure at all n locations
agcttgcccatgtttgaatggtataagttttatatataacggaaaattggaaccatgccattataattntgtaaaatttaagatatgtcatcctgacccacatgtcattggctcatatgggtcctacatgtcattgagataccgatggcatatatcaaactttgcaaaataaacactattataccgctttagaccggaggttcaaccggtcagaccgatgaaccattgaaccaagggatttactggttcaattactggtctgatctcaataactatggttcccagttccctagcacacgctcaaaatagacggagacccgtttgacgagcaacatgattgcacatactttntgctatcatgtttccagttccctaacacacgctcataatagatggagaccacatttgactatcaacattgaatc

SEQ ID NO: 61919 - DNA, 455 bp, Oryza sativa
  unsure (1)..(455): unsure at all n locations
tatgaatattataatcacacaataaatgtctatgcttctttctatatagnttacaaatttctacatattcctcacgtattgaagggcaaaactaacttttctatacctattaaatggtcaactaacgatcaattgacggcaagggtatggaagagatccaaatcaaaattcagaggtatacaagcgagtgaagaaaattcagagacatagaagggatcggctaaaattttaagggcattacgaaatattctctttcgccatacatgctctgaatgtatctctgaagtctgataattttatggggttcagaagacttgcaagcttcattactttggtcgtatgtctatcggcgagatcaaagatgtaattaaaccatgtaatttccgttatataagaaagatcgatcataacagtaatgctactgtgacatctatatgatacgctaatgcatgatg

SEQ ID NO: 61920 - DNA, 378 bp, Oryza sativa
agctggccgttcgccttgggatcgaccacctggttcgccagccactccggatggatgacttcacggatgaatccggcctccaaaagtctcgccacctcctcgcggatgaaggcttgacgttccggggcctgccgccgcactttctgccggaccggccttgcgcccggccgcacggcgagacggtgctcgatcacctccctggggaccccgggcatatccgccggtctccatgcgaagacgtcagcgtttgcccgcaggaaggagacgagcgcgtcttcctatttgccatccagaagaccaccgatccgtgtggtcttggatgggccgtcgcccatggcaacctccttgaccgggacatcgtcgcatgtgtcaatccgc

SEQ ID NO: 61921 - DNA, 289 bp, Oryza sativa
catttgggtgtactcaacgaccgatacgtcgccgatcatcttacgggcttcggcttcggcttggtcaacggttaacactgcacaggaaaggaaaggagtcagggtaaaaggtcaacggagagagctaaagcgccaagcatatcgcgaaaacagcagacttactgttcattccctcatggaggaccagcttatgcatgccatcaacctcttcgctcaaggtaaccgcaaactgccatgactgggagatgggaaagatgcgaagcatgcagaactcctccaccaggtcgcg

SEQ ID NO: 61922 - DNA, 399 bp, Oryza sativa
  unsure (1)..(399): unsure at all n locations
agcttgtatgttgtgaataaagaaattttctagtattgggcatacgccatgcgcacactgctttaacagatgtgcttaagtccctagaagacacatggttccaccacacctggaaatatatggcatatgtggtataaaatccgagtaaataaactcataaaggatttaccaaccgcctgaaaaatgaccacaatatataatcagcctaagccataatattggtcaataaaaatgcacacttacgtggcaaaaagcaatgatattgtatccaatcaattgcttaaaaacccaaacagcaccatgactatataaaaaagtcagcaggccagctatataaagctttactgtttgacaccttntaagatgcattgtaccaactcctaaaaagttgagtaactg

SEQ ID NO: 61923 - DNA, 448 bp, Oryza sativa
tcctgttaacatattcaccacttttctcatggagggccggtttgctgggttccactgaacacaccatagcgccacaatggccagctttctcaacttttctttctcttcctgtgtcatatccttggcaaattctgactcttgcgcactgactattgtctcatatatccactctggaacaaaaacctcattttggctgttgatacttggatctgagttcctctttccgctcaacatttccaacctagcatgccaaaactgaaacatctgacttgttagataccgcgccaaagttcctataatatagttccggtgcaatgtaacccattgtgcctcttgctgcagtcaatgtgacaatgctttgatcccttgcgcagagctttgcaatgccaaagtccgaaatctttgggctgaagctgtggtctagcaaaatgttgtgaggcttgatatc

SEQ ID NO: 61924 - DNA, 348 bp, Oryza sativa
  unsure (1)..(348): unsure at all n locations
agctttacgacaatgtttttcttaagcttattcaggncnaccacatgccgacgagaggggtcccagaccaacaacaagatatgtcccacaccatactgcgccaggaagcccaggggtccttcccgacaccaccccggcgaatccacatgtctctcggcatcaaggcttccctgttaagctagttactcagccaggggtgttccattccacccatgtggtcgtacttgtcttatgtttggatgaaagcccattgaatcggcccttaagtgcgagagcgggcaaccgtacacctggtactttcccctgttcgcggttttggaaattcatttaggtcgcaagcgccgaccc

SEQ ID NO: 61925 - DNA, 318 bp, Oryza sativa
  unsure (1)..(318): unsure at all n locations
gaccccgatacatngaccgccgtcaccgattggaagcaacccaagacaggtcctcagattcgcaatttcttgtgtttggcatgatactaccggagattcatcgagaacttctccaaaatcgctcgacccatgacacagttgttgaaaaaagaagagaagtttgcgggagcccgcaatgcgcaacgcgctccaaactctcatagaatagctggtttcctcgccagtgttaatcttgccggatactcgtaaagatttcatggtgtactgtgatgcttcgcgccaaagattgttgtgcgtgctcatgcangacggtcatgt

SEQ ID NO: 61926 - DNA, 423 bp, Oryza sativa
agcttcgacattgcgaccgatctgaatttgttaacatctttgaatcatgcgctgataggttgctcctgcgttcttcaatccaaagggcattgtgatgtaacagtaggccccaaagggcgtaataaacgaggtcttcaagcagtcggattcttttagtcggatctgatgatatcccgagtaacagtccaagaagctgagtaactcgcagccggccgttgagtcaaccacctggtcaatgcgaggtaacccaaaagggtctttgggacaagatatgttgaggtcggtataatcgacacacatgcgccattgccccgtctttttccgaaccataactgggttagccagccagtcgggatgaaggacttccttaataaagcctgctgctaacagcttggttaattcctccttgatcgcatcctttct

SEQ ID NO: 61927 - DNA, 419 bp, Oryza sativa
ctgacaatttgctttggaaagtctttccattcaccaccttttctatacagaattcgcttaagtaaagcactaatcatgatattctgataactctgtataatctgcatcttgaaatggcacttgatctttgccttgtgaccttcatcaacatataacctaacaacagagttatcggcgggatgcttatgcaattaataggtgttgccggcatcagcgcaacgtgcatctgtgttgtccgctttctcttgatgcacttatgtttcttccacatttatccaataccttttcgttcatcgcagccatggttgctagctgaaatgaaccatagactaataatttttaacaaactaaactccaacaagcctactatttacactaagctaataggcaagcttctgagtgtactcaagttcattatc

SEQ ID NO: 61928 - DNA, 426 bp, Oryza sativa
agcttggacgacgtcttgtgtcaggctccgtcgcggtagtttatgttaggttacttgttggtgtggtgtcgtagttgtggttttcgcttattttttcctaattacctgagcattgtaaggtttggtcctattttcttcttaaaatagaatatcttcttcttaatataaaacgtcggcaacagcctgaccgtttgaaaaaaaaagaccatgtgcagagatagcatcctttcagtgtataccatctctctcgtcaaagcatggacattgcttgtagggcaatgcacattggacacagcactgtatttggatgccatctcatcactatcgtggaacataagtaatgtgccaaagctacagcaaagtctaattgaacagatgctgagccataataatgagatccccggcttgatcagcggtggattcatg

SEQ ID NO: 61929 - DNA, 448 bp, Oryza sativa
  unsure (1)..(448): unsure at all n locations
tnctcggactgaacgtcggcaattcaaatccatataatatatatcttgaagaataagcctgggttattttttttttgtcaagagacataaaagcaatggataaaattgaggggatctaacaaactttaatctgaacgaaaacatatgtttactgaaacctagattaattgaaagttaccgatagaactatgacaaactttgcttgtagaaaccagacttcactatagagctaacaaaaattccacacaaggtctggtttagctctaactttttcttcaaattttcaactttttcatcacatcaaaactttcctacacacacaaactgtcaactgttccgtcgcatcattccaatttcaattaaacttccaattttggtgtgaagtaaacacaccctaaaatctaacggttagatcaaattctagaagaagaatgaagttagagaaaag

SEQ ID NO: 61930 - DNA, 438 bp, Oryza sativa
  unsure (1)..(438): unsure at all n locations
agcttaatagtatagtcaattgctggctcttaatcatctatagtcaacttgatagctaatttatacaatagttgtctataaacatatactacataattaatatctgctcccatttgtcatacacatatgtactttagagtccgtgctacagctagctacaaatctgtaacccggagcgctgcccttctctctcctcttttatctttttgaaatgtgtttatagctggtttatagcctgctattatacctgctcttatgattatggttatggatcggaaaaagtacaccgaaggtccctcaacttgtcatcgggataaaaaaacgtccttcaaccgcaaaaccagatatgcggggttccttaagcatacaaaaccggtcacccgaggtctttcggtggttttgaccccagtttnggtctacgtagcggctgagtcaccg

SEQ ID NO: 61931 - DNA, 272 bp, Oryza sativa
ctcagcttcatgaatgagagtactgaagtggaatgggtggaggctcttgtttcatcttgtcatatataatggtgtatcgcacatatgctctttgtttctatgttggtgcacagtttgtacatggggggaaatcaacctttatagatgtctttagaataagagattcacatttggcattacttatatatagttgtttttattcatgacaatatgtcaatcttgtaatcgctttgcatggttactttgcttcagtttcacagctttttcaccct

SEQ ID NO: 61932 - DNA, 436 bp, Oryza sativa
  unsure (1)..(436): unsure at all n locations
agctntcgtttcaatcaccatcatccatgtgtttatccaacaacacgcacgacgtgacgccgccggcggtggacgccgacatcatcagcgagctcaacgacgacgtgctgcttcacatcctcggcttcttgccgtcggcgagggacgtagcgcgggccaccatgccgtcgaagcggtggcgccgcctctgggctctcgtcccggtgctccgcttcgccgtcgggccgggctccttcgcggatgagcacggcgaggtcgaccgggagaagttcgccgtttctcgtcgcgacgctgcccggcggctcatcaccgccgtggacgccacactcctcgcgcggngcgccgccggcgatggcaacgacgtcgacgtcatggagatcgccttggtgtacagctccgtagacaagtactatgtgtgtagttatggcatggagag

SEQ ID NO: 61933 - DNA, 456 bp, Oryza sativa
tcgattggtggatacaataattccaatcttctttgccaatactactactcttccttgctctatcttatttcaactactactactttgaatcccgtcttattatctctatactacttcttatctcttggattccactgccaaacttcaacagctggtcttgtctctacttgattgaactgcccctgcaagtctgactatgcaccatcggcattgaaggaaataaaaaaccttgaaattgattacgcagatcaaagatcaatgggaaactctcactagctggctagaacgatgttcgttcttacccacagccgcaatgggcgcttgaagggcactaagatccgctggcaaggaactgtgaggagatgagattctctctgccgtattttataagttcttatatagaagttgtggcatgcatatagttagggcatatccttctttatgttgttgttatct

SEQ ID NO: 61934 - DNA, 375 bp, Oryza sativa
  unsure (1)..(375): unsure at all n locations
agctngcctccatctcctcccacttcggtatcgcgacgctatatccgcctgaccccaagtggtgatggtacttcttcttaacggcattttctttgtttctttccaacatcgcctgcccttgttgacttgtcttatatgcaacgaactcgtcccagtgatcccttaactctgggaatgtgtcgaagttcggtgtctgtcccttcaagatatatttttggtacaaatctcccttgaagctttgaaactgttctgccattttctttatagtccaccttttcactttgtcctatgtaccccggggaagggtgaatgtctcgagcattattgtccacagcatctctttctccgaatctgggacaaagttctcatgatctc

SEQ ID NO: 61935 - DNA, 432 bp, Oryza sativa
  unsure (1)..(432): unsure at all n locations
cccactgaggttacttgtatcacattgcatatttccctttccaattgcatatttgctttacaattgcatcttattaactgaaaacaacataaaaatttgcaaactagaaaatactaataagatatgataggtttgagtcatgatacgtaagataagctagttctctttgttgaaatgatgaatagttgctctgttttatatctcttatatatgggttcgtggcagtgctctctcaaaggtaaatataagtagccaacaattatctgggagtctgaggtaaatgagctgcacttgctgttcagagtctaagttgttgtgagatatgagatagtaaaataagagttgctatgaccctgatactatttngaattgaattcccgatgttttgtgttcaaaatgattaaatgagagtgctcattaatataaatccta

SEQ ID NO: 61936 - DNA, 429 bp, Oryza sativa
  unsure (1)..(429): unsure at all n locations
agcttggtagagtatatggtattcatggatatattangataggatngatttgtgtgaactccttccatatatgtaatcctttcttatctcattcccatgtactcctatatataccggtcccctaaagctcaatataagtgtgttaatattcacagtattcctcttcctatactatccaacatggtatcaaagatcagagcgggcgacctatagccgcccctctcacgcttccgccgccgctgcccccggaagtaacgatctcccgggggcggccacccgtttttttttcgtcttcgcgtcagatcgatctggttcagttcccagattggtcgctgttgtgtcgtcctggagagatcaatctccgggcgttcatcgtcgttgtcatgagaggatcgatctcgatcttcttggacgacatgtcgttcgtct

SEQ ID NO: 61937 - DNA, 433 bp, Oryza sativa
  unsure (1)..(433): unsure at all n locations
tctgtntaaaaagataagggtgaaatcataaataaagattaatggaagtaaaatcatgtttatagctgaaaacagggttaagaatgcaaatgcccttagtataattttagaaataaaattttatttgatgaaagttaatatcattagtttgacatttgaatgtacttcacatggctataactaattttgttgctacaaacactgtatgagaaaaaggacaccctctcaagctcgatcacctcgtatattttgggataaggagtatatattacctctcacatttatttatacacttctcatccagttggaacagtaagatcaaattccaaagctctggggaaagcatcatttctttgctgggataaacagtactgtattgtaaactactagtgcagagtcacgagcagtgcccanattaagatgagtaagttat

SEQ ID NO: 61938 - DNA, 424 bp, Oryza sativa
  unsure (1)..(424): unsure at all n locations
agctntcgacatatatagcgtgcaaaccttacgattcttccgatcatttcatgccaccacaatgcagcaaagcttacgaaaatgtcaaccagatgaagattgtaatattgatacatgtcaacgaaacattagcgataaataaatattcgtgtaaatttttagtgacaaataaggaattgccttgcaattgtcaacggatgtcacagcttcttccgatgggagaattatactaccggagatggcccatggattcagagttccagagcaccttgttaattaagtctgtaatccgcaggcaatttctccctatgcattatgcaagtatgcaacatgcaaccatcgtatcgttgactaaggtgaactcaaatttcaagctatagttgcatactcgcatgaatcgccagttcaagtagtagtccaatgc

SEQ ID NO: 61939 - DNA, 459 bp, Oryza sativa
  unsure (1)..(459): unsure at all n locations
tgctgttgagaaactcaacgtgctgcactccaagttcctcatattgatctgcattaaaatatatacttgagtttgtcagcaatttatctgtgtatgcaataatgcatataaaaaacaatgttaagtgttagaatacaaaaaaagggcaaagaaaaatgtttgcatacgcatacataaatcaaggctatgtactatactaagacagaagaccaaaggaaaagtgtccatcttcaaagaggacttccgtttgtcatggttttttaatcctccacaaagaagtgtatgaaattgttgtactggttcatcattcgtgaactttttacgatgtgtaaaaggagctaatccccacttgatgacttggcctccttataactntctagattgcaaagataaaacagcgcagctttaccaatagtcagcatacaactagaggtatttaccatgacagcaactccacta

SEQ ID NO: 61940 - DNA, 440 bp, Oryza sativa
  unsure (1)..(440): unsure at all n locations
agcttctcgatcatatcgcttcttgctgttgcagttgcacacgcggctgtttgctgcacgacggcgtccctctctgactttccgataggcgagcggcgtanggcgtatggagatgggagggaaaaaaaaatctctgaatgttgcaccaaaagacaaattgggtaaagtcatggatgaaataaattctgtatgtacgaacacctagatgaactgatcatgatgtggattaaactgaaagagctgacggggagtgacacgggaattattgaaggttttttgttgccgagaattgaaattcttatctggcacgttttttaaaagaaaaagaaagaaaattttggaagagacaagaaagggaatggaatggagcacgactnttatccgagcatacggcaccggatgtcaagaattcagtttgagttttgggttggagcctggat

SEQ ID NO: 61941 - DNA, 434 bp, Oryza sativa
tatggcattagtatgtaggaagttgagtactattgtcattggtggactccattgggtctgtctcaactcaatcatatgtatgtccctcctatagttgtgttaactggctaactgctcgatgcccttcatgaaagaaagagaagatagatgtgaagaaaataattctttccataaaaatattttttttacgttttgagtagagacaatttgtttgtattgttaatcagtgctgcttaagttctatggcatagagaaaaattctcttttgaaatgagtgaggttgattattaagaaatgtatcgctaaatatacatacgaccgtgacaatcttttaatgaagcccgcgcggttgcgcgggcatcttatttattggtctatgaaataatgctaaaagaagccatatctcacatttctacgtcgtgagatagatcata

SEQ ID NO: 61942 - DNA, 407 bp, Oryza sativa
agcttgaatcagacaaatggaggaaagactccacagcaaaaggaaaaacagcaaagcagtaaccgcccgtcatctcggagaccctcttatccgaaatcaaatgcatcattttatggccggttgcatttacaaaagcatgcatacccaagtgttccaccagagcaagcaatgtaccatatgtggcatcaggtgcaagcaacacagcagaagccgcattttccaatggtacccactatgggcagtacaggctttccaccgcctccaactgtgctccacatgtaccctccacctagagggcaattcaccatgccatccagccaagatggtttaggtcttattccattgttatcctgaagcttccccgtccttccacggtacttctcgccttatcctgcctcctttgtacc

SEQ ID NO: 61943 - DNA, 451 bp, Oryza sativa
tcctagaagattcacccaatatcttcatagactgcgatcttcagtcaagctcacaaaggtgagttccttcaagaatgctctgcatgacaacatctttgctaatttaagccaacataactcatttatgcatatccaacctgccttgcagctcacgagagtatatgcatcttcacttggataggggatatatattgggactctcctctagtttattaatgggttgttcttcccaggatcaattcacgggatctccatcacatagactgggttaccaccatattataactcacatgggtctcatacccatctccttcgatgcattgtctatcacatttcgtgatagtccacttgtgaaaggatctgccacgtttctcgctcgttggatgtaatccaacgttatatactcggagtttcttaatttcctgacagacttaatcgtcttttcacatgt

SEQ ID NO: 61944 - DNA, 408 bp, Oryza sativa
  unsure (1)..(408): unsure at all n locations
agcttagatggatgggtcattggtaatgtatactntcagacccagttcccctttcacacgtgagaacatcccacgcttctccagtggataatgcatgacaaccgcatcagggaatggcacgaatgaggttccagcaattctgaccttgccaaagaaggaccttgaaccatcaatggatctgttgatggtgtagacgtacgcttcaagcgcaagctcatgaagattagacggatccgaaacgttgaagtagaagcgctcattccacactgggttcagatccttgtccttgatagccgtgcggaaccgctggccatcaaacgtaagctcgacacaggcacttgctgaaccttgcccatccttgggcatcaagtcatgagcacttgcaacctccacacccaacttatatgc

SEQ ID NO: 61945 - DNA, 452 bp, Oryza sativa
atactaagctgtcatccaagatcacgtccttcagacggttttctgtcttatacgacggataatagctatggaggtcagaaatgcaataatcattactactgtcatcaccactgtatcagcatgaaggtggcttatttcctagtaaaagaatgaacaatcatgcaacatgaagctggatattgtaaaaagtcaaaaaattggatatactcacccgcccagttatgtggacatatggcgactttcgccaattacaccgctaacggatcattgcctaaccagccagctgaattaaaatgtagccaattatgatcgtatgtgtgtaacatgttaaatggcatacaatggaatttcccttgctatattttggaattatgacatgcaaaagtgaaccatacctctaatatataaaaacatggtaacagagattactatagcattgaaaaccactacag

SEQ ID NO: 61946 - DNA, 437 bp, Oryza sativa
agcttgcccgtggcctgaaggttcttgttctcaacagatggatcgtgcaagaatcgggttgtttcttggtgataaacaagaacaacattatgagggccagagggacaaggcttatgcttgatcgagggtgatgacggtcgttcagtttcatgaagatggataataggttcagaagaaacggacaaagatacaaacaatatcacctcctcgaacggctcatggttgggacgagccttcttttttgctggaataattcagggtgttctcataatcatcataaagatcacccctgaattggaatggaatttccgaaggatgaatttcttcttcctcaggctccagcatttggaatgaggattcggcagttgagtcgggttccgactccacgtgcagaggttcctcatcgataatctcgacctccgagacggcttcacttc

SEQ ID NO: 61947 - DNA, 429 bp, Oryza sativa
taatatacctaaaaacagtaagatctcaacataaagggcagatctatcatatctattaagcacataaaatataaggcttaatcaagtaagatcggctgaaactccgatgaaacccttatcggcttccaaaaacatgcaagagattggagttctaatcacgacttataagatcaaacaactgatgcagccataagtatgaaaagaaagacaatatctatataatcaagccattgattgtttcataggaggtagataccctatatatctaagccaacgttgatatttaacttaattggctatcttctaacaatagatgttagccggctgaaggttaaataataatattgtcaaagattatataaaatatatgataactcgacaacttacataaacaagattagagtatcataatgatagaagcactaatct

SEQ ID NO: 61948 - DNA, 431 bp, Oryza sativa
agcttaaagccatgaatcccttctatgcatatctggatctggatcctacagaacaaacatatcggatgagtagtatctgatataaatataatactcgagaaaaattcaagtatttaaaatatttacaaatatgtatttctcctcttgtcaattttgatttccccgagcggatgactccttacgtttaaatactctgcccgactagtcatagtccccaagcatcgggagtcggccaaagcacttcccagacatgcatatgagtgacatgagttcgtcattaatggaacaaagtttcacagatcggagtttactactcgggtacttttgcaattgtaaagagcagaaaataaatttatcttatctttatgcttttgatttattccgaataatacttagcaccttgcgttactcggtccatccaacgagccccc

SEQ ID NO: 61949 - DNA, 422 bp, Oryza sativa
caccccaattaaaccggacattccatcttcatatacttcgcttactattgctgaatacaccattccagatgtgaataaagcgaatagcgaaccttccaaccatgtgggcattggcttgacaacagaactgagaatggcatgaccttgaattgagcaattgcttctgctataaccgagaaacaaagcacatggatctcattcggtatccccaacataaggttcacttcgtcaccaggaccaagttgatacaactgccaaagcatacatcgtctgaactccatccacaagccgcctcaaagggatcgttttgagatacttattgtagaggacagtttgagatagaaccatcacctgcccaacaacttttgataagccgatgactgatggatcaagcttcatatactgtgtttgaatcaaaacat

SEQ ID NO: 61950 - DNA, 430 bp, Oryza sativa
  unsure (1)..(430): unsure at all n locations
agcttgcttgtggtatcctcttctgtctcgtcaagatagtcccttatgtcaaaagagaaaagattggctaagacctgcaataattatttaaagggagttagagctaaatagacatggccgatctaaattcttgtgtcaaaaggaaacttactgggatagcagaagcagntggttgttcttcttcttcaatatgatggctctctacggccgatggagtttggtcactcgatgattgttgtacaggagaagaaggaggaggaggaggctgtaaaagagacaagtgttagacaaaatcggctgagatcaactagtgaaagcattaaagatatcttattggtggagccggttttagagttgttgatgccgatttcttcttcacagcaattctctttttttgcaaggaaaagattagtgagaaaatcggtgagga

SEQ ID NO: 61951 - DNA, 434 bp, Oryza sativa
  unsure (1)..(434): unsure at all n locations
cctaccaaatagaaaaanaaatatagagtgaatctcaaaggttgttctttatgatcncancgngaatgtgactagtgttaaccagaaatatatttccttttttcccttctactaaggcgataatacagatgagctacattcacatttaagccataacaaattgngatgctaaaatcactttaacttttaaattacctcggcgaataattgatcaagcccatgcgatgatgattctgagccgatcttgacagcaacctcattccatcttctaaacaaccatataagacgggtccaaaacctccttgtccaatgaaccgttcaaaattattagtgaacttctcaagctccttatatgtaaattggcgattctcaacttttagcaatgtgccttcatgattatttctacttgctggagcaatatcaagttctggctc

SEQ ID NO: 61952 - DNA, 441 bp, Oryza sativa
  unsure (1)..(441): unsure at all n locations
agcttatgagtttagaaactatntcatattttaattggtctacttccaatgacatggccatgtgttattttaggtaaactacgaaggtaaaaattgttaattacatccatccatggaaagcccaatgggggagcttgaagattaaaaccacaccaaaactctatatataaaaaaaacttgaactatttcatgattttactgtgtgttttaacaaaaaaaaaacataagacagcatccaagcctcttttttttttacaaaaaaagaagaagaaaaatccaggctcttggcattttggctgcttcctgagctcgttcggtttacaggatttccaaatcataaaaataggaaaaacataggaattgcataggaattgcaaaaaaaagattgtgaaaatgtacgattgatctttcggatggctggtaggaaaaatatagtaatgc

SEQ ID NO: 61953 - DNA, 446 bp, Oryza sativa
atgtgtacgaattcacgcacaattaagcaccaaccgtggtcgtcgattattaattacgaggagtacctgtatataatcatattgtttgtacatacgcgctgatgatcaaataaaatgggtcacctcagcttggaaacaaagcttgtcgatcgaacggtgcataggagacactgtacctggtcctgtaactacagcaaaatgacagaacggattatgaatttggacacataagcttgtaattaccgcgaacagagaatgcacgccccccatccttccattattgctcctcatctaaggcattcatttgccatatatacggtccatctaggccctacacttaactcatcaatggctattatgtacggtgccttgagaaaacatcttttattatggcacgctctccgagtatatatatcctatagaatgtaaataaaaaatgtgacatg

SEQ ID NO: 61954 - DNA, 437 bp, Oryza sativa
  unsure (1)..(437): unsure at all n locations
agcttggcatacaattgatgttcccgcatctttcccttcaccggacggagatggtgctgatggtcttcctttgattgtgagtacaccagaatgtcgtagatgaagaccacaacaaacttatccaagtattccatgaacactttgttcattaagttcatgaagaaagcaggagcattcgtaagaccgaacgacatcaccgtgaattcatacagtccgtatcgcgtggtgaatgcagtcttcgggatatcttcttcacggatgcgcaactagtgataaccggaacgaagatcaatcttggagaataccgcggcacctttaagctggtcaaacagatcatcgatccgaggaagagggtacttggttttgatagtaacttcattgagagctcggtagtcaacacacatnctctttggcttggctttattctncacaaaaat

SEQ ID NO: 61955 - DNA, 417 bp, Oryza sativa
  unsure (1)..(417): unsure at all n locations
tgatacttcgttgttcttctatagtaaaggaggagttactgtattagtcttgatatatgtcgaagatattattgtggctaggtctacacataatgctactgatgctctattaaatgatctgaatcgagactttgctctcactgatctgggagaattgcattattttcttggtgtggacgtaaataagatacgtgatggcatattgctaacacaacaaagtatgcttcatatcactaaaaagagcacgaatggaaaattgtaagtcttctactactcctctttctacagttgaaaaactctcaacctataatggttctgtgttaggagtaaatgatgcaacacaatacaaaagtatagtgggtgcactttattatttgaccttgagtangcctgatatatcttatgctgtgaataaag

SEQ ID NO: 61956 - DNA, 389 bp, Oryza sativa
  unsure (1)..(389): unsure at all n locations
agcttcagtgacagtagatgcttcctgttttcaatantagaggaagcaactaagcattgtatgttatagtaataaaaacaatatagtgggagtgtaggacataccgattctgattcatcgccaagtaccgcgttcaatgcattggtcttgttagcaatttcagctatcaacatataatgtgatttgcaattagatgaaatggaagaaacatgaaaggacaaattaaacttgaacgatacaaaagcaaaaatgaaattacctaacatatcaacacgaccccatgcttgcacacacataagtgcctccacaagatcaggtttaagctgattacgatttggagttatcaccctcccaccagtactaaatgctgattcaaatgctactgttgt

SEQ ID NO: 61957 - DNA, 404 bp, Oryza sativa
atgtacaccgacttatcctatcacccacatggaggttggatgtatcgatgccttggcaaacacttgctgtatggctgcaatcaaatctgtggagctctgggttgacataaatatgtatcaaagggatagcaaatgctcaaatcagataatgcaaagttgaataatggtttaaagtcaagtaccgtgcttgtcctcgctagaacgtgctataacgcgagcctatacacatacgataccacatgatagcactttgaacaactcatgcacaactctgatatatgaagttcaactcatacataacagtattttctcttttctttctttcttctttctttctttattactttacttttcttttctttatttttggagcggcatttcttttctctttgttttcacctttc

SEQ ID NO: 61958 - DNA, 412 bp, Oryza sativa
  unsure (1)..(412): unsure at all n locations
agcttcagtgacggcacatgcttactgatttctttctttgaggacacaaccgagcgttgtgcgttatgataataaaaccaatatagtgcgagtgtatgacatacagattctgagtctaccacaagtacacgtgtctatgcactgaggcttgctatcaatgncgcctatcaccactctaatgagattacgcactgcaaagaaatgatcatatacatgaaaggacaaagtatgctagatcgatacatatgcatatatgtatttacctatcatatcagctcgaccccatgcttgcacacacataagtgtctccacaagatcaggtttaagctgattacgattgggagttatcaccctcccaccagtactaaatgctgattcagatgctactgttgtaatacggattgcaaaatgt

SEQ ID NO: 61959 - DNA, 442 bp, Oryza sativa
tgttacacagctctcacatgatcttaccaacgctagctgtttggtgatgtacaccgacttatccatgcacccacatggatgttggatgtatcgatgccctggcaaacactggctgcacggctgcaatcatatccgcggtgccccgggtcgacctaaatatgtagcacatggatcgcgaatgcccaaatcacataatgcccagctgaataatggtttaaagtcaagtaccgggctggtcctccctagaacgtgctatacacccagcctctacacacacgattccactatgattcactatgaacaactcatgcacaactctgatatatgaagttcaactcaaacataacagtattgtctcttatctttctttcttctttcattcttttttcctttccttttcttttctgtattttatggtgcggcttttcttttctctttcttt

SEQ ID NO: 61960 - DNA, 289 bp, Oryza sativa
gggaattcagtagaaaattgaccaaatgacatattattcattatcaaaggattctaattgatacctatgagaatgacacgcgggactatccgagtgaagggaaatggataggtgactcatataattgaacctcaatcttgcggagagtgaaattatcaaatctctcgggtttgagggacagggcacgggcaatgttgggtgctttgaagctccgtgggtactccatcatgcagctccgtatggcagtccgaccagtgcatacaagagtattagtctaggaataccataa

SEQ ID NO: 61961 - DNA, 453 bp, Oryza sativa
  unsure (1)..(453): unsure at all n locations
ntagagttagcgggttgtaactgtataaaaagtatatatgtatgtactttgtattattaggcctagtttagttcctaattttttttttccaaaaacgtcacattgaatctttgcacacatgtatagaacattaaatatagataaaaacaaaaactaattgcacagtttgcatgaaaaatcacgagataaatcttttaagcataattagtctataattaaccataagtgctacagtaaccatatgtgctaataacggctaattacgctcaaaagattcatctcgcggtttccaagcaagttatgaaattagttttttcattcatgtccaaaaaaacccttccgacatccggtcaagcatgcgatgtgataaaaaaaattcttttggggaactatacatggtcttactttgcgttgctaatcgcaaagtatattcacaataactacttataacgt

SEQ ID NO: 61962 - DNA, 437 bp, Oryza sativa
  unsure (1)..(437): unsure at all n locations
tgcagctttgatggagcattcacatctaatattctaattaattatngagcactttacacagttacagtactcttgactttaattcgattatacaactgctaaagccattgaacatatatatattcatgcatacggaggcaacaaactgaaagtctgaaatataaaattagtacactcgctctcacaagtggtttaatttgttcagtgattnttttagatagaggggcaaactcgagggggaagctagctagtgcgtgcgcgccagcgacacgcactttcgcgcgtaactaacttcattagttaacgctaatgacagtaattagaaaaaaatatgaagaatttttttttgagattttgatgaagacatcctgcactattacccgctggcaaagacgcaaaagtctggcggcgaccgtgtgggtctctgaataatccca

SEQ ID NO: 61963 - DNA, 444 bp, Oryza sativa
atactaagcttacaacgttagcgcctcccttcggaggtaggcccgtccttaaatctctagacgttattttcagctgagttatcgaattatgaactattattgttaccacggttctcaaactacaatttctctgtcaaaattttctgcaacagcgttgcttatataacctgttctaaactacccctattattctaaactagaaatgtagctcacacattctcacggacaccttattgaaattgtcataacgtttgctattggcatttcgaccattatgatattgtattattttgaatatttttttgataattttaatatttgtattaaaattattttgaataatttggataatatttgaatattatatatttttaataatattgtaaacgtgcgcacagtcatctttatgaacgcacatcatgcacattgtaccctcttaataat

SEQ ID NO: 61964 - DNA, 398 bp, Oryza sativa
  unsure (1)..(398): unsure at all n locations
ccgacgccgacaaaattgtgcgcacatgtgaaggttgccaattttttgccaaacaaattcacttaccagctcaagagttgcaaactatcccgctgtcttggccgtttgcggtttgggggctcgacatggttggcccgtttaaaaaggcagtcggcggttacacgcatctctttgtggcctttgataaattttccaagtggattgaagctaaaccggctgtcacaatcacagcagataatgctcgcgacttcttcatccacattgtgcatagatttggagtgcccaatcggataatcactgataatggcacacaattcactggcggagtttttaaagactcttgtgaggactttggaatcangaattgctatgcctccgtggcacaccccatgagcaat

SEQ ID NO: 61965 - DNA, 422 bp, Oryza sativa
  unsure (1)..(422): unsure at all n locations
nggaagagaggcaagattgttttgcaaattctttggttgttatccattttgaaattactaagtgatttatttcttcttaagtttggatcgaaaagagacttgcatctcgattcgacttgagagatgcttttcaacaactcaaatggtaatgtaccgacctcccaggtcagatcattacttctcggctcccagagccatttcacttgattaatcggctcctaaggtctttttcattttcctgactcccagagtcctgcgccgcgcagcaaagcaatccgcttccactcggaaagtctagtctatgatggccgcagacatcccgaatcacacagatttgtttctgaccactcatgtcatatatctgctacatatgctgattctggtgacgattctcaatccgcaacaactttttacaaagcaca

SEQ ID NO: 61966 - DNA, 354 bp, Oryza sativa
atatataacccaacccgctaatcgccaggggttatgttctgctaaaacagagaaagttggacgtacagctagtgcagtgcgtactctgtcagtcccgtagatgttattctctcgaaatgttgaaggacacgaaaaaaaagttgctctggctgtgtcctcccacgaaatggtggtaggcatggtacttcactcctccatacaacgggatatacttggtcggatcgaacggcaacttgaacctgcttcaagtatagttttcggataaataagctaaatgctactagtctatatactaacgactaaggaatggtcattatctatataaatacgagctatgtctcatctaatatggct

SEQ ID NO: 61967 - DNA, 393 bp, Oryza sativa
tcttctccactacaacctgatacatgacagattattaattggcatttactgtttcaaaacaaaggaaaggaaaaaaaatggagtttagcaatccagcaacgtgagattaaatagaataaatttaataggtaaaaaagattattggtttagaggcaaaaaaaaagacagggtgaataaaattgagcaacatatgttgacaatttattttgaaaaacaaaaaaaaaatcttacaaaaacgcagcatttcctatggacttttgaagcatttgcccattggtgactgaacgattgggtagtaagcatgacagaataataccaacgaagatatatcaactaaactatattatctgcagatgagtgtttcataagataaattcagatgatggtgaacca

SEQ ID NO: 61968 - DNA, 377 bp, Oryza sativa
  unsure (1)..(377): unsure at all n locations
ctagctttactgctcnaccaaggcattcatttatactgttttggtaccaccgatcgatagcgatatcgcgtgacaaatgggatcgacgccccagctgaccggcttttggcttatggcatcctgatcgcacgttgcaccggaactttccgttccacggcgggtcgatagtcatgcttgtgaacacccgctataacacaatcaaaaaggccccatctaatttactcttctatccttatacctgaatcgccgtgatgtgacaacggccacctaacggatgatatacatttcgttctgtgtcagcaggaattgcatgtctctgttactaattgccatcggtactgataaaagacccggctggtggatcatcgcttacgacc

SEQ ID NO: 61969 - DNA, 115 bp, Oryza sativa
cgagggagacaaacaaaaaaaggagggtatctgctccactaatacgccaagagcgcagaagtttagaacacaccgcgggggaacatgcaacccgcacaagggcgacacgggaacg

SEQ ID NO: 61970 - DNA, 422 bp, Oryza sativa
  unsure (1)..(422): unsure at all n locations
agctagccgcatgtagtggtgaggtcacctgttatgttgatatcaacgatgcggatacctggcaaagcccgaagaaacctagtgccaccactatggatggccatgtgttgtagcgacggcgtgaaacatgggcagtgctgcatacttgttctcatatgggcctgggcaccgatggctctgtccttgagaggtctangacggcagcggcttgtgctagtttctatggttttcccctggttttttctcctccttttgcctagatctggaagcactactactacaaaaaaacaaaacctaatatggaccagctcatatgtgttgattcacttaaaactagcacctactgactgttttccacctccatgggatgataaaaaatatagaacgacacctttgagcaactatatgtgtcggtactaaag

SEQ ID NO: 61971 - DNA, 308 bp, Oryza sativa
atgaaagaaaaatttatcgattagggcatggaaggatcaagtttcaatctcagatgtatagaaaggattggatatattttaaggatatgaaagggtatgaatgaattttatatgatacacagggaatttactctcgtatatacctttggtctggttgtgtagtatttatgtgcaatgtaatgcgcgcgatttttgaccccacccatccacaagatattatggatgttgagttcccttccctattatgtatagtggccaactaacggaacggatggtgcttgcccatactgccatccactgatgcatca

SEQ ID NO: 61972 - DNA, 444 bp, Oryza sativa
agctttgttattctaaggtggacacatttacaatttattgttaacaaacacagaaggagacgtgcatgttaagaacagagggaaaaaacaaaatcccctgtacaggacagaacaaaacagagggggaaaaagatgctagcaaacctgtaaatctgccaaaagcatgtccaatttactccgaataatgcaaatcacacaaaaaaaaatccccatctaccagacacaaaatcgagctcagtgacaagaccaaaaaaaaaaaatccagccatcgtttccaccgatggctagttcggtggttacaatttattctattcccaaatcacacaaagcagatgtacttaaaaaacagatcagacctagaaaatttcaaatagtgtgtagctttacctataaataaacagatcagagcactactcacctggaacttaacaaaataaaaaatca

SEQ ID NO: 61973 - DNA, 338 bp, Oryza sativa
  unsure (1)..(338): unsure at all n locations
ttacaatgcacatcatctgcaatcaacaagtgcctaatgttatgcatcacccgatgataatagagtcacgttacatacaatgaagaacttctttagatcacggccatgaccaatctccctcaaaggtgcataaaacttacgatctcatatctcaaaaaacggcaactgttactgtcaaatcctctggaattttcacctcacgaatgtttggaggggacctaanaaatcattataataagttatggccacatacatgataatgaaaaactttgacacagggctccacaaataccagctgctggtctaatcgcatcagagtcaagtactacagaactcac

SEQ ID NO: 61974 - DNA, 443 bp, Oryza sativa
  unsure (1)..(443): unsure at all n locations
agcttatcaaaattaaaaattgttggnccaatgaaggaaatgtactcataaacatatgttatgaagattntaagatcagnggtcctaaatacaactatacaagcctgaagcctccacagaacacagaaaacaaaaggtcgttttaacgattttagctaaagattagaagtgatagtttgcttaagatgatgcatacagattagaggcgacagattggaggcaacctggatgttcatcgatacaatgttcatagaagaatcaacgtcaagacagatcagtatttcctacttgccatgctaacttcaggaaacatcttggtacaaaaagaaaattgaatgaacaacaaacgtgtgttcatgctgagccaacatttttttttcgtttacttacaagtagcggctntattatccacaataggtgcaataatccaaaacaagcacacg

SEQ ID NO: 61975 - DNA, 380 bp, Oryza sativa
tactaagactggaagaattggaagtctaagctcttcaccgagtgtgtctacccttcctgcaatcatacgccgttcgatgaataccctcaaataaccaaagcggtgtgggaggaattctgctctctcaagaacacccaagagtttatagaatcaagcgaggcacatcgtctactgcaacagcggaatgagcacccgcatctgctgggcaccgcatggtacatcggctaggaggcaatatgggcccatgaatatgcacgcgtgcatcatcgaatctccctgccccgtttatacacataccttggcaaagagctcgcaactgggcgcgggcaaagggtaatgtcaacccggatggctctgtcacatttgagaacaaaagtgat

SEQ ID NO: 61976 - DNA, 432 bp, Oryza sativa
  unsure (1)..(432): unsure at all n locations
agcttggccactgcaatggtcttatattttctgngtgttatatatgggtcatgtgaacccactctacctaagtattcacagctagatatatagcttgatctggctaaattggctcagtggccaattaattaagtgtgtactctttattgtctcgtccgaacacaactacttgtatgtccagttgaaaacagtacgtggccatcgtgccttgcaccaaggtatatattggtgggtatttggttctctctccacgcttgtatatattggagttatatcacaagctagtgtgtatctcaccttgcaaatatgatgttatctgaagccacagaatttgaaataacaacaatgcaactatatgaggcatttcataagaaaaagctgctcttattaaaatttattcattcnccatagaataatccacatatattacat

SEQ ID NO: 61977 - DNA, 429 bp, Oryza sativa
tctcagctggcagggccattccctcgaaatatcttttttagttagttgtccggccaatcctgtgatgattcataatttaattcttcaggcaatattaaattgtttcacaaaatatgttgatcctcaatgcctttcagaaattcctgatcaattgtagtcttgaatcttgataagaataagcatgtcatgttaattacaagaggttagatctcgtatctactgaaagcataccgatcatatgaagtgtcacccgcgaacagaatgaagaacgatgttgatcagttttataaaggagtaacatgtcgaacattgcagatgttaagacttcaaggtattgtcctaattatgaacatgcatgaccttctttcctaagttaacaatgcatgctgatgtgtttaccgaatgctatttttatatacaattaaatgt

SEQ ID NO: 61978 - DNA, 395 bp, Oryza sativa
  unsure (1)..(395): unsure at all n locations
tgcagctgcagcttcaataatatgggttttgaatctcacaagcaatacagtttatccaccacacaagtccgtcttgtacttgccttaacttcatcgataatccaactcaactccttcaacattggtaccctccacacctatgtgagcaaactacccataataaaccactatatccaactaatgatagttacaagggacatttactaaaatcgaaacctagaatatataaatcttttaccgatttatattaaataacctataggtgttcccttattgttttatgtgtaactcacgaaccgtctaacggaatctagcaaataatacaacttcggacatctaaacaaatangtctacaacgaattgttgtcctgatttccggacctggtcagcagtac

SEQ ID NO: 61979 - DNA, 396 bp, Oryza sativa
tgagattcattcaaagagatagtgcacaggtattcaagttcttcttttgtagcgcaaagagctcatctatcaatatcttacaatgcaatctggtggccctccattactctctgggttcttcttcaactcctcgagcattgcagtgtaccttcaccatatatacaatagatagacataataaaatgttagagcattgcccagtagttggcttggttaatattaatctggagaaaatgcaccgcgcaaagacatgcttgcccggaagcacgtaaagagccatgggaccaaatggtaattaaatgtctgattcttgaaacataaatatggactatattcataagtcatgacaaagataaacaatataaatggagacaatttcattgtccatacaaatat

SEQ ID NO: 61980 - DNA, 408 bp, Oryza sativa
  unsure (1)..(408): unsure at all n locations
agcttctttataactatattgctatgtgtatattcaatgaagtagncaactttaagttgcacgcatcatattctacaaagcagccggtatatcacttggatcatgttatttatggattcacaccgtatatgctatcaagtcacttatttgactataattatcaagaatcactcagctggttggattatttactctttgactatatgttcagtttgctcaactaaccacatagtcgggggctacacctattatgtgcatctagtcgatgcacctaaaatttcatttaattatttttcagccctccacagtcttctgatttggtaaaagtactcgggagaccatggcgaaaatgattgaagcacttatctttggagtaatctagttcgagaaaagaatatcttttcgact

SEQ ID NO: 61981 - DNA, 429 bp, Oryza sativa
ttgagtcggtcaaattcaatcactcaatgttcgtaaatttagcttttgtggccatcaggatgaagcaaactggtattcatgcaactttggaatgtaaccacattttctatatattagcctactgattttgacatcaccatttcaccaaatcattttttcggtgacgcctacttatttgaactctatataattgtttaagctagtactataataagactgccatggtgcaagcttcatgtaccattatttcttgccatacgcgcatgacgcaattgagataaataaatcatgggcaattttttctcccatataaagacaaagatgaaaatatccccttcatatcacgaaaactgaaccctgattaatgattatgtttcccggtgcaatgcacgggcacactatttaacacatacaaccacagaattggtg

SEQ ID NO: 61982 - DNA, 425 bp, Oryza sativa
tcacctttctaatatgtaccacatagtagattatcatctcatcaccaatttattccacgaaagcctaatggtaatccaccattttctaggtaatatcacgggcactgttttccattctctatgtaaaagcagagtatattattaggttcaacctgccaccagaaagaagagagataggtcagcacaacgcataaatatgcaacgccctcatagaacttgcatcacagacagtaccttcttcgtgaatgcataaacagcccaagcatgtcatcgttatccccatcttcctcgggcttctctctctcgcagtggctgctgctgctgtcaacatcaataacagcttcagttaactcacggcagtcatcgagttctgatattttacaataaccctcttggaaatactgggtaaactccactgagttgtg

SEQ ID NO: 61983 - DNA, 426 bp, Oryza sativa
  unsure (1)..(426): unsure at all n locations
agcttgagttgggtgtctgggatacatgttatgcgcagnccgattgtcgccgttccccaaccgtacctgaagttatgaatctagcggtcgttaatgacatgattctcttgttttaagtcacctccaggtgttttaaccattaataatgttcagtatctgccatacaatacaattaattggacataaccctccaattaatggtacagaaaaaaagttcttgactatggaaggaaatctaacatataagatcctaaaaatcgtggtcgataaaacaggaaaaggaattcgagccgtagaaaatcttttatcaaattgcaaggtattgctaaatttaagacacctgagaaaacttcgagacaactaataaactgagtgaaactttattgtacggttataatatactacctctactataattattatata

SEQ ID NO: 61984 - DNA, 437 bp, Oryza sativa
cacttatgctatttagctctcagtgaatctttctcttcttctatagatgcccataaaaaagaatagttacttagccaatggggcatgttcttacaaactactgcctctaattctgaatgtaagtcattttagactttgcatcctttgtcaaagaacatattgaaaactgtagcataatttaacttaacaaattagaaaaagcaaagttgtttaacaccacaatcatcaagtatccgagtctatgtatacaaagggggtatataagaaagcttaagatcaaagcataaatgcctctaaaaagagaaaaaaagagagagtatcaacatggccctcattgttgcactattttcaccatataattggagcgtacgccacgataaatgtctcctaaatagtggatatagaatcaaacaattcatagatgtgttataactcaa

SEQ ID NO: 61985 - DNA, 417 bp, Oryza sativa
  unsure (1)..(417): unsure at all n locations
agctagatcaactgtctgtaggtctgatttttccaacatngancggctcgaagctcggaagattgagctcatagcccaacttgaagaaggcaacgccgagttggctctatagcaaaagaaactaaccgatctcccaaaggcaattgaagaacagaaatcacggttgaaatccgctatcagaaatgttgctgatatgactaaatccctcaaagttattcctggaaccgatgctcaagacactcaagccatagaagaagtagaacaaattatgcaacgggctatatcgtctatccagcgatatttgtcgcaatgatcatacatgtaatagggcttagaacaatttctgtaatcagctaagatactttntttaatttcgaactttttccaacatcgttatcgtatatatatgttgccccc

SEQ ID NO: 61986 - DNA, 426 bp, Oryza sativa
agcttgccacgttgcccagtcgagccgttctctatttttcttcttttccacagcgcgcacgcacgcccgcgcccagttcggagccgtcacgcgttttgccgagccgctccgcgcgcgctcgcggaaaccgcttgggtcccacgcccgtgcgcgccgaattccttgccgccgtgtgttcaccgcgcgcgcgcaccttgcgcgatctaccgcacttgcccacgcatggtgccgatgctcggggccgtcgtcttgtattgggcctgctcgggctggcctccctgccatccaagcactcgggcctggagccaatcatgcgtcggcttggtctcatgccaaccgaccccatgtgtaagctacctagccaattcagtagctgcacttgccatctcatgcacacgccagtgcatgccctgatgctacagtact

SEQ ID NO: 61987 - DNA, 351 bp, Oryza sativa
catcgaacaaagtgttttctttataccatccgggggtaaaccaccggtctaaaataatatttatgccagttggtagtggatctgaaaaataccgagtatgtggttttatgtaccatgacgaaagatcagctctacagttattggtgaaacgggaattggggtaccctttcccgggaacttaacacatattccttgttaactaaaataacaacgcatatttaaaccaccatccctcaagcgcacgttaacgatagcggtcatgggacccactttcgagacatgccccgacacccccgcctcatgaatgaagaccgacagctcatattgacttgtgacaaggtgctcccatct

SEQ ID NO: 61988 - DNA, 432 bp, Oryza sativa
  unsure (1)..(432): unsure at all n locations
agcttctcaaacgctccggaccgtntacctggacggatgaagctganaatgccctcacccagttgaaggcgtatctaagctctcccccagttctggtcgccccggagccagacgagcccttgttactctacttagcggcgaccccgcaagtagttagtgcggcattggttgtggagcgcgatgaggacaattctcatttcacgcttccccaccctgtgccgacttggcccgggagagagcagggaggagaggcccccgacgaccggagttggccctctgcccgcttgtcagacggtgctaggagcccccgacccccaggaaggccctgaggccactgtgggaaggccgcacctatcgccctttgaccccgaggctaaccctgtgctgactcaacccgggaaagagcatggagaagaggcccccgagccgaac

SEQ ID NO: 61989 - DNA, 126 bp, Oryza sativa
atactcagctcacatgacgaggtgattatctcttaagcattgcgtcggttgcagtttattccttatagcctactattgtacttgacacttattatcattaacacgtactccctccgttttacaatg

SEQ ID NO: 61990 - DNA, 427 bp, Oryza sativa
agcttgtgcctagtgcctatgatactgtgctcaccttgtgccacaactttgaccctgtcattctgcctggtttgcattgcgatccttcatcatgctacacatggccaaactaggtcttgtcgagattggggatggtaatcctgctaggcggaaacgaaaaggatcagttctatacacatggattttacttcgcccatatgagaactgtagtgttcacttcaaattttgaaatacctgcatgaaaaatgtgggatcttatcatgcatttttttttatgctagtgaagtcaaactattgaaattggtcattattgtgagaagatttatattgtattgtgcattttagatagctatgcgacaatctcaattcaatttgtataggcaaagtactctttgccctgtaaaatcatgtttatgatatgctgaat

SEQ ID NO: 61991 - DNA, 425 bp, Oryza sativa
agcttccagcccccaagaagttagtctcactaaaattatccgtggctcggacaatgtcatggtaagagatcaacctgttgttgagcacatcttccatatcaggagaaatgattctatcttcttgcttggctttcttcctcatcatcatgtacatgcatgtggatataactcatctcgtacctcccaactcatcatgtacatgcatgtggatataactcatatctgaaccggttgtttggtaggatccctgactcctttggacagtttctaatgacaacatatctgaacctatcacgcaactcatctcgttggtatgtgtggagatgatttgctacgtcgcgcaaaattgtggggctggattccatgccaagcatctcagcaccggcggggagtttgcacccatgtcaagatgctcttgttatcat

SEQ ID NO: 61992 - DNA, 409 bp, Oryza sativa
  unsure (1)..(409): unsure at all n locations
gactnggtgcgaagaggctggtttagcgatgtctgccctgcttaaccaaaggaaggggcttctttggcatatacccatggacaattcaaggcatagtgtccttgttctctacaatcgtgacaaaatgggacatcctcttctggcattggaagctcattgacctgggtggcaaatgctcgatcaaacacatactgattntggtcttgacttccaaccaatggtagctgtgaactaagcatcatcgtggaatggaccaatgggtgcccttgttaactctcttgaggccaatggtggattgagttgaaaacttgagttactggaggcatacccgctgacattctttccttcttctctgttaaacatctgtgacagggattgaggtgagagatgaaaacaagccacgaaagaa

SEQ ID NO: 61993 - DNA, 438 bp, Oryza sativa
agcttgtgcatagcataacaacaaactaatgctaatctaaacctattattataaccgactgacgtcactctcaggcaagtgacacaaaactaccacaagtggctctgttggggaacaaagcgaaaggagatgggaacaattgacttgttttatttctcccatcttatgggggctattattgcaaaaagaaaaatcttaccagtcactacacaaatttccctatcatacggcaaataccactatgcaaatatctgaaaattcattcgcatctcgttttcaacctgatctttgaagaccagatattttgaaatgcataggtatttcagattcaaaaggtagaaaaataggttaatacgattttttttaaaaaaacatatatataaaaaactgtggtactaaacatatcatttaacagtttggaaaaaacatgctaaaaat

SEQ ID NO: 61994 - DNA, 399 bp, Oryza sativa
tggcaagaatactatgacaaccctaaacaatgtaagtatatgatcttatcagccccgaaatttcttaattcgacttcactattagtcaccacatggtccacataccattaagaaattttggcttatcccaaatccttcctagtagtggcctatatttttttaaaaaaaagataaacgattcggtttggcaaacaacactacaacaggtaatatctcaactaatacctgaaaaaaaaagactttttcgtatctacagttctgtcataaaaattactctttattttggtttttcatgcactcttgtttcttccgtttcgaccatgccggactccatcgttcacatggctggcggcccatatgatggccatgatgggctgtcggcccatcctaagtcacatg

SEQ ID NO: 61995 - DNA, 277 bp, Oryza sativa
cgccctatatgaacacatcatccaaacaacggagatgacgcgccccgcgtaaaatatcaatcaggaggtatcctcgcacagcaatgaatagacgaatgatagagaaacatcatatatggacggacaggcaaagtgggacacagaaacccatgggcagcgctcttttggtggaacaagagggagctagggctgctagtcaaacatgtggcgatacgataaccagggccctaaaagccaagggcgacgtcagaccaatcgactgtccaaggaacaccgg

SEQ ID NO: 61996 - DNA, 445 bp, Oryza sativa
gggtggtgtggtcttatgggcaaacaatctctctggtgatataccatacaacgtctgcttgaatagcaccgcataggagacactggtgataagctacaacatcttcactggaaacatccatgagtccatgaccaggtgtgtgaatatcatttggttatcacttgccggcaacaacctgactggtagtattccctcatgattctgcaacctccataatcttgccattttgcagattaacacgaattcactctctggcacgcccaccacagcttggcattgcagcaacctcatctggcttgacctcaacagcaatgagttaaccggcacaataccgtcacagctagcatcacatgctgtgctcatcacctgatcaattgtctctggcaacaatttgttttctccgtatgagctggaacatctgccctgggctggtgtctgttgaata

SEQ ID NO: 61997 - DNA, 435 bp, Oryza sativa
agcttgccacagttgtggcatgtcgtcatctcgtgccggcttgtggttgctggcggcgtcgccctgagtgcctctgcgagcgccaccctcggcgcgtcttcgcacgcgcccaccgcagctagacgcctccgcgcgccttgcgctacttgcggccgcctgtcgaggaagaggactccctcttcctcccgtcatcctgacaagcctcccactgctcccgagtgagatggagcttcccaccaatggtgatagaccccgagagaagttgtggctcatcgccgtcgacgaccttgatgcgacctttcgcctcctcgattgacatcgtggagaagtccagcagagactcgatcgagcgagcgatctgcctgtacttctctgggatgcagcaaaagagcttctcgacggctctctcctcgtcgtaggtgtcgtcatcgtact

SEQ ID NO: 61998 - DNA, 425 bp, Oryza sativa
gcattacggacctatatatactcaagcttgccttatcaaaggcaggaggatgctccactgcattctcattgccttgaagaaaaataatcaggccccatttaattccgcgcacgattgcgacatgccaactacgatgaacgtactcaagacccttgctcttaatgaatatggtcagggaccaccaacaacacgggctcatgtgtttgtgtgtttctgaaacatgtctgtacaattgtcccaagcatgaaagttgtttttcccttggccaccggatagctgtggcccgccgcacctctgaagaggaaagaacagtaataataagatagcacggccctgtttcattgtaagaggatttttgaactattcattttagtctcaagagagacactccgaggggttgtgtgtggatcacctaatccctcttg

SEQ ID NO: 61999 - DNA, 430 bp, Oryza sativa
agcttaaagctaggagcatgtttcaagatatgatctcacgctccaattacagcctattactacatggaggttacctcaaggatcacccacaacaactatgtttctttttcctttttcttcttcatttttgttgtgcaaaacagaaagcatgcccttcctgatattttcctcatgggcaaaagtattggggattgataaaaaattataattactgatgctaattgtgctatcaaacaattaaagattttttcctcctgtagagattttaccagaacattgctctatttcctcttttattctaaaagaagtgctgctgatcagctgattgcctattcacaaattttgctaatgagttacgacaattgtataatcatacaagctccaataccttcgccttttcttttaagtaatacggcataccactgtcatt

SEQ ID NO: 62000 - DNA, 358 bp, Oryza sativa
  unsure (1)..(358): unsure at all n locations
tgttggggctcggtgatcagtggccgagctgcatagtgttctataangcatgccttgagttcatcatcataccgtcgcactgtctgatgttgattgttcaaaaacaaaaaaaatgggaagtatggccgcgtttaattccgatgccaaatcttttttaagtacacggacgaccatttgtagtattcaactttgactcataccttaccaactacagagtccgcgtataaactgggagacgacgtattatgcctaattatcccgccctcagaactgtctactgtagcatcacattgtcaaaatatggcgtagttatgctcaaaagattcgtatcgcaatctacatgcaaactgtgcaattg

SEQ ID NO: 62001 - DNA, 411 bp, Oryza sativa
  unsure (1)..(411): unsure at all n locations
agcttagacgctagttttattattcgattgattganaaaacttggtatacgaaaattacaaaatgcgtgaaattgtttataaagataacagaaagcttatggccagaaccctaaacaaccgggctaccagcatctgcatctctgattcagagataggcaaatccactacgattatgtttcaggaggcaaaaccgactttcgcttggtcaataagaacggtgatgggactcccactacgattatgtttcaagaggactcccacttatccttctaagtttaccagatttatccttgtgtaagacacagccttatcctttcgtaggttgggagatttatccttgtctagttacccaaattatccttctaagcttacaagatttatccttcacgaggacctctacttatccttct

SEQ ID NO: 62002 - DNA, 382 bp, Oryza sativa
cattcggaacttaaaactagcttaattgtctgggtcaaatgattcattattgttttctggtcctctgatgctgattctgcagagttcatttgaaaatatcaacatataatgagccagctgttattttctgaaatatgtatgtacaatatgtgaggctattctaaacaaattcaagattatttctacatgacagagatgtgctgcaatgatcgtaagataatatgggatataccatccagacaatggttcttggttaggcagtacacgacgccaaggatgaggtgtatactgtaaatgagaataaatcaataaagacaagaggtggggaaaaacttattatttctttattgcttcccgataatttaagcaatgttccttcata

SEQ ID NO: 62003 - DNA, 424 bp, Oryza sativa
  unsure (1)..(424): unsure at all n locations
agcttancaagtgcgagttctggttgttctatatcaaattcttaaggcacgtgatatctgctaaaggagttgctgtggaccccgaaacagtgaccgccgtcaccgatcggaagctacccaagacagtcactcaagtccgcagtttcttatgtttggcaggatactaccggagattcatcgagaacttctccaagatcgctcgacccatgacgcagttgttgaagaaagaagagaatattgtgtggagcccgcaatgcgagaaggcgttccaaactctcaaagaaaagctggtttcctcgccagtgttaatcttgccggatactctgcaggatttcatggtgtactgtgatgcttcgcgccaaggattgtggtgcgtgctcatgcatgactggcatgtggtagcctatgcctcacgccagctacg

SEQ ID NO: 62004 - DNA, 430 bp, Oryza sativa
  unsure (1)..(430): unsure at all n locations
tctaaanatcatatctaattcattcgatactccaattgttccattcaactcgcaaaattcatctaaaatcgagctctacatgtgttgttactttttatgtactgattccttggtttttattaaagattttcctcgttttgcgtgccaaggtgtaatttccgttggttctgaagttcgtagtcgcgaggaaaaaagttcaaaagatcaaagtgtagaagcatggcatgtcacacacccccttgagtaatttgcaccactttacaaatgttttatcgtttacaaataaaattgcatgttttgctaattacatgggatccgggtattacctatctggtcgcttgtgccatatttacttgatatctgtgctttgcaaccttgggaataaatcatctagctcagttacttatgtgacctaactagactatatgct

SEQ ID NO: 62005 - DNA, 424 bp, Oryza sativa
agcttgccgttcgccttgggaacgaccaccgggttcgccagccactccggatggatgacttcacggatgaatccggcctccagaagtctcgccacctcctcgcggatgaaggcttgacgttccggggcctgccgccgcactttctgccggaccggccttgcgcccggccgcacggcgagacggtgctcgatcacctccctggggaccccgggcatatccgccggtctccatgcgaagacgtcagcgtttgcccgcaggaaggagacgagcgcgtcttcctatttgccatccagaagaccaccgatccgtgtggtcttggatgggccgtcgcccagggcaacctccttgaccgggacatcgtcgcatgtgtcaatccgctgcctcggagcggtgggggcggaggtgcaagcctctcgtaccaccc

SEQ ID NO: 62006 - DNA, 413 bp, Oryza sativa
taacctgaccgcgcgggcgcttccgcgaatgccctgcttcttcaccagccttatggtgattcgcccgaggaggcaattcgccgttaaaaacccggttcgcccgaccagttgcctgccgtgtaagcatttggctgtactcaacgaccgatacgtcgccgatcatcttacgggcttcggcttcggcttggtcaagggttagcactgcaaaggaaaggaaaggagtcaggttaaaagcgcaagcagagagagcttagcgcgaaagtatatggcgaaaacagcagacttactgttcattccctcatggaggaccagcttatgcaagccatcaacctcttcgctcatgttaaccgcaacctgccatgactgggagaggggaaagatgcgaagcatgcagaactcctccaccaggtcgc

SEQ ID NO: 62007 - DNA, 428 bp, Oryza sativa
  unsure (1)..(428): unsure at all n locations
agctngaggaagtcctcggctgtctttgtgtgctggcaatctacaacaaaatcaatgagcaaatgtaaggcgatactgttgcaaattaagaccgcaccatcgaagaggaaacatatatttgttctactggtaagaagagggttgttgttacccacccctttgattgaaagagaggagataaaggagagcacagctagggaccaacatgagaggtgacaccggtgttggtgaggacccagcttgtagatgtggaagaaattgacgagcagcaggtgtggccatgcacgggcaatgtcagccatcagtgccagatttgcctggaatccaagcatagcacagggacagccaacctccagccgcaacataaggggaacgtcgccgcctacaaacgcctcctcctatggcggcgatggccaggacaccacact

SEQ ID NO: 62008 - DNA, 457 bp, Oryza sativa
  unsure (1)..(457): unsure at all n locations
tgtgtgtgatttgtgagacttcactacctagtagttgatatgaacgtatatattcttgtatatgtttcttgtttgctactcactatggcagggttacacaaagagtttggagctgttcgtgttcaatgtggacattttcacttgcgacaacacatggcaagtgaccagcatgacgcaaataatgtacatgatcataatcttgcaagagtggagtctgttttgccatcttttgatatgaacgcgattccgctgcatacttaattgggagctagcagtagaaaaacaatntgatgagtatgatttctctaatgctcaaatcattaaggctgctagtaataagtctaccggttctgcatctttttgtggcatactgtgggaaataagctcgaaacttgngatgaatgcaaaatactaatgagaaaaagatttgtgttntcatactatagacgtgctctcc

SEQ ID NO: 62009 - DNA, 438 bp, Oryza sativa
  unsure (1)..(438): unsure at all n locations
agcttcagcatctaaatataaacagcaatttttctattggcataatgaaacaccagtggttatcatactaagcaaaggatcatttgggggcaaactaattttaatggctatagtgaagcaatgcgtgaaaaaacacatgcaaaagatgatcccacaagtgatagtgtaaatacaattgcttccaaaaacttatagcaatttaatgacacaggaaattttatgaaacttaggccagaggattttatttaacctggaaagcatcttaaaattttcaaaagactacatgacattgatggatatgagaagcacatcagagtagaccatccttgtgcaatttatggttacaaaagaaaataaaagcaccagtaaacattngcatctagcgatcacaagctaatcgcaatattagtattcccaattaggcttgaatagctatca

SEQ ID NO: 62010 - DNA, 364 bp, Oryza sativa
  unsure (1)..(364): unsure at all n locations
aaatactaacttacctgcactactattcatttacctggcgtgtgcttcttgtagaaatataaattatcaaataaagttgagctgtgtacttatggcggcatatacatgcctaattaatacctcctgccaatttactccgctacatattataaaacttcggagcaactggctacgattgatatgatatgtgtggagtaatatgngaacatattnggtgtggtctgatattcattaacatatgatataatatggacaattatcgaaaggcttataacctgacaccgacatagtgctcacttaatcacttacttacaccaccctcgacggtaattactaacntctctatccttgtcgccgggatgac

SEQ ID NO: 62011 - DNA, 434 bp, Oryza sativa
agcttgttgctgctgccttttttgtatttatctcatagacatgattgggcctttgtaagcgtagcagctgaattggcccacgtacagcccacggatcctaacaatcccctctccttgaaattcgacttgtccgcaagtcgatatcaaataaacttttgaacttgcaaagctccactcttgatttatattgcacacttgtactgtcccaaaagctttataaatttgtccttcgctttcagctagatcccatggcatgatcaatgcaatcttagctatcaatcttaaggaagtgagatgtttcagaagcagcaatacaaaatcattgtcctcaatcttgttgctgacaagcatagcaaaggactagagttcagcgttcaatagctcctttgtttcaggtttaacagtaactacctcagctctgctatgcacttgag

SEQ ID NO: 62012 - DNA, 455 bp, Oryza sativa
tgaagaatagagaaagatgctccctctaatggtcttattataatccaaactttttgtgttcacgattgggatctcaattctcatcactcatcactcttcttgcatccccaactattgatgggtagtgccttttttggttgatgatatgatgttcttttttcctcattctaaatttgtgtgtgaggatgctgtagctgtgtgtgaatggagctcggtggtttggctgcttgctctgctgcggaggatgattgaaaggccaaatcctttctaaaaatatcttttggtgttagtatttttttccttgggtgtgtttctatctcctctgactgtttctggggacagaagagtgttcccatggaatccatgaaagctttggcgaaagtcaaggaatagcaatacagagtatatttgttaggacacgcacatgattacacctagcgtctcgaataatgaaa

SEQ ID NO: 62013 - DNA, 427 bp, Oryza sativa
  unsure (1)..(427): unsure at all n locations
aagcttggcaaggggcttctttccgtgtcaggggatacctgagagagcagggcctatccgtcgccattaagaggtttgctaaggattcctccaagcaagggaagaaagagtataggtcggagatcaaggtgataagccggttgcgtcaccgcaatctggtgcagctcatatggtggtgccatggccgcgacgagctcctactcgtctacgaactcgtccccaaccgcagcctcgacatccacctccatggcaatggcaccttcctgacatggccaatgaggtcagtaactgtcctctctaacttcatctcaacttctttggtgatgtcaaattaatcgacatgttcttgattntaacttgtcacagggttaagattggtcttgggcttggatcagcactgttctatctccacgatgagtgggaacag

SEQ ID NO: 62014 - DNA, 432 bp, Oryza sativa
  unsure (1)..(432): unsure at all n locations
tcgctctgatatgctgattaataaacagtagcagtttatcacgtcttgttcagacttttatctttatctcttgtagtaaatnttataatgtttagtcctaattctttccgcatgcaggagacggccaaccaaataaataaactactcgcatctatcgctgctgatcagctgccggcagcacaccagccacctccactcctcgctctgtaacgctaccccgcatgctcagcccatcaagacgcataaatccgagcgtttcaactaacatgcaaatttacaaaattatcctcccatgcacgtttctactaccattaaatatggtggtagtacgaataggtctgatcccttgaatagaaaagaatctacggtttagctagatttatttttactaccattagaaagcaccgttgcgagattcaaaaataattcgtc

SEQ ID NO: 62015 - DNA, 434 bp, Oryza sativa
agcttaagaggccaccctaatttcagattttgtcacgaaaacgctgctcaacaaaaagatcttatttaccaactcgaaaaaggagaccaggcatgacaagtggcgatctctgtactagaatagaacccctgttagcagcgttagcaacttaacaattggaattttccatcccttgggagatgactttggtgctaatctaggaagaacaaaaattcacaaattagcgaacaggaagaagaacatcatcggactctaagcacaaaagatctgctggtgcggcaactggcatctcaccgtcttgcaaaatctgtgcaccgagatggtgcacctgctcctcgagcctctcgtaatctgcaatttgtagcaccaccataccgtggattccctcgatggtatcgtggtttggactctgagatttcgtgcgcgctaaatct

SEQ ID NO: 62016 - DNA, 419 bp, Oryza sativa
ctaaaagacaagacatctttgtattgcaggtgtcacgtttatcatatctatacggaaatgtagaatgtttcccttgaagtcaatgtttctgtggttcttttgcctctccgaagattcaaaaaagggaggaagagtgcttcttggctccccgaaagagatgaatcctacgatccctgagtttttttctaatctattctacagtatgcaggcacgatatatatgtttccacgtgtggctaccgttttgtctaagtgcacctattatacaaatagactggaaattattggatattggttgcaacataaattatttcctcacgtagtgttgactaccatatcgatgtttcataccggacatcatatctactatgtgccattaaccatatattccgtgcacgcagcgtatcgcgtgtatctttc

SEQ ID NO: 62017 - DNA, 423 bp, Oryza sativa
  unsure (1)..(423): unsure at all n locations
agggtgaggggtgnggtggcggatatgttttgatagcacttgcagtcgaaaactctgaggtgtgtataggaggggtgtgcaccataaagggagaaaaacggtgtgtggtgtgtggagagtcttggtgggatggcggttaatgagatgggtagctgtgtggagggcttccacccaaaagggcggtgggaggctagcctgaaacaggagggagcgaactatgttattgagggaacatagcatgcgctcaaccataccgttttggggggaggtgtgggggcagaacaaacggagagagacaccgttggtgagaaaaaatactttgggcgctagagttgtcaaactcacgaccatngtcgcactggatgctttggatggtggtggagaactgggttttcgcaaattcaacaaattgagacaaggtag

SEQ ID NO: 62018 - DNA, 396 bp, Oryza sativa
tgcatgcatgtgtgtgttgtgtgcgccctaatgtgacatttccgtttgtgaagaaaggaaataaaagggctgctctgtacaggctgttcattgttcatgcatggctgataagaacacatgggtctctctccagcctctgcacatgcctaagtaacagcattacattatataattaatccatggcagggaagtgcatggggttattgtcggagctgagctagtaagcatatttaaaaccactgtgtgccgatggtcaattcaatctcccgggcaggccagttggaatcaacactggtactccctccactccgtagcaatcttacgcatgctaaaattacaaatgtaagtggttatattttagaatagacgaagtagtatttgaggatactatcaatt

SEQ ID NO: 62019 - DNA, 424 bp, Oryza sativa
agacttacggtgaaatcccagtttgcctatcctatttaacatatttaagttatctgaacctatcttataacaatcttactggaagagtaccatcatggtcacagcttgacaccctcaatgaccagcatccatatgatggcaatgatggtctctgtgggcctcctctcgaaaatagctgttcaagcagcagtgcctcaaagcaacgccatctgataagaagcaagcaaagtttgggcatggggccattctcccttggagttgtactgggattcatagcaggtctctgggtggttttctgtacccttctgttcaagaagtcgtggagggttgcctacttctgcctcttatacaacatgtataacaatgtttgtgtgattgtgggtgttcaatggggaagattgccaggaagaacatgagcaagatt

SEQ ID NO: 62020 - DNA, 374 bp, Oryza sativa
  unsure (1)..(374): unsure at all n locations
aagcntttaaggggctcggatgcggcggcgaatgcccacgtcttctggcgacgagaaggaaaggtcgggctcggagagagaaaagccgatccgattcgacctcgaatcaaacactttccaagctgatttggccgatgattccaaaagagaaaaggtagaggagatcccggagatcatttcccctcttttgattcggccggagaatgaaaggaacggccggatttggaagggaacggcgcggcgcgaaactatggttcgggcggcggcggccggaggtatacgacgggcctgacaggtgggccccacctgtcatcgggcggacgcgcgcgcgcgcggcggcggactgggccgacttgtgccgaggagagagagag

SEQ ID NO: 62021 - DNA, 293 bp, Oryza sativa
  unsure (1)..(293): unsure at all n locations
agctgtgctgacaaggtattntctatctctactcaagntaccatatgccgaggagatgtgctccaaaccaacaacaggttatcggactataccatactgcgccaagaagaccaaaggttctccccgacacacctcagagaaaacacatgatcgtctgcatcaatgctcccctgataagctcacaactcaaccaagggtgaaccatttcacacatgcggtcgcacctgacttatgtttggatgaaatcccaaggaaacggtccttaagtgcgagagcgggagatcggacacccg

SEQ ID NO: 62022 - DNA, 392 bp, Oryza sativa
tagaattatgcatcttattggtttggccaggtctatcttgataccaagtctctatatggcattcagcaccttcacagccttgaagacgtcataatcacatctgattacaataatgtgttggtttcatttatggaagccctcgataggcatccgatgattggttccatccaagtatgcataggagcatcttcggatctataatgctttaagccgaacgtccggcagttggaaaacatcggtcggcactccaaatcccatctattttactggttcacttttcaactccaccagccacatgttagccttatcccttcaacttcctaactctctctctctctcctccacactgactacttactccattccccacacatttccatctatcttcctca

SEQ ID NO: 62023 - DNA, 370 bp, Oryza sativa
cctaagcaaagataagagcgccactgatcttttcttttcttcaatcgaacccaacttaactataatgtcactcgtgtcttgtaaactactatctcataagaacgaatgcaagacaactggcattactattcgtctccccttgaggtgaacagcaaatccatatacaccaaattcctttacttacacaaaatttgaagcatgcctgttcctcatgaacatagtaatagaataaggcatatatgtgcgtgcaaaagcacatattgacacgataacaacttcctgtgttcaaatctaacaactaaacatgttgcatctaagccacaataggtttatatgcaaatgaccaatttactcaaaatattgtcttaca

SEQ ID NO: 62024 - DNA, 467 bp, Oryza sativa
  unsure (1)..(467): unsure at all n locations
tgcagtgctgagaatggaataagcttattaaaactgatgggccgttatattggtacgtattttagaattccttgccatctgtctgagtgtaatgctggtatgtttcttccattgttgaccttgctgaaagcacctatcagtttaaaaattacaagaaaaaactagccagcattntggccttttgcctgtgattgtactcatgcagaagatctcttgatttttctgtatttcaagcttgaatgcttgattactctgctatctgttctgtagtatgtatttcagtctattgcccttaaactgttatattcatcatgcagggttcattgcaatgtatgctactcttgcaagtcgagatgtggtaagcagatgcaaccattctgtctaattgctgtatattntatcccccctcttcatacagtagtgagattcctacttttctggttaccccacaaatctacttctaccta

SEQ ID NO: 62025 - DNA, 248 bp, Oryza sativa
tcggacattcatttgaacattgtgaaaccgagggggccatgcatagcggtcttgtgtttggacgccaaatactgttgagcatatgaccggttttccggtgaagctacaataatctgctagctgttctacgagtgtgacgtagtatacgttttcacttacagctaccatattaaatcctgcaaatcttgacaggtgcgcaacaggtcaattaaaactggtgaacaataatcctatcaacacaaaacact

SEQ ID NO: 62026 - DNA, 410 bp, Oryza sativa
  unsure (1)..(410): unsure at all n locations
ngaagacatangagaggagatgagttgggtgggacaggtaaagatggcaagttgagtctgctgactcgtgatagaaaatgagagggcaaggaaagacaagcgagcacggcctggtggatgttgaactcaattcctagatctagcatggcaaaacctatgcaccaaagaacgtggcgctaacatgttggacccaaggtttacaaaaccgtatggttaccacacgattatcacgtgcagtaatcttctcagtttttgaaaccacggtacatcttacggtaaccgcacgtttaccgtggccagtaacggccaaaccgtggggtggcggtaaccacggccaaaccgtggggtggcggtaaccaccgcaaaaacggtttgtgggaaccctggttggacctgcgccatactcgatg

SEQ ID NO: 62027 - DNA, 473 bp, Oryza sativa
  unsure (1)..(473): unsure at all n locations
ctaagcttgccaaggtctctatagcgaanacacggagatgacctatctcttctatgtcaattactttatgtgagaatgcattgaagaaataacacagttttgtgacaaccatctttacgtgtactagtttgattactttgattgcaatagcaatgaatattatgagcattacatgacagtcatgagaaatgtagcccaaaagctataaatacttcatcgacactagccgctttatgtttgaggagaaaccggtagggactctcacctcgtgtagggatttgtacaatgccattttctcataatttgtcaaggtgtaataagtcagcgaaaggtgcactcttgtgacatcctggcctanggcttaataggattaatagaatactcataccatcacgttgcaacttattttccttaaccgatctccacataactcaaaggttaagcgtgcttggcgtagagcaattttgggatgg

SEQ ID NO: 62028 - DNA, 433 bp, Oryza sativa
  unsure (1)..(433): unsure at all n locations
ttgatgtccatgtcaatcctcgcaaagagatacttattctttgagcggaatgcaaaagtaatccaacggtcaagggacagtgatcaatttggtggccaatgctgtcataaaacacctgtgtattgccccacaacatgtcaaggctgtcggtcatgtcgctgattactggggaggtggctaggatgagatacaaagctgccatggacatggagggtaagaagtgagccctangttgccccatggcttttgctaatgcgaagtgcctaagtgagtangcagactgtggagtgtgctgtgttgaaatgttgtagactttatatagactcatgtgaagaggaaaccaggtgttcaagtctaaacaagatctangtctgacatactattaccttagaatcttggaagtgtatgaactggacatcatggctgacatgaa

SEQ ID NO: 62029 - DNA, 422 bp, Oryza sativa
  unsure (1)..(422): unsure at all n locations
ntggagaagatgtcttaagtggagtcctggcttataccccagttgatcgcctgtgaagatggagccgtaggcccgctagtccgctgctgtttatttttgattgtcaggcctgaagcgcctttgtaataatgtaaatattatcgatataataaagatgtgccttttgtatcatgtttgtttggtgtaccccggcttttcctgngacggggattaatacactagcgttcgggaaaaggcaattttcccggtcgcgacaatatggcatcttttcggcagggggtcgcctgccgtggggatcttttcactgctccatttctttttctttnttttcanctggccggcagggggtcgcctgccgtgcctcagtaagggatcttttcactgcattntttttttgcagctgaaacggtagggcggataca

SEQ ID NO: 62030 - DNA, 332 bp, Oryza sativa
cacaacacgagaaggggaacaccgagacccagcaccccccacccgcaaaaaggggtaagcggagaaagggcaagcgggttcggccacgagaccccgaggacaacggcgaggagccaccccacctggggaggacggcccgattctgcgacaccttgagatcattcggtggagcaactggggccatgccagaggattggcaccttgaatctactcgcttctcgagaacaatgcctcagcttctcagtacccacaggcccaacgccggaaatggaaacaggagcggagaggggaaactacctgctccggagagaaaaaccattcacaaaaacgga

SEQ ID NO: 62031 - DNA, 424 bp, Oryza sativa
ccgaacacgcactcggctgtgttcttctttatgcgggcggtgcggagactttcgaaagttttcgctagatccgagagtaaggtctcctgtctgcgtgttttcacaaccaagtcatcaacataggcctcaacattacgttctatttggctacccaaagaaattcgagcagtacgttgaaaagtaggacctgcattctttaacccgaaaggcattgtcatataacaataagttcctatgggggtaatgaatgcagttgtttcctcatcctccctagccatgcgaatctgatgataaccagagtatgcatctagaaaacacaaaaggtcgcaccccgcggtggagtcgacaatctgatctatgcgtggcagggggtaagggtccttatgacatgcctctgtaaagtcggtgtagtcgatgcacatcc

SEQ ID NO: 62032 - DNA, 442 bp, Oryza sativa
tgtgcgtgtagaccattactttccactgggcgtggggctttcacacggttacacggggacacatagatagaaggggaagacaaacagttcggtcctattggatcgggctattatttgcaggtcgtcgggggtaaggaataagtctcttctacctccctcaactcacgtctctggttgaatagtatccctcaatcgtaaaaccgggtgtaacccatcctaaactctaaaaaccgatgcaaatcaattcccctagttttggaggtggttttgtcccacgtggcattttctgactccattgactagttgagtcatcttgtggaacccacatgtcagtgacaagaataaaaataaaaaacggtggggcccattatcagtggccactgtagtcgcacacattccccatgcggctacacatcgccttcgcacgtcccccactccaatc

SEQ ID NO: 62033 - DNA, 242 bp, Oryza sativa
  unsure (1)..(242): unsure at all n locations
ggctatgatgaatcgtgattgagacattattgttatatctaattcgatgcgacttctgttagatcattntattgaattttttttgtgaaaaccgacactaaattttttagatatggaatagaatgacactcaatgaaaatttgttgtactctcaattaaaaaattgctggttcaaattttgaaatgaaaacttgggaaattaacacgaaaaaactggcggtctgagttatatagtcaatgac

SEQ ID NO: 62034 - DNA, 372 bp, Oryza sativa
tagctagtacatcagtgatcttcaagtattccatcattgtacattgccttagcttcaactggtgtagagcaggggtataactcaacaagctctctaaatcttctgtgggtatacatacaagggccaaatcaagagtcttcaagcttcttatgccactaaaagttggtaaaggcctcaaattcataaagcaaagcttaagatgctctatatacgttgggtctggagcagcaacattaaaggatggaaagctgtatttgacatcacgaggatgagcataccatcgtggacttaggtcaatagtcagttcatttgcaccagatcggactgcacagtaaatccaacggtcaatatagtgtgcgtacttgtgattgt

SEQ ID NO: 62035 - DNA, 432 bp, Oryza sativa
agctattacgagctgcctcgaatagctaatataacagatataaaactcaactaaattatatacttcctccgtttcacaatataaggcattttagcattgtctacattcatattaacgtgtctagattcattaacatcaatatgaatgtagaacatactagaatgacttacattatgaaacagagaaagtacaaattaaataaaaataattatgcaaaaccatgttatgagcttatataaatggtattagaaaattcagggagttgaactagaaagcaagagcggcttcgacgcgcatatttggtgatgggccattattttcgccatgtaaagtgtagatgagccagtccaattagacccaatgtatgaatatatgaatgttcttattattagaaacatagtccgcagagagactgtaatcatctagaaatat

SEQ ID NO: 62036 - DNA, 324 bp, Oryza sativa
cattatactaatcacactatggcctacaagcaaaatacattttaaaattgggttactcctttcaagcctataggaaaagatatttacataatcatatattaaatatgttgataaaaaaacaaagttaatactaagtaaatttcataacaaagaagataaaattgcaattacaaaaggtagtttcatctttcgattaccgtgtctatatgttaacgacccatcaacactatagttctgaacatattcatcgcaagaagttcatttggaaatgtggatccactcccacatcagatatccaaattgtagtcaaccataaaatcctat

SEQ ID NO: 62037 - DNA, 449 bp, Oryza sativa
  unsure (1)..(449): unsure at all n locations
tctttatagctggggtgctatgtgaattttctatgatgtatccaactctaggctacactcattatattttacaaagcagtcggtatatcacttggatcatgttattgagggattcataccgcatatgctatatattgatatcaagttacttggttgattgcaattatcaaaaccactcggttggttggattatttattccttgactatatgcttagtttgttcagctaaccacatagtcgggggctacacctattatgtgcatctagtcgatgcacctgactttatttttcagccctccacagtcttcatatttggtaaaagtactcgggagaccatggcaaagatgattgaagcacttggctttagagtaatctggttcgagagaagattatcttttcgactatgaaggtctcacgggctactgtgaagaatatgggtacnccatacc

SEQ ID NO: 62038 - DNA, 315 bp, Oryza sativa
catatatatatatatatatatatgcataataacgaagtttccaatctattggttcaatcaattaatatagatatctatcgtggactggtacaaggttcgaaaatgctactacctcccgcccaaaatgtagctatttctagcacagtactttgctccaaaatgaagctatgtttctacctaccttctcctctcaactaatcacaaccattctttttcacctactttctcttttcaaccaatcacacacctttttcaatcattctcacctacttttttaatacccgtgccaacctcaaaaatgcttacattttggga

SEQ ID NO: 62039 - DNA, 420 bp, Oryza sativa
  unsure (1)..(420): unsure at all n locations
tatccagtgcgtcgacttctggctatactacatagccttcttctgtggtgccactgttgggctagtgtacagcaacaactagnggcagattgcacaatcatttcaccgggaatctcagctcaccatgcttcttgccgactactcctcctgttccttctttggtcgccttctctctgcacttccagacttccttcgcaagtccctctgtcttgttctatatacttgaatgcatcctaattctcaccagctggcccataaactaactatatatattgaatttgcatgcaggaaggtttcgtttgctcggacagggtggcttgcagctgcgttggttcccatgccaatggcgttctttctaatgtggaaattgcatgatgtanacactcctgtagcangaacagcactaatttgtctaagctc

SEQ ID NO: 62040 - DNA, 407 bp, Oryza sativa
gctgctagcttctgtgtgcgtgtggggagatcacacactattttatggtgttttggtcaggttcatccccagctggtggccggccgggtgatcttatagagagaaagagagagcttgagagtaggagcagatgaccctatgtggctaggtagccaggccagccactggagtgggagagggagagggtggaggaggaagacgaagtgtactttgtagtttgtatggcatggaggaagaggagagagagatgggtgaatgaataaatggattcttgatgttggaggaggcagacaataacgtgatgagagagagagaggaagctggagaaagactatagggcataagtggtgtacatggaatgcgaccggtgagtgatagagatggatagagagagaggaagataatgc

SEQ ID NO: 62041 - DNA, 474 bp, Oryza sativa
  unsure (1)..(474): unsure at all n locations
actcagcttccatcattttgctttaatggtggtggtcttggggaatcttctgaataaatctcctgtggaaagattgctgctttgctgctggtttcccggcaatcttgattgattgcgttggaagaggtcggcttcttgaatgaatcttgcttgcgggatcaatcgcctccgctcgcttgcttgctttttgggcggttcttggtgctgctttattggggtgaaaggttgggggatctcgcggccactcgaggtagcgagcgatctccccgcggcttctcctcgttgccggcattgcgggggaggcgagctcgccgccgggtcgcttgttgatgcggtgaggcggcggagcggagcttctcgctgtgctgctgctgctgcggccgccaagtgttcggtgaaaggcgcgagcaagcgagcatganggacttcccttcctgcttcngngagagcggcgtccagatcgcggacgcgtcg

SEQ ID NO: 62042 - DNA, 338 bp, Oryza sativa
  unsure (1)..(338): unsure at all n locations
tctaattcctcaaagttttcattcggaaatgataacctatcaacaagttttatttgcaccaaatgcctctggcgtgtgctcttgcatggtaatgccggtaaatgatgttgattccaatttgattaaaatgtagtattatatacgtcaactgtaacatgtaacacatgcctccgtgatgtgccccttgtgcttgctgtgacaagtacggggttctgatttaaaattacgacaatggcgatataatgggcttaataatctgtaaaatacggtcagctnntgttttgctggaattctattgttgtgggaagtgtgggcctgctaactcagaagtatgctat

SEQ ID NO: 62043 - DNA, 456 bp, Oryza sativa
  unsure (1)..(456): unsure at all n locations
ngaaagagaaaaaaaagcattactgggaatgtttagttccaaaatttccctgcattaaaaaaagttccataagcatctgactgcagattcttaacgtgatttaaactgtgtgcaaaggagaattgtattaaaattggcagcaacacaaattaatacacttcgctaaaaacagtaggaactttntttggtgttatgggaatattatttgtggtcatgggaataatatttgtgatccctctgaacaattaatatacatattgggagtaatcatcacctagatggctgcaccaaattgttttaaacatatgcataagaatatataatttacaaatatgataaactcaatatatagatctccaaactttggacataactcttcctgaaactaaaccacaattcatggatcanacatacctaataaatatatcatttccgtatgccaccctactccattta

SEQ ID NO: 62044 - DNA, 419 bp, Oryza sativa
  unsure (1)..(419): unsure at all n locations
gcttggtctaaaatttcccgaaaaatagtcttttatgattatattgggaataatccggccaaggggggattattcagagcaggctcatggacaatggggatggaatagctgttggatgggtaagacatcctatctttagagataaagaagggcgcgaactttntgtacgccgtatgcctactttttttgaaacatttccggttgttttggtagatgaagagggaattgtgagagcggacgttccttttagaagagcagaatccaaatatagtgttgaacaagtaggcgtaacggtggagttctatggtggcgaacttaatggagtaagttattctgatcctgctactgtaaaaaaatatgcgagggcgtcccaattaaggggaaattttgaattagaatcggctactttgaaatcagat

SEQ ID NO: 62045 - DNA, 469 bp, Oryza sativa
  unsure (1)..(469): unsure at all n locations
tctgataaaaaacgggtggttctagcgagattngtaatatgagtacctttacgctttgccgagatgtaaggggccattttaggattccatttcttaataccatgaccaaaatgaactcccgcttctatcatctctttcaaattgatgttccaatatcttcttgtcattttttccacacttccttttgattatttcttttttttcatcctacctttccattacgaaatttctttcttttcgaagattaagaaagagccgaaatagcttgaaataaataataattgttccgatggaaccttctacatggtataagcataaccttaatgaattaactaaacttctttttaaattaaaataaaaatagaaaatctaacctcttagcgttctaaggtcaaaaatctagtttaaagtaaaaaatctgctttatgtatccttaaatcatataaatggngtaaatggtgattctgat

SEQ ID NO: 62046 - DNA, 355 bp, Oryza sativa
  unsure (1)..(355): unsure at all n locations
gtttcctttcccattcaaactgtgtaagccctgtatcagatgaaaacaccctttgctttgctgaactactcctacatggtgaatactcctaatatatggagcatgcatcaattgtagtggcatgcaacaacactcctatcaggatgtgcacaaagtataatgtgcatacttctcccgtccaaaaagatttaaattgtctagatttatctttagaatttaaatcattttggacaaaggaggtacatcttaagatgagacttatacggaatatcggactcaaatggacatgaagaaaaactcttattgtcttcacgttgtcttatcagccacgatcaanatttaaaatttaaactta

SEQ ID NO: 62047 - DNA, 415 bp, Oryza sativa
  unsure (1)..(415): unsure at all n locations
aatagaaagaaatttagatgagaagtgatttatgagatcgtgttgatgcaaaaaaaaacacacactggcctaagagatttgctttactctagtgcaggttctaaatttgctttcgggtttagagcgtgccagttggtttgatcctgcagccaacaagataaaaagaaaccaaagttaaatctattaacgatagccgatcggctggattgccgatgacgtttcgtcagatatcaagccgatgcaatataacttggatcggcnatagagtatatagtagataaagaactaaattcactttatcggctgcagatattaacaatgtataatctatacttcaaaatatgtttaaactacgtgatcacggtagatccgatagtgccgagacagtatagataacatatggttaaaagtactt

SEQ ID NO: 62048 - DNA, 384 bp, Oryza sativa
atgtttggctaatggaacatggaaatgattgttcacccaccacaagacatatttagagtctaaccattcattgtccctctttcagttaatcataacattgtaatcatttaccaatcccaatcccaccctcatttgccagtacccaaacacacccaaagggtgtaaggggttaaattgtgaactcatttgttaagtgacttattttgatcttgctggttagctacttattatatgcttgcccgtggcttcacccgcacgtgagctgagcgctcgcgcaattgtgacatgcaagtgggcttttatccgaacgcgcatctatgacttctagcgaataatcgcgcattggcgtaccccacatgagtcgccttgctactaatgactcat

SEQ ID NO: 62049 - DNA, 286 bp, Oryza sativa
ccttattatgtgcataataatgtgtagggtgagaatgactaataatagcgctacgcgcttgctatgatgacacatttatgggataatattcatatagaatttattttatgtataaatttgttatgcatatatatgaaatgggatatggtgttgatttgaatatcgaaatgaccctggagtgataactatcagcaatagtacaattatgactacaacatatgcaaaaactaaaaaaagatggtaattgtggatgtttttagtgtaatacatttatggcatataacag

SEQ ID NO: 62050 - DNA, 422 bp, Oryza sativa
  unsure (1)..(422): unsure at all n locations
nggtgtgcagaccgtaagatgcatgatgggcgacttggtttctgcgcggttaaagtcgcatgcgttaatgggccgtggctttntggtctgtactaggatccattcttgaaagggataagtctattttaccttgctcaacttatgcgggagagctaattcacgcgcgtgcgccggcggcgcgcgtttatgcccagaaagcccagcgccagcgcgcgcggggacagcgtttctttttttttttcgcttttcttttttatccgtgattatttcctttcctttccttttttcgattacttttagaaaaaaatttcgccttcttttttccgtgattttttccgctttttattactttnttttaatcttccaacaacacgtgttnttaaatggtttgtgttgaaagtgttaaaaataactaaaaattt

SEQ ID NO: 62051 - DNA, 350 bp, Oryza sativa
  unsure (1)..(350): unsure at all n locations
atccactcaagtaagcagcacgttctctcttcacctgcaggttccaagattggaattatcaaggtcaagataacgaaataacacttatgtgttgcttaaaaaactcaagttacttttagatggttaaaataacatgcatttaaattacattataagtttagaaccatctaatcattgtagtaaacaaactggagattgtcgatacatgatggagaaactgaccatagccactatgtctgatgcaagttcaggagattagtgacagctaccatctgccacaatgtgaacccacagcccatggtagtntactagttcatagaatcataaattcatctggtagaacanaacag

SEQ ID NO: 62052 - DNA, 240 bp, Oryza sativa
ctggcgggggttttttctcgtctaaaaatgatgacctacacgattctactgaaaacttgggaatcgaccgaaagcatatatgttacagtgggggatgcaacccatagttatgactttttgaaaagggctagaaaatctctatctggcagagaagaacccactgataatggctgcctcttgattgagcgccacctaatataagaaatcgtttggagaaaggcaaggtaaaaaacgcttagg

SEQ ID NO: 62053 - DNA, 363 bp, Oryza sativa
caatgggcgaggtggtgcaatcactgaaaatggtccaacgctctgagttccaggaatccataccaacacctccagcacgacccaatgttatgcagtcctcaaccacctatgaatctgatggcacttcatccatgttctcttctggacccttttcaagcctcagcccctttgagactgagaacatatcgagaacggctttctctgaagatcttcacgaaaggcggtaacagtggtggtttgtgaaagctgtttgggtagagcctcagagtctctgaccacccatttgaaggctggtggtgcaagtgacctaaaccagtttattgggaggtaaatcctgtaaattccatttttattcaccacctg

SEQ ID NO: 62054 - DNA, 351 bp, Oryza sativa
  unsure (1)..(351): unsure at all n locations
tttttttttttttcantattttttttntntnataaatttattaatttttttcaccctcctcatccctcccaacttaacaaaccaatcttacaactcctctttgtacacaagcctacttgagtggtctttggtgttaagttggggatcttagtggtcacttgaaaccaagagaaatacctangggtgttggcttgaagaccggagacctcttcctaggccttttcttggcgaggcaagggtgtaatcaagacccagctctttggagctccttcacagagacatangaatctcggtggagaattcgaactttcggaaacaaatcatttgtctcctctcactctctttatcttt

SEQ ID NO: 62055 - DNA, 226 bp, Oryza sativa
  unsure (1)..(226): unsure at all n locations
acacttcaggacatatcatagaaaaaagtagttaacaattgcaattagtgaaacaattggaatacataaagtgagtagagtattaccggccaataggtacgtactagcagcttctcccgtgttcgggtctgttctccaccctagaactngtagtattggtatgcactgtatggatgtcgtaccgttncagagtaaagaggatatttatttgtaatacattcatata

SEQ ID NO: 62056 - DNA, 442 bp, Oryza sativa
  unsure (1)..(442): unsure at all n locations
taacttacccctgtatagaccttgatgtacaacaagaatatatattctattagcatagtactttcttatcatatattcccttgggattaaataaatacgataccttggaatactcccggatgaaatgctacaatggtatatccatgcgcttgcggatcacatctgtaaccataatataccaggactatttctagtgctattgctgggaattatatttccagtagtgtcaccaagaaataccaacactaatgtctaatgttgatattgatgtttggcggcgtattggcttctattatgtcttgtggctttgtggcatgtcccctctcctcctatgggatcttgtatttatacccatagatgtccncttctccaagcagaactatggagattaatatggatacgatccaagtagtccttgtagttntcatataaaactatattc

SEQ ID NO: 62057 - DNA, 295 bp, Oryza sativa
ttctgaaatcccgggctcgttgcaggtcacctatactgtgctgcaccaactcgccggggaatgcgaatcccgatgagttctcattgacgtcttctcttgcagagctggcggcggcaatggaagagatcccctccaagcgtgcggccaggatcggagaggagacgtccaacgggatctacaccggggcgtgccacgtccttgcgtgtgtgaagccggcgcaccctgaactcgatctacggaagatcttggatcagggggcggctagcgatgtgcgaatggatgtgatggaagaaat

SEQ ID NO: 62058 - DNA, 469 bp, Oryza sativa
  unsure (1)..(469): unsure at all n locations
actcagctgcctgcgccttattgcgcctcattgtaccactactgtctatgacacgagtagaccagcaactagtggcaagtgacttgggatttttatttagcattactatctgtcattggattgtgtaccactcacatatatttagccttcctagctccacatattacttctggacagcacatgttcttgatccctacaatcgctgactacgccttccaggtatccattgcttggtaagggcttggtaaggttcttcatattgctgagagtagttgagaggcaccactgcacctgcctggtagattattatggataaccttcacatttggtggtggtttggtggttccatggcacgtgacgatgatgagaggactgcccacgactttgctgactgtgtcaatggtgacggtcgctatcgatcaatntngaccgtcaatattaccaaaatagaggtgaactagtgatgatt

SEQ ID NO: 62059 - DNA, 307 bp, Oryza sativa
aattacatgggtgattatgtgattgggataagagaaggaagttcagcagttgaaccgcttagagtaccttgtggaccatggtagcgtgccatctggcatggtgggtgaataagagagaggagtatttagtgcagctggctgtaggttgatattagtgctaatagagtagggtatggtcgttttattttttattggtggcacattggtaatgttttgatactaaaatgtactaatgtttctcttccgcgtattcgagaaaaatgaagaagagaggagagcagaaagagattggatgaagatgataagt

SEQ ID NO: 62060 - DNA, 446 bp, Oryza sativa
tgagccgagctcgagccgagcctataaaatattcgagccttccgatatgcttggctcgagctcgactaccgagcttgatttttaagtgaaacaatatatatttcaaagataatctttaaaaaataattaatttctagttcatcatattaatagaagaggaaaaaagaataaaataaatatatgatgtcaataaaaggcatacaaataacatatttgatcttctaatttattaaataacaacaaaaaaaatcatatattattaggctcgttggaagctcgagctcggctcgacaaagctcgcgagcttatggagaggcttatgctcggctcgtctggagctcgagccgagctcgaatcgagcagctcgcgagcctcgagtttttttgacagccctatagtggagagagcaaccgggtggcaagtggtagtcgacgatggaaacatgg

SEQ ID NO: 62061 - DNA, 417 bp, Oryza sativa
agctcttcatgaaaccgagcttgttccggaggaggggagtcgttctgcggaagaagtgtgaaagggtatcattaacatcaggccggtcacatccggcctggtgtgctaatgcctgcaatgaatgatagtcgcgtcttatcatgccaccattataaaattatcgctgttttgcggtacgctatcgccaggttatgccagaatcataaaaaagcaggttgggagtcgtcagggtgcagcacgagacaaaaatggaaaaccagagctggttgaaaaaactcgcacgccgcctggggcctggtcatgtcgttaatctctgctttatcgtggtattgcttttttccaccttgctcacctggcgtgaagtggtggtgctggaagatgcctatatcttcagccagcgtaatcatctggaaaacg

SEQ ID NO: 62062 - DNA, 404 bp, Oryza sativa
  unsure (1)..(404): unsure at all n locations
aatttttttttttttttnaananntatagggaaaggatgaatatattgtgattattaccaganagagaataatgtattattatttaaatatatttatttattttgtttaaacgccatgcccttgggaatcgctgccatctgcaatgacacatacggtgcggcgatttttgccttctttttcggcagcaaccgcaataccaattccggcactgatggaggttgatgaatgcccgacgcttaatacgtcatattcgctntcgccgcgccacgggaacaggtgcagaccgcctttctgacagatggtgccgattttgtcgcggcgtccagtcaaaattttatgcagataagcctgatgccccacatcccaaatcaattggtcaaacgggagtgtgtagacatagtgc

SEQ ID NO: 62063 - DNA, 307 bp, Oryza sativa
tctttagccgatttaaaatgagtagccccccccccccccctccagaggaaaaaaattgagatgtcttacagtagtatactattttggatagggttgggagatttagtgtttattatatggccttaaaatttttgaaaacaggtatggatatggaaacttttggaactcacaccaaaatctacggctcagcaacaaacctttcatatgtggtgttccggtggaggcagtcgaagggatttaacggcttgtcaagcggagtgcacatcaatatcaatacaggccctacgatgcagtcatcacggcattg

SEQ ID NO: 62064 - DNA, 394 bp, Oryza sativa
ggtacaagaatgagattagttaatatataggggaaatagaaagcacaagagaagtagaaaattacaatttagcatgtaagtgacatttttcagattacaaaattattatgcagttccacacaggtgctagctcttcctattcagaccctacatcatgtcagagcgtacacatgctgcaaaccttaataagaacaaagttgtcaccacaaacctatcaaaattactattattatatgataaaactccataataaaagataaatgttggaacaagaatttgaaattgaggggattatatgaaaggaacagatctgcacgatggaaaatcaaggatctaactgaatatgtaacagaatacacatccaatacatggatattcaaatggctggatcaaa

SEQ ID NO: 62065 - DNA, 249 bp, Oryza sativa
caatctatatagatcacgttgtaaaaacaagaccattttcctttggttctttcttttacaatgtattctattattttgatattcattatctggacaagccagtaaggttttaattagtggaaatactttgaggtgaggcattgagttgcttgaagcaccagtggggcgcatttaacagcttcgatgtggcttttaataacttgccactcatatgtctatgacatatgggccctcatgtgtctatgacat

SEQ ID NO: 62066 - DNA, 370 bp, Oryza sativa
  unsure (1)..(370): unsure at all n locations
tagacaactggcagaaagttgttcaaaatgcattttatatgtgtcacaaaggataagcaaacattctgacatacttacatggatacactatagtgtgtcccagcatatgaacacaaattaattatctacgtaggcacagaagtggttctctaggtgtgcaaactgtaaccaattcgttttcctataaaatttgcaaaatacataaatggaactgtagtacagacatgttatgcatctttttcaaggcacaaataaagcaatgccatctaaattactagatgaaaaccccgtgcggtgttgcangaaagctgcacgtgaaatactctgtagctagtttgacggcatatcctatactttcgtatgattttca

SEQ ID NO: 62067 - DNA, 458 bp, Oryza sativa
  unsure (1)..(458): unsure at all n locations
tcactcnctctataacatttgaaacaatcatcaattattttctgtcaatgaaaccccactctcctagcaaccaatttatcttacgggccgattaatgaatttcacaaatcccttcatgtactactctcctagcaactttagttgatcattatctaagtaatactccatctattttttggcgatataatatttgagcacttaccgccgaatcttccgatcaaccttaagtgtaggatctttcaaaactctaatcaaaggaattctccaagctatttctaactcatgggcacaaatgtccgaattcacaattaattcagccttttaatcaattgtaacgtgccccccagccttctgtctgggatcggtcagaccggccacgcaatgccggtcagaccaccctgtctgtccggtcaaaccgaccatgcagagccggttagaccgcatgtcaccaccggtca

SEQ ID NO: 62068 - DNA, 411 bp, Oryza sativa
actgcagctgcactaggacgatttaccggttgatgcatgtcatgtgccacgtacgcccgcaactatgcatcatcactgcccgcgagaacaatcaacaatgatatcctgacccttttgtaacataaacagaggtagaggcctactctatttgggctcgttgtgttgcttatgctaatacttatctgtacttttttttaagtaataatagtagtagtagaagtaaaatttgtatatacatgtctttaacgattaaaaataaatacggtaaaataatatacaataaaaaaactctaaaattgatattaacgtataaacataagcctaaacgaaatggtagcattggatttgctcgtgtgtgtatatgacattaagtatagaaaggagcatgggcaagacatctattgattattc

SEQ ID NO: 62069 - DNA, 430 bp, Oryza sativa
tgcatcatctgtgtaaataaatatttatctcttcgctgtttattaaagatatttatatcgggattttgatacatccatatttgagtcgatttttaagtcccttcacttttggaaatacaaaaggagtcgaataaggaatcaattgttaaaactcgcacgttaacttgggacgagagtcggactcctaattatctaagtgaattcccacgataaatttcgacctagttaaaccgtataacaatgataaaattaaaataacacattttttctagttactaataatgaggaaacatgaacggaagggtaactgaaataaaatcggagaacgctaatgatttccgcgacttattcggattaggaacaaattactactcccataccgcttagcttagtttcagaaatcctaatcctaccaggctagggttatcta

SEQ ID NO: 62070 - DNA, 410 bp, Oryza sativa
gattgcagaaaggatatctcacctcggccgacagagtaagatcaagattgcttcttggtagtaatatgctgtcctgaatctccacctgtgacataatgagaattggactaaatatttcacctggaatttgataatttcattggagaaactgaaaccatatgttggtgagatgaattaccacagagctgttcattctcttcactgccatgctcacatccttggctgcaaccttgatcttgtcgaaggcttcctgtactgagtgtggcgaggcgagctttgttttctgcaaaacatcggtcaatcaatcaaggatcttagtttactgccgtgtattggtgtacgtaaattgtgaaagtaatctattctaaagcttaatgcacctgctcctggaagagacctgacaagtcaag

SEQ ID NO: 62071 - DNA, 427 bp, Oryza sativa
  unsure (1)..(427): unsure at all n locations
tctgtatcgtcataacaaaccggcatgtcggtcatgcagaacacanaacattggtctgttntgaacaacacacattttaatgtgccacaaaaaccatagccagcttgatgtgttctcgctttcaacaaatgcaaaagcaacaggaatgacatggctatccgcgtcgactccgatcacggntagaattgttcctctatacttgcttgtcgtgaaagtgccatcaacacagagcaaaggaatgcaatttctaaaggcctctatcatgcacccaaatgaccagaaagcccgacgaagaacattctctctattttcattcacctcgtggagaatagccatgtgtgtgcctgngtttcttgcctgcatcacctccaatagtgngggaagattgtgataagaaatcctcataagtccaaacctcatctcaagt

SEQ ID NO: 62072 - DNA, 445 bp, Oryza sativa
  unsure (1)..(445): unsure at all n locations
ggtgggagatatctcttccccactgaggtaacttgtagtatattgtatattttgcttttcaaattgcatatttctttcatgcactgcattcatgaacttgaaaacaatataaaaatttgcaaaatagaaaataccaaaaagataggatagatttctatgctaggtaagataacctagttctctatgttgaaatgatgaatagttgctctgttctataaaaccctgccgacccgcatgcccagtcgaaaatggcaagtcgcaccaaagacgaaggtctgagttgaggtagctccacctgttaccgccaaagcacctccgggagtaggttgtcgcaagggaaccgaagccttgcgtcgatgaaggccgtgaatacaccggtctgattgtcgtangggcgaggatacgccggtctgcccgtcggtcacagctctggaagtcacgagct

SEQ ID NO: 62073 - DNA, 287 bp, Oryza sativa
attgcattttgttctatttgaaatgaaaattacagggcactcaacaagcaaggatttggaagcataatatatatactttttttggaacattgccgtaatctaataatcaattacatttctacaagagaacatatgtacaacttacaccccacataaccagacctcagaaaagatggatatgaacattcctatttacattcttcaagccaccagacaaatcctccaactcttactattttcttgccatttatatggacactccagaatacagaataaacaggagcatt

SEQ ID NO: 62074 - DNA, 444 bp, Oryza sativa
actaagctcagaagtcaactaaacagcagcacatcacatcaacatatctggttattgcagagtttgcaaaagaagtccctgccttcttggaacactcaacactccatccttatttcttacttcttacatggtataagttgatatgatctatatcccaacttggaattgtgggcccttgtttgtagctcttagtgaaccttgacaaaagctgcaaattccagtggatatagaaatgattggctgccgatttagcattcaacttgttcctctttgcatttgttggtgtacctcatcagtatttcaaattctctcagcagacaaactaccaattgactgggacagaacactcttcactaattccgcaaactctaaagatttagagccgtaatcgttcaccatacaattggctccatttgtgtcgcatcaagtgttacagacaactgt

SEQ ID NO: 62075 - DNA, 283 bp, Oryza sativa
ataaattagccaaaataaagaaagatcacacttggtcaataacatatattatcagatgaccctttagaaaatctaagtcctccattttccagaatcagttaatccctcgaaataaaacttttccaaattcagttaatccctcgaaataaaactgataagcacttggtttaagtattatatcagaaatacgccaaaatatattaatgacatggtttcacatacacatatatgttgagtctacctccatcagaatgtagaaaggaaaatggcaactccctggctg

SEQ ID NO: 62076 - DNA, 465 bp, Oryza sativa
  unsure (1)..(465): unsure at all n locations
ttggagaagatggcatcatacacagaaggaacaaagagctattactttctataagtaaagacaaggccgattgaagaaggagatttagtcttgaagaaagtgctcaatgaggtagctgttggaaaactcgagtcaaagtgggaaggaccattcatagtcaaaaagaagacagaaacaggagcattcaagttagcatatcttgatggtgaggagttaaagcatacttggaatgctatttctttaaagaaattttatgnctaaaaaaagaaaaaaaagaaaaaaatattataaaattaaataaaagagaataaatatgaaaataaaaagagagagagaaagagaaaaaggagaacacgggagctcgagtttgtagtatactcactcagatgtaaatacgaatgatttccaagttaatgtatataaacaggacgtagggtttttatccataatggaggcccgaacctg

SEQ ID NO: 62077 - DNA, 413 bp, Oryza sativa
  unsure (1)..(413): unsure at all n locations
tataaagggggagattttttttccataaaaaaatcttgttaaggccgactgacatagctgatagggcacgctacaaccacttttttcaatataaaaatagaagagatgcatagtgtatagacattcttgaatacattgccacatgaatttaattatgcacagntatagaagtattataacaaaacataaaataagagtacaagtgtatattagcaatgtccttaacctcacttgcatcctccaagtgactactaaagaaagagcaagcaatagtgaaaatattcgctgctggtacanttgctgaagtgattgacgggcttatacttctcttcttgaattggagctttattcttctctttccatgatattcaatgggcttatcgagtagaggactacggacgatgaatccaaac

SEQ ID NO: 62078 - DNA, 407 bp, Oryza sativa
acaccttaaactcagcttagatagtggctccatcacgtaagcatcccctctcttcttacactgagtttttcgcagagactcagcattgcggttgatatcttggacgcactggattatcttcacaacagttgtcagccaccgatcattcattgtgacctgagaccaagtaatattctccttgcagaatacatgagtgcaaaggttggagattttggcatatcaaaaatactccccaaaagcacaactagaactcttcaatattcaaaaagctcaattggaatccgaggttccattggatatattgcaccaggtaggcaaaaatattatatttttgtattatatcctacaatttctccacctcctccctcatggggggggggtggactggaactttgtatcttttacat

SEQ ID NO: 62079 - DNA, 219 bp, Oryza sativa
gcattacacaaagacatgaggcctacgcgcgccaccttcactatacccatctgagcaccgggtgtggcctactgcagatcttcgacctgccacgttgtgaacgtacgtttggggataacatgtacgggctttattacttaatgagccagcgcggaacagtcatactaaccatgagttcgtgtgctaacagtccgaacaacaaatagcaatgctgccaca

SEQ ID NO: 62080 - DNA, 368 bp, Oryza sativa
tgggctaaatgctaatatgaacccaattcacagtttcaagaaatagaagtgtgataattgagcagtgtatatacatgatggagctgagctctcgttatgcaacatatttcaaaaatcatgaattgatggaagcattaataagggtggagaagacaccatcaagggctgaaaaatacaggcttttcttgggcaacacagggctcattgagcacagagtgaatctgtcctctcttgtggagagggcaaaacaagtgatggccgtgcattcaactcaacagccttgagaatccaatagattttcgatcatattaccactagcctttggatcatcctggtccactaagatatctttgtatttcaaaatactg

SEQ ID NO: 62081 - DNA, 353 bp, Oryza sativa
tgactgcaatggagagacaaggtgtttccattgctggttttctggtcacctatccggggcgtgtccggagaggaaggaggtctctgggggcaatccggggcggcagagccaggggagagcagtgcgtctgggcgcaaagaggtggccgtctgggagaagagaacaacacgcctatgggaaggtgaagcacgtggtggtaagggaggtgccgctggcgaagtcgaagatcgtcaagccggccccacaggcgacagaaaagggcgcggtgatagccatggcgggtgcttacctgggcggctaccagatctgtgcggccacgccgccgcagttcgtggaaaagtaccgcatctgcg

SEQ ID NO: 62082 - DNA, 357 bp, Oryza sativa
gtgagaaaaccttaggggtaaactcattccaagggaaaagagtttatctgacgaacatagatttctttcctgaggaagatactccccctaaatcttgcaaatttttaagtcgtctcataccaattccttcgacacatttaaagaatgtggagtatggtagagattttgtgaataaatcagcaagattatcacatgacttagtttgcaagatgtttatctctccatgttgttgaagctcatgaggataaaataatttgggagcaatatgcttagtgatgttgctcttaatataaccagtttccatctgaacaacacaagcggcattatcttcatagataatggtacgtgattccaatg

SEQ ID NO: 62083 - DNA, 321 bp, Oryza sativa
aggttaccaagatatctataacgagaagatcctacctttcaacgcaaccattgtctatacttatcctcttctttcttggatatttcagcgcacaaattttcactctcttgaacattgatttcaacctctacagatggtcaaagacacataaaataacctacatcgttttcgcctgttcaaagtattgattaagaaatataaccatttcatcagcatattgaaggatggataatccatcatccaccaaactgtgaattatccctctaatctaacaatcggccctggctctcctgataacgatttctaagcatcagcaactat

SEQ ID NO: 62084 - DNA, 156 bp, Oryza sativa
ttgcatagcgcataaagatttggggaatgctgtttagaagacttacgattgatcggcctaggatatgctcactatgcttgcagcccgtagaactagagaatgacgacaggtcaccctttaactcactgacaaacctatggatgcaatccctacaaa

SEQ ID NO: 62085 - DNA, 453 bp, Oryza sativa
tgtcagtttcatagcaaacacacaaagctaccagcccattttctgcatatcatccctctcacttggccgttctcgtgctgggggctcgacatactcggaccattcccacgaggacagggtggctacaaattcctgttcgtggcgatcgacaagttcaccaaatggatcgaagcaacactcacaggggaaatcaaggccgacaacgccatcaaattcattaaagggatattttgcagatatggattgcctcaccgcatcataacggacaacggcacccagttcatcagtgccgacttccaggattactgcattggactgggagtcaagatctgcttcgcttcggtctctcaccctcagagcaatggacaggtcgagagggcaaacggcatagtactacaaggaatcaagacccgtgtctacgacagactcatgtcacatgacaagaagtgggtc

SEQ ID NO: 62086 - DNA, 204 bp, Oryza sativa
  unsure (1)..(204): unsure at all n locations
ataataggatgtgaattagtttgaactagctttagcactggccaatttgccacaatttcagcaaagagtgagttcccacttaagtcacaagagcaaaagcagggatcactacaaaataaccaatacaagttgaaanttgtatttatttaatttggtacagaaacttgagatctagaacgccatgctgttatgttaagttcacaa

SEQ ID NO: 62087 - DNA, 380 bp, Oryza sativa
ctaaagaatatcttgcccagaaaattgggttgaatcccaaactcaaaatcctacattttctattgcaactgctctaacagtgatactgtattaaacaaatttacaattttatttgcagtacctcatcagtcatcaataacaatctatcacaatatcaagcgtcctgtggtaatgataaaagacagagtgaacttcaaaactagtctagacaatcagttgtaattacactatttcattagccaccaattcgatccagtcatgattccattaaacactgcgctatttctctactgttatctggtatatcatgcgttaatgaagacaaaactctagtaatgcatcttgcacttgacacagattctacacaacatcagatgcat

SEQ ID NO: 62088 - DNA, 391 bp, Oryza sativa
  unsure (1)..(391): unsure at all n locations
ctgctatgagtgcatggtatgtgttttacaaagtgcgggagaatcatttattaagtgaaatgggcttcaaaataaatgtgaaagaaaggttctggtttttctcacattggcattcttgaaattgttatgtcgaaaaaatatgtgagtcttgtgttaacatgcaaaaaacatgacatgagtntaagtttactgaactcacacactgatcattcgagggtactgacagtgttttctttacgattttctttactatgcacaggcgcacaagttctagtctaaagaaggagcgtcaacatcttcaatctactgttgaagctcttcaagaaagtagttaccgttctactctgatgtaaacttttttgactcggtctttatccatgcccactcatta

SEQ ID NO: 62089 - DNA, 238 bp, Oryza sativa
  unsure (1)..(238): unsure at all n locations
tactaatcctctaaacaacaaaaattagatcgccatatccatacaaatctaacaaaaaattagatcgccatatccaacaaaatatggatggccatatcccatcatgcatgaccgtgaaccaaacacatccttagttaatacatactatttttctgcaatagctaagacaataaaagctctaaaccattaatgcccatgaanttttttaatactttnttttccttttatccaccccatg

SEQ ID NO: 62090 - DNA, 463 bp, Oryza sativa
actcaagctcccttaacaacatcagtagtaatcctgatcgatagctcagcatggctcctacttgaaacatcgttcaggcctgtgtgggcaacttttctcctctgcactcctatagagtatatctcgtggaattcctccagagatcgcacaggcaccttcaaccatgaaaatacgaaagtaagcacagtgcacaatcgatgatgcctaatgcattgcagcaaacacaagtaagaataatcaagccccagcgcattacccaggccaagccctgtagctgtaagttgccatctttgtcattcagcaccatgatctctcttgccttgggctctagcaagtcatagcaccgctccatgtatacctcatagtatgagatcttaacagagcaccatgtgccagttcatatcgccaacaccgtctaaaccgtccaggggatgagcccctgcatattcttagtgctctgcac

SEQ ID NO: 62091 - DNA, 458 bp, Oryza sativa
  unsure (1)..(458): unsure at all n locations
taaaactaagctctatcagagtggcttatccctataggactagtacgttctttattttatattacnaatttgaacaccggactgatcaattagagagacatatagtgtggtatttcttgatagatttgtacactgaaagaaggctagatatatatcacaagacactgcacctgggagaaagctatctagcctagatagatattcagcagtggatgtcatttcatcattgatgaacgaatggtctagtcggctattgatgatacacgagagatcgatagagaaagagagagagcgagtgtgtgtgtgtgtgagctgatgagagcattaacagtgttcgcagtacattcacatgtgtgtgtgagagagaaagagagagagacagtgattgagtgtgtgtgcttgagagagagaaagattgatgaccgtgagaaacttctttaaactaatggccgagctct

SEQ ID NO: 62092 - DNA, 371 bp, Oryza sativa
ccttggacagaataatcatgtgaaactgctggtgttgcccatccacaagttaggttttccctgccttatttcatgagattgtgccattctttagagagcacacaggagagctgcacgacttttgaaaacacccgttatgttacattggaacatacaaaaaatagcttaatacatatgttactctctcctgaatcctctgcagcttatggacagcacctcccttggccttccaccgagctcaattgcgctgcaagctgctgagttctacacggatttgaacatgagaaggtcctttcagtctgttgtacttccattcaagccagacatgctattatttcttggtgatcactttgatggaggcccatatatgt

SEQ ID NO: 62093 - DNA, 359 bp, Oryza sativa
tatagaaattcaagattacaatggatctacgaaagatcgtgtatttacaactaccacggaatagtatacaaagtcaacacaaatcattaaatggaatttatggctacacaaaccggtgaagatagttctagacctggaccaagacaaactcgcgtaggtaattattgaaacccttgaattcggaatatgggaaagtagctccgggttgggggactacttcttttatgggggtcgcaatggctttattcgcggtattcctatctattattttagaaatttataattcttccgttttactggacggaattttaatgaattatgtttctactaacgaaaactacgaagtcatagtttttcca

SEQ ID NO: 62094 - DNA, 470 bp, Oryza sativa
  unsure (1)..(470): unsure at all n locations
ctttaataatatggccgtgatctgtcattacgtgcgactatctccttatagaaagaaaaataagaaaggatcaaattttctagtatttactagaaaagggggctttctacatagggatcgtcaaaacaacgattntgccctatcagctgtaggaagaaaggacacttcacgagaatcaaaataggaagaaagaaagtatggcctatactactctatggatagagttctcaaattgatagagaaagcaccgtaaagatcaattagtgaccgactgggtcgatacaactaaaaaaaactgcttacttatcccatgatatggggcaaaatttaagaatccgcttatgtaatagagccgatccactaagggattaagcagcggtgtagtatcagatcccaaagatagtaagttcttttttcttgcttatggngaanaagtctttntcaaggattctatagaaatttcatatatg

SEQ ID NO: 62095 - DNA, 425 bp, Oryza sativa
agcttgagctcttcccaacggactgcgattcttgtttcttctttccgagatccaattcacttgctattgactgatttaacagctgagagtatttcttttgtcctcggcaggcatggctgagcgagatgaaccatgaccattttcgtatccaccatcttcactagttcctgtacaaatgcaattgtcaggaaaaaaaaacatacagcaaacagctagcactagtagcaccagactaacatgagcataccagagttgtcctgagaagggtctatgacattcacaaagtttgccgattgtcttctaatagcagaaataaggtcctgcatctggttcaaagacacggctgcatctcggagcttgctgttcacctcactcaccggatcttcatcagaagccatcatctttccaccattcccgatatccac

SEQ ID NO: 62096 - DNA, 409 bp, Oryza sativa
  unsure (1)..(409): unsure at all n locations
actcagctcttaatggtgtggcatatggcaaaacctcttacgcatcttgtattcttattgtataccccnctcccacatgtcacactaaccatgaacattccacatttgggctggcttaatgaaaggacaagatcaattctttcacatggatcttttaaacctggccatgggaaggaaacaacattttgggaagacacaatgttaggcttgcaaccactcaaatatcaatatacttctctgtacactgaggttcgaaagagacattctactttggcagaggttatgagcacaacaccgtgtaatgtttcaatccatgatcaattgtaggaccaaaattactgatggaatgatttgattctctagagctaatataccctgcaaagaaaagatagtttattggtcgctcata

SEQ ID NO: 62097 - DNA, 388 bp, Oryza sativa
  unsure (1)..(388): unsure at all n locations
atgcatcatctctgctgggcttgtgtcctctcctatgctgaatgaccccatctgatcatcgaaaactgacacggatatggtgctcatgattggcgacatttgaccatgtaggtcatctccaaacatcggttcctggccactggaggctgcaaagcttgagagctggttgatattggcgatgttcgcctgcgacgggcggaaagatgtcccatcattgtgaccaagatcaggaaacaacgatggtgctgtaggttgccagtatttgctacagattgcaacgtccggaaattggtaatcattgccaattgtgctgaagaggtttgtagaagatagattcatctgaaccaaaagctgattattcacttcanggtactgcactgaaaactga

SEQ ID NO: 62098 - DNA, 267 bp, Oryza sativa
  unsure (1)..(267): unsure at all n locations
ttctttcccgtgagatttagcacacggtgacatttgagatgaatacacggtaagattatgtagctcattgtacagggttntacacattcacgattgtactgcactgatacagtaggcaggcaactaacatgtatgcatatatatatatcatccaaacatgacagacaagcatcacatatggaaccacacaaatgtcaggtgaacattagctgtatattatcccagtattaaattgtgaatacaatgatacaaaaacacaatatcaat

SEQ ID NO: 62099 - DNA, 449 bp, Oryza sativa
tgatgaagtctgcgtgccccctccacggagtaatgacgatagtatccttgttgtcaagcatttcttggaattgccagagagaagaacagaggtacttcaagccacgtagcttgcacctaccttgctggagagaagtgggatagataaggagacggcacgaaggagggtacatgccgacaagtgggtttgttgccatgttggaccccacataagcccataaaaccatgtgttgagcagagagggataatttgtctagtttaaagagttaggggatagtaaattaatgttcaatttcgtagttgaggaggtaaattgtacttttgtagtatttggggggagagggtgttaaattggagtaaaaccctttcaatatatccaaatcattaaaaagtttcttatttctaccccatgtttgatatccatgtggaacataagaaacaactggatat

SEQ ID NO: 62100 - DNA, 372 bp, Oryza sativa
acaccttatatatcgacaggtgacttacaaaggaagacaatgctgatcgaatcacttatttaagcgacacgaatggctgaactggggacggtcaaaacatatccggttagtccacagattaccaactataacaaaatagtgatcaccatcccacatgatcacttccattcctacatgaagcgaacagagtcaattaattggttgatagaaacatctgatagctaaaaagttcctatccttgaaaacatcactgtaagacaagtattacctgctaaaacactagtcggcaagagggtatgcctacatgtcatcttgctgttgggaaaggaacatcggacagtggccacttccatctcgtcaattttaacgatc

SEQ ID NO: 62101 - DNA, 382 bp, Oryza sativa
aactcagctgagcaacacctcgtttgtgccccgcgaagacttcttctgcccttacaaaatgaaatctcgtgaattgaacgcctctatgaaggcggctgagtgtaggaatgactctccatttacctgcagtctagtcaccataacctttgtaccacttgagaagctggaatagactgatcggtggatccttaaaaaggcggcgcctcttttagaaagaaaatatattgtcaataacatgtcaatttgaagttcttggaaaactgtcaagcctataagtttgttgattatcccatcagttgaaaaaaccaggaaccatcgtgcaagactaatcccggcactcttatgtcgcaatttctttcccaatacctcagccacagctatg

SEQ ID NO: 62102 - DNA, 375 bp, Oryza sativa
ccattcggccctattggtcagataaataatgttctactcaagatatgaaaaaatagtgtcacacggtttatgttggtttgataacattcccatgcctcctaaactgaaacatggaaagcaacattgctaatccaacagatatatgctagaagctttcacttttatcaacaccagcccctcctgtttatttggccaccagtaacttgaagcacaagaataattatacctttcaataaatgtggtaaaagttgaatcaacgatacttggttcattcaaagatgccaatacctatcaatcttatctgtgttaagtttagagcaatgcatctaaaaccattcaatttccacatacatatccatgatctatacgttttta

SEQ ID NO: 62103 - DNA, 345 bp, Oryza sativa
  unsure (1)..(345): unsure at all n locations
tggtntacttgatctactntaccttttactttgaatntcttactttatttatattaatccaaaaacttgtgctattaattggataaatgtcttaacttcctcctttcacttgtctttagatgccgcgctacaagcctgagtacttgtttggtggtgagggatttgtccaagagttgcgtacgatgtcctttgtcattggatttgggactgcccctttttatgctcagattcctcatgatcgtcatgaagagaagtgccgagtcaaagtcaccttgaacagtaatagtgaagatatcccctcaccgatgttcgaagcttgaggaagaaactacattcatgcatgtc

SEQ ID NO: 62104 - DNA, 405 bp, Oryza sativa
  unsure (1)..(405): unsure at all n locations
tagcaatcgcttctgatggtgctacaagataagaatnttccagctgtaggttgatcagtcgaagctgttatgtacctataggagtagatcttttcttctttctttnttcgcagctntcttcgtctccctgtttgtttttcccgtcgcgtcgcagtaagagctgtgtatgtacatatataaatgttgaattttctttggcgcaaaatcaaaatccgcctaggttgctcctcgtcattttttccccttctcttgtctcttgacaatggtttaaatgtgcatgagttcatcaaacatgcaatgaatatttattgcagatggatattattgcagggtggtcattgcaagtaaatggcatccgaatctgagaagaagcaccactgganggggtggtggacgacggtggtg

SEQ ID NO: 62105 - DNA, 287 bp, Oryza sativa
  unsure (1)..(287): unsure at all n locations
aattggcagcaaaaacaagtgacagcagagttgttgtcattcatcccttatcactggagccaaaaaaccaagtcacataatacagctatgtaactgttatatggtctgcaaactttattttttttttgaacggaaaaaacaccacagtagtgctttnttattgaatatagaaggagaaaatacaacccctaggggtaaaacaaaaagatctttatactatacactatacagagtgcgggatgagctcgcgcaatcttttaccccagctaaagcccacaagctgggct

SEQ ID NO: 62106 - DNA, 435 bp, Oryza sativa
  unsure (1)..(435): unsure at all n locations
ctggtatttttccgaccctatgaatactttctctagtatcatattncattttagctgtgtccagaaatgagtcgagatagtaaaactctagcaggtattttatctccccaatctataataaaatgggcctaactgacacattatcacataagtagcaggaccatcattactgatcaaacgaaatccctatagatgatacatatgaaactgtatttttagcatccactaatagattttttaacctcttcagcaaacaagcttcactatactttcttagtttagctgattaactcctgcaacaaaagtcattacaaaaaagcacgggagatgtaaaattagaagagggagaaagggaagagtctaacaatcttctaaggtaccataaaccacaagtttttaccctctggggagttattccagcagcagcaacatata

SEQ ID NO: 62107 - DNA, 418 bp, Oryza sativa
  unsure (1)..(418): unsure at all n locations
agtagtaatgtgcggaagaattttttttgtataaacggtcttgacagnggtgggggccgcggtggtaatgacagttgtcatcaactacaaaatctctaccattagggcttcagcagggaacttattttctctagtttctggtaagaatgattacacttaccctttggtaccgaagttttactttataccatatgtactctatctaatgttttcatattggactaaatatttataccatttttcactctggactcacctaacacttttgtataaccacattcaacatcttctccgccaacatgtgagctacacattagtttaaaagatcattggcatgaggacgctgatgtacttcgcaagatggtgatccacagagtattaaaggggaacattcctgttcaaggtgaaatgattggat

SEQ ID NO: 62108 - DNA, 105 bp, Oryza sativa
gcccccaagcaagaggaaggagcgacaaaagcggaggcgggtacaggcacacgggaaacaaaacacagagggcgggcgagcagccggtgatcagcacctacgcaa

SEQ ID NO: 62109 - DNA, 335 bp, Oryza sativa
  unsure (1)..(335): unsure at all n locations
aacctcctctctttttttctcaagcgaataacaaacaataaacattctcttatttaattgtggggtctactaatcattcatatttctattggcctattggtgcaaacttggttcatcaaatgcacagttttgtatcttgtcgtaaagttggaacttgattctgcagatatgcacaaactgatatgatgaagcttgctaaccgaatgcagtttggtgtaccaaaagagagctcattgggtcagtattggcatccccatttgaatgatgttntattggtttgtttcacaataaattatcatggagacttagatttatnttcttaacataatcaaata

SEQ ID NO: 62110 - DNA, 456 bp, Oryza sativa
actcagctagaaaccatttgcactagccagctcatcaaggacttaatctattacctatatggtgaaatatccaatgaaaaccatcaaataaataaaaaccgataaaaactggacctatgagctttctaaattcatctaaaaaaatagagacggatgtaggcatgaactatattaattgccactgaatttttaagtaatttgttttatgaatttagaaaacttttaatccgattcttacccttttttcacttatttgattttatttacctgatattcccttacttacataatatacgttccgttagatattatctcgcagtatttatatactaaattatataatacctaataaatattacctgtagagttttgacttggaatgatgggttctacaacggcgtggtatagacgaggaagatatcaactcatcagacctcacggctggtcagctcgtcg

SEQ ID NO: 62111 - DNA, 381 bp, Oryza sativa
  unsure (1)..(381): unsure at all n locations
tatctattaattaggaataggttggtagtttccttttattttaagaaagtgtgttaatgtccgataaagactttatattttccctttatctttaggttagtttctttcttgtccgagaaggacttgtatcaacccatgggtataaatatgtacacccggagtctatgtaatctatcctcacgatcaatacaattcggcgcatcgccacccttttatttctactntttgttttacgttccggcggaacttggcacccgacgcggagctgcatcgtcttcgatctccggcgaaaggataagtccaatgttctgcaagcccaggctattgtattgtctacgtcagcgtcgttcaaggctgcatcagtacattcgacctcttgga

SEQ ID NO: 62112 - DNA, 453 bp, Oryza sativa
  unsure (1)..(453): unsure at all n locations
tgacgttggggcctttagctgcaccaaatgggttaagcttcttttctttcccttggtggntntaggcatccaaggattgtgtctggatattgtgctgctctaagagagagttctgccctgccatgaacaaatcgtgcctgttgatctaaaaaaaagttgtgttattatggaggtgtttgattaggccagaagggccattcttgcttgtttacgaatttcttctcttctgtctttgtactaatcagaacttgtaaagtgcaacatcacaaaaccattttttttcccgataggtacaccacacaactttgtactccctctctcaatgctgataacacttgttctttgtaagactgttatttaactttaaaatctttaactaaaaatagcttttataatgtcttagaaataatgtgaccacatagattagtcttaaataanaagttattttttgag

SEQ ID NO: 62113 - DNA, 375 bp, Oryza sativa
ataccctcaatttgttcttgtcttctaatacatgccacatgaattcatgatcatgggtctattttctatgtcaaagactggactatttattattccccataagggttatcaaccgaatacttgcgccagtcgggattcaattattatatctattttggagtatcccataagggataatcactcagatcaaaaactattgatatgagctacacttggtctatatcacccggaagatgtattactcgggagcatgttatatgcgtcatcctttaaagggtgtcgaaggcatattttttggcctaagcctaatatgtctgcagcccatattttcaagtgtggcctgtcacgttcttttagggacttatgcactttttg

SEQ ID NO: 62114 - DNA, 410 bp, Oryza sativa
aactcagcttacttgctgaagaggaaaaaagctgctttactatacgaagttttagtaaaagactgagtcttcatggcttgaagatctacaaagatgtgcacatgcttttcagacaacactacaggcgataagctcagcccacgaaaattagctattcgttcatcatgatctaaagtagcggcctcaatgataacatacccccatgaagtatctttggtggtcctatgtttttcgcaataccttttcttttgagtactatatggttttctgctgaatacatgtgtctcctgctacagatacctgaatagacacattgatctcttctgaagttgacactttatttctttcaatttggtcacatgttttggtatctatattttggattggtgaaatgtttgttaaaatgggaa

SEQ ID NO: 62115 - DNA, 182 bp, Oryza sativa
actaactagggagacctcacttgcaatatggtgttattctcgaggaataatgtggatattacaatcagaaaactgagataaagaacaacaaagaaaaaaacgaacacgccaactagtggaaaaaatggaactattcattatccatgagtatttataatgtggaaaacaatcggtctaaaaaa

SEQ ID NO: 62116 - DNA, 417 bp, Oryza sativa
tgcatccatcatacaacgacatctggcaatcttccaccaacttactaaacttctcataatctctgtcgttgtcctctgcgtcttcaatgtcatgcaacattgtagatagacattgagtgtccaaatctatggtctctccacctaaaggagaaggtacgaacatgccttctcgagctgcggcggtgttctctacatcctgatccaacacttcttcagctgcgacatcaagcgcctcttgctctccatgcttggtccagcaggtatatttcttcataaatccattcattatcaaatgagcatgcacttcatccttgtcttcgatcatctgttcattcttacagtccctacatgggcacaacatgtgcatgctcatcctactttttctgtcattatccgccaatgtgacaaattcagtga

SEQ ID NO: 62117 - DNA, 196 bp, Oryza sativa
ttttctaaattattgaagtgatgagaaaaaattgtgtgggaaaaaaaatataaaatattgatgctaaaaagtttataatagtaagaaaaataggaaagtatcttaatataaaaacaactaaatgaaataagaataacactaaatagttaaacttaaaaagaaaaaaaaattgggtaaattatagttgataaaaaaa

SEQ ID NO: 62118 - DNA, 432 bp, Oryza sativa
  unsure (1)..(432): unsure at all n locations
actcagcttttgaagaaaaagtcttagatggagggttggcttatattctgtgggcgcctgcgaagatggagttgtatgccccctagttcgttgttgtttttcttttgttgtcaagcctaatgtgtcatttgaattaattttgttgtggtgttcctaggggtagaaaccgagctagctcggctcggctcgactcggctcagcttggtcaagctcgttagtataacgagctagctcggctcggctcgttggcaagctcgagctagctcgnttagctcgcgagccaaggcagtagcaagaaagccagaaattaatcaacacttcaatagtccaacttagcagcaaaagagaatcatctgtgcatataaacaataactcagagagatgtattctctagacatgagaagacgagttcaatggatcatcccaatgtgt

SEQ ID NO: 62119 - DNA, 373 bp, Oryza sativa
aattaagttaatgtggatgatatgctctaaagataatcatcagatgattataccgcatactatatctacatattatcatgtgttgttactcgaaatagataactcattattggctaatgaatatgtgattcgttcggaagactatttatgttgtatgttattatttctacaggatccttgatcaaatatcatatatgaaacaaataaagttcaataatcagcacatagattgattaattatcgtgtctcatggatcatgattgtaacatcccacgtcttaactatagtcttaggtatgctaatgacttgatcacaccagctgagagcggtgttgattgagccacgatgttggctagtacctataaatatattg

SEQ ID NO: 62120 - DNA, 424 bp, Oryza sativa
tctctccataagtgaatcacatgcatttaggatctattttaatgctattgactgtattctagagcagcaggtgtaattccatcagctttctgccattgaaaatctgttcaaaagtttgtgtccaataaatgatttctaatatcttaatcataagagaactactcatcacatctttttatactttgcctgtagatggggatgcttttgttatataagacacaacaaatgtgaaatttcctccagagatagctgttccgggctacaccgagcctttggttattcttggaacaggtacattttcttgttcgcttccctacaggattaaatcagcttgactatgctacttcgcatacttgctaaaagaaatacctcataggttttgttctggacaaatatcatggtattgtaatccttctttaaccat

SEQ ID NO: 62121 - DNA, 256 bp, Oryza sativa
gcttctaaaattgacattggaattgaattcaacaatttggtgtcaatgaacttagtgagtgaagtttttgcattcccgcaaacattgaacttggaagtgatgtaagtttagtccctgtgacctcaagagtcaataagctggataaagcagagatggaacaaggcaactccacaaggctagagcacccggcaagcatcaactcttcaagttttggcatgccttggaaaacatcattgggaaaattggctatgctgag

SEQ ID NO: 62122 - DNA, 412 bp, Oryza sativa
  unsure (1)..(412): unsure at all n locations
gcatgaatggaaacaaggganaaggctgaattttgtgtgctgtcgccatcattctatagttttctcaaatcccacttgctacctgaaatatcttttaaagacgaacttgggttctttatcaaagtgtggttaggaaatagtcacaggcagtcttataaatcaaggagagctgcatgttataattgcatgctctctacaacaaccggtcagggtatactctcaacaaaggcagacactatcggtggcgtctatatatatcctccatgtgaattgtgcactactaaagaaaagctctttggtgcaagtaggaaaacccctttatgtaccggatntactaacgggcacctagtagttggtcctgatgtctctggtcatcggtacctgntgtagaacaagcacctatcagacatat

SEQ ID NO: 62123 - DNA, 396 bp, Oryza sativa
  unsure (1)..(396): unsure at all n locations
ctgcttgctctatcgtgtaattcaagaagacatgaattcccacaatgattcagtcggagagcaagctgctgtgtgcacagtgcatacctcgggcatgatagaatcacacaagctagacatcggcattactttataaactctgcgcgctcattacacggtatgtatacacgattattagaacaagcggtatgtattattggatagtcatgtgcagcctctgatgatgcaacaaggtacgagcagatatctgaattctgaactgtggacctgattcaccgaacgagttggtgtcgataatgcgagcccagcagtctgtccaacgatagctacttgtgtcagtttgcatagcttactaccctgtgcatgtaaaggtactagtacattngcctatgtttc

SEQ ID NO: 62124 - DNA, 392 bp, Oryza sativa
atccaacaatgctgcagctaatgcactctctacgaaatatcctggagagatatctgaactacatgttgtttccagttgcaatcctgtatggcttcaagaagcttctgaaggttatcttccacgatgtcttttctgctcaacttttgactgacttgactcttaatgctgagtctccgcccactatctctttgtgtaatggtgtccttcgcttatatgcagagtctggatagataacaatccatctgtgcatgataagaatatctctgcgttgcacactaaacctttggtggggcactctggctttcctgttacttatagttaaatcaagactccttttgctctgcccagatgaagaaacagattatactgctgtcaaacatgtggatttgcat

SEQ ID NO: 62125 - DNA, 469 bp, Oryza sativa
tgattgaagaagactcaatgcgggtggcctttggacgcatccttcagtggccctccctcctcctgggctttcttcccccaaaggacgtcggtgggctctcatccaaacagcaacaagaccaagttagcttcttgatggcttcatatgggtggccttggattttcacagcctttcgttggccattcatctaattcggcatgcttgtggctgtgtgacgagtggttgttgataagttggggtgttagctttaggttgttttggttgttggctgggtaattttgcaggtgtagttcgtcaatcgttatattttgggatgttttcctttgtattccctgtgtattttctttttctatcttccagggcccctgcgcttgcgcgggaaaagcctgccctgtgtaagatcattttgaaagcttactaaacttcactccaatctttttcattatcaacaagaaaagctctatgtatc

SEQ ID NO: 62126 - DNA, 449 bp, Oryza sativa
  unsure (1)..(449): unsure at all n locations
actcagctggaacactagtatgccgcggtctacagtccatgttgattttcgtgttgcatacatgctgncacgcccggaaattcacaggtaatttccgaacttatttgtgcataaaacccccgtccaggaatcagccgaggtacacaaactgataatttaatatacaaatccatcaaaataactaaagcaattaatacttactgaagaggcacttagtcctcacaacgaagaaaactgcagcagaaaaataaaatctagcgaagctccagctccacccacacagacagctcaactggggtataagccaaacgtcttctccttctggatcctctttctttaactaaggttgattgattattgcacgaataagcatatgacatactcaacaagtcacacagcatatattcaagtgcacaaggataccataggatggcataatataggctcat

SEQ ID NO: 62127 - DNA, 402 bp, Oryza sativa
  unsure (1)..(402): unsure at all n locations
aaaattttttttttttttttataaaantttttttttggtggtttagggtgtgttaagtggtggtttctcaccactatctcctatctattcccagaatgggtggataatccctaactctttccgtatgttaccagtcaagttgttccacatgaaatccctctcataagaacaaaatatagcagttaggtaccaaaattttggaaatgtaacaaaagaaaaggcttcacgagactaaatgcacaataagagtcaaccatgcaagaaacaattcctttatgtcccagttattatattatgtaagtttcttctttcttgtgagtcagaattatgttcttttgcttaaaatatactaaatgtagtaccccatgagatacaatattatctttaaattcaggtaactat

SEQ ID NO: 62128 - DNA, 454 bp, Oryza sativa
accggcaaggtcagtgctgggctaggcttatcaatttggaaccgagacggaggagtaagaacctgcaacaaggaaccccccccccccctcctgctgcagctgcattggccggtgcgccgcgcctgaacgatccccctcgtcgccggcgccgcatggatatccctccttcagccgcgtgctcgccattcgcttcctcccgacgaccccgtctgcgccccgcctgctcgccgtcttgcccgcgtagcgtatgtgggaaggattcgatggttggagatctcgtgggctctccttgcgctatattttggcccaccccgacgtgtgccacgccacgtcgcttatgatccacatgggctgaatctacttaaccggttggaccgtgagcccatatttatgtggcatgggctatatgtttcttctcggtcatcgggcagtaacgtgtgccagtcataaaaac

SEQ ID NO: 62129 - DNA, 357 bp, Oryza sativa
  unsure (1)..(357): unsure at all n locations
acagccaaaaactggacctaaaaaaacttcctcatcacaaaacacagaaactagtgactatcaatctgtagactaaatcgccacccatgctcctgagtgaaaaactcctgtgccacctggtccaaacgttgcgataccacagcaatagtatcccgaagtcccgcaatagtattaccaaaagaaataccaccaattgctaaaagagagagatagtacggaaccgatacaacgtctgcgccgcctaggatagcttcttctcaccccatctgaagcactcaaaccctttcttaatgactggatggagcanaaaataagcanaaatatgcgagtaaattcacaaattgaagtctgggaact

SEQ ID NO: 62130 - DNA, 468 bp, Oryza sativa
  unsure (1)..(468): unsure at all n locations
ntacattatggaaaatggtctttttttgtcaatgactttctgattcttatcagtatgtttcttgatcagctgagtttgagtgagataaaagaactctatggcacacggcatattggcagagatcaagctcgccagcttgttgggctaatggatgtcttctgttttagtgaggtacttttgaatcgatccaaacttcctctcacatttactttattatcttctattcatgttgtagtctttcacttctggattaggaaagtactatcaatgccctactagaattttgtggactaagtagtgtggctttcagttttcaacccccttgcctagatgtttgcgctcttctatccattgttgtatcatgtaacaacattgagagttataattcactcaaatgtaccattgaaatgtcacataatttggttatttcatagaatcactgtgagactgtatcacanaatttaactg

SEQ ID NO: 62131 - DNA, 363 bp, Oryza sativa
gctgatgtttcatccaggaaagattcacgtcacctcgccaaaatgcgttgcctgcgcgagttctcggagccaaaagagggcacgcgttctccacggcaggtgagggagcacggcgcatggagaatggctgggcgctgcattgtggagctcgtggccttagcgttgcgtggcttcacgcggcggccgccagccctcccacaatacttgcacttgtgtatgaagcttatcaagttcttcgtctacgtggcacatgaagaatatcacaaatttgtggcgcgctgtgaacgccctaatacaagccaacaagttacaacaagcagtccacatattcagggaagctccactgcatcgagtactcccctc

SEQ ID NO: 62132 - DNA, 330 bp, Oryza sativa
  unsure (1)..(330): unsure at all n locations
aatcaagcaagggcctgttgagttctaaagtttttttcgcaacttgcaacttttcatcacatcagacctttcatacacaccaaactttgctatcacatcataccaagttcaaccacagggtcaaacttgagtgtgaactaaacacaatgctgacagaatctgcataactgacattacacagtgcattaatttcagcttcatgtcaatatcaaaagcgattntttgtaggcaccctgtaccgcacatcacaacaggcatagtacgtaatggcacccacttgtaccggctgtgctaatttgcgcgcgcacgccagatccgtatctggcgcgc

SEQ ID NO: 62133 - DNA, 255 bp, Oryza sativa
gctcgctgaagatttgcacattccaagtttgtaccggccaacttagctccctgcaaatcagactagcttagagtacggataaagaagtttgaataacaaagcgaggacaaggaactgggttgtcagttaaggcacaagaaaagagggattggtgttaatgccaatgacctttcgttaatgtacacttcagtacacgattaaccatgaattcatatcacacagtcatgggttcatggttctaagataacgggtttg

SEQ ID NO: 62134 - DNA, 466 bp, Oryza sativa
tatacacaactcaaagctttctctgtctctttgattcgactactaaagatgaacctttatttatggtatttatcaccctctttggtgcttcctcaagggcttttatcttcatcactttttgtccttccagcatgtgttgtcctccttggacgccttcatattttccctcgtattgccttacatgtttctccatcaaacttgccatttgtcgacattcttctgttgcgtgattgcaccggccatgtattctctagaatttactgtaacactcttcagtggagtgacctctaagtacatgtgtgtgacaaaacttttgccaccattctcttcaccttttcctcttccattattacacacacatggttcttgctctaacagagatccatactttggcctttcctcttcccggtgaatcaatgatttttcctttatgaaattgttcaatgacctttgctctctctctgat

SEQ ID NO: 62135 - DNA, 357 bp, Oryza sativa
  unsure (1)..(357): unsure at all n locations
ctgtcgngacgcgtctatgtgtgagacgatgttatgtgtttggcagncaccgagcatgggtaaagtgtacattcactacagtgtgagtaaaccaaatctattctaatatgccgcgctcacggttattgagcaccgggacgtgtattacacttggctagactctaaattcttaacttgcgtgggatgggatattgcatgatgattnttatgctgttggagctacttcctgagaggagggaaggtggacgacctcagaaaaccatgacgactcaatggcgggaagatatccttgggatcacaatggatggtggacagaaccgccgttgttaatgtgacactggcattaaatttgatcag

SEQ ID NO: 62136 - DNA, 296 bp, Oryza sativa
tcatttatatagagtcacattttgggccacatactatacttactccatcccgaataaactgagatgttggttcaagaattaccatcctatgcacatctctcagaaagctgtataagtgaactgaattatggaccaagggctacgaaaattgaggccatggccatggcatttgataggatcttcgtgcatttctatttgtgcagcagatgtttatttcgtgtgaccgtgagatttccaatttgattcgtggctaattggtgattagcaatactaatttacaaatacctgaaccctct

SEQ ID NO: 62137 - DNA, 339 bp, Oryza sativa
tggctgagatcagcccttgtaggatgacaacatttgctcttgcaatggagaatcatgggggaagcatcttcgcctggcgtgatggatggaaaaagaacttatgttgatattttcaacgtgaactatctatcttcgcacaaagctggacgggccaatccctatgttgagtgacacaaaactcagaatatgtgtgcatcggtacgtgcctatctcatttattttcatgaatacacagaacgcgtgtttttcgattaatatcacgatatagatgctctccataagttcaagcactatgtacatgcaaagaaaaggaataaagagcattgttttctaaagcca

SEQ ID NO: 62138 - DNA, 295 bp, Oryza sativa
tattactaatgtttacaatactatatgaaaacacatttgtgttatagaaacataccatttaatataccatgggggtatttcattttggtaaacttaattttttttgttttttaaaaattcagtaatcctaaattcgtaactgataggaactaataaacatgaactttgtatccatagtggctatcccatatgtaattaatttaatactgaaattaataattagcacgttacaaaaataaaatttggaatcagaaaatatatagaaataccacatattcagcatgggaaaaatatt

SEQ ID NO: 62139 - DNA, 450 bp, Oryza sativa
  unsure (1)..(450): unsure at all n locations
acctatgaaactcagcttctttactgaagggggagaaagatagtttttaatgttttcaaccacagnactcagcaagccacaccggagatgcacaaataatgcgaacgagtacaacgggataataacatatgggttaagttttgcagtgaacagcatttaaaagtcacttagttgcccaaagccattttgtaaggacgatcctagagctacacaatgttattaaacaaggccgtgaaccctcacgaacctgccttaacccaagtcctacgatgattcagaccgaactggctacccgaccctgtgtcccagctcgtccctagccaacccaggccaaccattcctacatttaagtgttgagcaaatattaagaattataacactgactcgngtacattgctcagcttgcacataaccaaaggcgcggctatttgaatagaatatactctgatc

SEQ ID NO: 62140 - DNA, 361 bp, Oryza sativa
  unsure (1)..(361): unsure at all n locations
tggttctgataagcagttgtgggcacagtgccgccaatttggtctgaanaatattcatcaattttcttggcctgaacattgcaaaaactatttgtcacgggttggtacactcaagccacgacatcctcgatggcaaaagagtgatgatgctactgaagtttccgaagctgactcacctggagattccttgagggatgttcatgatatatctcttaacttgaagctttccttggacagtgagaaatcaagcacaaaggagaatagtgtaagaagaaaccttgaggatgctgtacaaaagttgtcaagaggtgttagtgccaacagaaagacagagtctggtgagaatatggaggctaccaca

SEQ ID NO: 62141 - DNA, 220 bp, Oryza sativa
  unsure (1)..(220): unsure at all n locations
tgaaaactagttcgtgcttggttggaccgacaaccatggttatcccccctcctganggcgttgttgtgctggttcacccctcaagggttggtgccgggcgaaagcccagtcttggctcctttgagtcctgacggacgacggcggcggtttttcgtcgcttctcttcttgaagacatcgtttttggcattccctagggggcgttctcgtttgtgccccttt

SEQ ID NO: 62142 - DNA, 457 bp, Oryza sativa
  unsure (1)..(457): unsure at all n locations
ttacaattcagatatggagacgatggggataaggggatgatatagtancagaggctagccaccgaatgacaagacagggcgtggtgcggcacatgaatgggatggaggtcgcgcaagtgcangtatatagcgctcgactgcacaaaggcggtagtggcacggtggtgacgcgcacagtggaggtgtgacacagaggtcacaggtggcgggcgtgaacgggtggagcgcgagtgggcgtaatggcgccctggcgtctcgcggcgcatgtgctagatatacgtggaggggacgggctgtggagcaaggtgatgatggcgccatggcagcacgagacatagctaccagatagaagcggaggtgtgacatcctaacccacggcttaatagggataatagaatactcatatcaacaagttgcaacttcttttctggaagccgatctctaaagaactctgagg

SEQ ID NO: 62143 - DNA, 447 bp, Oryza sativa
actcaagcttctcgggttcttggtttcatgacgaggaatcgaggcaaattctgagaagatcaatgtcgatcgagaacatgaagtcgcccacaaggctcaaggagtcaagcggctgacaggatgcatggcttcactaagccgattcgtcgcaaggatgggagaacgaagacagcccttcttacccctgctcaggaagcaggacaaattcttgtcgaaccaagaagccgagaacgcatttatcgtgctcaagcactacttgtcaaatacccctgtagtcgttgctcctcgcatcaatgaagaattattcctgtatattactgccacgccttattctgtgagtatggttatcgtcgtaaagagggaaaaagtacaacatcccgtgtactgcataagcgaggccctccacgacgcataaattagatacccacagatccaaatattactcta

SEQ ID NO: 62144 - DNA, 462 bp, Oryza sativa
  unsure (1)..(462): unsure at all n locations
ntctacaaatactcctaaaccactatgtggtaccttactttctcttctaagtcaccacatggcgcttcataagttagagaaaaaatatgaaaaaaaaaacatctaaccgtcagttttcatttaaaacggtggacccgaaaatattaacgcttcacgtacgctttcctcctggccggccccacatgtatacgtacgtacaaactcctcctccatcaatctcttcttttctggaatgaaacatcccggtatttactcaaaagagctacaggcaattattacaatctagcactctaaaagagcgtaatccaaaataaagcgaaatacaccaaaccaaaatagaagataatcgaacaggacaaggagaacattattccagtctattggtgaatctccatctataattagaaaaaaaagtggcataactatcaaaagatacccaccgtatatttgtaccacaaatga

SEQ ID NO: 62145 - DNA, 271 bp, Oryza sativa
cacactttcaatccctctttccataaatcagccatatcttcaacaatggttcaagaaatacgtcaatatcaataccaggctgacggagtccctgtatgaggatacagagtagtacgtattttctctttctacaaagccaggtatgaagattatacatggtgagaagcacttggcaagtactatgggagctgctcacgtctttaataagattaactccatcggtactcagggcaaatctaatgttccatgggtctttagcacactctctata

SEQ ID NO: 62146 - DNA, 449 bp, Oryza sativa
  unsure (1)..(449): unsure at all n locations
catgcaaccatgttacatcatcacccactataattatatatttatacctatacatgcatacaacatcatttacaatttatttaattctacaaatcatgcgagcatattcaattatcacccctcacatcatttgcataatattttaacaaatctatctatcattttttataatatttaacatatacttatcaatatgtttcacattaaagcacagatatcgcttgtttgtttatgataagtaccgataaaccctgatgttttattattttcccccctttttttacttctaacatgatcgtcgaaaaaaaaaatattgataattgcttaataattccaacagcaaagcgtgggaaatcaacttatntctcttaaggttngaagacattcatatgaaatgcacacagagaggactataagttcaccatattcagccataggatggaatcact

SEQ ID NO: 62147 - DNA, 322 bp, Oryza sativa
taaaaatctgtgctggcaaccctcagattcttagtataatcttactattaattctttaaacagggggagtgcttggtatcggtattaattgcgtgacagtcgggaagtatcaatttcattttcgtattgacttttgatctgaccatttccagcttcaacttgtccgccggatgtttttttcattggttcgtagtacttggtaggaagaagtagtacaggaacaccatttcaaaattccaactactacttgtctacttaaaccacacatgaattttcttttagcaaaaattcaaaaccacatgtattgatgtataaatttgga

SEQ ID NO: 62148 - DNA, 465 bp, Oryza sativa
tctgcatgtgtactggtactcaaacacttgttaatccttctttttttttgcatgtgtactgttactcaaacacttgttaatcctcttttttttttcagaacctcttctttgtgaaccagttgcaggcacaattacgaggtggaaaagtgactttggctgctcagcaggagggtttcagtgacaagatgaattctggtgctgaatatgaagatggcagtgaggaagaagaaccatatgaacgtgtgttttatgatgatgaagacgatggcaatgatgattcaatatgtggggatccctgtgatgattcagtaccaaaagaggaggtgcacaggtaaagtggcaaagacacatttcatgtggagcatttcatcaatctggtgcttaattctcgcagtacttgcaggaagcttatgcatgaagcagagccatatgatgatttggtggctggtgaggaggaatcttgtg

SEQ ID NO: 62149 - DNA, 280 bp, Oryza sativa
cactcatgacccgaaacgagaacaccatggttacaaccctgaatggctctgcacaaatggagaatggaacatctactatattcaagcccaaaaaggatcctaatgcggccaaatcttgtccttccgacgagaatcacgagccgacaagaaccacttctgaagcaacaaggtcttggtgttctatccacaaaaccacgaagcacaccttgcaagcttgctgggtttttctcgacgtacaagctgagatccgtgccttgcaaagcgtaggaattaacgtact

SEQ ID NO: 62150 - DNA, 455 bp, Oryza sativa
  unsure (1)..(455): unsure at all n locations
tgtctcccgttgacatgttntctttctatcacattcttttttttccacataacaaggagtccaatatggacgaggggaaattatattaacgctgtttgactgtggggttgaataattcttatgttcctagtatggtttgattctacttgtgctaattgtactatggtttgatcttgttgagcatatgtctatcttgttcaggatctctcgaactagctttagagacatgtggtttagcactttgcatatacatagcaagaatgtgcaatgtcggcctcgttccatgttcataatctttagcagcttagcttgtttaaaatacactcatctttcatcaagaagctgctcaatgaanactattcttcataaacagcctttgctagtcagtgggaagcacaggaggtgtagcttccagcaagatgagctcacgcagcttgctgcatgctgattgaatt

SEQ ID NO: 62151 - DNA, 263 bp, Oryza sativa
accccgtggagtatggcacaactgcctggaagtagactgtggccgaaccacctgcctgagttgccaactttgccttagcattcatgctgacaatattggattgttgcccctgaaacaacacagcaaaataaagtggaaatgcttaagttaggaaatggatatgcaaatgaaattaagttgtaatgaaaatgagctaaccttctgcttagagcacttgtggagtgtgtaggctgacagcactagtgagagcaccagctaacctc

SEQ ID NO: 62152 - DNA, 435 bp, Oryza sativa
actagctgataaaattatagtctgcacttctgttttttgttaaacatcgccggattattagcttatcagccacaccaaatttcaaacgcgatacttctcatccacggaagaaatgatgctgggcagatttatgtaattaagtggccataataagttggttagtattagcgttcatcgattatttcaccatcgattgaaccgatgatcgtatcaatagaacagatcgatttacagatcatttcgaggccacaacaagattactttcacatgcttggagagcacactataaacaagaatggatcatgtcacagctgaatcaaattgaaaccactcaagttacaacatccatatttgggcagcaaaaataaagcaaagacagggaaattcttccacctctcaactatgctgtgaagagattttgtttcattcatcaag

SEQ ID NO: 62153 - DNA, 257 bp, Oryza sativa
ctaccctgagctccattgcttcagtgtctctgccaaggagatcaccaagcagtcgagcaagttagtgtctcactggttactctcattgataagaggatggcactctagatggggcaattttctggttttcttccattcacaaactcaaagccatatccttccaaaggggggattggatacatatttatagctgcttgctagtctgagaagggggctgtcctagagcatctcaacaaactgtcctagagcatctcaac

SEQ ID NO: 62154 - DNA, 443 bp, Oryza sativa
  unsure (1)..(443): unsure at all n locations
gcttgtgcaacacanatttgcaaccttctcatcgtatttgacttgcaaataagcctttcgtgccacctatctatagaaacacaattttcttcatgagacttatttttattatcaacataatgtggcatacactatactctaatggctcaagaaatcgttaaagaccatgcaagagtatcagagcaactntacatattgccattactgtgcaaatggaaaaaataccgntgcttaaagtgctgaaaatatctgtgcattgtgatataaaaatcaattaaaagtacaaaggcactcactattagagttcaatattttatctccaagattcagtctcaatgcacttcacaatggtattgcactcccaaacactttgcgttgntgaggaaggaagataatttagtagtaactctttcaattattagaagcattaatcagctaacata

SEQ ID NO: 62155 - DNA, 456 bp, Oryza sativa
  unsure (1)..(456): unsure at all n locations
ttgcttgtgtgcttcgcgcagctatcgacgattttgttgttcccaaagcgtggttcgaggtcgtcgcccaacgttccgatagccgctctctctgagcaaggctagtcacatcatccttgagcatattgaatcccagattataaaattattttagtttaaattaatgcattatcgctttatttaaaattcccgcgttgtcactgttttatttagccatgcctatttacctttgttatgaccttattattattgctattggtattattaccttgttcaccctaggataaacaaaaccccaactagtgggtattctattcatggttccactactatgaatttaagtagatgcttcgctgattaattaagccatattatggtggttctataactctatactttgngaatattcataacacctcgacactatggaatagctgggtatggtggaattgacat

SEQ ID NO: 62156 - DNA, 308 bp, Oryza sativa
ctatttctatacttctaacaaacaacatgttaaaatagggtaactagtatacactatgtagtatgaccgctataacgatgcagcatagctaagcctaagcatagctatgccctcccgaagcatcggaaagttaccccggggtgccgagtttctcacgaccccaggaaatcgtatgtacgaatataaactgcgggggagacgcccgtactgagctgtcaccatcagcggcctgcaaaccacacagagaatataccccaaataatgaaaacggatacctaaaccccatgcttaaagtactacttattact

SEQ ID NO: 62157 - DNA, 390 bp, Oryza sativa
  unsure (1)..(390): unsure at all n locations
caacaaaccagctgaatgagaagagaataacagcctgatcttgtgtaaacatcgcagnacgcggaacaataagtcagcataatacatgggaacataaacatctctgaaataacggtgcacggccaaccaagaatgtggtatagtgacatgcctaccacgacgtgtgcaatcattagaagcaagtgtaactaaaacactataggcacacataaccgtttgattctaccactagacacgcgtgtgaaatgcacgatcaacacgctagctcccaattaatgtaagcacgaggatcataggctgcctcgaaataaagcagtgcagagctgatcttaactagaacatcaacacttacctcagaacggtcatgcagatccctcctcatgtctcgac

SEQ ID NO: 62158 - DNA, 239 bp, Oryza sativa
tattagccggaacgatcgaagtctgggctatgctcacggtggaacgctcaacccaactgatgggccactggtcttctgtgatcaaataccagaagctgcgcgttgactaacaaacgcagtggaagcctctttttatggcacgttcctaccggacagagagagggacgagctgtcactcgccctgcagactccagagcatccaggacgaacacgagcgaaaggggtgattccttggaaga

SEQ ID NO: 62159 - DNA, 435 bp, Oryza sativa
  unsure (1)..(435): unsure at all n locations
ngatcttcttagcttcccataaccaggataatatcgttcttagcgaatagaattggcagtccccagaacagctntctgagataccctgctacaaccttcaacaatcagagaatccaatttccgtgcacgtacaacctcaccaactccaacatcagataaaccgtcagattgccgcagtgtaaggttaaccaaagatgggctatctgcaagcaagcacatcccagcatcagttatatatacgcaatccataagctatagcgtctgcaggaattgtgcagatgagagggccttcatcccctcatcatcaaagatattggcgccacatagcacaagatcacggattgggcaagactgaaaaaacatcataaggccctcttgggtgaagcctatttcttgataagcataatcacaaccaaacattgtgagctcaacaac

SEQ ID NO: 62160 - DNA, 432 bp, Oryza sativa
tgtaaagaagactattggcttataggtatgtacactgatctttgtggagttacgtcttgcattaatatattttgtgatagacaaagtgcaatatgccttacaaaggatcagatgttctatgagagaacaaagcacattgatgtgagatatcactctatttgaggtgtgattgccgaacgtgatgtcaaggtatgcaaaataagtactcatgataacccagctgatatgatgacaaagccaggtcctgctactaagtttgagctttgctcaagcttggtgggtgttatagtatagtcttagagactatttggcgcgcggtgattttacctacatgaggtatttttggtgatcgatgttcttatgctacaagaggaaattcgtctcacggtggagattgttaaatatgtgatccgaaatttgggcccacaatat

SEQ ID NO: 62161 - DNA, 214 bp, Oryza sativa
gccacttctcgaggtacggacacgggagccaaccccccgttagttgtattaccgcccttagccaatctagcggagaaaacttagaggtcaagatcggactttaatcacggtgatgggaggcgggaatgggacgtccctcttttacggacgagaccccaggcgcctcagctacagcgcctctactaccgccctgtctgaccgagctcacccactt

SEQ ID NO: 62162 - DNA, 440 bp, Oryza sativa
  unsure (1)..(440): unsure at all n locations
tcaccatcacaatgggtcgtctattttgaagctgtaacctttacagagactctgcaactggttgcctatttggaaaactagatatttcatccttagcatagtcgatgactgtgacgagtgtcattatattgtcactgctatttgttcctctttatgtgaaagccccaataataccatcttagtaataaatattaacctatttctccaacaaagaacactgcacaagatggagataccttggctcttttatcttttgtcagtactatgtatgacaatgttgtctcaagccatccattgtactttgctcatagcctcgtattcattgngagttggaactaggtacaagctttactttgaggattcangctttgtcagctgctcatgggacacaatctttaattgagctaataattagaatttaaacaggtgtttcatgctca

SEQ ID NO: 62163 - DNA, 429 bp, Oryza sativa
  unsure (1)..(429): unsure at all n locations
gctagctagctagcatatattcgattcgattcgaccgcccgcggcccggccattaatttcttcattctcatcaacatctcgatcgatccatcggcagctggccggcatcaagctcttaacttaattaactagctagtatctccctccctccaccgcatatccatcccccaccagttgtagcagtagctagctccaagagcttcttgtccatgaattgttgatctcgatcgatcgatctcttgtgcctgctagctaatgaataaacaatagctaggctatatatatatatatatatatatatatatatatatatatatcgatcgaccatgtcgtcgtggatgcaacacacgccgcggtcgtggacagcgcggntgctgttctccgcgtcgctcccgccggagcgcctgctcgtcttcttcggcatcgtca

SEQ ID NO: 62164 - DNA, 359 bp, Oryza sativa
ctggagaaagatctattgagtgcatgcatggacacctcttctgttactactcgaaaaatctgggatttcatatgcatgcactgtgatcgatccacgtaccggtaccgatgatcgagacaaaacggacggtggatatccatccgaaatcgtcaaggcatattaattgatgtgtctcttccatcgattggcttgactcttcgattcattttggtctccagatgatggggcaggctgctggttgactctgttgatcgcatatgtatatgtgtacagcaatatcatatgctggcactgtttgcattgcacgtactgcgatgcatcgatttatgcttcgcaaaatgaaaatttttggacgtcac

SEQ ID NO: 62165 - DNA, 416 bp, Oryza sativa
  unsure (1)..(416): unsure at all n locations
aagaattccttctgatctgccttcagcaatataatggtatcatctgcatactgaataactggaaaatcactttcatcatcaggcctaatatgtttagttataacccccaatctgcaggcctcattcaaaatagcctgaagaagctcagctcctaaaacaaaaattaaaggagacaatggatcaccttgccttactcccagtttacacttgaatccattgctaggtactccattgagtaacacaactgaactggcagaactaaagatcatttcaacccaatttaaccatttagcgggaaagcccatatgtctcataatatcaaggattgcaccatgctcaatggaattaaaggctttntcaaaatcaatttttatgataacaatctttcttttataattgtgacactgatgaatata

SEQ ID NO: 62166 - DNA, 464 bp, Oryza sativa
  unsure (1)..(464): unsure at all n locations
ntagcagacttcgtcgccgaatggaccgagtgctaatttgacatgcctgcggagaagatggagtactagactatgtattttgacaggtcaaagaggctttcaggcactggagcggtggtcgttctaatttccccgactggagagaggttgagctacatattatggatacatatttctgcgtctcacaacatgacggaatatgaggcgcttcttcacgggcaaaggattgcgatctccttgggaattcggcgtctgatagttcgtggagactctcagttggttgttaatcaagtcatgatagagtggtcctgccttgatgataacatgaccacctatcggcaggaggtatgcaagttagaagataaattcgatggcactgagctaacgcacactcttcgacataataatgaagtatccgacaaacctggcaatttgggtcaatacaaaagcagctctttcgacgt

SEQ ID NO: 62167 - DNA, 350 bp, Oryza sativa
gatccatgaagctacccaaaccgactctttctgattcgtatttcagaatgatgtattgttctgttcagatatgtttgatttgattccttggtttggtttctgggagtagttgggatgctcgtcttatacagtattttctatgatgcaaaatacgttgaccaaaatacattggttatgtgcaaatgggggatgaaaaatgggatcagaaatgaatgaaaaagttacacggtttaaagattctgctatgacgtgtgtgtgtaatatagaagattggttgcgatgtgttgaagaaatggtcaccggccacggcagcgcatcttgtaccgaataatgcagctttctgacaaact

SEQ ID NO: 62168 - DNA, 350 bp, Oryza sativa
tatgaaaattgttctttgatgccatgagcaacctcctctctaaaccttggtcatatagctcccttcatgaactcaatagtttaggtgtgacacttcgtatgtctatgttgtggtgtggcaagaggttgtgatcatgattggccgatccttggggagggggatgggtttttcctcttgatttccctttttcctgcttttattttgtataatttatgtgttactataatgttggaatgtattttttgtggctattggtgatggtataatttacgctgtttttttacgttctcctataactgatattattttttaaattattcctgtgtatatacatcgtctatatttcctgc

SEQ ID NO: 62169 - DNA, 375 bp, Oryza sativa
  unsure (1)..(375): unsure at all n locations
cgaaagcctatcatagctataagatgaaagaaaccttggtgatgctggcacaattgctgggcaatcttcaccttcacagcgatttgtttgttcatatggccttgcgagcctcctgcatctgtcacatgctacgtaccaccaagacccatatattttctttatggtgactgtgagacaaactcgagtttctacagtntagataccatgaacatcggaaataaagacaaaaggtttcatctaatgagcacattatataatgttggcttgttcattttacctgatgcactaatgggtgtaagtcctcgatctcgatgattgattatatctnagcagcagatcgcacnggatcatcccagtgttagtcaaaccacctaa

SEQ ID NO: 62170 - DNA, 440 bp, Oryza sativa
  unsure (1)..(440): unsure at all n locations
tttactcccttcttcaaaatcctttctttntaaanactccttctctaccacgtacaataatggtgtgtttacttcatactagaattgaaagtttgattgatattgaaacgatgtgatggaaaagttaaaagtttatgtgtgtagaaaagtttggatgtgatgaaaatagtagaagtttgaagaaaaagttgggaacttaatcaagcctaattctaaacatgtgtcagaggaatagtggtactctctctgtccaaaaaaacaaatataaagctaagtactaggttggtttttttataagacggagggagtaggttatactgtgcacgtggttcgtgcaaagctgtctaccatacgatcacccaacgaggggctgtctacattcataataacacgacaaactcatgtgggtaactgcataatacgcctagtgctgacttttc

SEQ ID NO: 62171 - DNA, 350 bp, Oryza sativa
  unsure (1)..(350): unsure at all n locations
gaaagacagcagactgaatgaagagttccataagctattaaacggaaaccatggggatcctactgatcgggtattgtagaagtcttctccctatatactccctgaacaagcctagcttagtacagtcagcctgtctattagatgaacttgcctatactttatactatgctggatcctactttctccgtcccaaaataaacaaacatattatgagatgcgataacctgctcagatcattatactagaatacgtcacatctcatgatttgtttattgagacggagcgagtactactataatttgttacaacccttgctagnttaattactccctccatcctaataatatact

SEQ ID NO: 62172 - DNA, 417 bp, Oryza sativa
  unsure (1)..(417): unsure at all n locations
attctaagagcctctcacatccttatccattgtgcgaatgatattggcatatngacatgcctggtagtcactcctgcaaaactacaactatcactctaggtcaataacctatgacaattccatgactgtcagaagaaatcagtatcaaacaaataagtgaccatgtgatcatcaattttgccaattctattcttgatccactgcgcgttcagacagaaatgatacaaattaggtatgtggtgagctggtgaccaacaagtagtttcagaagctaattcagaagaatttccaactctaattagtggtattctggtactaaaagatgaattaatcatttatatttgttcacttcaaagaggtttgctcttatacaaaagagcacagcttagttcatgattttaaacatctcatcatact

SEQ ID NO: 62173 - DNA, 360 bp, Oryza sativa
aagacacaccggtttactatttgggaagcgtgctaacggaagacgagaaagttgtagtttagaatggggccaaagccctcctgtgcttctcattgtttttttttaaagaaaatatgccaaatattatcatacataggtggagatctcacctctatgtaggacacctggaaagttccaccaaaactgaatctcctagctcaactctagagtgtttgcacaggttttgcagtacatttgctgcaacatgtatgtacctgttgtcatgcactatcattcttgccacatccttaatgaatctatgcccaggttccttcatgataactgaacagttgtctgcactttctagtggtagcattgaca

SEQ ID NO: 62174 - DNA, 341 bp, Oryza sativa
tgtggcaagccatcctatcttatgatgaaaatctacgcttaaaactaagcattgtgcttaacgctaagtcatttcagcttaacgcttaattgggatgggggcacgcgaccttgcgcggttgcgccccggagcacttctgcagtattagggtttccatgcatttgtacactggaagtgtggccttatattgcccctccatttttacggtgttcttcagagacaggagctatactcatcgagtagccgtatagctctaactgaaaacactgcatggcccaaatgggctgctcttccgcgcgagagatggcatcgcatctgagccgcgctttaaggctcgatcc

SEQ ID NO: 62175 - DNA, 363 bp, Oryza sativa
caaagcctattctcgtgacattgattggacaggagctttagtgtcacctgctcggccatccctttggcaacatctaactaacttcttggctttggatggaacacctgattattcaacgccttccaaattgtccaggctatgagcgttgcaacggcgtcgaatcctcaccgaagaggcttgcaaactttcttctggttgttgcagagccaaagatgaaaggattcatcaacatgcagttaggctgcccaatcgctttgagcacacaccactaaagttgcctggattctggacatgcgactaataaatgattgatggaataacctattttagaggtttttgtgtgtgtgtgtgtgtgttgggggg

SEQ ID NO: 62176 - DNA, 368 bp, Oryza sativa
tattaacttattgacattacattgtccttttatgttctttattcagttgaactaatgaacttccttctacctttatacccattggaggaacataccatgtaagtttgctaatcattttttaatcaaaccatctattttaatagatttgctatggtgctcgtgatagctttcgaggtccaaaacttcaatttttcatccattcagtcttgtgccaagattcgtgttacggtttgggtccgaatccgctttgagcattatgggtttcactttgggccggcctgttagcatttcccctattttgaacagtgaaataccgcgtcatagtcttgtctctttcagctttctttagagacatcttggtggcaatg

SEQ ID NO: 62177 - DNA, 436 bp, Oryza sativa
tgaaagtgtgcgtgagaagagaggtggtgatgtttttatattaaggtacgtatgacggtgggtgaatgtgaaatgtccgaagtgccctccatccgtcatcatggatgcatctggtgacgttcacagccaaacctcacatccaactgtggagatgggggttcggccgaacctgggctgggcccatctgacctggaccttagcccatgacctcccctggtccttctctattcattcttcaatattttgggcttattctctgatgctatgatgaagttcacagtccatccttgtatgaatacacatttctcctcactttagtctgatattgcttctaactctaaggtctatcatctgaatacaaatatgattcaccacttgtggaatatgtgatattaagcacctatcactatgttggatgttttataatccgaactta

SEQ ID NO: 62178 - DNA, 296 bp, Oryza sativa
aatggtctagctgacttatactgtttttttgagacgaggacaaccggagggtttatttatttggagacatgtagagctggcttaaatttgtgaagtgggataaatctactttgcaaatttgtatacaccagtttcaagctagtcttcaatgctcctacaaacactgatggtcggaagtgcccacttcgctttgtggatcaaacgggagaacgtcagttttgtgacggatttctaaggaagcgaataaaggtgaaaatatcatgaaaattgcagggctcatatcgacataaattatc

SEQ ID NO: 62179 - DNA, 259 bp, Oryza sativa
tatctatttctgcttttggatgtattccggaccgctcggtccgatgatttaagacaatgcctgcgggcttatgttgtaataattcgcactagactctcgtgtatgagcatttggtattacaactatgaactcgtgtgtaccagactacttgatccagggaaatggtactatttacacgattgattcctgttataaaaacgggggtctacagtttatgagcaggaagaggtcatagtctgttttgatggacgcatgcatc

SEQ ID NO: 62180 - DNA, 290 bp, Oryza sativa
  unsure (1)..(290): unsure at all n locations
tcagagatcagacatcttttgtgagaacgcaatatgaacaatctatccaatattctttgcagtgttatttgattgcttgttgccttattgattatggagattgtgttctgttcgttgattgtaaagataagtactacttctgactatataggaatttntgttagcttctatgggaacctggaactggaggatcatccactccatcaatggttggatctgtgaaacagtggcagaagtcagaccctcagaaatccaaggagacatggagtaaattggggattgctaattca

SEQ ID NO: 62181 - DNA, 355 bp, Oryza sativa
tggctggtcggacaagagtttttcttttctctttgagctgttaaaggatctcgttgccagagtgggaacaatttacctcatacgacatatgaagcgaagcatgtattatgtccgttgggcctggaggtcagataaattcatgcatgtacgaacgactgcattttgtattacaaggaatacgctgacttggatgtctgccctatctgtggggcatcaagatacacacgagccaatagtgaatgtgaaggaagtaagtctaagaggggaggcccatcatatgtggtgtggtatctcccaattgcggagcgcatgaagagaatgtttgtgaacatagaacaagctaagcttgggcgct

SEQ ID NO: 62182 - DNA, 381 bp, Oryza sativa
ctaacatctctagagcttctggtgatgatgcttctgttttgaagatctttaaccaagctggaagcatctgctaaaaaattacctcctggattccagatgaaggctattcagtttgagaaggttagttacttagtttttgtggtagcttctttgtgagctgttaagacatttgttaagacattctttggtacaaaggtcattatttgaaagtgttttcacgctgggaaacaactgattttctgtggatatcaactgatgaaaaaattcacacctgattagcaaaatatcaacaagacattgccatgtgctttgtactgaatcttacagcttaattgccatatcagattcctttttcccttgttaatagtaatccattcctga

SEQ ID NO: 62183 - DNA, 452 bp, Oryza sativa
  unsure (1)..(452): unsure at all n locations
ttgtagtgatgttcttccttggcttgaagcctatcatccattgaagtggatgaggagtggtttcaatccagcaataaagtgtgactatattactaacaatctggcggagagtttcaacaattggatcaacgattataagacattgccaatatgtgaccttgcagacaagacaaagtgttggttatggtattgtggaacaagaggagaaaaattgccgagaagatgactgggaacatcttgcctgctgtaacacagaagcttaaggcaagaactangggtttgggtcacctctcagtagtgaaatctgatagcttctgtgcagagattgttgacaacaacaccacccatgagaaacatgttgtgaaggcttacaatcagtactgctcatgtgaggagtggcagcacacttgaaagccctgtcagcatgcattggctttgataacctctcaaca

SEQ ID NO: 62184 - DNA, 457 bp, Oryza sativa
  unsure (1)..(457): unsure at all n locations
catcaatggcgtcttcagttcaatcaatccccatgttcattcagaattcaagatccaggtcagaaacatggactagctggttggtcggttgggcgatcgatcaaacggctcgatattaattcgagtcaaaaaccgatggcttggcttagcttgtgcagagctaagcttgtacagtttgagttcgctcacctgtccatagatgttcctcgcattcacatctgctccattctccagcagcaatgcagcaatctgagcacacagtttggttagttgaacactgtcaaaactggtaagaattcagaacatatcgattgttcagagattgaacagcagctgaatntctttctccttttaatcgataataagacaattggattgagctgattaccgaagattctnggcacacagttggttagttgaacagactgtcaaaaactgataagattcagaacatatc

SEQ ID NO: 62185 - DNA, 332 bp, Oryza sativa
  unsure (1)..(332): unsure at all n locations
tcttccaagcatacggctttctagatgtatatgacgatctctagacagatggatcttatatgaatcgtatgatgaagtaccacatgagtggatatataggaaaggaatccaaatctgccgaatcgctcatgttatgatcttctacatcctaagtctccgcgttccgtcatctggcttatgttcttcatgtagcattcagatcgaatgactctatgaaattacgtcgatacttctacatattatgggtaacgtaggagacatccctatnttcccccggtggtcttaattaccactgcttagctttcaattcgcctctgaccatcaaattaaat

SEQ ID NO: 62186 - DNA, 421 bp, Oryza sativa
tagacaacatagggtaatttgatatcagcaattgcccgtgccatatcgaaactggcccacccctgttgagaagacttactggttacgaggtccagttaacttgcaaatgttaaagttgagtaaccaatatatagatttacaaagataggaataaaaaccgagaattaaacgaaccaatatcaggtttgtcttgaatacactgaatctcaagtgctctgcggtagtacatcattcctcttactagtaaagcaaaaagtaaataattagacagtatgttaatatgtagctaatgtgccacacaattgcatattggtgatattaccagttcttgtgaggtgtttgcccctataagatccccaggccggatttcatccatcttttgtttcagtgatccttcattcggtgggtgaaatctatcctc

SEQ ID NO: 62187 - DNA, 337 bp, Oryza sativa
gggctgttcgatataattccgttcttgtttcagtattttagtgtatgatggatattaacaaacctaacacttttcatttggattgtgaaattattactgtttatttgctgattttcataacatcatggttatttgcttaagatgagttagaccagtctttttaactgacagatatctcgctaacaatattcagttacaaggacaggcgttctgttattacatccagctataatgagttaaaagccttagatctgctctgaatcatcttattttctctaatcttcagctctgaagacagagattattccgctatcgctaattggttttgttaacacct

SEQ ID NO: 62188 - DNA, 403 bp, Oryza sativa
ataccacacatgcatttctagccgcttacactgctaattctagcttgttcataccatacagtccatacttcattcatcaccttatggcatgcacataccaagtacaatcgcctcttcctatgtactactgcttttgatgttaaaaccaaaaaaaaaaactgcatgcatgcattttagcattgcgaaatgcatgtttcatctatatttacggctctagttaactaaatcatccgtgaagatctcaaatatgcataatatacaattcctggccacgagtacacctcagaatcatacatccacaactaaagtgctccaagtgcattgccatttcatcgggacttgggctcctaggatgaacacaattcgctactgcccacgtgaaactgatgatgtagccttgtct

SEQ ID NO: 62189 - DNA, 376 bp, Oryza sativa
  unsure (1)..(376): unsure at all n locations
tatgaatgccatggaagaaaataaatacccgaacatgccttttcgtgttgaggctcaccatgagaagtcaagaattgtggaaggagtgcataattgtgtatttggccgtgcgtcatgatattctggccagtaatggaggcattctagcacttgatgtcggngttagcaattgatgggaccttcttgaccggaaatttaagggtgtattgctcacaaaaataaggacattgtctgatcagccataatagagaagtgtgtataatatctgataagcacccaggcataatgaactccatcaacaacgagatactaaggcatcaacccattaccatagatgtgcacgangccctattgcctacttctattcactatagct

SEQ ID NO: 62190 - DNA, 435 bp, Oryza sativa
ctgaactacctccatggtggtaactggtatgtgatttaccttgactcttaattggatttaactgtacaattgaaactagtcttaattctctcatcattattgcttttactagcattaacaagtaattgaatgagtatttgattatcctttctaacataagtaggaaggtagcccgcacgaatgtgcgggtatgtatcgtatgcggtttcgtttgagaaacttatatggacggaatatcatccagatggcatgtgccatgtttcaaaaatattatttcttcatattttttttcatccgcattgttagatatattgtgctaccgatacatattccagagaagatttcgctaggttgtattgctaatgaaatgtgttggcggcagtgtattcaaagacttagtatcttcaatccaaagatggagatcaaagttggctt

SEQ ID NO: 62191 - DNA, 459 bp, Oryza sativa
  unsure (1)..(459): unsure at all n locations
tactgtatgtgaactgtttgcaaagaacttgtgtttttgcccctgcttgagatccaaactcagatgaatatatgtcaggtcgagctgtgtacttaaatctgaatacagggtatactttggagtaaaagtatatggtatagggtaaaattacatgtctaatttgagtcttttgtccaaaaatacatacgaaatccatgtctcttgaaaataagtcacattagacatttgtgctgggattaacagattgcctaaaatggcattgtcctccggttattcgattgtgcagataattactactctttctatttttcaatatatgatgccgnttacttttagttatatgtttgatcatttgtcttataaagtactctatgtaagtatcatatatttattatgatttgttttggcactaaagaatattttaaaatgactntcacatttatactagaattttaataa

SEQ ID NO: 62192 - DNA, 297 bp, Oryza sativa
accctcgcgcaatgaaaaggccaccgtcgataagccgagcaccaccactacccccagcgaaagccgttcgtcagataagtggtgctcgatgcacaacacctatcggtacagtctcgctgattgccgcacggtcaagaacttggccgatcggtacagaaagaccgatggggaaaggcggcagggtcgccttgagggcaaggcccccgcgacccccgtcggcaaccagcgagaggaggccaaggaaaatgcccccgtcgatgacgatgacgacagcgatgatatggagttctatgtacc

SEQ ID NO: 62193 - DNA, 447 bp, Oryza sativa
ttctcttaaattacttatccaatgtatgatccgatcacaccattatatttggtctaattaaatctttacaataaaatatcacatgatattattttgataaaagagaaatatatgtttcaattcgttaatacttgttgtttcatatgtgccagcgacatgtttcaacgtgtattttcaccatgtttcataaaatacttaaatgtttcgggtgttgattttttttgtttcaccatatataacataatgtttcacttgctggtcaacgctcacccccgcactgccgcgcgcatacgcatgcatgtaggccgcccatgctgcattgttcacgtgccacgttgcttgcctccactgtatgtgttgcttgcgctgctgcttgcatacgcctccttcattctccttctattattacatgtgcctagatttttcctcaaattttaaataattttt

SEQ ID NO: 62194 - DNA, 231 bp, Oryza sativa
agagaggccatggcttccccaccatctccatcttcctcatcaattcttggatccacaagctcttcttgttctggatgaagaggaagaaggcacatgttgagcctcttctcccccaatggaacaactagtgagatgaaccgatgatgctgatgctgcattgcatacaaccagcgaaaaaaagatatatccgctttcttttttagacctctctggtgaatggactgttgcatc

SEQ ID NO: 62195 - DNA, 439 bp, Oryza sativa
  unsure (1)..(439): unsure at all n locations
ttgcagtctgttgcagttgaatatatgtgctagagattcgcatacgaatgctggggtgctgcctcagtggctgttactaccaccggatgaacgatcacctgaagccgagaagaagaaggctctgaaagtctcatcttcttaaggctagaatccagtccaccatctgaacctgttggctgggctacagaaagtttcctcttttcccctatggcacaagggttttcaagctcctcgctntccatcggatcaacctttctgaacaacagaactcttggcctgtttgggtggatctttgctgcctgttcccaatcttgtcttgtttgtacagtcactgcagagtcgatggtgatttccttaagatgtntcaggtgtctgatctcaatgccggaaagaccaactagaccttgacagagcatctgaagcgagacgaggttcgata

SEQ ID NO: 62196 - DNA, 140 bp, Oryza sativa
  unsure (1)..(140): unsure at all n locations
acttagaactacctttggagcttcgcttggcgtgagaatgatgctgtgttatgggaagngnactcacctacttcctcatcgcggaccgtccaagaaccgctccgccagggatttccatcccctctctcgttgcgccactt

SEQ ID NO: 62197 - DNA, 112 bp, Oryza sativa
gcccgaacctactcgtgtatggcattgagaagaaacacagggtactgcataatacgtatctgatctgacagaatgctaccaactttgaagcaagaaatggtccagtaccaat

SEQ ID NO: 62198 - DNA, 251 bp, Oryza sativa
  unsure (1)..(251): unsure at all n locations
ttttcttcacattctttatcaatggctcaacctaaaaaagaanaaccatttcagaaaatatgtctcataaaaagatgggcagctctcatttgcgttaacaagatagatcacaacttgcctgaaggtcctatgttattagtaactaaattatattcgctgtgcttcacttcacaagatagcacttaccaagctatgaatcaacacagtattctatactcaaaaggagaattatcaatgctctgaacacactt

SEQ ID NO: 62199 - DNA, 340 bp, Oryza sativa
  unsure (1)..(340): unsure at all n locations
tgccttcatcatgtggccagcccagaacttcaacatgctctgcaggtgcagaaaatgtttgaccagctgctatgaacagctttaagaactgacatcatacgtcaagaataatgaacccactcaatggcatgcaatttactccaaattgttggaaccttctgacttgactgatgagcaaaggaaacttctancatcaaatgtcctctgttagaacagctgaaaagatttacatgacactggtccaagggcattgacagtgggagtgccgtggtccctgtgtctgcatataatattgcaactttatctgacccttcattgtcttgaacacgcttatgatttt

SEQ ID NO: 62200 - DNA, 399 bp, Oryza sativa
  unsure (1)..(399): unsure at all n locations
ttatgttggtgcaatgatcgcagccgggattgttctatttttaccgccgaagaaaggcgcaaaagatatggctgaagctagagtacagcttccacgttggacttctgagtcccttcatactgacggagtactactttccccaaatattgcgaaaccattactgtgaggcacgccattgcgggatcatgtgattgcatcttcatgcatgatggctctggctttgttagttggatcggctgaaatagctttgntctaccgtcagtttggtgtatatttaggtggaaggttatctgtacctctagccgctaacagggtaatctagttgcttcccttggtgcattgatgcagccatgtgtaaagaaaataacaatttttnttcatcatcttttaacctcatga

SEQ ID NO: 62201 - DNA, 388 bp, Oryza sativa
ttcacccttggtgagcctggagaccctcccagccttctctgtgccttttgtcctcacacctaatagcctccgaagaaggaaaaagttgatctgtgtgaaagggtcacattgtaagtaatgacattcgttcactaaaaccctgaagaaacaaatgagttatggcaaacctcaagctccacataaacatcaggaaaggatccaacttcacccagaacctgcccaaccagtctaatcggcacgtgtcaaaattggatccattgtttgtccaacaccaataagaccttctggcacagcatattggaagttcaatctgtcagcatatagtgaaactatcctcgaatagattggggtgcatttgatgttgcgctctcatcttcattacattccc

SEQ ID NO: 62202 - DNA, 379 bp, Oryza sativa
ttcacagtgacccgaatgatggcgggatgccatcttatctgctgttcgcactgatattgaacacccggagttccctgcagatgctgaagctcgctggaatctcaccatgcaatccattccgtggtaactcgagatgtgtgagtcgagcacaattggtgagagacacaggtatgttaccgatcagagaattcccaccaaggctgatgacccgtatgcgaagtagctggccaagctccaacgggatgccaccagtgagactgttgccagagaggttgagtgtgtggaggaaggaaagattggacagacttgggcttatcacacccatcaagttggatgacatgagctccagcgctgtcacacgaccagggtgcttgctgga

SEQ ID NO: 62203 - DNA, 456 bp, Oryza sativa
  unsure (1)..(456): unsure at all n locations
gacatgccaacaacctcatcagccttattgatcattttctttcattcactggagtgggctttaggatttcatgatttgtgcctgattcacccacattagcaacattnggaggccaaagagttagtggaacaggtattaatgccgggtagaatgttggcattgtcagaacaaatttagtcttgaaaggtgcagcatggttcatctccaagtctagtgctgctagtgaaggatctgtgaactcagattcctcatgcttccttagctgcaaatccgacaggtgtctagcaaactcaggttccttcttgttcacaagatgtgatattggcaattgatttgagcttgtggcttcgtcttgagtactatggagcataagctggtctacgaacactggggatactccatgggctgcangttgaagatgacattccaacattagaatggcgtgatatagaaata

SEQ ID NO: 62204 - DNA, 399 bp, Oryza sativa
cttcaccaatatgttgcatgcaggttttgaaaaaaaaatgcaatacacacatgcctaccctaatccaataaaccaatgagtggttatcgtttcatcttcaaggagcgtctgaagaatcttcaaggtaacaccccaagcatcatatgtataatacaggggttgaatatggagaaagaaaaacaaatatcatatattttcaagcaagtcacaaaagttcaatgttaccttgaatcttcccactaaaacagaactcagatcgctgcttgaaattaactttttcgcagtaccaggataggaaaatccatcacacagatattggtggcgccctgggtctgtgctttcttcagtgccattcaattttgacattgttatatcccaatgattccatttgcatataaa

SEQ ID NO: 62205 - DNA, 233 bp, Oryza sativa
catatgataatcagcgaaataggtcaccaaactatgcatatattatctcagcgggtatgtggtatgggatgccaactttgaatgaatacaccatggattaacttagaacccaatagaactccaggtgaattttcagattcatcagtactacaaaagtaactcatatggcaactgaatccaaccagaatgtttaaaccattgatgcagccgaaggctaatccgaacaaaaaatg

SEQ ID NO: 62206 - DNA, 425 bp, Oryza sativa
  unsure (1)..(425): unsure at all n locations
tactatccaaacataggccacggttggtcaataattattcttgattcacttttaacgacaccaatgtggaaatgtcatggagtattcctacctaaacctaagccacaagctntactcagaatattacggtttcttttgctgatcaagaacatgattaatttcgctatctcccggacatgtgtctacaaataatacaagttatttaatttcatagacagtatctcgttaattatgaagtgataactagttcctcgatcccattcacaccgcacgtgtgatataagtcaccatgtaatatatcaagtgctattttgttatactaaatccttcatcatatatctttgtcgattcttcaagtgccatattgttatactagaatcccatcatatatctttatttatctattgtgtaccttatatctttgc

SEQ ID NO: 62207 - DNA, 270 bp, Oryza sativa
tggaaaatagctatggtgctactctttttagctgcttacacactataagtataggctgaaagggacagtcatacatgaatagttatggtacatggtcatagcataaatgctttatattggacatgggacatatacactcatatagcgattaaactattatcatatagtgctatatttataccattatctgtcttctataaatacaggctaatcgctcgtactcaaattagcccgtacttttttttcttatcccataagatacggtatctt

SEQ ID NO: 62208 - DNA, 381 bp, Oryza sativa
tgaattttacaatctcgaagaagcaccacatgcttttttttctaccggatgacacggaaaaaactaatatgtatcactccacagctcacattactacttgattggtttttgccaacggtgagaagcgtttttgatatggctgcttggcccacctcccctaaggtgtcatcagaaatatctattttcgtaggcaagctgccctaccatgtggaaaaatcaattatcccatacgggccacttaacccggtgcattgtgatataaatcttcatagatgaccggattattaaacggcctgcgtgggataatagttttcccccaatggcatgccaaattatacctacctgggaagagcgccgttgagagaaatattttcacctatc

SEQ ID NO: 62209 - DNA, 326 bp, Oryza sativa
catatttgatccgacttttgtaagaaagccaaagaaacttactggaggtcatcatccaacgaaaagaaaaaaaacagatttctaccaacgacacttgacaccacaaacagactactgggttgcaagtttcagaaataacatcaagggcatatgcaacgacatcaaaccctcgttagatgagactaaaactggtaagtccctatcacatccgatgtttggaaactaattataaatattaaacgtcgactattaataaaacccatccataatcttggactaattcgcgagacaaatctattgagcctaattaatccatgaatagctta

SEQ ID NO: 62210 - DNA, 360 bp, Oryza sativa
cttccctgttcagcccaatggctgaacaagcataggcgctcaatctctctccgagtgttagcggtgacgacggggagccaaacccacgccgtcgagctcgtactccaccgccccctccacgccaaagtcctatgcgggaggaggcgctcgagagggtcgaaagatccgcgacttcgacatccacgggtgatggggaagggcggcgagatggggagcgtcgcctcctcgtctacggcgacggcagcacgccccatggcgcgctccaagctgcgggcgcgctcctacgtcatccgcccattgtccctgacccggagtctccagcccaacgttggctggacgacgtggccaactttggcatga

SEQ ID NO: 62211 - DNA, 393 bp, Oryza sativa
tacgtggagttaccaactatgctattggattttatagctactatcgaaatagaggagttctacagctacatatgaacattctcctatactcttgcagaatgatttcaaccgtttctagaaacaaattgccgcaatcgaaccattttaggcctatttggtttcctcaaagtcaaaacatagaggcaccttatgtaaacagcgtgttagcctatgggctactccataccataactatacatgtaaatatcacttgcaagatagtcaagattatgttaatattttacagttagttgtcaatccatcacaatcgagtgcacgcgaaagtaacagaagttccatctcggtggcggtctttggtaaagacactttcagcctcatctatggatgggtttt

SEQ ID NO: 62212 - DNA, 450 bp, Oryza sativa
  unsure (1)..(450): unsure at all n locations
catactagcacatgtggttgcacttgtttcgatatgaactgacattgagtgaagtccttaggtcggtttgggcacactctccccctatcggtacacaactaatcaccatatgtgcaccacttgaggcccaaacctaaaatccatgttttccatcattttatttatcaaaatcacaagtattaaagttctgtccagattatttcacaatcaatttttcatatttgtaatgagcccataatgacaaggaagaccattctaagcatggctaagcattatagtaacctagtgactccaaaattcatatataaagtggtatagtcatattgttcctaatggtangaatgagggatatggatatatgtggggtcaaggtgaatgcaaacaatatgagttcgctaacatgttaacacaatttaatttatagtgtcaatcgacatgcagattgcaaca

SEQ ID NO: 62213 - DNA, 272 bp, Oryza sativa
gtaagtgggtaatataatactggtggcaaaatgcaatgatgcacacaccctaatgctgtggatacagcacccttttcaagaaaccctttagattgtctgaaggatcagcttgcattcccatttcaattgtcccatcttttgaagagccttcccgagggagctcaaacgaatcctgtaaaactggaatgtataatacggacatatgtgcctcactgcttacaagaagaaggttagactattaaacaatacaataagccatctgtgctacttgc

SEQ ID NO: 62214 - DNA, 409 bp, Oryza sativa
tacccagtagatctcatgtaaggcttttatctataagcatcaagacaactaaatagatagattggctgacactccgatactatctctattagcaatcatatgacaagctagatctcatgagtctgaatattacttaatagatcaaacttaactgatgcagcattaaacaaagaaagaatcgcaagatctaaagcccaccgatgaaagccttgtcgagatggtagatacactatataatctgaaacaacattgatatataaccctatcggctattttctgatgacagatgctatccgatgaggttatatagcaatactgatctagaatatatagcatatatgataactcgacgatttacattaacgatattatagtgtcatgaagatggaagcactaaatccgagaacgc

SEQ ID NO: 62215 - DNA, 160 bp, Oryza sativa
aggggtgtgtgtgccccttgtagacccccccaaaaagttacagccgagtttgaaacgcggggaggggcaacacacagcgggaacatggcacacgaaacccataacagcgaaccggagccgcgctaacagagcaagcagacacgatcgggcagcaacatca

SEQ ID NO: 62216 - DNA, 233 bp, Oryza sativa
agaacaccaagagcagacagatctctcttttcgtgtgccacacaccggtcgctgcggctggcctaagctacttgcgcctcgccaagaacaagcagatcccgttttccattcccccgccgtcgacatgctttgagtgaccgccggcggaattcttcctcaccacccaagaaatgccagggagcgcctgacaagcgcgccctcatgcgcgcccttcccctgctccacagttggcg

SEQ ID NO: 62217 - DNA, 432 bp, Oryza sativa
  unsure (1)..(432): unsure at all n locations
gcaattcacactagtcgataactgacaattatttacttcantggaatcttcattccaatggtgatcaccatccactataaatgcagatacatcacttagcactagattgaaattcagatacatattctgctcttctgaagcacgggaatcccatatctcctgaagcaacaaataaaatcagtggcacattacccccaaccatgggcatataaaatccaactttcagagagtgcacgtgacctccgtccgaagaattaaatttcctaagtcaagcaaaagcttgggttcatgtatgtcatctgggcggaactttgtcggaacagtatatttgggggcagcaatattcagattcagtgtaaatctaccaagggtattgngcattcatcaccattcaagaaaggtttacaggtaaaatataactaacattaacta

SEQ ID NO: 62218 - DNA, 393 bp, Oryza sativa
aaatcactaagagaattatttctttttaaagatgggtccgaaaggagacttgcgtctcgattcgacttagagaagcttttcaacaactcaaatgggaatgtaccgacctcccgggtcaaatcattacttatcggctcccagagccattttacttgaataagcagctcccagatccttttcatctgataggctgctgccagagcctttttcatttttgcagactcccagagtgcagcttgccaacagcaagcaatccgctttcactcggtcagcctagtctatgatgccccgcagacatatccgaatcacaacagattctgtgtctgaccactcatgtcattcatctgccacatggctaattcttggtacgattccaatcacaaccactctttc

SEQ ID NO: 62219 - DNA, 299 bp, Oryza sativa
gcaattgcgaaggtaatcactactatgccaacccaaatcatgatccttaccaacttggatgtggttctctcgctaaaatctcgagttgcatatatgagaaccatgaaaagtcagatcccgatttatacatcagataccgtagtaacctcaagagtgaagactagtagagtctcgtcttttgtcattctttgctcctttttcactcaatgattcattggaatatcccgaccaacaattctatatgtctattcatatggcctcgttgttaatgctacaagatctactgcactggaactcat

SEQ ID NO: 62220 - DNA, 289 bp, Oryza sativa
actagaaatgcaacctgggacttttattgatgatatgagaagagatgaaaggctcaaaggcctactaactcttgctgagctctctatataactgttgaaacaaacaaacatggtctttatgattgggtctatttacttctcaagttggtattgatattacctgtagcaacaacaagggttgagagggtgctttctgcattgagtgtagtgaagagcaagctgagaaataagattgtggacaaattattgaatgattgttaatcacatttattgagcgggatgtcttctc

SEQ ID NO: 62221 - DNA, 436 bp, Oryza sativa
attcgtgaactataaaactcacctgggttaaggaggatgctgctttggtcaatatgtattttcagtggtgaaaagaatgctgggatggaacagagatggattttacaggacttactaatatgtttagatgatcagcacatgtattaattgatgatcaagtcttatggatcatggtatagagataccatattaataatgtggacacatattagtgaacatgttattggatagacccaacttgagacactgcaagagccatatgtgttgtgtcatcagtgatctcatttagtgttggtgttgaatccttagacctgatattatcatggttcccaacatgtgtagtaacttacttatggactgctaaacgctactccgtaattggggtagtataaaagaagttttgactatgctttaaacatgtagtggatatgaatat

SEQ ID NO: 62222 - DNA, 325 bp, Oryza sativa
tagaagcatcaacgtgaaatcatatgtcttccagatgattttgcatccacaccaagtcaccaacacaaagcaggggagacgagtgatttcagtcatggagcaaatgctccatgaacaagaaattttgaatgcctaccattatataggcatttcgattcacagacttgagggtccagtctatgcagcccaggcagcattgagaagaggatgatgtcattttcccaaagcagctttcgcgagcggaatcactagcttcaacttgcgtctgacgcattctagtataaaccgcacccactcaacagcagatacaacaagtgaacctata

SEQ ID NO: 62223 - DNA, 305 bp, Oryza sativa
ctatacctcctcttcttctgcctcaatttcttcagattctccatcttcagcatactagtgcatatttctcacttaaccaatcttgtgccgatgtgacacgagtataaaccatagccactgccggattttcagtgccttaaccgtggggattatataccgagcatgaccaggcatatcacgcgattttaatgaatatacctgatgacaaaaatagactccgaacatccgctatttcatataagcgcaatatattcaatgtaacataaattctgaggaaattctggaaccccagtgtcattttccaa

SEQ ID NO: 62224 - DNA, 282 bp, Oryza sativa
ggctgctgggcaaaatttgaagaagcacaatcagttctatccccgccttcagcctagagctccccgtgctcctatgacggagccctcttctcaccctggagctagctcaagcccagcaccttctcctcctgatgggtatgatccaaatgcttctttcatcctcactatgcttactctggaatgcaacccaatgaatacttcaacccggtacttggggctattaataccttaagtgaaagcattcaacgcttgtctaccaagcatgaagcattgcatgaggat

SEQ ID NO: 62225 - DNA, 304 bp, Oryza sativa
tgatgaccacactatagttggggaaagtggactaatgttgacgcgaaaaacacacactaacctatgagatctgcttaactctagtgtacgtccacaaggtgatgagatgcgggcgggccagtcatattggacctgcacctgacaaaataagtaaacaatagatcaaatagccgatcggctggcaagccgatggaatgatttccaccgatgttcatacaacgcaaatagccaaatgggtgtttcgaactatcggctataatgctgaagtaaaaatccgacactttgaagcaaataacaatataaa

SEQ ID NO: 62226 - DNA, 464 bp, Oryza sativa
  unsure (1)..(464): unsure at all n locations
cttactgacaaatgaagggttatgtacattcttctcatgtttaaatatggagcagccagtcgattcatttggaacggatgaacctggatttataatataacaatatgcaacttacattagtaggtgatacggaatgcctttatttagttgaactttcgaaaaaaatattcaatcaagcatgaaccaagttttcatttcgacaaagctaaacgagctaaggattttctcttttttccattcattattattctatttatnttgacctccatgcttcggtcaagatattgggcattaaaaaaaaagaaagaattaatcagacgtgacacgaataatacaaatcctttgtagctcatcatttattggcaaaaatagaaagaaacaatagtaacgtgaccatatttagcaaaaagagaccatatacacgttttagtaagctttggaatatcatggcatcactcacatct

SEQ ID NO: 62227 - DNA, 349 bp, Oryza sativa
atgctgcaacccggcagcaagataatgttgtgcccacctcatcacaatcagagggaccacctgcaaacccatcttgtgcacccttgatacaggcaggttccatatttatgtcttcttccaggcaccttaggctgcagctgctggtgcacaaactcatgctgcttccacttcattttgcttctcaagcaccttccactttatttgcttctcaagccacctcaagcaggggcaccctattctcatgctgcctgcacattatctcattacaagcatatcattctgcaggcactaattcatctacaatacctcagaatgttggcacaccatttgctcctttacaaatgcctca

SEQ ID NO: 62228 - DNA, 240 bp, Oryza sativa
cttgcggctggactacaagggctttttttgtcaaactatcttccatgtattctaaagtcaccatagttcccacttgcattgaccccaccacaaaaccgattatacatccctcacttataaactgtggttaatccagtttatccacggacatcacttggactctggggcccactgtcagatcccgtacactctttttccctctctccatctccttctcttcttctttcgttttctttctct

SEQ ID NO: 62229 - DNA, 305 bp, Oryza sativa
  unsure (1)..(305): unsure at all n locations
gctaagggctatactcatgaagaaggcgaagatttctttgatacttactcacctgttgctagattgaccaacattcgtgtgctacttttcctagcaaacctacatggtcttttcgttcatcaaatggacgttaagacaagctttcttaatggagagctcgatgaggagatctatatgtatcaacctgatgggtttgtagntgaaggtcaagaaagcaaaatgtgcaaatcgttgaagtctttgtattgtctgagacaagctcctaaaccatggcatgagagatttgacaaaacattgacatctgc

SEQ ID NO: 62230 - DNA, 379 bp, Oryza sativa
  unsure (1)..(379): unsure at all n locations
gcttcttaagctgctggaatgaaccaacttgtattgtcttcgtcagtgacaccgctgcgaacaaatgtgctgctacngagcagcgatgattattatcgnctatatctggcttattataaatcaccaattcactgaggcttgctgtcatgacaggatcgaacccaaccactgttaagttatcacagtctactagtcgcagacgagtgagagatgtgaggcttgagagcacagccatcgactgcacgcttgactcgctgtaaatagtgagttccttaaggggagccaggaagggcttgctagtgtgatgagttcctgcctctaccatgaaccacgaagcgaaaatcttgccgcaacgccaaaattcgagttcttggagtga

SEQ ID NO: 62231 - DNA, 467 bp, Oryza sativa
  unsure (1)..(467): unsure at all n locations
ttaaatactcagctgnacaagttacaagagctctgagaatgcgatggttgtggaactaatggagagatccaagcaagccttgggtgggtttggaaacgccttgtgatggtgtggatagggacctcttcgccgcctcaacaaagataactgtgggcgatgggaatacaacgcgcttctgggactccgcatggattaacggccaaagaccaaaagacctaatgccgttggtctatgagatctccaaaaataggaagaaatccctacggcaagggaaagaagacgactcctaggtgcatgacctgaccctcgatgcgggttcatctatcacaatcaaccttctcgatcagctagtccgcctgtgggaggcggtacggaatgtgcacttagacagcgaggagccggatcagattgtttgtgaaatcacaagcagcgggcactatacagcttcctcggtaatcatgcccaat

SEQ ID NO: 62232 - DNA, 414 bp, Oryza sativa
  unsure (1)..(414): unsure at all n locations
atcccgtgatggcatttcttttttaccaacggcaaaaataaaacctgtgataacataatcaagcaattttacaatctcanacacccatacacaccagagattactcatatttcatgatacataaggggcatcacaaacatgtgggttgttaacagaaataactacagaaacatttggtgcacaggcgcagaattgatactacaaaaataaaatgctaccaaatcaattgatagaacatgcaggggtacttccccactcttatttaattcattgcagctagcattttccctatatgaacttgcagaggctatcttttctagcaagagatatgctccttggtccttgcttcagcttgtctgcaataactgtattcttgttccaccattccagtaaagtngaagttgtcaatatata

SEQ ID NO: 62233 - DNA, 487 bp, Oryza sativa
  unsure (1)..(487): unsure at all n locations
ggaccttgaaactcagcttntagattcaataagctgtggcaaatcgtgtaaccccagagcttaccaagtctctgttaagaaactttctcatcaaatccaacaccctagtatgagcatacaagaaaacagtcacttgtcttgcattagcaatggtttcctcaactggtccaagcttcccaatatcctcgagcatgagatccaagcaatgagcagcacatccattccaaaatattgatggtctttttgctgtcaatagacttgctgcagttgtgttgacgctagcattatcagtcaccacttggacaacatgttgttcccctatctcttctatgtacctgtccacaagttcaaagatatatttgccatctttcctgtcacctgagcattccactgaatctaagaagagtaccccatgagcactatgcacaactaaatncatcactcccctacccttcctatnctgtcatgcatctgtcatgataaaaca

SEQ ID NO: 62234 - DNA, 190 bp, Oryza sativa
aattacttttccaattaaattaatcactgaaatgatctttgaattgttaaaaatacttctattgctcaaataatttcaagaaaaatcttgaaaatacttggaccctcaaagtatttaacaaaattataatcagaccatttaatgattaatttaatatgtggataattactgaaatgttctttgtatgatt

SEQ ID NO: 62235 - DNA, 472 bp, Oryza sativa
  unsure (1)..(472): unsure at all n locations
tcaagctctaagactccacggaagccaaggtgtcttttgatatgctcttgaacaagtatgagaagaaaagtgttgaacaaatgtgtaacaagggcaaaaaagcaagatcaccttctatggagcgatttggtcattcaccaagaccattggagccgccttttactcatcatcctcaagtcatgccatggggaccttgtccaatgccactgccgggttatccttttccttacttcatgccatttggacatcaccaccaatgtatgatcatatgcctcctatgcaatttcatcaaagttggggagaaccaagaaggtcagcacatgagccgttgtcttcaccaaacaaatgccggtttccatctagaaatcgggttgatgaaggaagcanggaagaaaagcgtgtcaaggtggaggcgaggacttcaaggtgattactattaaagtggagtctcatgatgtgccaataccttctg

SEQ ID NO: 62236 - DNA, 417 bp, Oryza sativa
gcttaacaatgaacgtaacattgctcagcggctgtggcaacattgggtttgatgcgtattgaatcatcactgagagcaatggtccgctatgtcgcttcacaaggcgcatcctcaaagggagaggtgagtgcttgggcagaaagctgtacttcatgatggggatgggttcctccttcgatggcgtccggacatggaacatcccattctcgaggttgctcaacacagtgctctgcaacgcggccttcttcattccagatgtgccctcaagacgaaatgagaactctgtctccttaccagccgccttctttggtggcaacgttcgcagaaagattgacccttcaaccaacccgtgcaagaatagactcttaaattctgattgacctcctcacgatgatagctcagggctgcatcttgtgc

SEQ ID NO: 62237 - DNA, 451 bp, Oryza sativa
  unsure (1)..(451): unsure at all n locations
ngatataaattcctgatgatttgttcttcanaatgataaatttgaaagttcattatttgatataaattcctaccatagccaaatatagattttactattgaaaccttatacttggttgcttgtatttccattgaactttgtcaaatcttgtgacttgtgtagatgcttttcatactttatgatcaagatcatacacccacatatacacacatgctaagctcctacattggaagatagcatccatgtcatccaccatatccatgtcattatccacaaataagccctacattcattcttcctttccaaagaaaaatcctttgcaaaagcaaaagaaaaaggagggaaaggtatggctataaataaaaaataaaataaataataaactcttgctcttccaaaagtggagcatgatngaaaanaatatatagccatactctctctatganaacta

SEQ ID NO: 62238 - DNA, 305 bp, Oryza sativa
  unsure (1)..(305): unsure at all n locations
ttatctcccacctccgtgcatgattcttggggattcttgggtggtcttccagagaaggcttgggtggtcacgatggctcggtggctcggtctggtgtggttcacagtggccagaacggcgacgaaatcatggcggcagtgctcggtgcgtgctccagagccgacaatggcatggcgacattcccatcgctgcagtggatgaaatgagatggtatcgaaagaataattgtttggcatgatgaggagaatagggaacgcanaaaagatggngatggagatggcttggcgatgaatgcggacatcatc

SEQ ID NO: 62239 - DNA, 463 bp, Oryza sativa
  unsure (1)..(463): unsure at all n locations
tcggaggatccctatgcctattaccaggagggtgatgatgacgatgacgctcaataggtcttagttacggtcattgcctatggcaatggcatgccgctgccttaattccgctgccttatctatttctgcttttgggatgtattccggaccgctcggtccgatgatttaagactacgcctgcgggcttatgttgtaataatttgcactagactctcgtgtatgtgcgtttggtatctcggctatgaactcgtgtgtaccagactacttgatccaaggaaatggtactgtttacacgattgattcctgttataaaaacggnggtctacagagctggtatcagagccatacgactgtangataagaccaaaaggcgccccaccctcttttctaagttggccaagggagaaattcccatttagtaatacttttcaaaataaaaatgctatgttcacaaaactctata

SEQ ID NO: 62240 - DNA, 394 bp, Oryza sativa
tgaaacatacataccacatcaacccattaataacacaaagctcaacatgcaagcatataataattattatatctacgaattatttcattctaaaactaaacgtacatatgctaaatcatcattctcaaatcacttttataatatttcaattcaaataatttcatcatttctccattatctatttatctaacatacttcccgtagaaagcacgtcacttcatctagttagataattaacctaataacagtgtattaaactctctccaacccttagttctctcctatgtctaaatcgcgattcccccactgtcggcaatgctatcgctgtcgggtttattagctgacactcactacgccagatcctcacacctctgacgggatacctgtgacgggc

SEQ ID NO: 62241 - DNA, 429 bp, Oryza sativa
  unsure (1)..(429): unsure at all n locations
ctaatgattgattaaaacctatcctttactcgtatgtacctacagtataaacatagttgatattaaacatgtgaacactacaaatatatcntttacaaggagcacactacctatctaataatctaataatgatgatttatactttctattatgatagaatggggggctaattattttttaatattattcaaaggtatgttcattttaatctaatttattttttagcgagttatatacgatgataaaacataaattatattttctataattctataatccttaaatggcacgcacaagtcagaatacttagccctaactaatgtctctgctctaagttgaattaaagtggatatgggtcttatgatttagatattatattgtcttacatgcctaacataaaatccttgctcttctaagaacgtgaaaata

SEQ ID NO: 62242 - DNA, 388 bp, Oryza sativa
  unsure (1)..(388): unsure at all n locations
tttgaaatcattttgaaatcactaagtggtttacttctttctaaggttgggccgaaaagaggcttgcgtctcgattcgactttaagagatgtttttcaacaactcaattggtaatgtaccgaccccccaggtcagatcattacttctcggctcccagagccatttcacttgattaagcggctcccagagccttattcatgttctcggactcccaaagtccagctgcccagcagcacaacaatccgcttccgctcgagaagtctagtctatgatgcccgtagacatcccgaatcacacagattcgnttcttgaccactcaggtcatccatctgccacataggctgattctggtaacgaatcccacaccacaacaacttttcacaaagca

SEQ ID NO: 62243 - DNA, 431 bp, Oryza sativa
  unsure (1)..(431): unsure at all n locations
ggtcctgcacaagtagaccatttcgctccgattatccgatttacggcgacctgtgcgaccaaggcatcatcagataagctcactcttgcccttccaccttccaaccaggcattgtatctcagaactgaaaactggtgaagaacagatcgaacgctatacctgacactccctcttactgtcaaggcagtcaacgatgcacgggcatttcgagccaagctcaagcgcgaccggcgtcaggtgtttcgctgctttcgtcataatgatgcgccctacacgagcattccctgaaaaacaaaatgaccatcataataaatacagtcaataacgacgaattgaagtttcagaaccaagttgagtttggcacagtgtacgtcatgcatntaccggtgaaaaggaccttgtcccatctgtgctccatgagctcctctcct

SEQ ID NO: 62244 - DNA, 426 bp, Oryza sativa
  unsure (1)..(426): unsure at all n locations
agctggagagctccttggtggatggtgtctacgcctcctcccacagtctccatgctcattaaagacgccgtcgttggtgaggtcatcgttgttgtacctccttccacagccttgacgctcgtcatgggggacaccgccggcgacgaggtcatcgtacctcctccatatcctcaaagcttgtcgttagggatgccgccatcgacgatatcatcttcgtcgtaccttcttccatagcctcaacgctcatcacgaggggcgtctctgccgccgaggtcgtccactagtacaggaatgatttttctggagcgtgactcatttggattgcagacgcanccgtagtggtcgcgtctgcaaaaatcgtgctccattntggcgtgcggctctntaaaataaccgcacggaaaaannaatcaattttagtgcgaa

SEQ ID NO: 62245 - DNA, 459 bp, Oryza sativa
  unsure (1)..(459): unsure at all n locations
ggtcttcgtgcattagacactcaaataagattattctatctggatggaccgcgcaattgcgcggctagcacccatataaaatcacatatttttttagtatgattttacttaaaagttattaaatagctatctcattgtattaagactttgaaagaccaaaccttaccatcctcgtgtttctaattatatagtttttaaaagtcacgctagttgctactccttatgccatctccttctttatttgcttgctcgatctaccaccattatttctattcattcttattagaacctttaaaaattggattctatagtttttagagtctattgtcacgttgggtttcatttttataatttctagatgtcccatcaaacattgccattatactcctctacggnccgtccactgtatcttttctttatcgccattaagatcttaaaaatcgaacataattatctgtt

SEQ ID NO: 62246 - DNA, 439 bp, Oryza sativa
  unsure (1)..(439): unsure at all n locations
agctngcatatcatgatagtatgaattatcagttctggtatcttgttttaaacattgcagtttgttgaacaaaatgtcagcataatacatgggaacataaacatctctgaaatatcgtttcaggtctttccaagattgtggtattttgttatgcctacaaagatgtttccaatcattagaagcatgtttaattaaaacactagaggcacacataaccttttgtttctccgacaagacatgcttttgaaattcactatcaaccgctagctcccaattaatgtaagcacgaggatcatagtttccctcgaaataaggcagtgcagatttgatcttacctagaacatcatcacttacctcataatggtcatgttgatccctcctcatgtctcgacgaagatgtcgatgttgagcacagctatccccaattatcttgcgtatc

SEQ ID NO: 62247 - DNA, 442 bp, Oryza sativa
  unsure (1)..(442): unsure at all n locations
tcagtcataacaatgataaattcatcgcccccgtagcgtgtaacataatcactactgcggacgttgtcataaaaggcctgagagactctacgcagaatttcatcaccagtgttatggccccacgtatcgttgatctctttgaatttatcaacgtcaataatcagcactgacagcggtgtaccggtccggttggcatgggcaatttctcgtttgaagatagtcggtaggaaacggcggttaagtaatttcgtcagtacatccataccgacttcgtggcgcgatacttcttcaaacaattcacgcagcaaggtaataatttgcgatacggtatttcttatctgtaatataagattcacccgcagacttctggtattcacaattctggtgttacgcatggtttgattganaataccgtcgaaatcctgaatcagaccggagatat

SEQ ID NO: 62248 - DNA, 416 bp, Oryza sativa
gactaccactaacctcctccttctggttcccctctacatcccattccacgtgcccctgctggttccccttcgcatccctctccacgttcccttcctcgttcaagtactggtgtggatcctcgttcccctcttcttcattccagtactggctgctttcctccgcgattgtatcgtacaatatctggtcctcatcgcggtcagccatctgttgatacaagaaacatctgctaagtcacgagacatttatgttttaacaatctaagtcatgtatgctaagtgtacatgtcgtacattagaaccctacacaaccttacgcgctaaggctaattacaaatcgtgatataagctaagtctaggtgacgtatattatacacccctagctaggaaataattatatactaagtctaatacaaata

SEQ ID NO: 62249 - DNA, 331 bp, Oryza sativa
ccacagtactcagcaagccacaccgggagatgcatgattaatgcaagggggtacaaagagtaataatatatggttaggtttttgcagaaacagcatttaaaagacacttaattgctcacagctattttgtaagacgatcatagagctacacagtattattaatcaaggccgtgaacccacacgaacctgccttaacccaaggcctacgatgattcagaccgaactggcaaccagacccaggtcccagctcgtcccaagccaacccaggctaaccattccatattttatgttgtaagcaagttttaagaagtaaacctctaacttgggtaca

SEQ ID NO: 62250 - DNA, 475 bp, Oryza sativa
  unsure (1)..(475): unsure at all n locations
tctcagcttagctgtttccttgccgagtggactgagtgctaagaagacattctataggaaaagatggaatattggactatgcattttgatgggtcgaagaggcttacaggcactggagctggggttgttttaatttccctgactggagaaagattgagctacgtattgtggatacatttttctgcgtcccataacgtggcggaatacgaggcgctactccatggattaaggattgccatctctctaggcattcaccgattaatcgtctgtggagactctcagttggttgttaatcaagtcatgaaagagtggtcctgtttagatgataatatgaccgcttatcgataagaggtacgcaagttggaagatagatncgatggacttgagctcacccatgtcctccgacataacaatgatgcagccgacagactggccaatcttggttcataacgggaggcagccccttctgatgtgt

SEQ ID NO: 62251 - DNA, 457 bp, Oryza sativa
  unsure (1)..(457): unsure at all n locations
cctcatggacccctgctgcctttgcacgaagtgacccatttggattgcgtcacaattccatccaaatccaattggcaaccgctaccacaaatgatgcaacaataagtctcaacaaataaataatgcggcattagaggagttttaaagttcgggacaatggtagatcagagacgactctgtctaataagctacgaacaacagatccaagtaacggtgctttctctggtcacaaaaatatgtttgggatgaagtcaaactcacaactatgcctcaatctatttctatatttaattaaactgaacattgaaagatcttgctcataaatctgactcgaagaaaacgtacttccgtacataatatttcgacatgttataaaatacatcgataaaaaaatagatattgaactgnaatttgtagatgatatgttctcttgactagaataaggtaattgataatc

SEQ ID NO: 62252 - DNA, 468 bp, Oryza sativa
tgagatgtgtggaaagatctggagttgtcaatgttggtggtgcattgtattggctgactgaagatgaggaaagtgtttggaaacatgcagttgtgacctttgatctcagtgaagaacttttccagtggttacagctcccagcagttgatcctgcaaactatgtgcttggtgatcctgaccagtggctgattacagaggttgatagcaatgtgtctgtaagctattacgagacagggaagctgcatatctggacaattgacagcaagatagagcaaagctggagtcagaagtacaacattcgcttatcaatgcttgaagttccaggaccacattggatctgcggtgataagattatcttgcatgattttaataagaacctatatttctatgagttgatggggaagaattctgagattgagtcgagcaagttagtgaagcaattgagattcagcctccgcaacaacatgc

SEQ ID NO: 62253 - DNA, 389 bp, Oryza sativa
cgaaacaacgcaagaaagggaacaatgaaacaacttctgaaccgccccacaaatcaccatatgaggcgttatcatataagggacgactcgagggcaaaagcattactggaatatctctaattatacaacacgcttggaggcaatatcacccctagaacagaggatcagcatttttagacgtacgccccattgaaagttttctcaacaaaatgcgcatagctacgttacttcgtagagggctgctgagtactccctcacgctctaaatatctgacgccggtaactattttaaatatggtagagcgttccgcatattcaaaacaataaagaatcagtaattcttttgctatcatttgagccaccaacatactgctatgatatatatatata

SEQ ID NO: 62254 - DNA, 426 bp, Oryza sativa
  unsure (1)..(426): unsure at all n locations
tgatggatccatggccgcttcagntttcgcctttatgatttcttcccatggatggatcaatgaatctttatgctttcttccaatggtggatcgatgaatgctaccaaaaaaaaaactagataggttcaagaaagaaagaaagtgaagagaggaaaaggatgtgtgcatccatgtagatcaagattcccgagcaggtgaggggatgagaatcgaacaacacacattcgctcactcacacgtactacgctacagtacgggacaatacagagtggcacagatcacagaacatgcgagccgccattgttaatttcaagcaaatgtaagaggcgcgtgggattagtcagcccanatatatatatatcataccatttgatcggagattgatttgtagtgtagtgtagtcctgatcagttagcacaccccatt

SEQ ID NO: 62255 - DNA, 436 bp, Oryza sativa
  unsure (1)..(436): unsure at all n locations
ttgatacacgaanatcgtaagataggtctatcacatttagttacagtgcttaggcaaacatagatntttgtctgaaataaaaaaaatgttgagatttgatataagtcttaaaactaatgcaaagatcatggaagatagtatgatcaacatctactactctaattccttcttgtaggagattcctatgatcacgtgttttgtgattcactacctacataataagtcattgcctcattggcattaatatgtttgtgattaccaatcaacatcaatggagagaactaaggatttcatactgcagctacgagatggaaaccaacctcatatcaacatcgacgaaaagaattgagattccatactgtaattaataactacgagatggaaaccaacctcaagcccctggcaatatggcaacaacgtcttgccctccttctcg

SEQ ID NO: 62256 - DNA, 451 bp, Oryza sativa
  unsure (1)..(451): unsure at all n locations
taaatattaaatatagacagtattcggtgattataattgttgaacgtgggtaatataatggccgagtgagaaaatagcatgcgaatacaagccaacaagagattatatattatttatcgagttcacaaatactctagctggctgattgcgcatattgtataaagaatgatcgatatttcctttaaatagaatcattaatatatctgtcaacgtccatggcagctaattatgcattgccacgtaatatgtattgagcaaaggggggtgagtatgacatgtttgcctagtttatataaattccttctttattccattatggtaaaagggtttcttttgaatntataaataatggccgagaggacatatttattgaaatggatacaattaagcttggaactaattaatgttcaagatgtcgctccccagtgcgagcacagataaacatttaaaa

SEQ ID NO: 62257 - DNA, 391 bp, Oryza sativa
  unsure (1)..(391): unsure at all n locations
cacttcgggttctgcatgacgtaacattttctctaaggcgaatttggcctcaacataaccatcgtcatgcaccatggtctcaacttgggtcggaactacattttcaagctcgtccacttgttcttcgccatgacgtgtccatatttcgtacttggccataaatccgcgagttaccaagtgctccttcactttaaaagcatcgtcaaagtcccagactatatcattcttacagtcagcacacggacaaattatcttcctcatattgttcttctcagcgtgaaccttggcaataccaataaatttagccacttcgtttctatatggagaacaanaactcagccaatgatacatccattcccgactttcatatctctaaaaatacacgtaaaat

SEQ ID NO: 62258 - DNA, 463 bp, Oryza sativa
  unsure (1)..(463): unsure at all n locations
tcggatgtgcatcgactacaccgaccttaacaaggcatgtcctaaggtcccttaccccctgcctcgcatagatcagattgtcgactccacagcggggtgcgacctnttgtgttttctagatgcatactctggttaccatcagattcgcatggctagggaggatgaggaaaaaactgcgttcattacccccataggaacctattgttatacgacaattcccttcgggttaaagaatgcaggtcctacttttcaacgtactactcgaatttctttgggtagccaaataggacgtaatgttgaggcttatgtcgatgacttgtgtgtaaagacgcgcagccaagagagcttactctcggatctagcggaaacttttgagagtctccgctccgcccgcataaaactgaaccccgataagtgcgtgttctgtgtacccgcgggcaagctttctcggttcttggtctct

SEQ ID NO: 62259 - DNA, 433 bp, Oryza sativa
agctggcccttgagaacacccttaaagactatcgaggagtcatcccttctaaatacggtcacatcaacatcggtaaaaagacaattgtagcccatggaacataattgagaaacggacaagagattatagtttagagattttaccaagagaacgttagaaatggaaagatcattggagattgcaatcttacccaatcccattacttttccctttccatcgtccccaaagactatgttctcttgcgaagtgccatttggatcaagggagcaaaacattgattcttctccggtcatgtgatttgtgcatccactatcaatcacccaacttcttccaccggagagatattcctacaagagatcaatttctagttttaggtacccacacttgcttgggtcctctcaagttagtgacaagtgccttcggcacccaaaga

SEQ ID NO: 62260 - DNA, 426 bp, Oryza sativa
  unsure (1)..(426): unsure at all n locations
ntatatatgcatngcttgaactaactcggntgttctattctatcggtgaagaatctccatgtgtacgaactgtatgcctcaagaacattgcaaacattaaccattaaaaccacatatatgcgtgaaggtttccttctctcttgatacataacatagcaactaccacgcttaatctgttaaagaaacaatcgcgatagcttatagaagatgcatcactgtaggaaacacatagctcagtgaagaaacaatccatttcactagtataataatgcaacacgattcatgactctcatattctaaatccaatctagcaaccagcacacagagccaaacgtccaatggaaggctcaatccatcccccgttggataatccatacacgaagagaacctatcagtgtgttctatacacaaagagaacctatcctc

SEQ ID NO: 62261 - DNA, 415 bp, Oryza sativa
  unsure (1)..(415): unsure at all n locations
ataatcatctcggtggaactagacttaatctttactcttgtcacttgtaaatccccaaaacagcaatttcataagggataatctgtcaaatttttttctcaattaatggttgcaaatcaaaatgtctaagccgcagctaaaacaacttcaagagaatgtaaattgcttgtattgttctatttcaagtccagatacaaaaggacacacaatatagaaacaaacatgtattaaaactcatcttctttctacagntattaatgctccatgcagaaacaagtttcaaagaaacaaataaagaaagtttctacaactttggtcgcattcttctacattccattgacacacaatatagtggtaaaagtttcacctttggtccatacacatataattntcatcactaccattgaatcccatc

SEQ ID NO: 62262 - DNA, 457 bp, Oryza sativa
  unsure (1)..(457): unsure at all n locations
tccttctgattgctnggtgaagcggatgacggtcttctgcttggtatcgccctccggaggttgattgccctttgcttggcctggagtaggtcggggagagacacaacttcttccatcgacgacaattctttgctgaggctgtcggtgcagagaatggttagtgctaaaggtattattgccatgatttattgcagagttaggtggagcaagaggagcattggtgctgtggatgatatcatcgatgttgttgttggagctgactagctgacgagacaatcgtagggttgttcgttggatttctgcggtcttggtcaacaacacactaagttggcaatccttgggcacatggtttgtaccctcgcacagaaaacatgtgaccttgcggatgggacactcccctggtggatggtcttcttcacaatgagggcagagggtgaggcacatgctatgcacgtgt

SEQ ID NO: 62263 - DNA, 404 bp, Oryza sativa
  unsure (1)..(404): unsure at all n locations
tctatttataggacaggtatgacgattattctgattccaattgtcctttctgcccttaaaccgccctcaagaggtgatttggaccgttcattccgaaacctggatcaaaccgccacgagagtggttcgggcgaaccctggcctggcccaacagggccaggacttggcctggtgctcctccctgctctgccttatgccattctccgagtattcggcccatttgatgatatttctgtgtagctcctggcccactcgctgcatggataggattcttatcttcacttaagtctgattttcatcccaacttcggcgggttaatacctgcattaaatatacaccaacactcgtggaatatgtagaattaaaccctattactatgntgggatctttatcttcttttgttat

SEQ ID NO: 62264 - DNA, 457 bp, Oryza sativa
  unsure (1)..(457): unsure at all n locations
tcagaattgaccgctcgatcataccagtgccatgcatgctgcactntgctccgatgtgtgtagggatgaaaatggttcagatagtattcagtttttggcttttttttccggaaacaaaaagtgcgggtctgaatattattttcagaaagtttcgaaaacggaaacaaatttagaatattttttttcttcttggaaacgagtatggtaatactactatccttttgaaactggaattagtcaaaaactttccggaaacgaatttgaaacagtaagctggttttcaagccgtttttcaccctacccgtgtgcatgtgtgctcattgctctttgtggcagtggcgcatggcagcaaacggccggcaagggaattaggttgtgtttagatccaaaatntgtattcaaacttccaactnttctcatcacatcaacctatcatacacacaaactttcaatcaca

SEQ ID NO: 62265 - DNA, 358 bp, Oryza sativa
  unsure (1)..(358): unsure at all n locations
tcatgttctgatatatcatagatgtagaatggtatattgtaatttgattggtcccgagactcagtacttcattgaaaagctcgttacttgcgttaagtttgtgatgcggaatttcataaaataggccaaagttccaaaccccngtggacagcaactactggttgccaaaaaaaaatccttgtggattcctggatgagtattgcctgccctttatttagatatctttttgaaaagaaagttagaacatntttctaaatgaccatcaacagttttttttttgnggtaaatggtgttgttcaaggtcaaagaaccagagaaaatcangacgactgcgccttttaatagtagagaataaatg

SEQ ID NO: 62266 - DNA, 476 bp, Oryza sativa
  unsure (1)..(476): unsure at all n locations
tataataggcttataactcattattatattggctcttagctcgctcgtttgacatggccggatgggtgcgaaagggaggggaataagctggacgcgccagcaacaaaaaaaaaatcgagcatccgatttttttcactaaatgaatagataaaaaatatttcaatcttttaataagctaaaacacaaccaaatcatctcatgaaatattttgctacaatgtataaaacaatgattttaaaaaaaacgagctttgttttaccctacataaaaacaatatttcagcanataacgaaagaatatttcaattcttaaaagaaaataaaacacggtcagattactaggtgaaataatttggtacaacgtatgcatcaaacgatttaaagccattgcaacacttaaaacttatgtacatcaacaaaccacgtatccatcaagatgaaaatattaaacaatataaaaaatccactgcaacattt

SEQ ID NO: 62267 - DNA, 250 bp, Oryza sativa
  unsure (1)..(250): unsure at all n locations
caccaacatattatttactatgctgggcaaacatgtagaaaggaagacccggagatggttgttgaattagccagtttattatactctgatgaagaatgctgaagcaacacgttggatttgctcatgccaggatgatggaacttttatatggtaaaaacacgctaaaaacgacattttagtcttctgatgtccttatgtcatgggatntaactctgtgatcaggttgagatctctctctctctctctctct

SEQ ID NO: 62268 - DNA, 335 bp, Oryza sativa
aatacggaaaatcgaatgctttaatgggagattgcgataagcgctgatgctagaagcaagaaaaagaaagtttgggtttttacgattgtatggctgttgctgctcatcgccatcgacgctttggctgctgggaattatggggctatactacgatcatttcttataaacatgaacgaacatccatataggatgctgttgtaagtatattttccaaagatatggattcaaactgctagaggaagaatcagatgaccctactgcccaaaatggcgtggtcgacaatcctgatactaccactacaagtgattgctacactgaagtgagtgacgagcctg

SEQ ID NO: 62269 - DNA, 470 bp, Oryza sativa
  unsure (1)..(470): unsure at all n locations
tcacttattaaaaagacataccttaccacagagctcttttattggtgagggcctttctagcatatgacgtgagatgaatttaagactcttgtgcacaatcagatattaaccatcatttctcaaaaaaaataatataaaccatcatgattcgggccccacaagctaatatcacctcgaacaaatgggtgtntacacataagggcagccacaatgtgaacataagggtgggtcttaagcctctaaagtgaaccttatacattgtgagagtagtctttatagatgacatcttgtggagctagccatatgtttaaagaccacccacaaggaataaacaaatatattgctctttcctctctcatggtagtgatactctctcttcctcttctaatgactaatcttgggtttgtggggtgcaccttaatatccactcttacggtcttaccatatatattgtgctcatgattatatat

SEQ ID NO: 62270 - DNA, 385 bp, Oryza sativa
attagtagctgtactatgtaggccaaatggcaagcaaggttggtgatgaccaattgacacggaacgagatcagtgtgtgtgccaaaaacattgatcacgcttacaaaaaaacagccacagtgtcctgtgtcctcgctttcttctgcgtgatgaaaaatcaattgccacgagatcgacccaattaaatggcagcttggtccttaagctgatatgttgacacggcccgcacatcaaccaagtcatttgtaggagtatctgctacctagaaatattaaaagcgagagttgttgacaagctgcgaatcttatccagattaaagcatttatggtctgtacccatccatacaaattgatcctatattaactgttttttccctaaactctcg

SEQ ID NO: 62271 - DNA, 442 bp, Oryza sativa
  unsure (1)..(442): unsure at all n locations
gcttggccgagccgcccctttctctcgggccgcgccctagctgcccgatggaagactgnttcccctncctcttttctctttntcaaaaggagttaattaaatcatatttcctttagaccaaaaatccaataatcttagaaattcaatatcttctcaaccgtatgtccgtttgactccgttcaacttccaaaattcctcaaatctcgagatctgtttaatggcacgtttagaggtcaataatatggctctattttcgccgtttgttgagttgtcccgtttcgcgtgtagtttcggagcccgaagacccgcagtgcgaggatttcgaggatcaagctcaagatctcgagcaaggcaagtcacctttgatcatcttgcacctataatntatatctaagtatttctttttcgcaaatattgcataaataggaatatcacgagtaat

SEQ ID NO: 62272 - DNA, 341 bp, Oryza sativa
  unsure (1)..(341): unsure at all n locations
cggcaaggagaggtggttgtggtggcttatttctaacggggaaaggaaggggaagtggggaaatgggtttgccttctcgaggcgaagctagtggcgcgagggttgtgccaatggggcaccggtgagggagatcgaccggtggcggcaatggccggattttgagaggagagagaaggagctctgagaactctatggtgtggagggaaaagaggcgacctcgccagtatttatangcgtcggaggtcggttcttcaacgccgttctcataggagaaagatgatgaggataccgcgcccgtggagtgtgaaagaatgagactgacccggctgttgcctgtgatt

SEQ ID NO: 62273 - DNA, 469 bp, Oryza sativa
  unsure (1)..(469): unsure at all n locations
nngaaccttgctcgtcccgagtaaaggatgaatggaactaatacttgtttgttgattaagagtttctactatgttgtatatctcaaaggtacaagtgcaaggtatatatactctgtctctgattaaataatctttggcacggtggcttacccttacccctgattcccacgagacactgcttctcctttccttgggcggttgaaagatagaacagcaactagagcacaaatcacccaatctttattcaacttttattccagaagttttcaaatgattttgcaaaagaaagccaagttcctcatatgattaactcagtctctccaagtgtatcaatatgaattcctcaccatttntgcctttttgattcctactctaaggtttgatatgtggagctcggtanggatcaaacatggcatacttgcattcacatntattaccaaatcanaaactcagactaaagaaaatgatt

SEQ ID NO: 62274 - DNA, 459 bp, Oryza sativa
tgccaggagtgggaaatgaacgtgaaggcattctttgtttaagctcgatgacattcagacaaatcttgttaaacacatggatcagtatgtgtaaatgctattttcaatactgctacgtgtttactgtattgtttctcagactaatgtgcatcttgttattttcagaattcaaaaggatgctattgatcatgagaaactgaaagaaacattgagtgacgagcaattcaatgaggcgtgtgacatgagaaaagcagttgagatggtggcactgttggaagccctgcttaaagacttgagtcctaacctggattcaatagcagagtatgaattaatgatctatacatgtcagtagcattgtggcaccaccaatttccttactggcttacattggctggatcacgtaccgcacaaaggctcgtgtatatggtgaacgcgttgatgagctatatgccaccactc

SEQ ID NO: 62275 - DNA, 443 bp, Oryza sativa
  unsure (1)..(443): unsure at all n locations
agcttctcctcactctctaccttattctattgtacaaaagatacaatagagccttgtgtgattcatctcaaagttgtgtgttggaaatgagagagagaagctctattcatagcctccatatgatggttacaggtatgggaaatgaccaaactgccctctaaccgtcattgggatgaaattaggaccatccatgtgaaatatggtgatcaacggcctccagatgggttcgactgaacccgggacgactccgttcggctcgttnttcctcgtggacactaattntgaggcccttatcccattggcatggtggattgggccatcttggggttttaattgggttnttgggtccaaaactccataagctcggacacgagttngattctcccccctctttcatgtatatttcctctncaacttgatcgttngtcacctgcatatgaata

SEQ ID NO: 62276 - DNA, 455 bp, Oryza sativa
  unsure (1)..(455): unsure at all n locations
tcttgctagaaagaattcagtatttgatcctagttacattcatattcgttgtgctgctcacatagtcaatttggttgttaatgatggccttcaaccaatagataatttgataagttgcttgaggaacacagtgaaatactttaagaggtctccatctcgcatgtataagtttgtggaagtatgcaacaattattctgtcaaagtgggcaggggtttagctctggatgttaaaacaaggtggaattcaacttataaaatgctagatacgtgcattgactataaggatgcctttggctattacaaagaagtagacaccagctatgtttggaaaccttcagattcagattgggtctcgtttggaaaaattaggccaatattgtgaacaatggcagaggctagtactgcattntctgggtcactctatccaactgccaattgtttctatccttacatag

SEQ ID NO: 62277 - DNA, 462 bp, Oryza sativa
  unsure (1)..(462): unsure at all n locations
agcttgtcaacggttcggcaatgttcaattttcgcctgccgccgngttgaatcctatcatcaaaccatggccgttccgaggttgggctttggatttcaatggtcaaatttatccttcgtcatcaaaggggcataggttcgtgctagttgcaacgcattacttcaccaagtgggccgaagccgtgccgctcaagaatatgactcatacggaggtaatttacattattttgaaacatattgtccatagattcggcattccgcaaacattgactacggatcaaggaacttcttttatgtctaaggaagtgaacaattttgccgaatcttatggtattgttggtatttcttaacgacattactagaaatataattcccagcaatggcgcagaaatacttatggtatattatggttacagaagtcatccgcaagcgcacggatataccattgtagcatttcaccccg

SEQ ID NO: 62278 - DNA, 446 bp, Oryza sativa
  unsure (1)..(446): unsure at all n locations
tatacgggtcgaccctacgctctatntcacggtatcagtatatagtacttcgggatctaattntgttaaaacaagagaagagggaaaaaaatctacatttatagtatcataaatcgattatgcatgtaataaacaaacacattaatccttttattatttttttcgagttcaatacatcaattagtcacatgcaattaaaacaaacactattcaaatcatgtctaccttttggatcccctccagacaaaggtcacacatatatttttttctcctataaatactaattagccaaaaaaaaaactgataaccggtgtcgatgatcggtaattnttgaagtcaccacagatgtcttggtgtcaacggataagtcacttataaatgaaagaataattagccgtaaatttgagcacccatgtcaaaattagtatttaaacacgggttgactg

SEQ ID NO: 62279 - DNA, 377 bp, Oryza sativa
  unsure (1)..(377): unsure at all n locations
ttcttatcgctcaccattattctgttagacattcatcctatgaaactgccgcaaagtatgtggtgggaactgaagttgcgtacagaacggttcaataattgagtcaaaaaaggaacgcggccgtcataataaagccgcgggacacagtccataatttccaagagttgttgaatttcgcagcttttttgaaagcctctgtatcatactaacaagtaaaaaaggcttaaataccaaaattaacctgtatttttgataagtcttaccattgtacgaattacacangctcctgctccttcttgttgatagtggaaagggtgcattgtgcacttgcgtaaacatttatgacgcgttgatgtccatggttcacatttccttgt

SEQ ID NO: 62280 - DNA, 451 bp, Oryza sativa
  unsure (1)..(451): unsure at all n locations
ttttctctaccaatccgggatatatatattcatcagctctcacaatattccacagcactaaatctctccccgccaccccgtacctctgataatggtctaaaatcattgaagccacttgcgacgacgttgctcaataaggaaaatttggcgtgaataatattcaacaccagtgcagcatcatcattacatacttacagccgccgactaccgctttcgatatattgactcaattttccagcctggttaaaaatagcgaccagctcagtcgcaaatatagtgactaccctaactaagcaacaataaggaatacactatgactgttcaaacatgtaaanatccgcaggtcgatattgctgaagataatgcattcttcccttcagaatattcgcttagccaatataccagtcctgtctctgatcttgatggcgtggactattcanaaccttatcgc

SEQ ID NO: 62281 - DNA, 275 bp, Oryza sativa
  unsure (1)..(275): unsure at all n locations
atgcttatattcatcataaatattgcaaatcttgtatttgtttgtggcactaatcttgcataacgatgtccccatggtcgaccttgagaccataaacaaagcattaccgggagataacccggattatcatggtaagttccattccaataaaagcatgaaccattnttttagaatagtatgcatcttcaggtattcttgatcgttaaccatctcaggttgagattaacaacgagggtcatatgatgcctaagaacacaatagctacatcaactaaa

SEQ ID NO: 62282 - DNA, 448 bp, Oryza sativa
ggaacatggtgatgcctgcatgaagtaccactgcaagtggacttggcattgacattcaccccactatcgttcacctttttctcagctagtgggcaatgaaaaaaaaggcaagctctagctagttgctggcgcaatttggatagagaaaaggtgttgaggatatgccgcgcacttcagatggtgtttggtcttaggttatgtggcatatggtgggtgttgagtggatacccactttcattcgaatggaaaaaaatatgggagcagatttcttcttaagttctggttttccattgttaggttccaccgttacaaacaagacttaattccatcttacagaagattgcttcacggttctgacaagttgttacatgtggaaccatatcatgtaaaatgaacttaacaagcaattctgtacacaattggatgtaatcgtctgagattaataaaa

SEQ ID NO: 62283 - DNA, 325 bp, Oryza sativa
  unsure (1)..(325): unsure at all n locations
gcttgaacaacactgacttaatgcctaatttatttgttatatgnnggtaactagcataatatctcatattttcatttctcctttatatggcatccattaatacctataatctttgggtgcttgatatccataaaaatgctctcttaaccatgtgattttcttatttttgaggttatgattcaattgaaatctcagtggttatagctgcagcatctatctcttgtatcctatctagagaagttatgatcttctagaaagtgataacatgtttgacttattgattgatgatattttgtgaatgattttgaccactagagggattttg

SEQ ID NO: 62284 - DNA, 455 bp, Oryza sativa
  unsure (1)..(455): unsure at all n locations
atctcacacttccattcatgtctntctgtttctggtccttggcttgatctgatgatattgattttcgtagtaccagaaatataatgttgtgtctaagttttgatgaattcatttagcatcttgaattttcatatacaccttacttttgcttgtagactgcaaatgaggaatctaaagcggttacaaaagcaagggacatgaaaggtgagtacttagtttagtatatttaaccttgtctaaaaagttcttgtacacttttgataacccactctacctattgttgatgcaacaattacttttccatagcaattaaacagaggatggagaaagatattgatgaagtggggaaaatcgctcgcatggcatagacaaaagttgatgaattggaaatgatgtatgtcacttggccctgctagctaatggcattgtattaatttgccatatctgcgtaatat

SEQ ID NO: 62285 - DNA, 348 bp, Oryza sativa
  unsure (1)..(348): unsure at all n locations
cttcagagagccagtccaagaaacagaaggaaaaaacaagagatttccctgccttatttctcctgatcttgtacagggacagcgtgccttgacatccaaccaactcgatccattccattgcataataacccattttaattccatcacctgtgctgctgtttcagctctcagcctctgaatggaggggttaggttatagctgcaggctctgaagcangttatgtgctcaacagagacaggaggccacaaaatgacaccaaagttcagatagagttaaaggctcatggaccaatttgttgcgacagtgagtgccactgttcagtagaggatggtgatacaagcaaccaac

SEQ ID NO: 62286 - DNA, 461 bp, Oryza sativa
  unsure (1)..(461): unsure at all n locations
tgccataccgaagtctgcaatcttaggacagaattctgtatcaagaagtacattgtctggcttcatgtcacaatgtatgatgcaatgcctacattcctcgtgcagataagccaagccttttgcaattccatgtgctatacagtacctgaggttccatgttaattttgcagaatagtttgaaaacagatgagaattcaaagaaccattaaccaagtactcatataccagtaaccttttgcttccttcagcacagaaaccaagtaaacgaacaagaatgatatgttgaatcataccaatagtctgcacttctgatcggaactgcttctccccttgtctaaggtcttttagctttttgacggccaccacagaaaaacctggcaatgtccccttgaaaacacatccganaccaccttctccatagttttcagagaaaccttttggtgcattctttagctgtgaat

SEQ ID NO: 62287 - DNA, 426 bp, Oryza sativa
  unsure (1)..(426): unsure at all n locations
ctctctaccctttgcccatatttatcttgtgtcctggatgaacccgaggaagagataatcacacacgttcccttggattccatacacttggaatactctgtatgggaagtgctacttccgtatatccgtgcgcttgccgatttctatctgtgatcggtagaaataccaacaaatatatgataagagagtactatgctagtaatttatatcacttgtatagatcaaagtctaatgcatggattaatcattntagggataaagatagattgacacacaaggaactaaacaaaatattctcactaaaataataatctaagctaagtggagaaagaataagaaaagaatcatttatgtacttatagtatatagtcattntagtctatacttgctattgtacaattatgcagcccataccccataactatg

SEQ ID NO: 62288 - DNA, 468 bp, Oryza sativa
  unsure (1)..(468): unsure at all n locations
ggctcgcaaactactggaagtgtggagaaattatgtgaatgaagtagagggggtaatcttgaaacctgaggcttctcgtgtcatatatgctgtttctttggccgacaaactgaaggaagactcccaactgctcctagaaatgtggatagattttctagtctatgcggccaaccgatgcagcagggaatctcacgctaagaagcttaatgatggaggtgagttaacaaccgtcctgtggcttttgacagaacacatttaccaacttatgagcaataaatagagacggtcgacaacaactctntttcctttgttatatgggttatcttcagttgtaaagataataagaaagttgttcgattctcgtttctttagatgtaatctgtaacgaagaaggtcgttatcgatgaacgtcgctgtaacctgatcgacactgtatgctntccnnccgaattttttatactagtcatc

SEQ ID NO: 62289 - DNA, 279 bp, Oryza sativa
ttgaacatatattgggcgcaccatggtgcattcattgctgtctgtcttttacatatgagaattgctggcataaaaaacctattatagcacctgtgtgattaaatgcgagttatacgtgagctggaagaaaaatcctatatctgagctagattactaagcgaattccttaccatgcttaggaagagaagttatgacaacttaatccagtgatgaacttctaacaagtttatttaattgccggtgtagtaagatattttctatagagaggaatacataaat

SEQ ID NO: 62290 - DNA, 471 bp, Oryza sativa
  unsure (1)..(471): unsure at all n locations
nntttcgaaaagcaatagtcaaatatggagtgaatctatgctcctttntttatacagatgcactgaanaaaaaagaaggtagcatgaaaagggaatcttgaaagatgctttatgatcgacaggctgctcatattgggcagggagcagcattgagaaacactgttggagaaaccatctttgatcggtccactagatttcacaatagtcccggccgttttgctcttctctggctaccagacacacaagaacaacacgttcttttccttggacatcaacgttggacttttaaggggcgactgtgttttgcttgtgtggccaaggtagcttcaacctccatcgcgagaggccctgactgcgtttgctcctcgggtttatccttttgcagttcatcatgcaatctttctctccatcaccgttcgcgcaagttggttcgctgctgatgtggaagaatcagatgaaggacctgattgg

SEQ ID NO: 62291 - DNA, 394 bp, Oryza sativa
gaagatgttctcttcttcactttcggaaatcgacattacattgtctatgagaatcaccagcatatcaggacggatatcgtccgcatgattcatcgctgcaaacgccatgcctgcggtaatcgcgccatcgccaaggacacagacagtgcggcgattattgccttctttttcggcagcaacacgcaaaccaattccggcactgatggaggttgatgaatgcccgacgctcaatacttcatatgcactctcgccgcgccacgggaaccggtgcagaccgtctttctgacggatggtgccgattttgtcgcggcgtccggtcaaaattatatgcagataatcctgatgcccgacatcccaaatcaataggtcaaacggagtgttgcagacataaagc

SEQ ID NO: 62292 - DNA, 404 bp, Oryza sativa
ttatctcatcgtttattgccattacggtcggtgcgggaattaccctggcggtgctgattctctcagggtcgattgaatttatcccgatgcaggtgatccctatcgccgggatgattgccggtaacgccatggtagcggtggggttgtgttacaacaatttatggcaacgggtcattagcgaacagcaacagattcaggagaaactgagtcttggtgcgacgccgaagcaggcttcagcgatattgattcgcgacagtattcgcgcggctttaattccgacggtcgattcagcaaaaacggttggcttagtgagtttaccaggaatgatgtccgggctgatatttgccgggattgatccggtgaaggcgattaaatatcagattatggtgacctttatgctgctc

SEQ ID NO: 62293 - DNA, 397 bp, Oryza sativa
agcttaagggcttgcttggataatttgaatgtgtttgtactaaaataatcttagagtgaaactttatggactatagtggctattctcttttctaatactatcttgtttcggtttcatattttgtatgtatttctgcttctcgataagaaaaatgaaaagaaatgtcgcggatgcacccgttggtatccgacacattctcatccctaaaatgaaccatacaaatgcacaaaaattatattaagcaattgtatcttttacatcatcaggtgccttacaataacataaatattattaaaaacaagggtccatggatcaaaagaacacaaataatatacctgtgagatatctggaaacaccggtgtacagtgagggcaatcaagtgccttaattttttctc

SEQ ID NO: 62294 - DNA, 261 bp, Oryza sativa
caccccgagacactgcatcgacggtgaagaggaggagaacgcggctacactgaccatggagaaggtagatctggcggcgggcggctagcaaggtgaaggctaactatgggtcgagggcagcacccagcaagcaaggcggaggtccgaattgacggagccaacaaggtggagtctcaaactcttaggtccgatacgacgattacttcctcttgcaatgctaatcttgcttctattgggacgggttcgaattcttccatggat

SEQ ID NO: 62295 - DNA, 432 bp, Oryza sativa
agcttgaataagtggggctgaatgtatgttccaacatttcctttctacatatgccatagcttttgctattgcgagttagctacatgagatatcaaggtcatctaccttccaactcactttgacttggtgtctttttgttgctaacttgtggatccataggtcatcaggtccacatgtcataacaaaagtcatgtgactttaaagatatatgatctttatctatctcgatcaatatgtgtttcgaggagcaactagcagactgggagagtagaagcctcaaatggcaactactgcaaatctgcaatgtaatattaaaaaaggtcagtggagtacgagtttgagggatacgggggagaggtggagggaataatacattgtactttatggataatctcgactataacaaaaagataaaacaaccactcgacaatg

SEQ ID NO: 62296 - DNA, 427 bp, Oryza sativa
  unsure (1)..(427): unsure at all n locations
tggaatcggcaaggggcgactgctaaagctggcgaaagtaatagggcaaaagaaacccgaaacaaaaaaagcaaagcctcccgaatcaaagggtcgcaacactaagcagcagcagcaggagcagcaagaagaagatgcgcagaaatcatcaaaagaactagaaataaaacgggatttattttcccccccaacccaacggcaagaacagccaaaccgaaacaaatcaaaacccaaacagaaaaacaaccaaaaataaaacgcgattttttttcctccttctctcgggggcttttgcttcaacctcacaattcaaacctccccaaccccccacatttctctgtctttntcccccttccgccttgatccgttacttaggcagtggaaaacattaggacaaagcaaaccgaaatgacgattatgccctcgc

SEQ ID NO: 62297 - DNA, 294 bp, Oryza sativa
  unsure (1)..(294): unsure at all n locations
agctaatttattgtcatttggttactctccttggactccactactcagagatagattctcttcgtcttactcctgcgtctgcctgccctgactgcgtgtgtgagcgagggaatatatcgtggtggtggggctgcttttcngaataagttcacattttgtgggtaaagtgttcccctcttcagaagttaacaaacttatctaacatcaccgcccacggttatgggcagaagttaagagacttccatagcataaaattttttggctgtgctctgcgaaaaggtcgtgtggtgttgg

SEQ ID NO: 62298 - DNA, 447 bp, Oryza sativa
  unsure (1)..(447): unsure at all n locations
tacttgngagatcccaaggatcaaacttgtagatgtcttgctgcctgacgagctcaatggagataggcttctgctggatcttcctcttgagatagaagctaaccagctcttcatctgtaggatgaaacctgaatccatgcaagaggatctcatctgacttgtccatgttgacatcatttctctgctccatatctcacacaagagaagatcaagcctgaagcaaatctgacaaaagatgctcctgtactacttgtgcagtatctagtgaatggcttctagggatgaagccagtgaggtgaagacacaantgatcactattgcaaattcattacacaccatgtgtacttatatatganagcttgtgatgcttagattgactagatgaggcccacaagtctgaatgatttcattctgcattaaacaagtgttctctatatgaagctgaca

SEQ ID NO: 62299 - DNA, 302 bp, Oryza sativa
  unsure (1)..(302): unsure at all n locations
ggactaactgtgatctttatagctatatccatctgaatttcgcctttttatggctcgactgtctattgggagatgaaaagtacctctattcangagtctgttaacatgtctactttgactttggattcactttatacaanattgaaaacacatgagatgaatgttctttctcgaaaagctaattctaagtctagtgccgtggttcttcttcttcctctttggatgttgatgcttcttcatctaagtcctcttttcttggctgttttaatgccacatccgatgatcaactcgaacaaatcgag

SEQ ID NO: 62300 - DNA, 464 bp, Oryza sativa
  unsure (1)..(464): unsure at all n locations
tcttataccagtggacatcctgagcaaatggaaaacacactgcccataagcgtgccctctttttgacaactccagggacatgacctcaattgctggcagcatggttatggcttccatcaaatactgactgcggcccatctgcacattcacaaataaggagccacaataaacaatatgaaaaacagtaccaccttgaattaaaaataagttgttttgttacagttgacaaatttattactatagcttaatgcccgtgcgttgcacggataacagatgatagtgggtggttgaagtttgatcaaagtcgcgttgttcttgacaattaatcttctttatatttgcgggatatatanttctaagcagataagccttaanaaaatgagagaactatatgaatatacccgtgcgttgatatgtgaagaaaatgtgtggagttgaaatatattgccnccttcataaaacat

SEQ ID NO: 62301 - DNA, 365 bp, Oryza sativa
actggaagcctccaggaaagccgcccccggggaattcttctcctccatggaatccaccatcgtaatggaatgtgtattgctggccacctcccccaaaaggattgaaaccaccacctccttctcctcccatattcatctcatcaagatcctctcctcggtcgtatcttacacgtttatcttcgtccccaagaacctgcaaattgccgattgcgcattgttaaaagacacgcgtggcatctgcagcatgtcgatctgattcgaaacaagcatgcctatagctaaatatgggtgaccagaatttatgttattgggacactttttgtctcggacacatgcagtgtctagcatgaatatatttgtggatg

SEQ ID NO: 62302 - DNA, 439 bp, Oryza sativa
  unsure (1)..(439): unsure at all n locations
tagagagttatatcttgggctgctnntagttttgtcttcataactgcaaaagttagttgactttgtacacatataaaaacatttggacagtctnagnncgaaatttgtattcaccaatgtgctgcattgctgcttatgctagcatctcctttggattaaagtttttagatatgcatgctctagtagtgaaaactaatgtaaacagtagagtaccaaccttctagaggcctcttgagtcttgatacacattatgtttcctgtntctgtatgaatcattntgttctttcttttttggcaacattagttgttcgaaataagccttatatttccctggaacttttaaccccagaaattcctttgtattaatataagttgtggtctttccatctataacagattagattggtgantctaatttttacttcttgtgaacttggat

SEQ ID NO: 62303 - DNA, 462 bp, Oryza sativa
  unsure (1)..(462): unsure at all n locations
ctaagctatgtgtactaaagttgatatcatgattcatcttttatgatcttgnattatcagtggatggcaccagattcttcagtgtacttgtcactagacttttggagctntcatgctagcagcacgaaaccgtcctccattagcagccttttttccaggaggattagcacagagccactgaccactttgagaagctttaagatagtagaagtaactttcggtcttaaacttttggagtatcatgcatacttcctatatatcatctttgttgtgtcagctttgatcacaattctttntctaaataatttggtgatgacaagntaaaattgcaatgttagatttgccatgcaaaacacttcanaacttaattaaatattgagctgtgcgttcattaattactaagtactaaccanaatgtcagtaaaataaggttgtatgttttccccggaccgtcgtgggact

SEQ ID NO: 62304 - DNA, 425 bp, Oryza sativa
agcttgccgttcgccttgggaacgatcacttggttcgccagccactccggatggatgacctcgcggatgaatccggcctccagaagtcgcgccacctcctcgcagataaaggcttgacgttccggggcctgccgccgcactttctgccggaccggccttgcgcccggccgtacggcgagacggtgctcaatcacctccctggggaccccgggcatatccgccggtctccatgcgaagacgtcagcatttgcccgcgggaaggagacgagcgtgtcttcctatttgccgtccagaagaccaccgatccgtgtggtcttggacgggccgtcgcccagggcaacctccttgaccgggacctcgtcgcatgtgatcatccgctgcctcggggtggcgggggcggaggcgccaagcctctcgtcgcaccc

SEQ ID NO: 62305 - DNA, 445 bp, Oryza sativa
  unsure (1)..(445): unsure at all n locations
tcatggattgctggtaggatatatgcaatggtactagatggtaatcgttgggttcgatgggttctgtatttatgggggagttcaccatggtttgngattaggttgctgggttatcgctgaaacaatatgttttctagtagttcagtgagtcgtcaggctgattgactggtgttacatttcttggaaaccattttgtaagaaagcttgagattgatcttggttgcttggatgttttcaaattgtgtgctgttaaatccagcaacaacttcaagttgttctttgtttgcttcgtgctatcgaacaagttcaagaattgcagcagtcggctgctttgcgttgctttcgtattgagttaacaatcaacacctggtttcaaaaagaaaaaaaaaatacaatcgatatcatgtgcagtagtctgaaaaacaaactacgcagttaggaactt

SEQ ID NO: 62306 - DNA, 402 bp, Oryza sativa
  unsure (1)..(402): unsure at all n locations
catattcagnggggtcatacatgtggtaagaagaacgtaacccgcttggttaaaatacctttttctataggctcctaccatgatcaaattgaatgtgatgttgtacatatgcaagcttgttctgttattttggggcgaccatggcaatatgatagagaagttgtttttgatggtaggactaatacatattaatttatgttcgatggtaaaagagtgttttgcattctatgactccagccgctgctttgaaagatgatcttgcaagacttgaatgtgaaaagaaagcgacaagtgataatcagattattgcttaacatcctgcttcaactagtaaaatagaaccaagtaccacaaagaatgatattaagttgaagggtgctcttgtggcttctaaatataata

SEQ ID NO: 62307 - DNA, 467 bp, Oryza sativa
  unsure (1)..(467): unsure at all n locations
ggacacttaaaactcagctttatgacaaggcatttccatagccgacacatgcttattttatgccgacgagaggggtcccagaccaacaacatggtatgtcccagaccatactgtgccangaagcccaggggggtcctctccgacaccaccccggcgaatccacatgtctctcggcatcatggctcccctgataagctagttactcagccaggggtgtcccattccacccatgtggtcgcacttgtcttttgttcggatgaaattccaaggaatcggtccttaagtgcgggagcgggaaaaccgtacacccggtacgttccccggtccgcggttttagaaattcatttagttcacaagcaccgacccatgtgtcaggttttcaagtcttttgtaaacccaagttttacccaagtgtttttcagatttaagtttaaggcgactgtcatactccacagagagacgaatat

SEQ ID NO: 62308 - DNA, 431 bp, Oryza sativa
gcttcaatcgtaacttccgaagactttctcgtccctccttgaactccttctggaggcgcccacgttccacttcttccttctttttctcttcttctatttgacgcaagtccatgcgcaaaggcgacgcccggtaaacgcggacgccctgcctgcgcatgctatcatagaacctctcgggattccagacggcgacgtaaacgccgatggcgtccgtgaagttgccactccggccgcagaagccgacgatggaccccgagtgctccatggagacctcgaaccgcgttcatccagctctgtcttctccaagattgccgtatggtccgaacgtcctgttccggttgctcctgaactgcaaccaccggatgaagtggttgttatggtagccgcacatgtgcgtcaacaccttcccatggaagtcgagctcctcctgt

SEQ ID NO: 62309 - DNA, 458 bp, Oryza sativa
  unsure (1)..(458): unsure at all n locations
ntaacctatcacggagacgtaagatccgtggatccgatcttctggatacaaatcaacgtgtctcctctcttggtttgctcgttcttgccatctctcatattgtgcttgagcttgtttttacccgatctacttgcatgcttaattaatatagttggtgaccttatatcttgcttagataccttatttgccaccttttgattcatatacattttgtttattcgagctacaagttcatagctagtattttattccattatccgccgaacttttatgttaagaccagaacttccaatcccataccagaagttccgatttgaaccgaaagttctcatctctctagtacgctatgatagtgtgataattttttatgaacgcctatttaccctcccctctaggcaaattcaagatcctttcggtgtaccctgcgtctcacattacacactatagacgttatgtgt

SEQ ID NO: 62310 - DNA, 426 bp, Oryza sativa
  unsure (1)..(426): unsure at all n locations
agctngcattaaacacctaagttctcgtgtcttgctgagtacgaaagtactgacccttgctctatataaatatatatatatatagntcctccgccctaaagagaagataaagtgaagtgaagattaggggttcgtcctggttcccagccgtcgcctgtggtgttgggtgttagttcgttggttccgctgctgctgctgatgttggtgtttcctcgtccgtgtcgtcggatgcattctcgggttgttctgagctgcaacctaagttaacgtaaataagtcctctatttattttaaggatttgcagcgattcataaattgcaccgtgggtaccaccactatgtcctgcgactggtaccgagatcgcggtttcgtangaagcggttcgcgccgtttttcctacgacacgctcctattaggtgccgttgt

SEQ ID NO: 62311 - DNA, 410 bp, Oryza sativa
  unsure (1)..(410): unsure at all n locations
cttgtgtttggtttganaatgggcctttagcccttgaggctgcaagattctctggtcaaccattagtcgacaactgggattgtttgaagaagatggtgagtacaaggctcttttttttaactctgatataagccatctataaatatttcttgagttattgtcttcttgttgcctgttggccttaattgcacaatgctatccttggttccttgccaattgtcaggtgcgaatttttgaatctcaatgtggatcactcactcagtatggcatgaaatacatgagagcatctgcaaacatatgcaacaacggtgtctctgatgccaaaatgatggaagcaagtatcaacgcttgcggccgttacaactcggcgagatggagcccaatgactgaaggaggacacagtgcttgat

SEQ ID NO: 62312 - DNA, 397 bp, Oryza sativa
  unsure (1)..(397): unsure at all n locations
agcttgcgagcgagaccattcattatctgttggaatgcatctcctgcctgagcaggctgggggaacagcatggcctgcttcatcgacgggttcgcgagaagcctctgcttcctcacgataacatctgttggtatggatgtcaggatactgtccagcttcggaacatcctcctcggcgacaaacacgccaatctcctcccaggggatagcatcagcaaaggggaggacaatgtcatctgcaatgatcaccggaatacaaccgaaaaccacagcttccaccagtctggggctccatggagcccagcccaatgggcacaagcagaacacagatctctgcatatcttcgtagtacgtgggtgggtgatcggttgagatgtcaaacagcggngttgttcttg

SEQ ID NO: 62313 - DNA, 456 bp, Oryza sativa
  unsure (1)..(456): unsure at all n locations
ttatgcatgtaaaattaactgtagtatcaaatttaatatcgtacgatttgagatctcataaataatgtctgtgggctagaatacagctgacaattcctcggacactacgaactatatatagcttaggtgagaaaaattcaagccatgcgtgcaccggatttgtgtacggattttaactgaattgttatatgtgtggatatcttgacctgaccagtgaattcatcgtccatccaacggcctctgactaggtgtcacttgaaatttaggtgaaaaataccggcaaaaagtcaggtgatacatctgaactgaaagcattctgagagtagttgaagactctntcaagtttcaactcttgtacgtctagcatgacaatcggttaatgtcaatcctttagtttcgtcctttttgtcaatacttcttttccgaatggactatatacaacttaantaagcagtt

SEQ ID NO: 62314 - DNA, 404 bp, Oryza sativa
agcttgctcacttaccgatcaaggtggttggagtttgatttgtgaacgcctaacatggcctatgtttatgtgaggatttgatccttctatgtggcatgagagaaccctgtgtcggcttgggaaaggctttgttgcgaacctctgataccgaccggtgttcggaataagttcgtatcttgtgggtaaagtgtacccctctgcagaggttaactaactgttcgaacagccgtgcccacggtcatgggcggatgtgaggtggttcccgctgcgtatatttgtttgcctgtgctttgtgaaaagatgttgtggtgtgggaatcgtaaccagaatcatcctatgtggcagatggatgacctgagtggtcagaaacgaatctgtgtgattcgggatgtctgcggcatcat

SEQ ID NO: 62315 - DNA, 455 bp, Oryza sativa
  unsure (1)..(455): unsure at all n locations
nntaattgtcaaggtgctgcttcagatgctccttttcttgaggatgatctttgggttcggaatatggtgaaggctgttgctgtcaactaatgattccatttcttgggataaagctggatgaggttgtacctgcaggttcgaattccaagcaacatcacaagtttagaatacaaccttaataagggccaaattttataactcaaggggggtgtaaccataatttagtcaggaattgttctaaagaaactcgctgagctcatagtgaatagaaataaataacagtttttttagggtaataaataacagagttcgtggccgtgtctcttcacatggccatgccaagatacagaataaattatcacatctaacctcgtaactgcgaagcatagaagcaatcaacattgcgatcccaagaaccgcatacttctgctcaacacatgcttgacttccagagc

SEQ ID NO: 62316 - DNA, 387 bp, Oryza sativa
  unsure (1)..(387): unsure at all n locations
agatcactggcaggtggatacctagtttgcagaacaaacaattggtaggagatactttgtcttgcccaatgtaaacgacgatntcgttgtacgtataacaaattccaaatttaactagcatctgcttattattactatcatatctgactaactatgtttgtttcttagggcaatccaggaaggtgcgcattcactttatggatcgacaatgtcaatcccacatatgatggccaaaagataactgagtctgaaacactggtagagtaccagcgagagaaggagcattaaaatgcaatacatgttgaacagcgcggaaggggtcggtagatacgctcangctcgatttgtcaggactggacaaattgtatcttttatccatgctatctt

SEQ ID NO: 62317 - DNA, 455 bp, Oryza sativa
agcttgttatgggctgaggcagtttaccatgggaagttattatctgctcgagaagaacaaatttgcagaatgaattgacagccgatgaatattacaatctcatggccgatgaaagagaagatctggttcagtcaaggctgcgagctcttgcacaagttactaaggataaggaaagggttgctcggcattataacaacaaggtggtgcctaaatctttttatgaaggagagcttgtttggaagttgatcttgccgactgggactcgttataataaattcggcaaatggtcaccaactatggaaggaccatttcaaatacataacgttgtgtccaaaggagcttatatgttccaaggacttgatggagaagtttatggacgaccgcttaatggaatatacttgaagaaatattaccgcttaatggaatatacttgaagaaatacttatccaagtgtt

SEQ ID NO: 62318 - DNA, 362 bp, Oryza sativa
  unsure (1)..(362): unsure at all n locations
caccgaacacactcttattgtgtttaagtntatgcgggcggagcggggactcttaaaagtttccgctagaactgtgagtaacgtttcctggttgggcgtctttacaaccaagtcatcgacataagcctcaacattacgtcctaattggctacccacagaaattcgagttgtacgttgaatagtatgacctgcattctctaacccgaagggcattgtcgtataacaataggttcctatgggggtaatgaacgcagttttttcctcatcctccctagccatgcgaatctgatggtaaccagagtatgcatctagaaaacacaaaaggtcgcacnccgcagtggagtcgacaatctgatctatgc

SEQ ID NO: 62319 - DNA, 410 bp, Oryza sativa
  unsure (1)..(410): unsure at all n locations
tcttcggttcttggtctctgcccgaagcattgaggccttctcttttaagatactggctatagagcggatgcgccctcccagcaaacttagggatgtgcaatgcgtcaccggttgcatggccgccctaagtcggttcatatcgaggctgggagagaaggcgttacccttatttaagcttctcaaacgctccggaccgtttacctggacggaggaagctgaaaatgccctcacccagatgaaggcgtatctaagctctcccccagttctggtcgccccggagccagacgagccctngctactctacttagcggcgaccccgcaagtagttagtgtggcattggttgtggagcgcgatgaggacaattctcatttcgcgctttcccaccctgtgccgacttggcccgggagag

SEQ ID NO: 62320 - DNA, 447 bp, Oryza sativa
  unsure (1)..(447): unsure at all n locations
aaaaataagagtaaagtcctaaagttacatattaagatggtaaaatcaccattaaagttgaaaacctacagtaaaaacataattatcccttcagacaaatatagttacttcttttctccctccttcctccctcatctaaaataaagatccttcctctctggttatatctactttaagggcccctttgaatcgtatggtagaaaaaatggaggaatatgaaaaacacacgattctgacaggaattgaagtgtaaaacagaggattgcaaaatataggaaaaacacaggaatgatcgtttgattgaagcgcacgaaaaatgtatggatcggatgagagagatagactcanaggaaattttccaagttggtggagctcttgctatatatttctccaaaatccacatgccatgcgccattccatagaaatttcataggatgtggaaagctt

SEQ ID NO: 62321 - DNA, 443 bp, Oryza sativa
agcttatcgtccacagcttcacacacggtattactctttatgctcgtggctgcagaaaggcacgacaagcatgcccccacgaacatcgccggcccggtgcccatccatcccatgtgacgagaaaatacgtacggccggggggattaagtacgcatcaattacatccctcacaaaggaataagtacaccttaattgattactcctccattacacccaaacaatacaggaacagagaagctacagccgctagctacgacaaagtacaacatcaatagtccccttgataaataaaacacggcctcgcggttttaattccgttgcaggccatcactccggtacaagaaaacgctcaaaagtagaaatttaatcaatacaattattattgatttttttctcaagtagtactaagcttagtacttccctttactactaccactacactt

SEQ ID NO: 62322 - DNA, 477 bp, Oryza sativa
tactaagcttccgtccaagaagtagaacttgcgcacgatcaagagagatctgttctcatgatgcgcatccacaaatcaagatggccaagactctaaacaagaattagttgtagccacgcacggtcccaagcacaaattttgaagtatgaacaaggacttaccttgcacattaaacagcagtacctcgccgaagactccccgattttctgattgcagttaacgcaggttcgaccacgcccttgtaatggtgtcatcctgtggttcaacaggatccaatcccgattccagtctttcactctctgtatatagttccaattgtacccccagcgacccacggggtacttggcgaacgccgcggagtctccacttccgagcaacccaatctgcaacaagaagataaggaggcatggtgggcaacacgcacgagaggctcagctcagctctcaactcgatcggagcgcaagaagtcaagaacaa

SEQ ID NO: 62323 - DNA, 384 bp, Oryza sativa
  unsure (1)..(384): unsure at all n locations
ctatataaatatatatagttcctctggcttgaagtggagatgaagtttagtgaagattatggtttcgtcctgggttccagccgtcgcctgtggtgttgggtgttagaccgttggttccactgctgctgctgttgttggtggttcctcgtctgcgtcgtcggttgcattctcaggctgctttgagttgcaacctaagttaaggttaataagtcctctatttattctaaggattgcaatgattcatatttgtcaccgtgggtaccagcgctatgtcctgngattggtactgagatcgtggttttgtaggaagcggtttgcgccgttttccctacaacacgctcctgtcaggtgccgttgtacggcggtgccggatcggcgtgtgac

SEQ ID NO: 62324 - DNA, 416 bp, Oryza sativa
tcactccctctacagcatttgaaacaatcattatttattttcggccaatgaaactccactgttctaagcaactaatttatcttacgggccgattgatgaattccacatatcccttcatgtactactctcctagcaactttagattgatcattatctaagtaatacaccatctatttttcggtgatataatatttgagcgcttaccgccgaatcttccgatcaaccttaagtggaggatctttcaaatatctaatcaaaggaattctccaagctatttctaactcataggcacaaatgtccgaattcacaattaattcggccttttaatcaattataacgtgccccccagcctcctgtctgggatcggtcagaccggccgtgcaatgccggtcagaccacccctggtctatgagttt

SEQ ID NO: 62325 - DNA, 437 bp, Oryza sativa
tcaatacatcttgttagacccacaatgccctcagccccgaaaacccgtcctctcttgcccgagtaagcttccagtcccacctttcatcaatgaaatacaccacgaaaggtgtgaccgttgtccaatgaacctataataataaaaacccacctagttacttttctccacaaaatgaacctcattatgaaatgaactaaaactcaacaaataatgcagacaatattgacagtagggatgaaatattgacaataatgtaattatatgttgggatgatgtcagaataaggatgggctagagtaagttgaatgaaagggttattgacatatcgatattgttaatgtctgcttatattgcatacagaatgattataaccatgacatatttccaattcacctactacttagtagtgacatatgtcaaagccagaacttggaagt

SEQ ID NO: 62326 - DNA, 463 bp, Oryza sativa
  unsure (1)..(463): unsure at all n locations
tactcgatcgatcgatcgatctgtgtcttaattctagcttgtgtggtggcctcgctgatctcataagctagcactatatatatagtggagatcgatcaagatatatctagcagagcagaacagtagcgttgcgactttatgaagagcccatcgatcgcgagccgtttgcaggttcgcacccaaattaataatttactccacacaacaacaacaacaaaatacgtacctcacttatattaccagctaatctgctaattcatgcatcanagtaaagtttgacaacaaccatgcagcgtctactaattaacctcgcttcaatccttccgccccatacatgcacttttcttatctcaacagtcaacacccaacacttggccacatagctctatncaatcgattaatntcttcatgacgtttgctaataataatactgctccactaattaatctcttctagatgaact

SEQ ID NO: 62327 - DNA, 373 bp, Oryza sativa
gcggaaaacataatcactactgcgggacggtgtcattaaaggcctgagagactttacgcacaatttcatcaccagtgttatggccccacgtatcgttggactcttatgatttatcaacgtccataatcaacactgacagcggtgtaccggtccggttggcatgggcaatttcgcgtttgaagatagtcggtaagaaacggcggctaagtaatttcgtcagtacatccataccgacttcgtggcgcgatacttcttcaacaattcacgcagcaaggtaataatttgcgatacggtatttcttatctgttataaaaactacacccgcagacttctgttattcaaatttctgggtgtacgcatggtttgattgaaa

SEQ ID NO: 62328 - DNA, 424 bp, Oryza sativa
  unsure (1)..(424): unsure at all n locations
agcttgagatcgaaagatggantaaccttttttcttnttttgcatattaactaaataatttaaaaaaataaattcaaatttgactaatacaagttattaaaaaataaccaattaaactcttactagtatatgtatatttataggtaaatttattatttttataacttataaatagttgaatttgaatttacaaagttgtcaagtgatatattacatacgaatctatcttggttttttttaaaaaaatatataaccattcaattgacatataagagatggattggtattcttttaanaaaatataactacntatattatatataagaaacgggtgaatgtccccgagtgattaaaagagttactcttgagatcgccatgacaggacaatgcatcgttctgaacattgatcttgcttattttatgg

SEQ ID NO: 62329 - DNA, 179 bp, Oryza sativa
  unsure (1)..(179): unsure at all n locations
tgacacaccnatactcagctcgctgcagtccttatattcctgcagctattctgttttattcatctttacacttctcagtttttgggactatgctaaggtgcctctactgactaacaatactattattaccttcatcatgttctgcattgtacatacggggagggggcgactgaaagtga

SEQ ID NO: 62330 - DNA, 400 bp, Oryza sativa
  unsure (1)..(400): unsure at all n locations
agcttgtgcctgtttggagagatcatcatttattattaaagtatgccgttcgcggtacataaaatactcagccagggctgctcccgtataaggagcgaggtattgtaatgtagcaggggaatccgccatttcagctactacaatagtgtattccatggccccctcttcatggaaagtagttactacttgagctacggaggatgctctttgaccgatagctacataaacacatattacatcttgccctttttgattgagaattgtatctgtagctactgctgttttgccggtttgtctgtccccaataattaactctcgctgaccgcgcccaatangaatcatcgaatcgatagcaataagccccgtttgaaggggtcatatacagaacgcctggaaatta

SEQ ID NO: 62331 - DNA, 466 bp, Oryza sativa
  unsure (1)..(466): unsure at all n locations
gacccggaccttaagcacctgggctgcagcttcaccctatggattgatattttgctggggttggctgcactgcgtgtatgcaacacgttctacgtacagtactggggtctgatagaaacacttattgtgaaccacagtaattttaagccagcacactgcaccatggcacagatttgcccacagatgtttgtttgcaaaaatagagaatcaaccaataaccatcaatggggaaaaaatttatatatgacataggatctatcggcgcgcagtactttggcatgatgcagatcatatgttgggagttttacagattttgatggttaaactatctcttaacaattgcgagggcctgtttgcaagtgcttttggcatgtgcaactnttcctaanatcagaagcaccccaaacaatntagatattcattcaaatgctaaaatgttgtagttatagaaatccggaaatgaact

SEQ ID NO: 62332 - DNA, 420 bp, Oryza sativa
  unsure (1)..(420): unsure at all n locations
aatcaaccaaatctatcttatcgatttaatacttaattaataatatgttaaatgtttntatttcacgtgcagaaaaaagctaagtcaaattgttgccactgcttcctccacactgcccacttgtccagtggttgccgaggtgcttattcctacacctaatttatggaggtcaataacaaaattattattgtaatatacttttttttatatagtactagctcatttcacccgttgttatgtaaactctttagcccatattgtatatgtggcatctgacgaccgtccagtataaaaagcatgaggcctactggcctacttaccgtataaagtcaaatgatacactttgtattcaaaacacatgttacctgtgtacacatgcatagaccaaacggaacacctcattttagtaaacctagtctg

SEQ ID NO: 62333 - DNA, 412 bp, Oryza sativa
  unsure (1)..(412): unsure at all n locations
actaagaanactattctatttctactccactagcactagagcactaactaaacttgagagagagctctttgatcttcttcttgagtgtgtggatgaagtgaggaggtgaggtccttttatagactcccattgacggttacagcggtttggaaatgtcggaaataccctgcaaccgtcattggggaggcatctggagcatccaagccaaacgggagagccaaccgctgagatcaaggttcggtcgaaacctggacttgcccaattggcctatagtacggcaggtgcgtctgctaatgactcctcagtcaagtggtgcggtggttttggcccattgaaattatcttaatatggttggaggcccatccacccataagtctgcctctgacggatctcgattaattattcggttatg

SEQ ID NO: 62334 - DNA, 426 bp, Oryza sativa
  unsure (1)..(426): unsure at all n locations
ntagctgattntctcgccgagtggaccgagtgccaagatgacatgccagaggaaaagatggaatattggactatgcattttgatgggtcgaagaggcttacaggcactggagctggggttgttctaatttccccgaccggagaaagattgagctacgtattgtggatacatttttctgcgtcccataacatggcggaatatgaggcgctgctccatcgattaaggattgcaatctctctaggcattcgccgactaatcatccgtggagattctcagttggttattaatcaagtcatgaaagagtggtcttgtctaaatgataatatgaccgcttatcgacaagaggtacgtaagttggaagataaattcgatggacttgagctcacccatgtcctcggacataataatgaagcagcaaacagactg

SEQ ID NO: 62335 - DNA, 303 bp, Oryza sativa
gctggaatccgaaagggaccatgataggaagtagtgaattaagtcaccaaattacaaaagaaacaatttatcacaacttcagaaacaagtcatgaagggaagataaatacaacgtaacaaaaaaaatgtaaaaagttcagagcttctattaacatgacagtgagagtggtacctgacgcttttggaattcttgtgcaatatcgcctgccaaatttctgtacaagagacagctatttcattagaacccacaaatgttatgaaaacaaaaaaaacattagtatacatattgagtttgatacactg

SEQ ID NO: 62336 - DNA, 465 bp, Oryza sativa
  unsure (1)..(465): unsure at all n locations
tggacaaaggtttacatcggccgatccattggaggaagtatacatatgtgatggaactaagccaatgccgacttttgtaaacaaaaatatgagtgccgattataaggttaaaataatcgagctactaaaggagtatgtggattgcttcgcatgggaatatcatgagatgccgggtcttatccgtgagcttgttgagcatcggcttccaatcaaactgggttttatgccttataaataaccacctcgtcgttttaatcctttattatatgaccgagtcaaagaggaaattgatcggttgttgaaggcggngtttattatgccatgtcgttatgcagagtgtgtttctagcatagtcccggtggagaagaacgcgagtggtaagattatagtttgcatagactctagagatttgaataaagctactcccaaagatgaatatcctatgtctatagccgatatgatgat

SEQ ID NO: 62337 - DNA, 437 bp, Oryza sativa
agcttgaatggttctcaactgcctatatatattttgtgacctccttttaacaggtgcttatattgtgttttttatatgggcttcctaacacatggtcggacttgttggcaggtggtgccaaatgtttaatccgtaatttccaaggtgtaagacattcagcaaccttgaatatttgaagctaggtgagtggtttttgagagattggtgctatcctctacttttcttgcttcggcgctcacctaacatagaaaaacttcacctgcaacttaacaaggtaagatataatacctcagccccttccatattgctatttgtgctcatggcttgagtttgatggtgtctttcattcttgttatcagtatggatctgatgactatgaggattacccagatgctgctgcagcaattgatcctacttgcagagaaatagaagaaatg

SEQ ID NO: 62338 - DNA, 256 bp, Oryza sativa
agcttctcgttcttgcattaccaggaacccggtgtggctcctttctactctcgccctgcgttcccaactattggcatgtgatgtttccctgaaccgactagtcacttatccagggttgcccattccacctcgtggtggcactctgattatgttcgacgggttacccatagaatcgagccttatatgcgaatactgtacagtgcctcataagcacgacccccgcatggcgagtttcacaattcattttttttaaaca

SEQ ID NO: 62339 - DNA, 292 bp, Oryza sativa
cctataatcacaatcaccctctccatctctctctcctttttgagcccccagcaccagcatgatgcccccgggagaccaaccaaagaactaaactcaagggaattcactgtaaagtgtaaagcacactgcagtgcagcactgtaaaggccagctttgctaactgtctctcacgacacatgtggctccccctcgcaagtccacgccgcgcgccgggttcttcacgccggccggaatgctggcgttcgtccccgcaggtgcaccatgcacaaaaggacccccggcgactatggtg

SEQ ID NO: 62340 - DNA, 468 bp, Oryza sativa
  unsure (1)..(468): unsure at all n locations
tgacacgtctttttccgtttctacgcacaaaggagattagctggtcaatgaacgcagatgtcagcagttttcgcattattaacgtgaccagcggatattgaccatatataactaacagagaaaatagaacatgcaatgcatatatgctagtactatatatgacggcatatttttcctatgagaaaacttagtacgtatacgtagcagaaatttcagcatgccccagacttctatgactgcttccgaaaaagaggatatgtctagtcgctttcctgaatatattgatcattattggtactatgtcttttgatcaggatttttcttcctttcgtatgaaatccaggagtccatgaatttcgttcgtacgtaattccacgcacgagctcatgcataagacagggggaaaaaacagtgtcgcacatacgaaacatagtgtttccctacanacatagacttctttgatcccgc

SEQ ID NO: 62341 - DNA, 345 bp, Oryza sativa
acaactcacaacctcatagggcaaggatggctttctttatggcggtcttcatgatccactaccaatggctgaaacaaaacaaataacgatattgggttatttcgttgatcaaaataatccaattgaattgttagttgctaatttgattcaaattgacatcattatatgaatgcgaaaggaaaggcttttacattatgaaatgtattttagtagcttcttagtggcaatacctagtggcctctgcatggcgcgtgcggaccttgcctcggcaccatgtgtccattgcctctgcatcaacgcacacgtccgtcttcctcatgctgctccaccaaacaagtagcttat

SEQ ID NO: 62342 - DNA, 470 bp, Oryza sativa
  unsure (1)..(470): unsure at all n locations
actcaacttggctggaatgaaatacattaagtcagatgtcatttttttagtaataaggactggataaaattacaatgtgaattatctataaaaaaattacaatgtgatgttgtgaactcacatttgagagaccaccagtgaacagtgcaaaggagaagtcctgcctctgattgatcaactgaaacttgagagtgccttttcctgtcttgccataatctgaagaataatttgcaagctgatactgaaaccagacatacaaaaaaaatcagtttacgagttcatttgcagaacttttacatacatgatgctattattcctacaaacctttattggtgcagagcatataacaggccctgagtctgatccacaaggaccggagcatgtggacgcgcttgatgaaaatgcaagagttcattagatcatggtcattgngattgtaatctacaaactcacatcacatggtctaacta

SEQ ID NO: 62343 - DNA, 426 bp, Oryza sativa
  unsure (1)..(426): unsure at all n locations
tcttcttcttcttcttcttctctctccgtcaacctactccgtttgcccggccattgttcttcagagcttggtcgcgatagaaagaaatgaaattgtagctatgatgttggcccggctcactcaaatggatcatcggtgcagaagagtgcatgaatctgatgcagtctcagtgtagtatgctccatgctggaacttctgattgagccgtgccaatatctcagcaccatttttatgcaatcatgcgtacagatcactcccaaagtctcaatntaccatcactaatctgcggctatatatatggcgctcgtcggctggtaatagcatgattagttaattcttgcagctcactatcattatatatattcttgcatatgtatgtatatatgcatatttgaatggccgtgtgatcccatacaaatatatatg

SEQ ID NO: 62344 - DNA, 380 bp, Oryza sativa
gatgctggagagaaccaccagtaacgaaacatctatgtactttaagctgagctgatcagcgaactacgtattatcaggggagctaacagcgaataccaaccacaaatatattctcttcaagaggaaaatgaggatctcacaaggagaaatcaccttatggagaaggagcttgacctgaagaccagccgaaacatagatgataataccaataagcacgtgagcctccaagatgaagttcttatgctacaaagctctcttgatgaagctaagttagaaaacgggaagttggaagggctacttcaatcattatctgaagaatgtgaacaactaaaggcacagaaggggatgttaacagacaaggtctcatgtatgcacgacac

SEQ ID NO: 62345 - DNA, 381 bp, Oryza sativa
  unsure (1)..(381): unsure at all n locations
aaaagccttgtttgaaagcttttccgacgaaagtacctgcgccggcgtgtgatccgcaaatgctcttctggatgtcaaggagaagagtatttccgtcgtcggatgatacccacttgaggaagatttcgtttggggccttcttgtataaatcgttgctgatcatacaatatatcttggcctgacgggatagtttctctacctctgtgtcgtcatccggcagctcgtctgactccaagaatcttattagcggggtgcgccagtcgtctgttgtctctatgntcgcaacgacgtttgtgaatagtgacctctgcagctccctgcgagatgctggtatttgctgtggtgctttcgtcgtgcgtggtcttgatggatggttttgtc

SEQ ID NO: 62346 - DNA, 443 bp, Oryza sativa
tagctggtactgtacccagcttgcacatcacatcttttttgaaggacagtacgtgattacaatgtgatatatggccacatccatgcttaattaggagcctgaaactgaaagcaaacaccactggcaaccattgattactgttcatgcatgtcattcatgggcctaccaactgagtaacaaaaggagggttattatatttttttttcttattgttgatggaaaagacacaaagaagctgcctttgaaaatatgctgagatttgagaggcaacagggtccctgtagaggattgataattcaaagatggatgagcaaaacctaaattattttccaaaggtgacatgaagggccctacaatgttgtatgaattgcaccccctttctttcagttccaatctcctttatttgcttctactaccatgcattcttttccttttcttttctt

SEQ ID NO: 62347 - DNA, 424 bp, Oryza sativa
tgcagctttaccagctcttacagatcttttctttgctagggaatggggacatacaccgactcaaccaagcaccccaatgaaaggtggatgtatcgatgccttggcaaacacttgcggtacagctgtaatcaaatatgtggagctctgggtaggcttaaatatttaaccaaggaatagcacaggaatagcacatgctcacatcattttttggtgcttttttgaactctctcaatccggtcagaaacatcccacccgtgtgggctactattggcattaattgacaaaagttcgccgggcgaatcacgaagtgagtgtttaccactaacgcacccaatacacttcaatatgtcctaacatcattatttggcgctttttcaactttttcattccgggcaaaacatacgacacgtgtcggccaatattg

SEQ ID NO: 62348 - DNA, 451 bp, Oryza sativa
tcatgttccgctttacatttatgctgtgaaaaagttctattccaaaaagcttgtaaatatcggctgtgagagtttgactacaacaagaaagtattattggtctcccagagcaagttaacatcgtagccactccaaatcacggaattactaaactgtgggagtttttgttcatgcatctaagaaagttcacgatttccaaaaagaatataatttagttctgaacaaactgtttcctgctcctgcatacagtttaagcatgccattgggagacttctacatgattctgattgaatagttactaattgcatggtcaaactttaccttgaacatgttcaaagtgctccatgacattagcttctaattatactgcttgaatctctattgacacaaagcttatgacctatatgtataattctcaagtacaagaatcgaagtgatatgcccaagtagt

SEQ ID NO: 62349 - DNA, 429 bp, Oryza sativa
  unsure (1)..(429): unsure at all n locations
agctttgccatttttctgggctgtttttctacttcgaaatttaaacaatcaggccattaatgaagtcattaaattggattatcgctctggtcaggattgtacataagatctttggtctaattngtcgtaatttgaccagtaccttttcttatcacccaatatccctctataaatggcattttagggagctactatttaatatttaaatttaattatactttaccttttcaagatgaatcatgaaacatgagtatgtgaccatatcatcaagttgctcacattgtttttgtgtacgctgcatgcattaggttccttcaaagggtctattttgtccaactactacagtaatgcttgtcanagggcacattgtttttgcgtgcttcttcaaatctattttgccaactactataatatgcttggaattgataa

SEQ ID NO: 62350 - DNA, 419 bp, Oryza sativa
ctcagcttaagctgcctggttgcctatgtttctgacatttattgcagttcattaattgaatgacaatttgaacattctatgactattacagtttaattttggttagttcaaatcaatggttacattcaactcagttcaaggactgttgtaatgcaggtgaacgatcatagctctaggtaacactaactggcaaccagaacaagtgtcaaagcaaaacttccctggaattgagaggcactataatctggtgagaggtggctgtaatagaggtgttcgatggccacctcatcatagttggaaatggttgaaaggggaaaaacagcatgttacaggcaagagctaatagcaatgactagaggattataaacaggtccaggtttggtttgtgcatctctcagtataactagttaacatgtgat

SEQ ID NO: 62351 - DNA, 450 bp, Oryza sativa
  unsure (1)..(450): unsure at all n locations
agctttcataatagctagactaagctattttgtccgcgtatttaccttctgcttctggctgtctcgcaataccttctacagcttgtcctgcagcagtaccttgaccaactccaggcccaatagaagcaagacctacggccaatccagcagcaataacggaagcagcagcaattagtggattcatgatgagttcctcgtgtcaaaaaaaagaaatggttaaggatacaatcaaccaagaaattcatatttctaagctctattggacagaagtaactaaaaagtacaaattgaaacgataatctgaattctccgaactgcttcgagatctcctttntagtttctaatcattagagggttgtgtactcattattctatttctctttctttccaaccaactgatctttcattccatcccttcttctttcctcttcgatatccttgagtttctat

SEQ ID NO: 62352 - DNA, 426 bp, Oryza sativa
  unsure (1)..(426): unsure at all n locations
ntaacaatntatggactagttgtggcactggcgctcttatttgcgaacccttctgtttaatcctaaaaaagaaaacgagtcctttagattagatactttcttctttttttagtaaattggtatttgcttctgcaattccaattatatcaatactttactcctaatttattactcctagagttttctatttatggggacagacaataccccaccccaggaatagctgatttgaggatgatcaatttagaggatatgttcgccgtcttgcttcccgccctttgtttagggcagtggaaagtatttttccttttattttaggaattttgggaacatttcaacaaaggaggtctttcacaggtcaaacgagatctaagacttaatctataagaaattactaaatggaatctatttctattaaaaaaaatt

SEQ ID NO: 62353 - DNA, 374 bp, Oryza sativa
  unsure (1)..(374): unsure at all n locations
aaactcagctgttagctagcacacaatgatatactctctaatattatggccaaataggccgcctggcatggcacggcccagtcccgatcgtgccccggccaagatttgtcgggccggcacagcccgaccctatacgttaggccgtgtcgtgccggcccacgtgctccacttatggcccatgcacggcccaataagggtcagacgtgctgggctggcctgaatgcacgtgcagcccatcgtgctttttttaaataagtctatttggcttctgacatatatatagctaaataagtctattntatgttcgtactatttgggtcgtgccatataatacgtttatttgtgctccctattctttgtgaaaataaggctat

SEQ ID NO: 62354 - DNA, 346 bp, Oryza sativa
  unsure (1)..(346): unsure at all n locations
tgacagcttttatgaacacatttaatgatcttatgagttgaagaaaatgcagtgcgcagtcaatgcagtgttcccaagcaccctgaagaatctgcccaaccgtgtataccgtaagaaggaaccatttctttgtgaaggtgaagccctggaaggaggcgccaaggacttcttttaaccttaataatttgagcgaattcttgtaaaatgataattattctagatactgatgcataggcatttcgccacacgttgaggtagcacaattaaactttacatgtcagcaagttggttcattggctnttagtcttgggctacctatcacggccaatgacagtgcaaaaatatg

SEQ ID NO: 62355 - DNA, 450 bp, Oryza sativa
  unsure (1)..(450): unsure at all n locations
cctgcactgcatagntgactttcagtcccaggcctcagttcatggcccagggggctcaaggcctggatccgcctacagctgatttatatataatttgatgatatttgctccaatcaattaaaaagtatctcgaggtaccagtacctgatcacgataccaaatcgttttcgatcgttggattatcctgccgagctagatcaacgatcgaaaacgttttggtactgtgagaaaccagtacatcgagatactntttgttggaccggagcaaaatctcatatatatttgcagctgttggacaccacatgcgcaggtttactatctgtcagaggaaagaaccactctttacacgatattattcgtcgctttcttatacattctgttagtcgatcatgatctctgacacaatttcaagtgtagcanagtaaacacccattcttcatttaattctta

SEQ ID NO: 62356 - DNA, 478 bp, Oryza sativa
  unsure (1)..(478): unsure at all n locations
actaagcttgtcaaatntnncagtccatcatgtgcacagtgaaaggacttccatagaagacaagcattctagtcgtttcatatccgaagatcttgtacacgtaccacagattgatggtgtatctcttggtctcactgcctgcagtgatgacaaagcaaatggatggtatatgttttcacaacatggtaaatcagatcatatatgcaggaactatgggatgcaggatgacaaaaatatctcattttgcctgagcaaaacaattcctctcctgacatcgtaagcaccacccaatttataaatttggagtaacttaaacagtttttgtgattatattttctccatttcagggatgatataatcgtacataatgaagaataccaaacaaagtttcacctggcaaatatggacagtgacgatgcttgtctggatgcatctggcagtcaacggaggacatcctcagatagcaagtttccatggt

SEQ ID NO: 62357 - DNA, 460 bp, Oryza sativa
  unsure (1)..(460): unsure at all n locations
ntaagctccattaccccatgattagtttaacactaatgaccttaatgaagcttttggttgtaatgtaatgtaaatgtggtgtggtggtgttgggtggtgtgggaatgaatgaaaagacacacaaatgcaacacatatgccatagagaaaaaaggggatctttatgtgcggttgcagcatgggcgattgggcatgcataagctatgccatcatgctcccaatcctgaccttctgatgagaccatgtgatgtgatcacctgtttctttccttctctgcattttattagccatggattagaggagagtagaaagatcacctgttaattgaatacttctacatttgtggcaagaatgcactataatactatttctgaatatntctctccctctctctcttaagctntgtttgactgaatntctgcaatgtcattgtttgctttcagcttataagccattgtcag

SEQ ID NO: 62358 - DNA, 409 bp, Oryza sativa
  unsure (1)..(409): unsure at all n locations
agcttgttgactacggaacatttactttttctacctgccaagtctttgaaacatatattagggcaccacatatagtcaatttcagttactgttttgtctatcggattaaatgtgagggtatttcacacattaaaataaattcatcaagttagctgaagtgctgaactcttgaatatgggtgcaacatccttcttgtcataactcaaatttgaatccaagcctgatcttgtggagtagagaaattacttangatgttctatgatctttttgttgtgagtaaatatgtgcaaacattaataaatgctcaagtgagaactgagaagttgtcgaaataaattcaatacgtaataaaaaatggtgtgctcataaaatgattagatgatttgtatcactctgattcctacatttt

SEQ ID NO: 62359 - DNA, 454 bp, Oryza sativa
  unsure (1)..(454): unsure at all n locations
atgattaagaaatagaaaatagatctcattattgnttgcaattnttctattacggacatgctagttctctccttatataggtccaatttacaccaaatgacatgactgctgatcacttgtcttaatttgtgcacaattaatgaatcatatatactgatgtttaactttataagaagaaaaatgttgttacttcactaacagcttctcaggttgactagtttctaaataaagtatttgtattatctctactagtgaatcaggtcaatcatgtgtactttcattatccattcctttgacagtattccttgcatatnttatgattaccaacattttactaactctgattgttattttcccaatcctatggcagtattccttgtgtatttcgtgtctaccatcatcgctacctgtgagagatggctttgctgggtccatggatgtggatatgtactca

SEQ ID NO: 62360 - DNA, 398 bp, Oryza sativa
  unsure (1)..(398): unsure at all n locations
tcaagaaagaatgagcattttgaccaaaagaaacttctacatgtccaccggtaagcccgatatcaaaaattccaaaccaaaatttgtaaccttgtatacacatcgcatataggtatttaaacatatattgatgttcaagtttttaaagttgacttgaaacttatcccaaatggcatgttctcatgatcgggtggaatagtttacgtacaagataacacacgtacgcaattctagctntattcttcttttcatctatatattcatgggggttcttcgtgtaaatcttatattgattttctcattctcagcctgaagttggtcatcgtgatgtcaatgtgcgcaagacaaaggattctcttggctgtatggaatctatatattcagaagttcagcgtctc

SEQ ID NO: 62361 - DNA, 447 bp, Oryza sativa
  unsure (1)..(447): unsure at all n locations
ntcagtaattcgactggttcanactgatcagtcagctcttatgcataagccaaattaattgcatcaatagttctcccattttcaatcaaaactccaatgacacctgatgtccagaaacatgaacatgaggacttaattgtcatgaacaaatgttgctgacttgtaaaaacgaaaagagcatgcaagaggggaaaaggcacaaaagacgaaagacaaaattaaaagaatggagcaaagggtgaggcaaacaaatattgcacaaaaaataatgttcagttgcaatgactgttgaaactgtcaaaacaaaagcagatacagcagcagctaaacaataagcaatatgcttgttcaaaccatacaaaaatcatcattcatgtatgtgattantaataatttagattgcttaattgctggagctatacaagctgtaacaacatatcacgaact

SEQ ID NO: 62362 - DNA, 424 bp, Oryza sativa
  unsure (1)..(424): unsure at all n locations
gtttgattcagttgccttacaccccaagagcctcgttcaggtaaaaaaggttacctgaccaccaccaatattccaaagtaatgcaaccagctttttctctatcatgtttttatgtaactgagaatcaatatgcctttcaaagtattgatgcagtcatgctagagtaaaactgtacattccttgttcattctttttcttggcacaaccaatagaagtatccaaagcttcagtgtccttgttaacaaaatttctaatatcagtatccataatctagtagtcatatgtgttagactatcttgtggattgtgactntgctgcaaacacgtactcttaagcctctaatctatctntttttttaatcacaatcatataaaaatcaatcaaaatcttagaccgtaccactaaggcattaattatcttcact

SEQ ID NO: 62363 - DNA, 422 bp, Oryza sativa
  unsure (1)..(422): unsure at all n locations
tgttctgttattnntgggcgactatggcaatatgatttataagttgtctttgatggtaggactaatacatataaatttatgttcgatggtgaaagagttggtttgcattctatgactccagccgctgctttgaaagatgatcttgcaagacttgaatgtgaaaagaaagtgaaaagtgataatcagattattgctaaacatcttgcttcaactagtaaaatagaaccaagtaccacatagaatgaacataagttgaagggtgcttcgttggcttctaaatataatatttgtgcactagatgagccagattcttgttgctatgctctattttgcaaagatcctatactcacattcgctactgctgctagtactttatattctttgccacccactggtactcaggaatatgagaatggttttca

SEQ ID NO: 62364 - DNA, 401 bp, Oryza sativa
cctgaagcatgcaagctttaaacttttaggaaattgtttatttttgttgtgctcaaaagcacttgctttcctgatagcattataatttaggacaccaaagttgtgttcagtgaaatggcatgaataagattggtgatttcttacagtgacttggtacctactaactgactctgaatatgatgcattcagagcaactgatcatcttcctcagttgagatgctgaacccaacacaaccaaactgaagtacagaacactgcatcagctgaaaaagctacttgtgatgaagtgatgaacatgaagtctaaaaacacagatcaattgaacaggccggccaccgacgatcggatcatctactgacttctgcgatgctgtgcagcgacgggcgccattgacgatgcct

SEQ ID NO: 62365 - DNA, 463 bp, Oryza sativa
  unsure (1)..(463): unsure at all n locations
tgcatggtagagttacctgacaagtctagaatctccatcttttccattcctgagaatatgaatgtgaatggatccttttcatctttggttgccgtatagtcttgatcaatcatcttgattacacgaagcttctgtatcttgttatgctgccgtttccaaatatgtctcaagttgtgcggtttcactccctcaacattgagctccctgacattgttcatttcctcaatcatctgtggggagaaaacccactgtgtgtactgtaggtctagcacccacaaaccatgaaaacagttccaagactgaacctcctctccagcatcaatgttcagatcaaggcagttatcaagcccaaggaatctcaatccgcggcaacagaggaaaggaggtgaagcacatctaaaagtacagaggctaagttttagcactctaagggtctctgcatgtngaaacatgtcattataat

SEQ ID NO: 62366 - DNA, 381 bp, Oryza sativa
  unsure (1)..(381): unsure at all n locations
agcttcagagatgcatctatatgtgttngtttacttgnttcgcggattgattgcattgccttttgcctttgatccaaaggacaatcttaacgagtacgcacaaccaattcggataattaaacaccacactactttgtgaacaattaattaatttgatgttgttgatctgtttttcgtttctggcaatagaaaaattcagacaacttggaaatatatttgcacggtaatttatgatcaaaccgacaaactgctactaaggccaaagcaatctgcacaatttttttttaaaaaattaaaacctctcgtgcgcgcgtacgtgcgcacataacgtagtggaagtacacagctcgagttcttcgatgcatncaagaacagatcgat

SEQ ID NO: 62367 - DNA, 456 bp, Oryza sativa
  unsure (1)..(456): unsure at all n locations
tgaaagaccgtgaacancttgaagcgtctgtnttttattttaatcgattaanaaagtgttaattttaccaaaggtagcgtgtttttaatatctactcatattaattatatgcattaaaatcatgtaaaaaatgatgaatttcataggaggcaaactagccagctcacaattcttttttcccctaaatttgtaaactttctttttgtcgtttcttaatgaatctcaacattatttaaagggaggcagtgaggaattttaaccaagttttatttttatggcttccatgtcaaattttgctgaattttgttcaaagtttcaagttcaatagagttttgaaatgttgatgatttggtcactctgccgccttcaaatttgtttcataactaaatttggagaaggaaagaatgccatcagatccttatantccagtcatttgtggaatatttgtgttgctat

SEQ ID NO: 62368 - DNA, 400 bp, Oryza sativa
  unsure (1)..(400): unsure at all n locations
tttttcttcttgtctctatatgatagccctcgggactggatgcatcaaaccttgggtatcatcctttggagctgatcaatttgatgacagtgatccagcagacagagtaaagaagggctccttcttcaattggntttacttctgtataaatatcggtgcatttgtatcacgcaccgttatagtttggatacaagataactcaagttgggggataggatttgccattcctactatatttatggcattagcgattgcaagnttctttgctgcctcaaatatgtacagatttcagaaacctggtggaagccctcttacaagagtgtgtcaggttgttgttgcagcattccgtaagtggcacactgaagtgccacatgatacatctcttttatatgagggtgat

SEQ ID NO: 62369 - DNA, 204 bp, Oryza sativa
cttccttctacttcttacttctctcctctttactctctcctctctctctctccctccctccctctccactctcctcccttcctccttcctctcttcctcctttctctctctctttctcctatcctacctcttctctttctctcttttcctttactcctctcctcccctgtctctcctccttgttctcccttctctccctccttc

SEQ ID NO: 62370 - DNA, 458 bp, Oryza sativa
agcttactgaggaaactgcaaaatgtgtatatagatttctgacaggactggatgctgatcgcctttatttatttcttcctcttcaatctcttggaaatctgacatactatttgcacttgaccgtgaaagctgcttgcggttctgctgccctgatgatgaatgtgcaaaccttttccgcaactcatcgaacctcaagaagtatgtggataggccaatcttctgacttatagcatcagcaacagcaaaggcatctcggcccttctcccggcttgcattatacaggacacaagcacctataacaacggcagccaatccacgaacacaagcactgtaagcgttacttgaagcaagctcgataatgtaattcagatgtactgctgattccaaaaggcaatctacggcattagcacaatccacaagccatacaatgagtaaccggagaatgactggctgaatat

SEQ ID NO: 62371 - DNA, 398 bp, Oryza sativa
  unsure (1)..(398): unsure at all n locations
ctgaagacttgagaacgttcttgtatnctcctattctcttgaacataaccctcaataaaccctaatagaacccaacgattnacaacccatatattgtgggctgcctatattgtgttggagaagtcacctatccatcaattaatattctgatacacaggctcaacccaaacagatgacccaccatacagttaatcctagaaagaatatgaataatcctataacggaatatgaatttctgatagtgaaccctagctgactctatgattctcaaacatattcaggtctcagttacaaaagtgctacattgcgacggttgagcaatcgttttactctggttgagngtcacaaatagactggaaactgattgctcagtaataaaacccaccaaatacaacaac

SEQ ID NO: 62372 - DNA, 447 bp, Oryza sativa
agcttgcccgcaggtacaccaaacacacacttatcggggttcagctttatgcgggcggagcggaggttctcaaaagtttccgctagatctgaaagtaaagtttcttggttgcgcgtttttacaaccaagtcatcgacataagcctcaacattacgtcctatttggctacccaaagaaattcgagtagtacgttgaaaagtaggacctgcattctttaacccgaagggcattgatgtaaaacaataggttcctacgggggtaatgaacgcagttttctcctcatcctccctagccatgcgaatctgatggtaaccagagtatgcatctagaaaacacaaaaggtcgcaccccgcagtggagtcgacgatctgatctatgcgaggcagggggtaaggatccttatgacatgccttggtaaggtcggtgtagtcgatgcacatccgaagc

SEQ ID NO: 62373 - DNA, 461 bp, Oryza sativa
  unsure (1)..(461): unsure at all n locations
ttcatcattntccgctatcgtcaagacaaaccttaaaactttccttctcaactatttcatccatagaagcgtatctgacaactatgtcatcatcgtttttttcttccaaaagctagaaagggcctacctagtgcttgcatttcggggtaaagtagctttccccagctcaataagagctacctacaaacatggaatgccaatgcaatgatcagaacttccttgccaagaacatcctgatttattatcaggctttaacctttgtaagtgtaagatgagacggtgagagtcttatgccctgtttgggggagcttaagattctgagaatctgttggttggtagccagcttctgagaatctgggttttccagcttctgggttctagttcattttctggattctacaactatatattctcataatctgggtgacaatttggactggttttgggagctggagattctg

SEQ ID NO: 62374 - DNA, 429 bp, Oryza sativa
  unsure (1)..(429): unsure at all n locations
agcttagtagctatatttgagatggaggttattatgtatgaaaactgattcngtctaattggtagggtcaagttgagtcctcaccaggaaaggagaattttagaagaaattttgcaggaacaaaacttagttctggtataaagttttttggatgctgtactaatattgtcatcatttatcatacttttttgccacattttaccttagttgtggtcaataaaaaaataagtcacactttagctagaaaaaaagatgtgccacactttnttgagttgatgacatgtgggaccatgagaaataagagaatcttgccacaagtgtaatcataaaccaaacaatgagttgatttgatcaaacttgtctaaaatatgagatatggtaatttttgacaagttatggagtgaaccctcctttcttctaactggatgt

SEQ ID NO: 62375 - DNA, 424 bp, Oryza sativa
  unsure (1)..(424): unsure at all n locations
ttggntgggatattatatttattatgatatctttatataaagtattatcggagtattagccgatacatgctagatctatctgatcggctgtgctataaacatatataatcctgttattaatatatatttcgatctaagtgatttatactgtctcggcatggtgaccgatctatcccaatcacttgatttaagtatatattaatataagaactatatatcgttaatatctacagccgatcgaatagatttagttccttactatctatttataaccgccgatcgattcatatatgacattggctcaaagataaatgatatgtcatcagcacctagccgatcggctatcatttatagatntaaccacgaattctttggctctatttcttgttgattacaggatcaaatcaactggcacgctcataca

SEQ ID NO: 62376 - DNA, 443 bp, Oryza sativa
  unsure (1)..(443): unsure at all n locations
agcttaaccactattccttcccggattgtctctgatggatcggttagtcttgttaatttcgtcatcagcttatacttggtttggtggagtttgtgtgtttattgctttccttccaagttgattgcgatgagttgtacaaaattccacacaaatttatacgtctagatgcaatgcatgctggcaaatttctctccttcctctgatgattggtcagcagagaagacaagggggatatcgaggaggagctatatgaagctagacaagataagaatggcgtgcacagtgtggactgtggagatgcggtgtcgatatcctacacaaaaaagtcatttggaggcgtgtggaggcctcacgcccgctctggaccagattgccctatttctctccaccacaattatcnatcttcttttgtttccacctttttacatacttatctgtcttcg

SEQ ID NO: 62377 - DNA, 466 bp, Oryza sativa
  unsure (1)..(466): unsure at all n locations
tacacccgacggatggccggcaactacggttccgtgaacattagtttatcacttctccacaacgccatagaggccacgatgcacatccagataaccgaagtgcgtggcagtgggggcttcaacatgtctatggcttgtcgtgtcggtcaaatacctgatgaaatcaagctctttgaaagtgttgccattgccaagccgtgtcagctaaacaagaggtttgtgcttgccattgtcaagcgcggcatcttggtgttagacttgaaggttaagcggagtggcgcctcagaggaggaggagccagtctgtatgctccgtggcttgaaggcaaaagcacatagccaagtcatcctacctatgatatttgattgcgccaccattttggtcagtgtgcattggtcaaatctgccggcccncatgttagactagccacaanggtctttntttttctttggtagcttctttatat

SEQ ID NO: 62378 - DNA, 435 bp, Oryza sativa
agcttgtgggacaacatgacagcatgaacactacagtttgtgttcctataaaaagtagttatgcctactacaggatgtgttccgagtatgttgtgatcctataaagttagtagtgatgtcttaagaaaaaaagaaaatgcatacaatagaaagttgggatcctgctcgtgggacgatgtgacaacatgaacccacgaccttgaattcctcgtccccaacccctccccccaatcctccgccttgctcatcccgtcctaaccgcctagtctcatcaggaagcggcaggatcgacaatggcattggttgtgacaaaagagaccttccctaatgaagcgatggcggtggcaggaggaggggcagtcaaaagcaaggttgtagctggcgtacacaaacaagatctatgaggttgtggaggaagccgtcatggataagcct

SEQ ID NO: 62379 - DNA, 445 bp, Oryza sativa
  unsure (1)..(445): unsure at all n locations
tgtaggtttagganaaccctactcaccaagttagaattatactcattgtactcttcgtccacattgctgattaattcatccatgttactacaatttttgaggtatgtcttcgattgaagagaagcaaagaaacccagatcaagcacattcatgtctggtgaattaaggggctggttcatgatgcgtatgtctaggcctacttgggccaccgcgagggcaaatgcttcgtcgtttggcagaatatgtgtcagtgcattgtcttgctgaatccaaatggtcttccctacatcttctctaggccaacaagaggcaatagctggaataacctttgtaatcaagaaagccctacttgtttctctcgacaccataatagattntgtgaccaatgtacccttcggcctgttgcgactactcctttgtgctggttcctaacatatagagcaaa

SEQ ID NO: 62380 - DNA, 433 bp, Oryza sativa
  unsure (1)..(433): unsure at all n locations
agcttgccaattctttcaggtgttaggatttgctntgcagcctttcgaatgccagaagcttggagttactagctcattcaggggaggtatttcaggacctttttcttctgataaatttgtatcaagtcttgtttcctgtacttgcattataatagttatgattatgataaatagcacatgtagaacaaacttgtttcttttcttggtactattcgtcttatcaattcaaaagatggcactcaaaatcacaaagaattgtgtgtgcctgccaatgttgcatccctgtttgctatcttactgaacagaatggggaagattcttgctaataaaaaaaatgaaatggttctgctaatgggtttgtttcactcttgcctttgtactgcctatgtactctgcaaatatttataagtagggaacatatcctatgcacact

SEQ ID NO: 62381 - DNA, 459 bp, Oryza sativa
  unsure (1)..(459): unsure at all n locations
gtcattatgtctacttaagggtcctgctatagttttctatatatctggacacttcaatctgttcctttcaacttctcgtgccatcccataatttccttgggtccaggaaagagcatcaaatacccgtccacacaagtttcgatgaatctcatgcttatccaagtgtgttcccaaggtgaacctagcattctatgttccttatgttctcaaccttgacctatttgtgttgccttgtccatcttatttggcatgttcaaatatacccggntaatctcaaatgattctcaaatggttagttcaatctcatcgtggtttaacttatgattgtgtcctttcagcagtgatagctgattcattcagttgttaccacaggggaagaactcttcttttaactactctgctgcagagccaaagcttcctttcttttcanatgcagtatgtgcctatggtggatttttc

SEQ ID NO: 62382 - DNA, 405 bp, Oryza sativa
agcttgaagccctcatgcattctctggtatttttgacatggcttcccagcagccttagctgccatacagtagtaatcaccaagctgccctttgtaggcaagcagagtaccggtgacatccacagtgatcaaccgcagcttcgaaatgagcgacatgttttgacgatgatcttcttctgagcagcaaaaaaataaaacgatgaaaattctacagtggcggatctaacatggggaaccatcaaactgttactactactagtattaaggttgagggcagatctctataacagaagctagaggctaacgcaaatttggagaagaaagacagaaagtgcgtgggttgagaggtgtgccgtgtgcgtaacggatgcgggcagaaggagcataacgagcgacggatggtgat

SEQ ID NO: 62383 - DNA, 458 bp, Oryza sativa
  unsure (1)..(458): unsure at all n locations
ntatagaaggctcctgtgaaatcatccggcccatgtgctttatccccaggcaattgttttaaggcagcaagcacctcctcttcggtgatgggcccgttaatcattgccaagtctacaagtggcaactgcaaggcatcccaatcgaagtctaccaggcatggtggcgggcgcgctagaaaagcttcgaagtgatctttaatgatggccgctttttcctcatgcttgaatttccaaatattccccacgcggagccgttgaataaatttttttctccttcgcgcattcattttaaggtggaaatatttcgtgtttgcatcgccttctttgagattggtgatccttgaagcttgccttttgcgagctctttcaattatagacagtcccatgactctgtccttgaggccccgtcttaggttgagctcagcttgactgagttgtcttgactcttgtgctatatc

SEQ ID NO: 62384 - DNA, 456 bp, Oryza sativa
ctctgagtcacctgcggcatcaagcttgcttcattcttgtaacatgacgatgtccttggcttgatgaccactaacccatggtgtcattcattagcctcatcatagtgggacctattccttttcacacctcaaaggagaacattagtctcaacaaatcggttgtcatccttcacttgaagaccaaccggttgcatatgaaagatatggatatgtttgttgagtattcattaacttcacaagtgtcatatactcgtatgcaagctcaagtgcaaagatccgatataaataataggtgaacaacatggatctagaacatgcacaataaatgtataggatttgctccccctaaatatatgcgtacaaataaatatacaagagatgcaagtgtatgcataattaaagaatgaccaatggggggttatcctatacatatagagaaggcatatgtagtaatga

SEQ ID NO: 62385 - DNA, 453 bp, Oryza sativa
  unsure (1)..(453): unsure at all n locations
ttgattattctaagtcctaccatagtgctgcatgacattatatttcgtgctggntggccaagattaaactatttggataagggaagagacacttgtagtactaagcaatgaaacctcactaaatttggtcccctagctacttaaggatcccgttagctccttgacaatctatggcctttttggatcaatgccattgttagccttgccttcttgtctctctctcttttttgccatttttgcgatggcaagattagtaaaggtgcaagtttggaatgttgtcaaaatttttggcataagtatgtaggttagtatttcgcttggtgccaaaggatgccaattttttttgttatagatcaaatgagtaccaattgttntagcaacaccaaagaatatntcctactaactcaaatatcttatcgaagctattgtcctaagtcctgaccacaagtcatc

SEQ ID NO: 62386 - DNA, 429 bp, Oryza sativa
  unsure (1)..(429): unsure at all n locations
agcttccttgtcctgagtgctatctagtttatgatgacaaagttgggttatagagctactcatcagctaactctccttgtcattttcagtttccccctctcttcaaggtttcaatatcagctgggttatcttgtcattgttgcttcatcctcggcgtagcctgcgattgattcactaatctgccatataatgcatcaaagactagtgttggttgagtatgtagcttagaattgcatgcatgaaactgtcccattgatgtgtatctcctgaaacctaaatatatagtgctgtcatccatcactgcacagaatttaattccaacaaatgtatatgacttgtataagcagaaaaattctgtgaacaattttctcttctatctangaaatttctaaatccatggactaattaattattctattatgtacataa

SEQ ID NO: 62387 - DNA, 464 bp, Oryza sativa
  unsure (1)..(464): unsure at all n locations
nggccgatccttctgcanatataattatcggtgctgntgttgatgaccggtacactggtgagattcatgtgacgatcattgccacagggtttccacaatcctttcagaagtcccttttggccgatcccaagggtgcaagaataatggaggccaaagaaaaggcagcgaacctcacctataaagcagtggcagcggcgacggtacaaccagcgcccgccgccacttggtctcggaggctcttttcctgaacacggttcaataggaaaactagtagtttgtgtaccttagattctcatggaattactgagttggcgctccaatcaggcttctatgtgttattctttttggatatgtaaacacttaacagttacacatagtgattagcttcacttttattgtatgtatcatctagatgagggtgaggtcttcaggagttcaacagccgtcacgaattttattgtatg

SEQ ID NO: 62388 - DNA, 435 bp, Oryza sativa
  unsure (1)..(435): unsure at all n locations
agctttccatgaagttcttgctcgccaagttttccatgaagtacttgcacgcccaaatcagagttcgcatgaagtcgtggcggccgtcagaagttggcgctaccctgcaatccgaatccaccccgcgcgaatcctctcccctttggatcctctccatcattcctgagtaaaatgcgagtgcacgcgtctccggggtataaagaagaggaacatgaactcaagaaagaactcacctgatagtttagttgacgtgcacgagcgcgggtaataggaccatcatgctgtacttgggggacgtggatgtatcgatggtgttgatgtcctcatcaataaattagaaagaatatatgaaaagttatataaaaaagtaaacatacatccatcaatttacacttaaatagatgatccattantttcaaccattaaattaattta

SEQ ID NO: 62389 - DNA, 425 bp, Oryza sativa
tcggctctctcttgggaccgcacttatatattatcattattggagaatacctcttctctcccgatttgaaccccatctaatcccgggtaacacaccgagaggagtaatttgagactaaagatcgtcatttgtagtcccgatttatatacccgggaataaagaaatatctctatatctggttggtaacaccaaccagaactaaagatagtgctatctttagtcccgattggtgttatcaacctggagtagagatatattttttttatttgcttctaaatcattggttttagctgtttgcacttgtttttagccgaactcatccacgattcatcttctaacttcctatataatctacaatcccaaattatactaaaataacattattcactattcccaattattctcaacaacaatatgtttgttca

SEQ ID NO: 62390 - DNA, 448 bp, Oryza sativa
  unsure (1)..(448): unsure at all n locations
tgccgtcagttagcagaatggcgtatccataatattcatatcccggcgttatccgtgaacttgtcggcgctgcactttcgcagtaatcaactgcctaatcaggtgtctgatgcaatgcacgcctgtggtattgacggccaccagctgacggtagaaatcacggaaagcatgatgatggaacacgataccgaaatctttaagcgcattcagatcctgcgtgatatgggcgtgggcttatcggtagatgattntggtacgggcttttccggattatcccgcttagtcagtcttccggtaacggaaatcaaaattgacaaaagttttgtcgatcgttgtctgaccgaaaaacgcatccttgccttacttgaagccattaccagcattgggcaaagcctcaatttaaccgtcgtggcggaaggcgtcgaaaccaaagagcaatttgagatgc

SEQ ID NO: 62391 - DNA, 464 bp, Oryza sativa
  unsure (1)..(464): unsure at all n locations
atcttaagccactgagatgcaacttgaaatcggcaaatgaaggcattttttttatgagttatagagcaggacctcagctctctaaagtcagtaaaatcacttagcttgaaaaacaactctaaaattctggatccaaataaaaccacaacacggtgatacccatgctaaaataagttcattttgcacacataccgatacaaagttaaaaggaccatggtgtgtttactttagcaaatctcaatacaaccattactcaattcatttacttctaatacattattctctatttctacaaactcagatataatgattactctaaaaataaatttattttgagacagatganagaagctgaaagtaaacttattacgggacaatggaagtattttggtttgatgctttgatcctctttcagacttcgagcatgagtattgtacgtgtcttctctgtattctctccaccat

SEQ ID NO: 62392 - DNA, 366 bp, Oryza sativa
  unsure (1)..(366): unsure at all n locations
gcttcatccgcaggaggtggcgcgactttggaggccggtttattccgaggtttccatccggagtggctggtgaaccctgtggtcgttcccaaggcgaacggcaagcttctgatgtgcatcgactacaccgaccttaacaaggcatgtccttatgacccttacccccttcctcgcatagatcagattgtcgactccacagcggagtgcgacctttngtggtttctagatgcatactctggntaccatcagatttccatggctagggaggatgaagaaaaaactacgttcattacccccataggaacttattgtatacgaaaatgccattctggttaaagaatgcaggtcctactttttaacgtacta

SEQ ID NO: 62393 - DNA, 409 bp, Oryza sativa
  unsure (1)..(409): unsure at all n locations
agcttcacgcattcgacatggccggntgtttattgattacaattagnatcgcagacaaatatgcgttgcccacaaatttggatctcaacggattaactgcatttccaatttagtatactcaaatatagatggcagattcctctaaaaaagatttatggatggcagataatgatcgagatccaagtttggccaaaaaaattatttcgacccaagtatggcctacaaaacttacggtaatcaagatcggcatttggcccatataacttctgatcagacaagggaaagtggcgcccatcataaatcattattgggaacagcctagatcgccaacctaaattggatttggatttgctaatcctcccgtagtcccgtggggatccttgttttcgccgcctgccggagctcctca

SEQ ID NO: 62394 - DNA, 460 bp, Oryza sativa
  unsure (1)..(460): unsure at all n locations
ntaacanatcctatatataagtacagcacgaaatgagcgttactcttttgatgttaacgagtgaccagttgacgaattntcgccaccaattttttgggatattaattaataaggtttgcttgtggtttgtattttatttgaaggccccatcattttctaattaagatatagactttatcttgatttctgttagcatactttttaaactactaaacggtgtgtttcatacgaaaactttctatataaaagttggttttaaaatatcaaataaatctagtttgtaataattagtactcgactaatcatgcgttaacagcttgtctcattttacacgctgaaaaatctttatcttcataagtcgaacctgaacgggacctgagacaagggacatgattaatgtgatttggattgtactatacaacaaattacctcaccacaaaatttatagcaacataaactt

SEQ ID NO: 62395 - DNA, 438 bp, Oryza sativa
agcttctagccaattcctcagatccaaatgtctccattgatgatataaaaaacccgcatagcggctggtttttcatctcttgggtatccttggaaataccaccataatgtgcatgctctaaggatggagtaaagatgacatgatccactggttaataaaaaaaaaacactgtgagttgaatcaactgtattatccaaccaaatgatcttgcgtaagttaaatttttgaagacgtaaatagctgcactagcttgtcaattgtgtatttatgtgcaatagacataaatatttgacattttgggcaagatctaattaaaactttgatattgctatgtatccaatgcttaattaataaagcatatattccatagaaacaactctctcttaatagcagggaattagtagatatccttgtagaaaatgtcctactatataatga

SEQ ID NO: 62396 - DNA, 441 bp, Oryza sativa
tgatgagagtgaggacgagaagaagcggcaggaggaaccttatgttaagttctatggtctgcgcaaggcgatcaaggaggtgctcggtgacaacgtggataatgatgttgtctctgaccgtgtggtggactctccctgctgtctagtcactggggagtatggctggactgctaacatggagaggatcatgaaagcccagtctttgatggactccaacatggccggctacatgtctagcaagaagaccatggagatcaacccggagaatgccatcatggacgagctccgcaagcgtgccgatgctgacaagaatgacaagtccgtgaaggacctgttgatgctgttcttcgagactgccctgctgaccttcggtttcagcttggaggaccccacaccttcggaccaggatccaccgcatgctcaagctcggctgagcatcac

SEQ ID NO: 62397 - DNA, 422 bp, Oryza sativa
agcttataagctgctaacactcaaacttgtttatctaatttaagttgtgtgaagcattaatgaacatcagggaacagaaaggtgaacttcttttattcgtttattattcagtcaccagaagcagaaggctaagacaatatacctcaagttgtgctcgcatggtttcaagcaaaccaaccaaacctggttgccgctgagtttgggattgagtactctcactcttactacgtccgagtttcctcattaatttggttctcttctctttcttcttttctttctgtggaactataagtcccctgtaggtatggaaataaggtaaatgatatggtatacctggaagactttcaatcttctaattggaaaaaaaaatgagcacaaagaaatgcataagcctaccctgaagcaccagcagcagcaacaag

SEQ ID NO: 62398 - DNA, 460 bp, Oryza sativa
  unsure (1)..(460): unsure at all n locations
tgcttgatacatacagatgtctagaggcccttggataggtgaagtgctctggcaaattatctgtctgtcagcgagcagcagtggtctgagtttggactttggaccttttgacctgatccgtattgtatccttattgcattggacaacgaagatttggatgtttaacttgattgtcgtggatgtcaaaggtagtagttgggagatgtcatgtcagcaaggattgagctcaaaggaaagcatgagtgacatggaagtgagaatgtattgggcagttttttcagggtctgaaaaggtggggtccaagagttctaatggtagttgtattcctgtattactttcaggattcttttcagtggctctttaaacatgcttctatgttcttttagcacaagattgtttagcaagaacatggagttaccaaaanaaaaagaagtaatgatctaatatagttttttggagc

SEQ ID NO: 62399 - DNA, 434 bp, Oryza sativa
agcttcaggggtcggacctgctcaccacttatgacgttcagtccatcaaggacctgctcctcaacgcattccaatggcccccgcccaacatggacttcttgtgctgcccaaatggcgagtcttgtgctcaagccgcccccaatggcaccttactgctggcgacatgcattgggcgaggcacttttgctcgagtttcgatcgaaattgaaactccaaatcaagttctatccgaccaactccgacaccttcctgacataacatttgatagggtagtgatggagacaaagctatctaagtgcatagcgaaaatcacaacctgcagtgttgattgtgaagaacctcaggaagaaatgcattatgatgctttcccgccatgcgagcacataatttccctgaacatgtgccttctcgacaccatccattgcttctacatc

SEQ ID NO: 62400 - DNA, 466 bp, Oryza sativa
  unsure (1)..(466): unsure at all n locations
tcaataggtttgttattcagtccgattgcatgcatgttgtaataccatgttcaatggagtattttcgacaacgatgacgctagcttgatataaacgaagaatgtaatctactatggagagaattttatagcatttctattgaacattntaatagggaagcaaacaaagttgctcatgaattggccaacgtagcttttagtagaaaagatatttgtattgggtccatgaacctcctgactttattctaagcactttagttaacaatgtaactatgtngttcgaacaataaagctaccaaatgacattctctctaaaaaatagtaaatttcactttaggccacattttattaccaatgtttcactctgaaccaccctntcactaatgtttttattntagactgggtaatgtngcaatttgtgtactttgaaccacccgattctctttcatgcatataaacgatctcag

SEQ ID NO: 62401 - DNA, 447 bp, Oryza sativa
  unsure (1)..(447): unsure at all n locations
atgcaagcttcgaaggtcattntattatatgctattatatatnnctaaggcttggttcttaatagaagatgtacgaaactgagtttatgataaaatggtacaaacgagtagaaagttaaaaggttgaaatagctttcttaaagacaagctaataaacaagtttttttaataaaaaaaaagtagtgtaagaagcgtgtctatgttaatcaaatccataatataatctgttagcttaaaaaaatcatgaaccaataaaattcatgccattaagaactaattaatcaaatccaaatttgtctcgccaaatttatgacggtcagggaggagggaaatttaaagaaaccggcgaggacaaattaaaatgtgaatacatacacaacanaatggtgaccttgatatacatgtactttttttaaaagattacatggaagacgtagacacacacag

SEQ ID NO: 62402 - DNA, 447 bp, Oryza sativa
  unsure (1)..(447): unsure at all n locations
tgttcgagcctatntatagaataaattcatcgatatgtgtatccttaaaataacagacaacttctaaaaccaccagtagtacgcgccgcgggaggatgtgcttaactaccgagattgcatgtgattcgatccgtttaagattcccgagccctcattagttgggtattttaggtcatcacaccgtgaatccaaaccttgatgaaggctccatcagcaaagaaattgctagtttaattttgttgtacgacacaagaacaagtggtcgatcgattagattattagcacacatatcagagacaatgaaccaagagtgtagtacgtacgtagtacacctcatattgacccggcgatgtttttgtggtactagtactgcatcccattaaatntgccacttgctcatatacaaattaaagattaattaacaaggaagttgctgatttataaata

SEQ ID NO: 62403 - DNA, 441 bp, Oryza sativa
agcttcacaaagcgagggtgagtccgcgcttaagaggcgcgaatatgacatcctcagaaaggcgctcggaaccaaagaacatcctgaccggactcggggaattggtagcgatgtgccctggaagcatggactcccgcagtacagctcccaatacaggaaacggaaagtctccaaggaagagagggacgttcgtttgaaggccgaacttaaggttgaggtcattcaagaactagaagctagcatgaatgctagggtggaagaaagggttaacaaggtcctcgccgacatgaatataccctgaggcacaacacctgttgtgcatccaactcctcgtgcacaacacgacgcgagtccgtcacagcataggagtagttgtgcatccacagaggtgccagcccctggtcttccggtcgcaccactagctgcagtggaccacatcga

SEQ ID NO: 62404 - DNA, 421 bp, Oryza sativa
  unsure (1)..(421): unsure at all n locations
taattgttaatcttatacaaacataatcgatcaatctgatttaattatcgcattaaatgattaactaactaaagtgattaacgcgtgcatgtctaattaatcaaatgaaatcatatcacttttttattctatttttttgatgattaagtggaaaagggacacgtggaggggtgaagtaccagccattccttgtggccctgggcgccctcgggatcccagagcttgacggcgatggcctgcgggcggaggcccggcttgacgccgtcgccgacgaggcccttgtagaccggcccgaagccgccctcgccgaggaagttgccggagacgaacccgcgggtggcgtcgcggagctcggcgacngtgaagacgtggaggttggaccccaccatcgacaccgacaggtcctggttctgcgcccccg

SEQ ID NO: 62405 - DNA, 404 bp, Oryza sativa
agctggtgcgctggcatgccgtataacggttagtcgatactatgctgaggcacccagcagattcagtacagtggaggacaatcgataggatttaccaggaattctcaaatgacccaagaaacatgcgtttcgcaatgtgtacggacggcattaatccttttggtgatttgagcagtcgtcacagtacatggccagttctgcttgttaactataaccttcctccctggttgtgtttcaaaagaaagtacattatgcttgccatgctcattcaaggaccgagacaacctgtcaacgatatcgatgtgttccttgaaccgataatcgatgacttcgaaaggctatggaatgagggcacacgaacatgggacgcatatgcacaagagtatttcaacctccatgcgatg

SEQ ID NO: 62406 - DNA, 458 bp, Oryza sativa
taaccaatgtaaacaaagaagaaattgacgtttgcttatatctgggataacaccggatagaatataaccagctcacggtcatcaagaaagaatgtcgacggcagcggcatgcatgacaggagatacttaacgatcttctccaccgagcaacagcacaacccaagtcatattaacatgtcgcatgaatctggcaaggctattgaatgaagagcaccctgagttaaatcttaacaagagggaaacatatcaggtacgaataaaggttttatcctaatgaaattatgttgctaggctatcgagaaaaataaattgtatttaccattagcttccaggtgttgatgatccatcaatatgaccttgttttctttctctccagataagggataccgttcctttcagcagaattttgtgatccaagctgacaattgcctctagaattgctggcatcagatgtccta

SEQ ID NO: 62407 - DNA, 426 bp, Oryza sativa
  unsure (1)..(426): unsure at all n locations
agctntagcaacaaggtcggcatggatcttatgagctntgngngagaatgatatagcggcgacctctctcctccaccaccgtcctctcctcgaccggcgcatcgagcangggattggagcggtgcggtctggcagtgagctcctagacttatacgtagattaggtcgaggaattgcatggatccattggtacgaacgaagagcacagggtgggatggtgatggagtatcggagggcgaggtggcagaggagcaattgagccaatcggttgagcaacagggagagggttcttctggcgacatgatctgtcagcgagagtgagtcctacatcatgtaaaggatgatgaaatgggtactgaccagtgggcccactattttatttatttatttttcttgccacactggaaatgcccatgtcagcaaatct

SEQ ID NO: 62408 - DNA, 437 bp, Oryza sativa
  unsure (1)..(437): unsure at all n locations
tgaactcttcaccagnttctctgtagttcagcctcactatgtaaaactcgaggggaagagaagtttgatggagctcttcctttgtatcttccattctcagtattggttagtgcatttgtgttgatctttgctagattcggcctccttgcacttacaccagttttgcggttcccagtggatcgtccctttggaacagcttcttgccacccttcatccgacgtgtactcttcagtaaaatcatcttgaggtataccgcttaaggtgttacctggtatttcttctttcagtttctctttctgaataaacgttccattctctttgacttcagaactttccttctcaattaatgaatggtcacttttaggtggtgggctcccttgatcttcatcatcgactacttcagatggattntgcccggcacgaccttngatctatta

SEQ ID NO: 62409 - DNA, 262 bp, Oryza sativa
aaaaccaacgccttacctggagacacttgcaatgcatgatttactattaatttcaatcatatataattacgcggtccagagctaataagattaaccatgcaagctaaaactgatgttgcatggggaacattaatgcgatatgcgttacctttagacgatccatctggtcagcatactcgtgaaagatagctgttcctgtatcatatgcttcatcgagcatacgagaagagctacgaactgaatgcgtggcctgggctttatc

SEQ ID NO: 62410 - DNA, 403 bp, Oryza sativa
ctgctaagggagccgttgtggacaccgacacaacgaccgtccgccactgatagctatgcaacacaaccacacttctctcagaatcgcatgtttcttgggttcggcaggatactaccatgagttcatcgttaacattttcaatatgactcgataccatgacacacttgttgtataaagaagacaaatgtgtgtggaccccgccatgcgagaaagcctctctaactctcaaataaaaggttggttgctcacccatgttaatcttcaccgatactcgcaaggacttcatggagatttgagacgcttctcgccaacgattgtggcgcgggctcatacctgaaagcatgtgtgtacctatgccttccgcctgttcagtctctgaatgcaacctaccctcccctgattt

SEQ ID NO: 62411 - DNA, 440 bp, Oryza sativa
  unsure (1)..(440): unsure at all n locations
agcttcgnggaagctcaccttgccttggtcctctataattccttttcttccccctcatcttcctcgccccttcctcagctctcgatttctaaagacatcgccatgatgaagcttgcacatttgttcggctcttcttcttcttcgtcttcgtcttcctccaagaagaggaggaagaagaggaggagcggcgccaagagctgctccttcggctccaccacgtcttcgtcgtcgtcgtcgttggcggcgtcatcatccgatgattccgccgccaccacgccgagatccgtgttgccggcgtcggcggcggcgtactcctccggcaccaaanaaccggcggcggtggccgtgacgcgggaggacctggaggtggtcctgcggaggatcgtgtctagcaaggaggagctggtcgcgatgctcgccgaggcggagtgcgccgggga

SEQ ID NO: 62412 - DNA, 450 bp, Oryza sativa
  unsure (1)..(450): unsure at all n locations
ngaccataccgcatatgtgctgaactcctgcttggctttgttctgcatcaaagaaaattttatttgttcagatttggtttagaaatgtttagcaatgttgtgctagctagcaattcagaaatgttcagaaatatttgtttagattagttctgaaatgttcaaatatgttcggaaatatttgtacagattatttctgaaatgttcagaaatatttggtcagactagttcagattatttcttgaattcgtataagttcggaatgttgctatgtatgtttttcagatgcacatgtacagaactttacaaatgtagtggcctagactagagcactgtattgatcatcttcttttagaggatttatgataaatattgtaagggctaaagggcatgacaattggtagtgcccctgtggggttactttcagtttcagtaagattgacctgtatatct

SEQ ID NO: 62413 - DNA, 413 bp, Oryza sativa
agcttgttgatcttgtcaactaagacattttactgtgcttgagacttgatcttgcagtctgcatcaacagattcacattaatgaatcagcatatagaagataatggcttttgaggtattgattattggtaccttcaacctcctttaaagccgaattcctctgtcttgccagctttgccttgtcattttccagagtttggatctgctcctttagttgagatatcttggtagcttgcactacattaacttcggttaatcaagattacagagataacagcacaaatcagttgggcagagtttgcgcgtaccttttgatgagccactcagttcaaaattggattcctggagctcagcaatctgatccctcagatcgtgttcattcttcttggcaagttctctggcctcgtgcaactg

SEQ ID NO: 62414 - DNA, 471 bp, Oryza sativa
  unsure (1)..(471): unsure at all n locations
cggacctataaaactcagctttgngttctaaatgctgaaactgaggataattgagagtggtttatgagacaacttcataaagctataggagatgttaacccactagctgtttgtacctatgcatgtaaggattagaaaaggttgcacatactgtgtttgagcatgctgagtagacggaatgcttctgccatctaatgaagaactttgtgaagaggtttggtggtgatgtgtgcacttagcagcaaacggcttatatgaaggagatttggaaaaagcacatgaaagaagttattgaagcttgcagtgatgtgcttccttggcttgaaacctatcatccattgaagtggatgaggagtggtttcaatccaacaataaagtgtgattacattactaacaatcttgcagagagttttaacaactggattaaggattacaaggcattgctaatttgtgaccatgcggaaatttaca

SEQ ID NO: 62415 - DNA, 433 bp, Oryza sativa
  unsure (1)..(433): unsure at all n locations
agcttcacttgtccgcgcattcgctatcgtgtaagttctgcattgtcgncggctttgtgggggtttgcccggggaggcaattcgccgttgtagacccggttggcccgcccagctgcttgtcgtgtcagcagctggctatactcgatgaccgacacgtcgccgatcatcctgcgggcttcggcttcagcctggtcgagagtcaacactgcaaaagtaaagggggtagctacattaaaggtcagacaaggcaaaataacaaagcacaggagtgtatagcaaaagaacaatcttactattcgttccctcagggagaaccaagttcggcaaactgtcaacttcttcgccttgatcaaccgtgacttgccatgactgggagaggggaaagatgcggagcatacataatttctcaccaagtcgcggcagctaaggcggg

SEQ ID NO: 62416 - DNA, 232 bp, Oryza sativa
tgggcttgagaacatctcttcaattactctaactcaatgttcttttgttttctatctccaaactcacatgcctgtatgcccatagtaataagctccagacctcttccaaaagggaaactctgttaagaaccaaccctttctgaatggtatggttttgccatcatgtattcacctagatcaaagaacccttggaatcatatatttgagaattattttatggtaatatttcttt

SEQ ID NO: 62417 - DNA, 430 bp, Oryza sativa
agcttatctcaccactgcgggacaggcggtataccgtgttggttttcgaggtggacgcggcacctgcactggtaacagacgtggcggacacagcgaatttcgtcaccgtgatcacaggcggggcgcccctagcggggcacattatggacgcttacaacgtattgataatcgtcccgtgtgccaagtgtgtcacaagctagggcgtgttgcaagcgactgccggcatcgacatgatgactcatatgttcctgatgaaaagcttggcggtgctgcaaaatactcctacggtgttgataccaactggaatgtcgatactggagccactgatcacataaccgggcatataaacaaatcgacatccaatgatagatacttaggaacagagcttattctcactggctgaggcaaatgttcgagtaatacacatatc

SEQ ID NO: 62418 - DNA, 354 bp, Oryza sativa
caaaacttgaatattaggcaatccatatgtgtacactatctgaccatgatttgtagcacagaactagtagtttacacaaataagtcgatctactattagaatagcatatgtgaccccaaatttactagacttacaattgcggcatttgcattatgtaaacacaagctcataaaactcggatgcggatcaggcaatatcctgtcaaagtgtgtcatacgttcaaatgtgaaaattgtgaggttcaatgttttatattatgaataagatacagtgatcgtattattcatcttgccacatgctcaccaaatgaagctcaactcatgccatgtgggcgctgacattgacactgagtat

SEQ ID NO: 62419 - DNA, 399 bp, Oryza sativa
  unsure (1)..(399): unsure at all n locations
cggtttagctcgcttttatctttctcgctgcataagcaanccattatatttttgtaagacatggatctggatgccaataattgtcgatagtgtaccctggctggtcctggacatggatctaatgcacattcagcttagaaattctggtgcgggaatttctgggcgtgacagctgcgctgttgacatgcggaccccacatgtcaacctaagggacctcggtagaccgatttcacagagacggtccacgggtctatggaagcataccccgtgtgttaaccgaggcgagtggccgacaaacggactccactagacatcactcgggctgcacacgtggaaaccacgcggttaccgagcgggcacacaaacactgtcaccacacgcatactcgaacgactaccg

SEQ ID NO: 62420 - DNA, 406 bp, Oryza sativa
  unsure (1)..(406): unsure at all n locations
ctgagtccgtccggactagcanacgccgaacattctatgttttcgctttccttaggcccattcactctggttcatattctattggggtggtggttgagtcgaactacagtcttgctgtgtaacgaattggaacgccccctggcgaagtcacgattgcggcgatgcccggccctctgtgagaccacgaaccgtcggagtgcatgacccatggttgttcgaccggttcatgctctgggacagtcagcgaggacttgggacttgatcgtggtgcgggcgacaaagtgttcgccgaaaggtgacagctcagcagtccattttcttatgcgccccgtagtttcttcttctcgatgatacttgcgaggtaccacgattttgtgggcttggaaatagtgtttgagcttttatg

SEQ ID NO: 62421 - DNA, 410 bp, Oryza sativa
  unsure (1)..(410): unsure at all n locations
agcttgctcacttaccgagcaatgtggttgtagtntgatttgtgcacgcctaaaaaggcctatgtttatgagagaatttgatccttctatgtggcatgaggtaaccctgggtcggctggggaaaggctttgtcgcgaacctctgacaccggccagtgtctggagtaagttcgtgtcttgtgggtaaagtgtacccctctgcagaggttaactaactgttcgaacagccgtgcccacggtcatgggcggatgtgaggtggttcccgttgcgtaaatttgtttgcctgtgctctgtgaaaagttgttgtggtgtgggaatcgtaaccataatcagcctatgtggcagatggatgacctgagtggtcagaaacgaatctgtgtgattcgggatgtctgcgggcatcatatact

SEQ ID NO: 62422 - DNA, 374 bp, Oryza sativa
ttgaacaatgggtaaactacagattgtacagtatatttttctatgatcatgcaagaactttgcaaaagccttgacgtaacggtacatgcgcggtaaattccgcttgatatttttacctgtcactcacgtaattactggaaagcaaagccaatatattcatctttgttgggttctcatcctgtaaggtgaaatcctgaccactggagccttttcttcttcctgtgatcaccaaagtcagcatgctctgctccttgccaaaacaaaaatggaaaagattcaaagcacagagaagaagagttccaatcttctaaacccagttgctagcaacagatccattgtagtaattttctaaaaaagtatttaaatattgggtt

SEQ ID NO: 62423 - DNA, 414 bp, Oryza sativa
agcttgtggaagcattcgcgctctactttgtagagaggaagcggatgcacgcactgccagtggagacgtcggattcacacacgactgggaagagaggaaacggatgcgcgtgtggccgggggagtgagaaagcggatgtgctcgatcgattgggttcgatggcagtgctagataatttgcgtaaaattttaagggtagtgggtctttagccacccaataatctaaaaaaaatcatgtttagaggggattaccagattatactaatatagtttatagattataataatctatcatagtaatttaccaatttgtttcatattattactaataatttagattgtaataatcctaagctgaaacaaacatgatctaaatataattcgcataatatgacaccgaagatacattatgaca

SEQ ID NO: 62424 - DNA, 454 bp, Oryza sativa
  unsure (1)..(454): unsure at all n locations
tgtgtctgcagaacaagttgagaagatggngtttatgctttttgaaacaaagtaatatgcatactggataattatcaaacttggaaccaacaccataactgaatatggaggagctaaattagattcctgatgaacaataactcacccattccagaccaggatagggaagttgacgtgtcaacatctctaggactgtgcagcccagactccatatatcagcttcaggtccatatgttgtcttgggattgacaacctgaaatttcatcattatcttatgaggcaactacaacattatctaacatcaatgcattataaacacatttttggctttttacctcctacctattangttgttattctagataaaccatcacaataaaagaagggtaacaaatactacctctgcttcagttataggatntctagtaatgctacattcatatatatgtaatga

SEQ ID NO: 62425 - DNA, 427 bp, Oryza sativa
agcttgctgtgtgatttaccttgtcgagtttaatgtttgaggccttgaagtcgcggtagatcaccggcgtctcggcctcgtgcaggaaggcgagccccttcgccgcgccgacggcgatcttcagccgcgtcgaccatggcaacgaagcaagaagatctgcacacccaatgaatcacacactcgattagcaaaagctgcaacagctaacacacggtaattaaccccaaatcatgtggtaattagtaactacttactcttgaacaggtggttctcgaggctgcctcttggcatgtactcgtagaccagcatcctgtgatcatcttgtgtgcagaatcctaccaacttcaccagatgaggatggctcagcatccccagatacaccacctcagcctgatcacaaaaattaacgagaaaatcattattatca

SEQ ID NO: 62426 - DNA, 423 bp, Oryza sativa
  unsure (1)..(423): unsure at all n locations
agctgggtatcagncatgttggttggcacttatgcatcatcataccgatcaactatctcaacaacctgcaacagtttcaaacagataaatacagaaacttccagaacatgtcctattgtgtaaaagatacagagcatacattttgtgcagctagcagcgaaacaacaccaactggtacgaagatgacgccgacaaggaaaaacaccgatacaacctaagtagcacaaagccaaaacatcagtgaacggctccgcacatatattcatcttttatcccctaaaactagtaacaccctaaatctattaatccttggaagtatgcaacaagtaattaaacttacccattttggagttagaattggttacaagccggcagctcctgctgcgtgaacttggaatctgcgcatgaataaattacggagta

SEQ ID NO: 62427 - DNA, 409 bp, Oryza sativa
  unsure (1)..(409): unsure at all n locations
tgtgtatcacgtgcaaacatcttgttagatagtgatttttcttccagntgtctaatgattttgtcaaccttacccacatcaaagctttgaggttttatgttgcactcaagaccctctactgttttagcggactgttcttcccctgagattagttttacatcctcgtcaagaggaaatatatacaggtatctcctccatttggctgcaaaattagggtgaaattcacgtgagacctgcaaattatgccatcagttaataacaagcgtagcatcacccatggtggatgtcttgacattctaagaactttacatgaaaaatggacaattctaccactagcagcaatgcagcatacatatcaagtgcagtcatatattctgaaaaagcaaaagaaaaatacctgtgacacatg

SEQ ID NO: 62428 - DNA, 442 bp, Oryza sativa
agcttgaaatgaattcaaggtgtccagatgaaatatttatgagaattcgtgtgagcgtttcttcttatgatccaaattggcaaggaaggctactagagacttatgatactcacagtgatgcttttgaaattgcacctgcctgctggtgtgtatcttaaaacatttccatccaatttacgaaggaaagagtttattccacaacctcaattcttctgaaagtctagaaatcaactccctcaaattcttaacaccatcactttacccgcagtagtttgggtaactgaaaatatgtgatcaatttgttgttataatgggaattttgatagctctaattattgcttaaaataacggtaatcatgtgtcatattttctgttcattagcgaatcaaaccctgtacaggactacaagaaaattccttcctttcagctgtgttaaaaaatg

SEQ ID NO: 62429 - DNA, 326 bp, Oryza sativa
  unsure (1)..(326): unsure at all n locations
ctggatagctataccatgggtatcgatacaagttgggtcattgatagttcatgcatgtaactgaagttactcgacaaaggcgccaccccaccagcaaacctacccacctccgaccgatctagggttacgggaaatatgcaggagcgccgncaccgccaccaccctctctctccctctgtccggatctgggagggaggggtactgctaccgccgtcaccaccaccaccgncaccgccctcccccggcctccctccgtccggatctgggagggaggggtactgccgccgccgccatcgccctcccctgggctcccttatgtcggatct

SEQ ID NO: 62430 - DNA, 443 bp, Oryza sativa
agcttgctctcttcaattcagtagcaaagatatggagattaattatgccacaatatcagttcaccaaagaagcccacatccgtgaggttacagtgttacacaacaaaacagcatttgtggagcaaaaaatttgcattttgttttccttcaaatagccattgtcaaaacataaatgaccaactgtccaactctaactgctataccaaaccaaccatcacaagctataatttgcacatcttgacccttgtccacacctggaagattgtacagatgccattgtcgaaatgatggaagagaaatatgaggttaacttaatgacaccacaacttgctacatcgaattaaccaaatacacatggagggtgactatttcagttatcaaactagaatttaaaatcttgcacgaagtggtccatacgttatactaattagttgattagttcc

SEQ ID NO: 62431 - DNA, 450 bp, Oryza sativa
  unsure (1)..(450): unsure at all n locations
ntgattaatctatcgggtgctggtcaatactttgacaaatatcatcaagactgtggttgatatcacaattgctgagcattatgataacgggccagtctttctgccagaaggtgggttccatacatatagaagcttggtgacatgtaatcaacagcctgtctccaatgtacctccagggcagccgatggcgtcagcttcagctttgagaccaggagcatcatcttctacgtagagaccagtggtcaatcctcatgtactgactagggaacaacctcggcatgctgggaaaaacgtcaatcggctgactcaggaacagattgcagctatatttgggccatctcaaccggttgtcgagccgattcaatcgacaccaattatgcagcaagtggttcagccgaatatgcagcagatggttccacaaataccggcaggacagagaacacctattat

SEQ ID NO: 62432 - DNA, 432 bp, Oryza sativa
  unsure (1)..(432): unsure at all n locations
agcttagcacanaacttaacacaaatgtcatcactcatggaaggcacaaggcagagaggatgatgaaaactaacagaagcactgtattttatgccaaaaagaagagaaaatatgccaaagctcaaattcttttagacatgaaattggtctagcatacagaaaaaagatatattcaagtattgaaagatacacgtttccttcttttgccaccatatccactcaagctgaattttctagtttataaatagcaaatcaaatatgttatgtgcactcacattgcttatgaactggtatgccaactgcgttgagtatgtttccttgatgtacaggaatagccttattatctgcaaaaagggaaacatggtgcatcaattccttttatgaggcaattaagggtataatccatctcactagtcaacaccactatgaaat

SEQ ID NO: 62433 - DNA, 465 bp, Oryza sativa
  unsure (1)..(465): unsure at all n locations
tgaaactaagcaaatattaatcaaaaggtctctaaacactcacagtgaccaagaaacactttntattaatctcagtattgaacaatccgttaggtcagcaagaaccaccagggcctccaacccccagaacaaaggtggtaaatatgtggtataaagtaaacttacgtaaaagctcatgtaaatcctgactaaaaagtcatctaagttacacaactatataaaacttgtccaaatttgacttatataaaaataacaaattttgaacctatctcataaacaaaatcgagtttggacaagatttttacatgtgtaattttttcatttgaattttgatgactttagtcaaggtctacacgtgattntatctaagttaaagggtttcaccatatatttacctaaacacacgtctttttggggaaaaattgagaatgtagaaagcattttgtagcaccaactataactagt

SEQ ID NO: 62434 - DNA, 406 bp, Oryza sativa
  unsure (1)..(406): unsure at all n locations
agcttgtacagtttgtgaaggggtttttttatagaaaagaagaatctacttcaaccgatatgcccttaggcacggccatacataacatagaaatcacacgtggaaggggtgggcaattagctagagcagcaggtgctgtagcgaaactgattgcaaaagaaggtaaatcggccactttaagattaccatctggggaggtccgtttggtatcccaaaactgcttagcaacagtcggacaagtgggtaatgttggggtgaaccaaaaaagtttgggtagagccgggtctaagtgttggctaggtaaacgccccgtagtaagaggggtagttatgaaccctgtggaccacccccatggnggcggtgaagggaaagcccccaatggtagaaaaaaacccacaaccccttg

SEQ ID NO: 62435 - DNA, 470 bp, Oryza sativa
tcttcccagcatacggctttctagatgtatatgacgatctctagacagatggatcttatatgaatcgtatgatgaagtaccacatgagtggatatataggaaaggaatccaaatctgccgaatcgctcatgttatgatcttctacatcctaggtctccgcgttccgtcatctggcttatgttcttcatgtagcattcagatcgaatgactctatgaaattacgtcgatacttctacatattatgggtaacgtaggagacatccctattttcccccgggggtcttaattaccactgcttagctttcaattcgcctctgaccatcaaattaaatgtgaataaccccgcctcctctctttgaaacaaggggcgcttccggttctgtgcgtgcttcaaacaattatgtcttctccatattaccatatctctagagtcaataaatttctatgaggaactactgaactcatcactt

SEQ ID NO: 62436 - DNA, 436 bp, Oryza sativa
agcttatctcaccacttcggcatatgctgtataccgaggtggtggtcgtggtggacgcggcagcaacactggaaacagaggtggcggacgcggcggcttctgtcgtggcggacacggacgtggcgcccctaacggcgcaagtcaaggacgcgggcgaagcaatgatactcgccccgtgtgccaagtgtgtcacaagcgagggcatgttgcaagcgactgctggcatcgttatgatgactcatatgttcctgatgagaagcttggcggtgctgcaacatacgcctacggtgttgataccaactggtatgttgatactgtggcgacggatcacattaccgggcagctagacaaattgacaaccaaggagagatacaagggaacagatcaaattcacactgcaagtggcgaacgtacgagtataaacatgttggcatgc

SEQ ID NO: 62437 - DNA, 441 bp, Oryza sativa
  unsure (1)..(441): unsure at all n locations
ngacttggcatagcggaagtagacggctcatcttttttgtgatgtggatggcttgtcttccacttcaataggcttgacatctccaatggacatgttcttcatagctctcatcaagccttcatcacctacatcatccaaattctcatgtccctcttgggagccattagtctcatcaaatagaacatcggcggtttcttccacaatacctttgntcttgttgtagacccggtataccttgctatttgaggcataacctagaaaaaacccttcatcacaccgactttcaaatttggttagactatcaccctttccgtaatataacaacttgcaccaaaaacttgaaaataggtaatattaggcttcctcccaacaattagctcataggaagtcttttcaagagccgatgcaaataagcctattgttgcatggcaagcggtgtta

SEQ ID NO: 62438 - DNA, 438 bp, Oryza sativa
  unsure (1)..(438): unsure at all n locations
agcttagggggagactctctgaatgatgtaccttgttttaacacatcacattgtactctttttcctttngtgagtttttaccatccggtttttctcatacaaagtttttaatgagacaatgttagatacaagcttatgccttatctcatgttttcctcacaggggtttttctagagataaaacatggcatggattactccttaaacctttcaggtttctgatagagtaatcaccaatcacattattcctattttttttccccacagggtttttcgaaggaattaaagaacaagttgatctcaagatggactcgatcaaaagggggagtgttacaaaagcatcatgagacattttttatctcatcaaaggctcatcaaagagcaacaatggcaggaatcaagtgacttgtaaccgccatactatggtgaatttgtgaca

SEQ ID NO: 62439 - DNA, 371 bp, Oryza sativa
  unsure (1)..(371): unsure at all n locations
ctttaagaaatcaaagaattggctagaactatctttcacttcatatatacaccagtattttacaaattgagcctccatttgctacattcatactcagtcagaatcagtcctttcatcatcagagttattgttgctcggctgaaggtcgttgttgcggaattgatctacaacgtcacttgcaatcttgtcagccgcgttttgagcattgctgataaggtcaagagcagcttcttcgcttgtcccgtctgcaaaaccatcaatggcgtcaatatcaattcttgggtacaaggatttggtcatcgccaatgccatgctagctcccatacttccagctttcttgatattcttgaaatatacatacngtgcaactc

SEQ ID NO: 62440 - DNA, 297 bp, Oryza sativa
agcttgccgccgatggagccgtcgcggcttctgcttttgtccgactacgacggcgcgatcgtgtcgccgctgccgtcgccgccgccgtcgtcggccacgccgttcatgccgggcgtcgcggtggtcgtgggcatcctgacgagcgtgttctccatcacgttcctgctgctgctgtacgcgaagcactgcaagcggaacgccgcggagtcgtctggcccgtacgggagcggcggcgcgttcgggtcgtccggtgggggcggggcggtctagcggtagaactccggcgtctaccgcgcc

SEQ ID NO: 62441 - DNA, 415 bp, Oryza sativa
cacctgtggagaaacaatgctcattttccactactgtcgatgtgatttggttctgaatcaagggaatttcataggtttcatatagccatacagatccgtaagaaagaaaatcatcatatggtggccttctatgctcactttttattcagtcactatccttgtgtgctgtaattatttagagatgctgcgttgtcgtgagtactctctttccttcggatttgctagaaaactttcataagttttttatataagttaactaaaccatagttgaatgtaagttttatataagttatatcatggttacaatatagttatagtacagttacaatgcaattacacttcacctatactttagttgcaattgaaagtttttaacaaaaaagaactacgttagttcttttaatcctcctttttt

SEQ ID NO: 62442 - DNA, 355 bp, Oryza sativa
  unsure (1)..(355): unsure at all n locations
agcttgacgttgttttaggcactgaagttatatctgtttngtgttcctattctttgggtcaattttgtgtttcatcagccgatttgatgatggtctcactgctattgtgttgctcgcttgtttcctgagttggggttaattggggattgttgctgctgcaatttgtattccggtgatgttgtcgggtgtgaggacccgcgggtgccccgtacccgcagtggggacggggacgggggagaacctgcacccaagtgcggtgattgggagggtgaccggcgattcccttcaatgcgggtgcgggacggggtggtgaaacccggcgggtgcagccccgttggcatctcatgtcttcctg

SEQ ID NO: 62443 - DNA, 451 bp, Oryza sativa
  unsure (1)..(451): unsure at all n locations
ntgtggtcttatcggatgacttggcatagttcaatacatgtacctccctataagaaggnttacgggcatgaagcagttttaccgtgggaacatgcaatcggctcgagaagagttgctgtcgtgaccgagaaaattgccttttcccgaacgctagtgtattaatccccgtcccaggaaaagccggggtacaccaaacaaacatgatacaaaacacacatctttattatatcgataatatttacattattacaaaggcacttcaggcctgacaatcaaaaataaacagcagcggactagcgggcctacagctccatcttcacaggcgctcaactggggtataagccaggactccacctaagacttcttctncaaagcttctcttactgaagggngggaaagacagagcaagaatgagtacaaccaccgtactcagcangtcacaccgggagat

SEQ ID NO: 62444 - DNA, 417 bp, Oryza sativa
  unsure (1)..(417): unsure at all n locations
agcttcaacaccatgttgagctcatatnttcataccagagcaattttatggttcttgagtaggtactatgaggtaccattttttctattataaatttggtacctcttggtatctaggtactatgatgtaccaaattntacactaaaattttggtacctcatggtacctccttaaggaccgtagaattgctcttttcagaatctccaccaagtagggcctccctcctctcttggcataagtcggtctggcttaatgcgttgtgtatcgaatattcttatcttctaatatattaacgtgcaatccttttgcgcgttcgagaaaaagccaaatagggcctgaatccagtccaccactgagaattgcatcangataggactaccctgaacccacaactctagaaattcagagatcacagct

SEQ ID NO: 62445 - DNA, 450 bp, Oryza sativa
  unsure (1)..(450): unsure at all n locations
tatctaanagaatactcataccataataatctctntagtctaatgatcgacccacgcactaaatacatagagaaaacatcccggccttcatgcacttcaaaaaatagatttggcatgattcataaggctaaaacatcaaaccatgtgccatcttctaaacaatatagtacggcctacggtcaacttgagaaaaactgaaacgaaaaaaaaatagaggatagttggataaattattctcaaaacttgataactactatctccgtcacaaaataatgcagctgtgggtatccgaatccaatgtttgactgtccgtcttatttgtaaaaatttaaaataaattagccgatcacacataaagtgctattcatattctatcatctaataataataaaatactaactcataaataacttcaaataaaatgaacggggtaacatgggatataacaat

SEQ ID NO: 62446 - DNA, 367 bp, Oryza sativa
  unsure (1)..(367): unsure at all n locations
agactgccattagatacaacataacagcctacatatgttatcgnaatcaacgcttgccgtccaagtgacacagcagcttcgacgccacttacgttctaaaccttgtggagaataagataaccatgcagattgagcagaaagcgagcaaaaacgaaatcaaaggggttaatttccgaccccttctgcatttgacaacggctcggatgctctctgtcttcgccttcagaaaaacgatgtttgcctcgcaagcattgcatgtttttttacgcctcgtcggcagaaaaatgttgacatttcagggaatcaaggactgcatttttctttttaagggtctgaagctcaactgtcgatcgatcgagtagttcac

SEQ ID NO: 62447 - DNA, 395 bp, Oryza sativa
tgctatgtgccaacatcatctgacaacttggtcatcgtctacagaaactggtttagaaagtactgcaaccatcagattggctgggcaaacccaaatccaacagttaaacagcagctgccacaaactcctaccagagatcagctcttggagaggtaaacaagctgtctactgatcttcacgcaatcaatcttcagctcttggagagaactctcagtgatcatctaacatgaatacttgtttggataccacaaacaacaggtattggtcgcatgtcatgcagtgcaccagttgtagagctgcactgaaggggatgagggctctggagatcaccttgcaggtggcggcggtcgccgtcgtctggttcctcgccgccggcaaggagactgcggtgatgt

SEQ ID NO: 62448 - DNA, 440 bp, Oryza sativa
  unsure (1)..(440): unsure at all n locations
agcttataaaagtagcaacgaaaatggctggtgagaccttgactcatatttagggcagtctcgctagctgcaatggatgaacgaaatgacgatattattttctggcaattcttgatgggtagaacttttggaggaatattatcagaatgatgagaaaaataggggaaaaaaaatccataagcccctctactctttccatactctaaatcttaaggtgaatgttccatccaactacaatgacatctgctcttcagttaccttggcttcaagcctccatatcgcggtaaaagtgaagaaatagagttaaggaattaacagtattacatccattttaaaagtattaactaaattctatatctattcatcatgaaacaattgattaaacaggattcaataacaaataaacaggatgcaataacaaatganaatggtagtatctc

SEQ ID NO: 62449 - DNA, 460 bp, Oryza sativa
  unsure (1)..(460): unsure at all n locations
ngagactgtgccattggcgggcgcggaaagggattactgttgttctggtttccacaattgccttggctgaaatttcctggctaatacggcctgtgctgtcgaacaatcatcattgtaggaccactgcgctgtcctggaccgaagcggggcttctactgtccaccttgctgactcctgaactgtatagttttcctcttgcgatccatcttattgcgctagtcttcctgacgaatggctttgcccacaagtctctcaaaatcagcataatctccagaaattaactggttagttaactcgtcatccaaacctgctaagaacttctcccgtctctcggcatcggtacgcacattctcaggggtataacgtgctagacgacttaactcatgcagatactcagtaacaatcctgtttccttgatgtagaggtctaactctcacttcttctatgcaacaattccatt

SEQ ID NO: 62450 - DNA, 400 bp, Oryza sativa
agcttccatttctctctttcagcacaagtttattatttattgcagtgaagggttgatgaagtgactacttaatttgcctgggtggccaagatgcaaaacaacagttggtactcacagcattcactgccatgatataagaggataggacagaggatgcatgcacacacatcatcatctggtaaaggggcatgcagcatttgtgtgtgcaatagagatcccaatgctgatatacacatttgacgataggattctaatagtagtgggaggaagaaacacaagctttggttttgcatatctgtctcatgcaggcagtgcaccccagctgaatctttgggagcatctctgtcatctttatgtgtgtgtgatgtgcaagatactgctctctctctctctctctctc

SEQ ID NO: 62451 - DNA, 460 bp, Oryza sativa
  unsure (1)..(460): unsure at all n locations
taatgcaaggaaagagatgttataaaaccttaccaaattattgcttatatcgactgagaagcaatntttaaatatatatatatatatatatatatatataaagagtactggtggacagtacaaaatcgcaacctataccacactttatctctgttgtttactctaatatgccactgaatctaatcataaaatattgtgtggaattataacatactacaacatccaaaatttgctagattatatttgatgttcatatttacaccaccgggtgataacatgggccaattgcatttctgccactatggtttaacggcaccgttctatcactcctgttaggctaattgctgtcatgccactagattggaattttgttgggatacttcccacccatcattaaaaaggaattacacccccccccacaaaaaaaaaatccttttacagaagtgctctacattgcact

SEQ ID NO: 62452 - DNA, 432 bp, Oryza sativa
  unsure (1)..(432): unsure at all n locations
agcttgaataataactcaaaaaaggggctactcttctcttcanatttctctcatgcangagaaagcggtagctagtctaaaatgccggcacgctancatgcaactagtgtgtgtcacgctacaccgagcattgctcgtgcactccgtaaatcattcgctgactcttgatgctgaccccgccgccgccggcgacgacagcgccgccggacgacgacgtgtcgccgctgctacccgacgcccggtggtccatcacgccgtgcagctgactctgaaccgtggctatacactcatgcctacggagagacgccgcgcactcagcgatgttgtttgaggaggcgccagcgccgtctatgccgtggctaacaaagaagctatgcacgtcctcgtcgatcggcgacatcgcatatgagaaaatgctacttgatatctgat

SEQ ID NO: 62453 - DNA, 467 bp, Oryza sativa
tgtcagtcaaagcattgaataaaccttgtgtatgaagcttcactttatcaaagggtgcattccatcttaattatgccgcaaactgttcctaattatgctgtctcatctcaaaccaaagagaataggcatatttgctaattcctatgctactcatggaaaacctatctttctggcttccctaccatctgaatcttgcacaagtgaccatatgatagccttgagttgtcattgtttaatcacaatcagcttaatccagtccatacatgagaagattgtgattagataagacctagggtcatgcaaggcaagccaaaagggttgggtaatcaaagacaatggtctaatacaaattgcatgaattgctccatttggcatattgttataggttattgtttaatgaatattaagcggtccaagatgtgttttttttcttgctgaacaaaatgaattagaggttaatgatgaat

SEQ ID NO: 62454 - DNA, 438 bp, Oryza sativa
agcttccatctttactctaaccctcaggagtacatatcctaacccttacgtttggccatacaagtcttcttcacatacctgcactattctaacggagttgtcagctccaggagctgagctacacatccctccatattttaaggcaagggtttataaatggcatctttgactgaaccacgggacaacagtccacacagcagtctgacgggttttactgcacaacattattccctccgttaaaaaaaaatactcaactttcaaaaaaaatttgaaacttttaactttttcatcacatcaaaacttttctacacacataaaatttcaacttttccgtcacatcgttccaattttaaccaaacttctaattttcgcgtgaactaaacacacccttacgaggttgagtttattttttagacggagagagtactcattcacctt

SEQ ID NO: 62455 - DNA, 392 bp, Oryza sativa
  unsure (1)..(392): unsure at all n locations
agcttataaaagtagcaacgaaaatggctgttgagttctttacacaaatttagggcagnctcgctagctgcaatggatgaacgaaatgacgatattattttctggcaattcttgatgggtagaacttttggaggaatattatcagaatgatgagaaaaataggggaaaaaaaatccataagcccctctactctttccatactctaaatcttaaggtgaatgttccatccaactacaatgacatctgctcttcagttaccttggcttcaagcctccatatcgcggtaaaagtgaagaaatagagttaaggaattaacagtattacatccattttaaaagtattaactaaattctatatctattcatcatgaaacaattgattaaacaggattc

SEQ ID NO: 62456 - DNA, 459 bp, Oryza sativa
tgagactgtgccattggcgggcgcgaaagggatactgtttgttttgtttccacaattgccttggctgaaatttcctggctaatacggcctgtgctgtcgaacaatcatcattgtaggaccactgcgctgtcctggaccgaagcggagcttctactgtccaccttgctgactcctgaactgtatagttttcctcttgcgatccatcttattgcgctagtcttcctgacgaatggctttgcccacaagtctctcaaaatcagcataatctccagaaattaactggttagttaactcgtcatccaaacctgctaagaacttttcccgtctctcggcatcggtacgcacattctcaggggtataacgtgctatacgactaaacttatgcagatactcagtaacaatcctgttttcttgatggagaggctaaactctcacttttctatgcaacaattccatggg

SEQ ID NO: 62457 - DNA, 410 bp, Oryza sativa
  unsure (1)..(410): unsure at all n locations
agcttctcatagctgaggaggttctttgtttattacaccagataaacgggtattcctcacattgagattctcaaggttggtgcagttcgtaagtaaaggcggcaaacgaccagataagtggttgttttcaacgctcaggtgagtcaactgccctaagctccaatggaaaggtggcataggcccagttaggtcattgtgtgagagcagaagggatgttcaaatggatgcattccctattaattccggcgatatctccccattgagcatgttaaatgacaagtcaagaaactgcaacgatgacgcggcttctgctagtgatggaactccgccattcagcatgttggaagacatgtcaaggtactttaaatatggaaatagacttccaaagntgtatggcattttcattgata

SEQ ID NO: 62458 - DNA, 391 bp, Oryza sativa
tactcagcttgggctcaattgcttgcttccgacagtttgattcttcagctggtcctctacgtttgacaactataagaattggagagattgggaggagaattatgaataaccgcttcacaaagaaatgcctataggcgagaggagacaatttgcaagttgggttttcagaaaacttgtccttatggtttgaccatctggctcaacctatagtcaagctggctctgataccactttgttacgcccagaaatttatcccaaatttccagactattttgtgtattaaatccctgtccaggaccagccagggttcacaaaacgactagttatatacagtttcaaacatgaataaagccgtaaatacttacaaaagaggcacttattccttccaccg

SEQ ID NO: 62459 - DNA, 436 bp, Oryza sativa
  unsure (1)..(436): unsure at all n locations
agcttgagtgtgtgtgagatttatgctgtcactacctagtagttgataggagcgcgtatattcttgtgtatgtttcttgtttgctgctaaccatggcaggattgcgcaacgggaaacaagatggtcatgctcaacgtcaacatcttcaccatcaacgaggtatagtgacttcttcacgcatcacatatgaggtacatgataatgatcttacaagggtagaatctaaattgcctagttttgatggtaagtatgattccgccgcttatgttaattgggagctagcagtagaaaaacaatttgatgagtatgatttttctaatgctcaaatgattaaggctgctagtaataagtgtaccggctctgcatctttttggtggtatactatagganataatcttgaaacttgtgatgaatgcaaaatactgatgagaaaaag

SEQ ID NO: 62460 - DNA, 441 bp, Oryza sativa
  unsure (1)..(441): unsure at all n locations
tgtgctntagacttcggtggaagttgggataagaatctatcttatgcagaattttcgtataacaatagttatcaagctagtcttcagatggctccttaccaagcactatatggtcggaagtgtcgcactccgcttttgtgggatcaaacgggagaacgtcaggttttcgggacggatatcctaagagaagcagaagaaaaggtgaaaatcatccaaganagattgcgtgtggcccagtctcgtcataagagttatgccgacaatcgccacagagatttgagttttgaagaaggagattatgtgtatcttcgtgtcatgccttttcgagggagttcatcgtttcacaccaaaggaaaattggcaccgcattttgtgggaccttataagatngtcagtagaagaggagaggttgcttatcagttggaattacctcaatctttg

SEQ ID NO: 62461 - DNA, 418 bp, Oryza sativa
  unsure (1)..(418): unsure at all n locations
agcttgctattctggtatagcttattatttataataagcaatgcgagagtgataacttatgagttaagatgacaaattcacagagagtacaaaggaaaggaaggaagttcacagtccatcttggaaatgcgacaagggtcctaaaatactttatcttctatgtgtcacaaaatatgagttccgttttttttttgtgaaaaaaatactcctctataagctattttaagcatgcttataagagctttggttgtgtattactaatttactattactaacataccggtttcacctgatttttccatatgtgagctcttcccataaattggctaaatgctggtatactctggcatatgaggatttgtcaaatggccatgacccanaaaaacagttgggtgcagcaaatgtgcagtgatgtatt

SEQ ID NO: 62462 - DNA, 458 bp, Oryza sativa
tgatacaataattagagaattcaactaaaatttttctactctaacaaatagcttctaacagaaaatcctctgcccttgttaagagacttcctaaaggaaggtatgctttatcaacatactacaataaattaacacttttgagtacttgttgaggaccttgaggcatacatggttactttagattgcaaatgtaccgacaacaaattaacagaatcttatagaaggatggattattctcagatttttttgctgacaactattgctgttaactacaagcaaaataatcattgataatctcaactagagaacaattaatctactctaagggtcagcaaaagataatctcaactatgaatactaccattgctagtaaaagtctgaacgatcaagccaaactggtactaaaatggtaaatgcaatctatcatagattgtagtatgttgagtctaagtgcacat

SEQ ID NO: 62463 - DNA, 429 bp, Oryza sativa
  unsure (1)..(429): unsure at all n locations
agcttcaagaagcccaacgctacagaatttattccttatccctcgncatctatgggcttggtgattgattcatctgtacagaaaaaagtcctcaaatgagaataacataagaggatttgtacaaatttatcatgatgtgtgaagggtgttccatgtaaactttgtccaacatggacagttgacatggcaaaatttatgtggtagccttttgaaccacaaacacacccacctagccaagttgttgcattggtatgtcattttttaagttatcgcacttaattgaacccactcgccaagttctggtatcgttaacacaatttgctcaaagatntgtatctaattggtattttttggttttgtgcttattcttgtcctaccaatcttaattagtttgataatttgaataaatcttttggaagcttttctcat

SEQ ID NO: 62464 - DNA, 400 bp, Oryza sativa
  unsure (1)..(400): unsure at all n locations
tatattcatgtctttgcagacgccaaggccttatgtttgtgattggataacacgtanggctatgaaaattaaggtctttgcatgacttctttttagcgacaggttgaacactagagatatgcttaatcatcggcattgtgcaaaggaggatgatgatcttacatgtgtacttcgtacaaatggtcatagggaaataagaggacatcttttcttcttttggcctttcagtcagagatgttgacggcacctatgcattctttgggatcctaatctcacattctttcaaatggttgtggtagcgtgactgcgtttaccggcaaagggcttcttggaaatttctttattgctgcccggcatatttagaaagaaagaaatggatagatatttcagaacaagaaat

SEQ ID NO: 62465 - DNA, 433 bp, Oryza sativa
  unsure (1)..(433): unsure at all n locations
agctngggataggtggtttcagcatgggtgttgccgttgccctccactctgctgcatgctatgctcatggaagattcacaaacggcgttgcctacccggtcaccctcagcgccgtcatcggtttgagcggttggcttccctgttcaaggtctgattctattcttcgatcgttttggaaaatgataataataatttaatttgcaatgatttccttacaagtgatgttcttcatgtgttcttatttaggactctgaagagcaagatggacagctctcagactgcactgagaagggctggtgccttaccaatcctgctcagccatggaagaggtgagcaatgcaatcgttttgaactagatgtgtataaaatgtaatgatgctaaaaatgttctacttatntttgcctttgcagctgatgaggttgtcacctacag

SEQ ID NO: 62466 - DNA, 456 bp, Oryza sativa
  unsure (1)..(456): unsure at all n locations
ttanagctgacactggttatgctctggaatagcaggctgtgatgaacctgattatgtgcctgaagcaattggatgggaaggagacacggccgggaaggaatcgaaagagatgaaaccgaaagaaattgatctttcttcaattaatccagcaaggtagattaacatttttttctgggattaggaaataatcagtaattgattgaattacctttgattgctttaataagcacagtcaagatgaagaanaacagctgatgcacttgaagcttatgggatggcgccacttccctgtgaatcttgacaagttagctggggtccgatgtcttttgttgggtgctggaactcttggatgtgaagtcgcacgcctacttatggttaatgcttttagctgacacaagaattatgttccatttttatggttaatcataacacgggcattaaatgtgcgtatctttt

SEQ ID NO: 62467 - DNA, 430 bp, Oryza sativa
  unsure (1)..(430): unsure at all n locations
agctntccaacaagtccaacatcacgcattgagctaggtcaggttgaagtcagtactgtgttcggaggccgaactggattccaaaactcgttggacttgaatatcttataggtcctttgttcatcaaatgtattctttggcaatgcttatatttcttatgcttggttgtatgcctatacttgatggtcacattagattcatagtagtagaatgtgtcatatcctcctaacatcctttatattttggggcagagggagtataatttttctcatatgatgtgtggcgttctgcagagcatcagaatcgaaagagactaatagcaaaagacaaaattaccaaaccaactagagggcggagtaaatagcaaaaggcaaattattcaaaacttgaaatatataaatctacaatagctccgaattcatatacgtgc

SEQ ID NO: 62468 - DNA, 368 bp, Oryza sativa
tgtgctaaggctataaatagacctctagggccatgtaatgggggatccccaaaaaaatatttcacgaatcaatacaattgcttttacattccaactactattgagagaaccacgcctttcgacgtggcatagttgtccattcgacaacagctggcgccgtccgtggggaacctagaccgaaagggcgaaatgggacccctttcgccacacccacacccttcaccacagtacccgtgaggtacggcgacaagggcttggggcaaaagtgagttaagtccaagctggggggctacgaagccaccccagcctctagacacctttcgccatacgccacgcccttcgccatagtgccaataaggcacggcgtc

SEQ ID NO: 62469 - DNA, 426 bp, Oryza sativa
  unsure (1)..(426): unsure at all n locations
agcttagctcaggttttggctggctggctctgcatgcaaagntctggccggatccaatcatgcatcgcgtaccgacctgatcaatgcaggtattaagtatggacaaaccgtaaccgtatttaatttatgtgtagtttgcttttcagaatatatttatggacgtacgtagtgccatctcaccaatttatggaaatagatatattttagaaataaataccatcgacaagtgttaaattctatgttttgctgtaaaaatatataccatcttacaaattaataggtcagagaaatggcatcgtcgttaatttgatagtagaagttgtcagttaggcgatagaaaaatacaattctaccactcggttaacaacgtcaaatccccaaattcccaacgtacacgctaaaacaacggcgacagacaacggacat

SEQ ID NO: 62470 - DNA, 455 bp, Oryza sativa
  unsure (1)..(455): unsure at all n locations
ntagagtcaaaaatgagaaanatcgagtgatgggaaaagtctccatctcctctgacaaaatgactacctgaactaaaagataaaacaaataaaaaaattagcaaatggttacacaggtgctacgccatctaaaatgttacaaaagataacgactaccaaaaccaataaaatagcatcattatgcataatatctatttgttcttttatccttgtcaccaaacaatattcatatttagaattcgactacttttttgtaaaaaataataaatacttaaatagatgtcactttatcgaagtgtattatatattaaacataattattaactttgttcataataatctagtcatttaaaaatacattaaagtttgccacaatactgatcaatggtgataattatatangaatnganggagtatcatttttagtggttntgagaaataatataaaagttttg

SEQ ID NO: 62471 - DNA, 432 bp, Oryza sativa
agcttgcctttatgttcgtgagcgtgccattggatttgattctgcaatcaacaagaaataaagacaaagaaaccacggttaaatccataaacgatagccgattggctagttgccgatgacaaatcatttatctttgagccgatatcatatgtagatcgatcggcaatcatgaaaaagtaagaaagaactaaatctactcgatcggctgtagatattaacaatatataatccttatgtcgatacatacttaaatcaagtgattgggatatatcggtcgccatgccgagacagtataaatcacttagatcgtaatatatattaacaacaaaactatatatgttcatagcatagccgatcagatagatctagtatgtatcggctaatactccgataccactcaatattaagatatcaaagcaagtaaaatatacc

SEQ ID NO: 62472 - DNA, 433 bp, Oryza sativa
  unsure (1)..(433): unsure at all n locations
tgcatacttctctctcncttatgtgtatataatattgggttagacttgcgagtacaatcttgtatttaacccggtgtctgcaatttcaggagaggattccggttatgagttatgcttcttgtgtggtcattgctctgccgagggcggcgagggcaatgagtgatctcttgcagcttggctcttgcccggttggtttgccctagtggggttgtggcaccaccggttttatcttttacttatgaactctatttgagacttccgctgctatatttatgtgttgtatgttgggacctcggaccctattatgtgtcatgtacctcgctgcactntaaccctattatggtacttgctatgtttattaatggcttgcgatgaaagtgtgaggctagtcgcattcctggggactagctaagcatgagtaacgggttttgat

SEQ ID NO: 62473 - DNA, 453 bp, Oryza sativa
ataaaactcagcttagaaattaaaactggtgggaaataggatttttatttcttggggtggagacataaacttccttctatataaaaccatttagaaaagcacttttcacatccatttgatacaatttataaccttttgaaatagcaaaagctaacaaaagtctaattgcctctattctagcgacaggagcaaaagtttcaccaatatccataccctccacttgggtaaaaccttgagaaccaagtctagctctatttgtcacaatcaaaccatcctcattttgtttatttttgaaaacccacttggttccaataatattatgtccagaaggtggttcaactaaagtccaaactctgtttctctcaaaattttcaagtcttcatgcatggcgttaatccacgattcatcagttaatgcatgagtaacatctctgggttcaaaagaagcaacaaa

SEQ ID NO: 62474 - DNA, 339 bp, Oryza sativa
tagaagatagatgccggcgacgggtatctcgactcactcaattggaaacaggagcgcttggctttccatcatttcttccgtgtgagacagaagtgggactcccttggttaatacctaaggcacgccgccattgtgaccgaaaataacattccacctcccaaactatttagcatacttcctgtctgagctagtgattccactccgggattgcctgatataacaaaatattttcgtccctgacgagccgcgtaggggagcgatatcgggctctttttcccatgcgacacgcatgccagtgagcccgactatttatttttgcttctcgtgctacgtgcccct

SEQ ID NO: 62475 - DNA, 437 bp, Oryza sativa
tatatccacccgcaaccacattatttcttctagaatatttgtaccatgaacttacaacaaatatgtgggtttcacgataactattttcgtaattttcctatgattggcgggaatagggggaagaatatgtgtattttgcaaattaatttcagaatatttgcaataaagaagcataataaattgtggatatgtggcacgcaaattggtgtgttataagtcaaatgctagaagcaaaaatagcccaaactattagcgaatcttatttgggataattatgaattattgtcacaccacgaagtgtgttatttattggccatagaaaattgcatattcatcgacgaaagtatgaaattgcatatagctatctgaaagctattggatacttgtacaaatatatactaaaaaataatgactttggattccatgattctaatgat

SEQ ID NO: 62476 - DNA, 402 bp, Oryza sativa
agcttccattcctcggtcggtgccggccgcttctggctcgcgtggaggaggttgctgctgctgctgctgctgggggcggcaaaagctagtggcggtgggtgtgggatgcccgccgcgacgccgacccgctctcgccttctcttccccgcgttgcggccgcggccggtggtggttaaagcggacgggggaagcctcgccgctgccggtgactgactggctgactgaccgactgcgccgccgcggtgcggtgggaccacacgcgacgccatggacgccgcctcccgccccgccgtcgtcatcgacaacggcaccgggtaagcctccctctctctctctctttccagatctgcgcgcggagagcgtgcgccgcggcgaatctgaagcgggtgatgagaatgggtg

SEQ ID NO: 62477 - DNA, 396 bp, Oryza sativa
  unsure (1)..(396): unsure at all n locations
ntactgacacatatcataacaccaaatttaaagtgagataagattatgaaacgagcgcataaagtgtactgtacaagaatgatcgatttcctttagatatggcactgcttcggcgaatcaaaacttaaacaattgcaaacagagaatgaagaacagaagaaaaaaagcaagaacaacctaacagtacagtacggcaccgaacgccatcacagagaagtgaaaaacaggttacagacaaaaaatgcacaatatctcggtaagggagaaggaagccaaatcaagattcaagagatggaagtttctttgataggtaaagaatcagaagatttacaagtaattcaatggagcgacacatgcagaaatcattgaacgaaanaatagcatcgagtaaacaaa

SEQ ID NO: 62478 - DNA, 388 bp, Oryza sativa
  unsure (1)..(388): unsure at all n locations
agcatgcaagctncgctatacgcataaattctacctgtgctggttcaacgctctgccttccgaattacaaccagaacttcttgcgaggggtggaaaccgaatattcgctggcatttattcttgcggcgctgatttcctttagcgtttgcctgctctatatggtgcgcatttatcatcgcaatgaatggcttaatcgccgctggcatttgcaggctctgacagatccgttaacgctcctacccaactttcgtgcgttggaacaagcgcctgagcaagaggcgggcaagagtttttgctgcctgcgcattgataatcatgagtttatgagacgtcattacggcttaatgatgcgcgttcactgtatccactcaatatgccgtacgctgct

SEQ ID NO: 62479 - DNA, 401 bp, Oryza sativa
cctgcagcatgcagcttctgaagcaaaaaggatttacctttttgggttaatgcgcaaaaacggaaggaccctgatcaatccaccccacttagtttaactgtacataaccttcatgtaactgaattgggaactgggctcgcataccattgccgtatatcttttaccatataccacctcgccattttttatgtcttcgggtcctaaaataaattatattgtgttcaaattgtgcaatgggcaacatgccattgaacgcacatgacaccgtattgttctttttttatattcaatgtgtgttaacaagaatatatttgcgctcccgagtattctaagacacttgctatcagatactatctaaatttttccttgccactcatgttgtcaaaatagaaaaatgctta

SEQ ID NO: 62480 - DNA, 410 bp, Oryza sativa
  unsure (1)..(410): unsure at all n locations
tcgatatcttctcaatggtttgatggatgggtgtcactgtcattatcaccagcacgtttacttcatcggccctgacgtctccgccggtgctaaggggtgactacgtcctcaccgtcggttacttttgtcatcaccgactttcatcgccgacttgttatttcgtcttcacggttggcctactatgcaactgccgatagaggatctcatcgttatcatggactgctacactactattgactagatcaacgacatggttatcttcatcaaacatcctgtcaagtctcttcaacatagcctactctgctgtcgttgatgggcaacttcgtcatcatagccggctatctctgttgccgctaatcatcattaccgtcggatgcgtttgccattgccgactattntcttcatcttca

SEQ ID NO: 62481 - DNA, 430 bp, Oryza sativa
  unsure (1)..(430): unsure at all n locations
agcttgttcttcatcacggccatgatcatatcccctcgtgatctcttccttgacatgctgggagaacaacatctgcaccggcgacggagacgacggtgacctccggcaatcgtcgccgccgtatgcgtaaccgccgccgccgatcccgagaccaagccatgaacctagatcctctccttccatgctactagagctatacatggactatatcttatgtagaagcttctattctatgtagaagaagaagaagaagaagaagaagaagaagcagctataagtttaaggtgtttgctatggagaagatgaagtgtatgtagaagaagaagaagaagctagaagcttacaaggtgtgtttgatagctatggagaagagaagaaggtgtcaagaagaggagtagtgtgtttatgctagctntatatgtgacaacaa

SEQ ID NO: 62482 - DNA, 408 bp, Oryza sativa
agcttgtctgaccaacatcagttgttcatattgcatgatcaagctgaactaggagaggagaaaatatgggcaaccgcattatcagcttctaaggtactttgcaatgcatctgcagcagcttctcgtagtattaatgcttatgtaaagaaataagaaccagctatcgaaagaaaaaaaaaaagacaaaacagccaaagatacagatgtagtatgttaatatggttaatacttgggatgaagctataagcttatatgcttctagcaggtatgcctttttaagatagcgacttggcttacaacttatggtagaatgacagagtgtgtttcatggacctatcttcaagtaagatattcctgagatagttaaggaatacgatgattagtgaaagccaaagaaagacagacaga

SEQ ID NO: 62483 - DNA, 430 bp, Oryza sativa
  unsure (1)..(430): unsure at all n locations
tgacacttttatatttacttgctgaacatttagctgcgtatgaatgcttgngcaaacatgtgctgctccatgttagaatgactgcatacatattttttcttgcaaaatacactgtaactttaaatattttctcatggaatatttttcagtctcttcatatattgaagttttgtactgttactgcagtcaagaagctggtaatattgatggagttcactgcaaattctcatcttttggttcttcattcaaacaaggtggagaattatcaaattttgcaatgtgtgggttctggccatatatgtttaaatcgattcatcctttcaaatccaaaagacactatttcttcttttcaattggggttaacgattgtatctttaattttttattgaaacaactctcgtcttgctaattgagatgattttttatttaa

SEQ ID NO: 62484 - DNA, 415 bp, Oryza sativa
  unsure (1)..(415): unsure at all n locations
agctacgttagttgataacttaatatatgtttaaataatacatgagttctttcaagtagacccccaacagttttgagaactaatagtaatctttgaagtcaatatttggtcatgttttgtctagcccctttaacttttctagcttcacttatttactgtcccttatgtagtttgacaaagacgatgcattccgagcttgataaagataaagtttttcagaactagtgatgtcatgaatatgatgctgttacacgctgaactaatagtatataatgtaaatatgagcagaacagtgattgtaaggctactcctaaaacatcagtgttggtgctaggttgcaaagcattatttggtttttttcctttctatgcttctattctaattggtgcacatatttcttattntctatcaattt

SEQ ID NO: 62485 - DNA, 451 bp, Oryza sativa
  unsure (1)..(451): unsure at all n locations
taaaggtagcagcatatatcaagtatttcagcacctttttgattaaaaatacaagctnttttattataaaacaaccatatattttcaagcataaacaaggtcaagaatgacgtcagacatactccaagaaccataggactaaattaggtgccttaacaagacagaagcgctgtacaagttcatcaaaaggaaatcctgtgtgacagaagctacaaaaagatacagatcatcacagaatagacaaatcattcaaatacttaaaaggtcagaaagaataaggcgtgcaggcaataagagtcctagtcaatggaaaagtctgtgctgtattattgaaccagtccttccagccaatctggcaacattttctaccaggaagtcataaattaatggatcgaatatgacctgctttctcttttatataagtagagcttgacttgctaacgacatgggc

SEQ ID NO: 62486 - DNA, 419 bp, Oryza sativa
agcttgaaaatgcataagcagctagaactctttttacggtcaaaaaaggcattgccatcttggcatggcaagtgatccctaatgcaaatcgcaattcactaagaaactcttagtttgtaccataatctgactcttctattaattgttgatttttttttctcgaagcatataaggatattaaggaaaacttgtcattacccatagaagaaccatcatggtattcatagtgacaaatgctttgcactagggcagttgtgctcgttgtccatcatgatattaattgttgatttttaggcatctatgcagcaaaaaaggaaaattacatccgcaataaaattagatattccacctatggtcccttgctagctcgaacacaaaaaattctaacctcacatccatattagtggttggtgatttct

SEQ ID NO: 62487 - DNA, 448 bp, Oryza sativa
  unsure (1)..(448): unsure at all n locations
nttcccatcgtgttcctgcttatgtagttattgaaatttaagaccgtgatataccaaaagggtcatggcatctggaaccaaatgcccttcctctcangaatatagattaatatatatgggaagtagcaaaaaatgtttagagttttagataattgtaatgaccagatcttcttctttcaccctgctattaatagaatcatttgcctctatctgtgtctgtcatgattatcttgtctgttaaaagagctgtttgttcagatgttcctgcattttgtatcctggcacagtggacatttcttctgcattttaatttagtaatcacagatcagaactgattggtcttagaacttggaaatgagctgacaaaatgacaccaaacagtcatttgacataactggtttccaatttactatacatgttngtattgtattgagcaaatcttccatat

SEQ ID NO: 62488 - DNA, 422 bp, Oryza sativa
  unsure (1)..(422): unsure at all n locations
aacttaaggctgtgtttgacacattgagttgtggctaanccttgatgcatacaaaatggggtgactcattagcacatgattaattaagtattagctattttttaaaaaataaatggattaataggatttttaaaagcaacttccctattttttttgaaaaaaatgcacggttttgatttggtaagcatgcgaccagaaaactatgtagtgaagttggaaaagtacacattccaacacaacctatagtgagctcccacaataactaaagtcacaacacttagtgctttttggctaactttttggtatatttttgctgtcttaaaactttatacagagaaatttcttaagaaataataaatctatttttagaggttacaatagattatatttaattaataatattgaatgacttacatatcatt

SEQ ID NO: 62489 - DNA, 421 bp, Oryza sativa
atactcaaccttgctattaattatgtactccctcttgcttcttctgtacttcttccgaacattcaggaccagagctacagtactgatgttatcatttttcttgaatgcctttgcaaaatacaggccaaacgatcctgaaaactgatgctgaattcctagagtcaatggcttctaatccttttatggatgaaggttcaacagctgcgactgctaatttggttggccaccacctatatgttggaattgtggtgatcacgtgttgtcgctctaaagctggcaaggtaaatttgattggctgtgttctttgtagtgatacacttcacttagatttcatatactataaacggtgctatccatatgccctgaacccttctgccactgaaaacatcaaaattgacgcccaccggatctaactttaatg

SEQ ID NO: 62490 - DNA, 424 bp, Oryza sativa
  unsure (1)..(424): unsure at all n locations
ctcagcttcntaatcaaatctactaatcactaagtgatattttttaatgtgttttcacacaccacggtacgacgttgataagctgatctattatatcacttaaagctacgttggatataatagcatcggtgggttcactgcgcttaaaaacaaaattttaagtcggaccacccatatcctaaattctagatccgccactctgcatcacaggtgaacatccattgactgatcgacgtttgccaataccggacggaaatctgaagatcatattaacatgccgtgttgatgccgacattgcccaagtgcatgcccacgaaacttcgaggaagcctcctagatatgccattcacggcgtaacggaacaccgaaacactgacttaacaattgacaccatccacaagcctatccatcggcggatgaacac

SEQ ID NO: 62491 - DNA, 400 bp, Oryza sativa
gcaaatcctccaaggtgtggcttttgcattttataccagcccacgttggaatgcgtaatttggctcctctcttaacgggggacatattctccggctcactaatgtcacatttgagaaagatcgctgttgttgtgcttgccacgccatgaaacaagttgggaatccacatcctatcaagaacatcatgactaccacacgccctcttgagcttctacatatggatttatttcgtgcccgtgcctacataaattttcgatggaacaagtatggttatgttattgttaatgaatattcccgcttgactttgggtgattctctccatgactagaagtgaagctcaacatgtctttcagcgcttctgcccatcatgcgcaatacctctatgattctcccttcatga

SEQ ID NO: 62492 - DNA, 459 bp, Oryza sativa
  unsure (1)..(459): unsure at all n locations
actcagctggatcgatcaaatcgatcactctggatgacgtgcagtgactgtctccactgctccggcctgtgccggaagttgcagctgctcgtcatgcacagaagctccgacacgacggggccgtcaccgccgtcgtcatcgctcccctcctccagccgccgcaagagctcctccagctgcttcctcgtgatccggatcttcacctccgtcaccttctcgccgccctgcttccgcacctnctcctcctgctacaccgccgccgcggccaatttctcctccaccaacaccgcgcgcttcttcttcccggcgttgcaatgcgcgccgccaccaccgcccgcgagcgatctctcgaggcagttgcccatcactgcttgcttgatctcgattctcgagtgtaatctgaaatttgatgcgaattgcgaaatggagaatggtgagaggaagaagtcgatctcctct

SEQ ID NO: 62493 - DNA, 155 bp, Oryza sativa
aacaaagaaaagagaggacagaaaccaaacgaaacaaacaacgaaggaaacgaagaaaagaagggaagaaagcaaaaaaggaagggaaacaaacaaagaaacaaacgcaggaaaaacgaagccaagaaaagaaaaagcaaaagaaaaaacgaagg

SEQ ID NO: 62494 - DNA, 380 bp, Oryza sativa
  unsure (1)..(380): unsure at all n locations
catgcaagctnnttcattatggtttatcaaacttttgatagttatttctgcagctagtccatataggtgaggacaccttgcaaagttggggcagcaaagaatctaaggttcaggttgacctgtctgaacaagaactgtcatgtggatgcaagctttttgaacacttgggaattatatgctcccatattatcatagtaagtttgaatattaagcagttctcataacgctggtgtgtttttgtgtgttaatgcatagtgtttttgcaggttatgggacagtatggtttcacggaaatacctaagaagtgtatcctgtagaggtggacgtaagatgctagagattcaatccccaagcacttgaggagtcgtactttatgataa

SEQ ID NO: 62495 - DNA, 437 bp, Oryza sativa
  unsure (1)..(437): unsure at all n locations
agccttatatcttgaactgatctaagctgatgtgtatgtnttgatccgantattatttgactcatcgatctacctttatacgtcggatgaacagacatccaatctatctatctagataagatgtccatcaccgaaatgtatttatctgatcactagaaaataaaaggaaacccaagaagaggaatggaaacaggagagcaaaagctagctagcagctgaagatcatcctcagcttgtagtgcagaaaacaaaaggaagagctgaatatgacctggagtctgatcccctacgtgccaccctgctccatgcactgacaaaaacttttcatgaatccagcacatatacaaaagcattgatcgatcagtccatgtgtacagcaggatgctagtactgtcatgcaatccaaaacattacagagaatgttcataaatacactg

SEQ ID NO: 62496 - DNA, 452 bp, Oryza sativa
  unsure (1)..(452): unsure at all n locations
tttccacanaagcaaccaccagctgaagatctactattttctgcttcaacatccaatagaagatatcttgatgatcaagatagcaccaagaaatctaaacacactgcttcaattccaaggcgaatggaggctcaaggcagcttataagaaactaaggctggcgaatctggattgcctagagaacaaccatttttgcaagcacaagctaaagatgctcgcagcctgactccaccatcacaagagggatatgcaggccctcaagctgttagcaagcaacgtggagaccctggttctatatcaaggcgaataagagcccaagatgctagagtcacatttgtagaatcaaaagctgatgattccacatttaccagagagcagccttcggatgcttggcaagctacgggtcctctcccagagcacaaagtatatgatgctcaaagctctacctcacc

SEQ ID NO: 62497 - DNA, 436 bp, Oryza sativa
agcttggacggcgcgcgttacagtatgcatgcagcgttcgttccgcagttcatcatctctgcatgctaggccgaaaaggacccctgatctaacgtgtatatattcatgtagcagtagaagtctaacaacaaaccagcatggtaaaaataaacctgctgttagctaattaagcatccggattgcatctggtgctgtgaaaaatgcagaggtataaagtgcaggggacctgtgagctagggagggggagtccaggagcagtataaacggccagggtgggggtgggggcaaggaaaccggttgcaggaaggcgtacaggaggttgatatgctgctccactgccggtgaattgggttccaggtcgcaagcagctggccgaggacgacgccagccaagccctgccccgtctgcactgcagcctctctctccccttttgttg

SEQ ID NO: 62498 - DNA, 456 bp, Oryza sativa
  unsure (1)..(456): unsure at all n locations
ntattgaaattggtggactntaagacgtangagagtatttctttttgggcatgctgctcatgcctattttcagtacctttcgcattcatcaactgggcttcaaccctcatatcaccgtgatgttttgaaagggaaaacaaagagctacactctgagggcattgttgtatctcctccatataattntgaactacggngtggagttgaaggaaatagttgaaagtgggctttcaacagttcctttgttgccgtggcaggtacatcacgatagtgacattaattctatattatgataaaattggtgtgtaatcatatgctttggatatatgcaggagattataccgcaactttttgcccgcttgagcttccacccagagaagatagttaggaaacagttggaaagcatattggtgaagctagggaatctttctccttgttcaattgatatcctacttta

SEQ ID NO: 62499 - DNA, 434 bp, Oryza sativa
  unsure (1)..(434): unsure at all n locations
tcaagctgaacctttgctcgtcccgagtgatggacgaanagaaacaaaaacttggttgttgatcaggagttgctactatgctgtatatctcanagatacaggtgcaaggtatatatactctcttcagattaaataatctttggcacgatggcttacccttacccctgattcccacgagacattgcttctctttgccttcggtgggtgaaagacagaacaacaattagagcaccaatcacccaatctttattcaacttttattccggaagttttcaaatgattntgcaaaagaaagccgagttcctcanatgattcactcagtctctctaagtgtatcaatataaattcctcacattgttgcctttttgattcctactctaaggtttgatatgtggagctcggtagagaataaacatggcatacttgcattcaca

SEQ ID NO: 62500 - DNA, 452 bp, Oryza sativa
  unsure (1)..(452): unsure at all n locations
gttcacaacgccgactacacatccctntttcttaccattttgccatacatgctgcacaagtctaagaggcacgccgaatttcagcgcgacttgcttcgaaacgccacggtggagcacaggtggatctgccttcgccaacaacaccaggtatatggcgatctttagttcgttcgagtagtacctcctctttctcaggttctcaccttcaaagaacaaagcatatataatcaaaacaagctagattctgtagccattttttttggttaacatgtgagaagattgagtacagattgcctgatgcacacatgcatgatatgtgataaattcagggcaagatcactngtacaaagtcagttggaaccgaaacatcttagagtaaaacaaattcggagctagttaaaatttcacatgatccagtaatactaacaatatgtaagtaaactggcactata

SEQ ID NO: 62501 - DNA, 422 bp, Oryza sativa
  unsure (1)..(422): unsure at all n locations
agctngtacttgtatgagcttcttcaatatgttgggctctgcggntgagcacgaataatttagtttttgataaatcaccatccatctcttatatgcaggtaattttcaggacaacatattggctccgatactgggcgcaactacaaaagtttgaagaagacggagagtttataaaagttgcatgttgcaagcttgagatgacaattatgcaattttgtcaattatggttggagattcactaatagacttcaataatgtgttctccttattttagtttcgttacttattttgttcattgggtgttctcaatgatttattgaactacactcttatttgagtactactatgtaataattggctgtaactcttttgagcaaaggccgggatgttatattccatttatctaaaaaaatanaaatgat

SEQ ID NO: 62502 - DNA, 421 bp, Oryza sativa
  unsure (1)..(421): unsure at all n locations
tatatttttaaaacaaaantatacttatctaactaatatttataaatggagaaatgaattgaacgaagaggaggcgtacatacgtgggttctttatttctaaaaaaaaaatataacttatactacatgctttgtgggcccgtttaaagagaatttttttgaaataatctaatggtgtaataatcggttcaccaaatttaataaaaatatgttttgtttnttagaatttttaagaatttcactaatttattagagcatcacatggaaacatangaacgtttgcaggatgccatatggtggattangtgtatttttaggaagtttaatggactnttagtacataatggatacatctaatctaatgttctanaacatcgatcgggttcgccaatttataatgaaatcaacgggtgatattacgt

SEQ ID NO: 62503 - DNA, 431 bp, Oryza sativa
  unsure (1)..(431): unsure at all n locations
agctnttcccgacacataatatgtcagtattctatgtctttgctagcagattatttgtagttaaaaaatttggggaatggggcagtgacacttttctggatcacaattcaaatccatccatcttggcatcaacatcctcaaataacacgttttcatcctagagaaaaatagaaggatacccactcttagcacatgattgtgtatttaataccgacaagtatgccatgtcaatagtgattaattttcacatggatcttcttgcgatactaccgagagtgccttataaattaaaaccgcttgtgaaaattatgattgttagtgcagattcctacgagaaccacatgtattctgaaaaatatgggatagagatagacatcataattagataaaatattttatttaacattaatttaattttttaaaaaataaca

SEQ ID NO: 62504 - DNA, 447 bp, Oryza sativa
  unsure (1)..(447): unsure at all n locations
taattaagtatatagtatttgtggctagcatatggntaatattntgtaataatggatggttgagggaatgccttatgccgagaccagaataaaaaaaaaattcacatatctaaagaaaacaggggatgaggagtgacctgttggaagaagggtatcatgatggccatgacgagctggggacggtactgccgctgggtgacgatcatctgcaggccgcggctgctgttcgccttgtcgctattggcggccacaatgtcctccagctcgtcctccacgtcgctgacacctcggatcctggtgagaagcaccctaactctgcgcttgtctctgccttgctgcagtangctgttgggcgtctccgggaggaagagcgcgccgagggtgagcaacccgccggggacggcggcgactgcgagcgagacgcgccatccccagccttgcctgatc

SEQ ID NO: 62505 - DNA, 419 bp, Oryza sativa
  unsure (1)..(419): unsure at all n locations
agcttctgatttgatattttttgttgtattcgtangntaatcgctaccgcattttatagtaacccgaactttaatttgtaggcacgcaagcaagaaattaacgtaacgtaggtacgtatgtagcttgcaaagacgcaatgacaaacaaaatcgagaaggcaatcatatatacaccgtacattagcatgcgtggaaggatccctcttgaactttattgctggaattgccgttgtgttgccaacaattaaaatggcactccctccagtcgtcagggatgatcaaacttttaaaaattatagcagtcaatttatattatagtaagtttattaaaacctaacaaatctatatatttgatgatgtttttcaaagtcaatcaatttgtactggttntttaactaagtatttgagaaattgttgac

SEQ ID NO: 62506 - DNA, 421 bp, Oryza sativa
  unsure (1)..(421): unsure at all n locations
tggtgctcaagtttatatagaatttgcattgttcttcatagagatatatgtttgtagntagctaagctacattgtcagataagattacttgagcatcacgtacggttgtgacatgaacatcatgattcattcaggtacaaaaaactgtctcaacgatgcatcaagtatcaaacatgtaaaagactgaaggaatctgccgtcgcaaggaatcatgcaaaagactgaagttcagtgagttgtccacctttatcttcatatgttttagttagctaagctacattgtcagataagattacttgagcatcacgtacgggtgtgacatgaacatcatgattcaggtacaaaaaaaactgtctcaacgatgcatcaaagtatcaaacatgtaaaagaccgaaggaatcttgccgtcgcaggaatcatg

SEQ ID NO: 62507 - DNA, 387 bp, Oryza sativa
agcttgctcaacaatatacggcccctcccatttatgttcaaattttcctctagttttatgagtcaccacgatgggacgccgaagtacaagaacatattccccttttcggaaaacccgttacttgacgagcttgttgtaagcccgcaccatattctgtcgatataattccaagttttgaacagcttggagacgaccttcttccaacgtatccagctcctggaaccgaagccggacttgctcgtcttgagtgatctcttcgtggatggccactcgaagagagggtacttctacttcgagtggtagaacagcgttactcccataaacgagtgaatatggagtgcattgtgtatgggtacggacagtgacgcggtatgcccaaagagcttc

SEQ ID NO: 62508 - DNA, 463 bp, Oryza sativa
  unsure (1)..(463): unsure at all n locations
tgcccttatgtttgaatggaatcagtagtttatataaactttattgaactgctttagaccaggggttcaattggtcagaccaatgaaccgttgaaccaaaggcttcgccggttagattgccggtccagtctcaataactatgccagctactgggtagaaatttaataaaagaattgaattttgactggtaaccggctgatacatttccaaatttaaagttccggtttcaaatttgaatttatatcctctggctggtaaccgcccctaatttttctttcatagtgttggagaaacaatctatcacgtgaacgtgcctttntgggacccaagcaaatctcactccttttattgcgatattagtcaaagtttccatcttttcactagctatttctgattcagtaatgcttgtcaaatattttttgtcagaacgttgtgaattatgtgataaatggtatttttgatg

SEQ ID NO: 62509 - DNA, 435 bp, Oryza sativa
agcttgtgctaaggctataaatagacttctaggccatgtaatgggggatccccaaaaaaatatttcacgaatcaatacaattgcttttacattccaactactgttgagagaaccacgcctttcgacgtggcatagttgtccattcgacaacatatactataataaattggtagttatgattaatttgattatgtaagtaatcaagtgaagttgaacttagttctattaattttttatgttatgattaatttatagataattttgtactaactgatagttacaaatattgtgtatttaagtaaagttacggcccgttagataatttatagttaaaggtgtaatatattatatgtactcatccaaatttgcaatagtagtattgtgttagaggtcatatctaaataggtacaaacagtccgtagcaaagaacatgat

SEQ ID NO: 62510 - DNA, 358 bp, Oryza sativa
attatgcgagctctgtacgttcaactcgggaagactataacattatagattcatgctatttcttagtgaacaattcgggattactagtgacctatgaacacatgaggtcaagatatataatgagtacttatacactatgcatgaacgtaatatactccccaggttaatatatgaaaaagatgtattcattgtgtaactatgatgggacgtacaatatatgagtgccacaacgtataaggctttgggagtctactgcacatgagcttatttacaaagcgttctgaccaatgctccaagcgagtgctggatatattgtaatgaagtatacgctagccagtttctatgaccgatatagtgt

SEQ ID NO: 62511 - DNA, 399 bp, Oryza sativa
  unsure (1)..(399): unsure at all n locations
agcttgtagtttgtatttccccggagcctttgctctctatatcagcgngacaaaaggggtcaggtgtagcgtggcactgagttttgtatgccgaatatgttgaatactgttcgtgagctgtgaacttccaataaatttgatcagactctttctcatctagatgcacgccgcggactgcggtccataaggccacaagctggtcagagaaggcaaccgtgatttgtgggtttgactgcaaggccaagttcccgaccgaagcatcatgttcctttccttggcgtagggacttccctctttatgtagagattgcgtaactaatggcatgagatctcttgggctctgctcatttattcatgcggaggcccagaagcacgtcatgtttccttcaccaacggcttt

SEQ ID NO: 62512 - DNA, 427 bp, Oryza sativa
ggcctccatctcctcccacttcggcatcgcgacgctatttctgtcttaccccaaggggtgatggtacttcttcttggcggcatattccttgtttctttccatcatcgcctgcccttgttgacctgtcttgtgagcaacgaactcctcctagtgatcccttagctttcggaatacgtcgaagttcggtgtctgccccttcacgatgtatttccggtacagaacttccttgaaggtctggaactgttctgccattttcttaaaagtccactgtttcactatgttctccgtacccgcagggagccgtgaacgtctctagcattgtggttcacacgcatctcttttctgatttctggacaaagctgtcattatctccgcgtgcccttgttctgcgctagtacaccttgctgacaagcacgttattcctcac

SEQ ID NO: 62513 - DNA, 427 bp, Oryza sativa
agcttcatgaaatggattaacattttaaatgccccttacatagacaaaagctgaaagcttctcaagtaagcctcccaaaacctttggattattttaaaacaagtcttctccattgaggaaggccttcaaaggcttaaaacaaatgtaatcgcaccaaggtctattagatgcttcttaacaacagacttgctactgcacttaccactcttcttccctgttggatgtttttcctctggacttgctcgctgcttcttagcagcaagtcctgtagaacaatgccaatcacagatccaatcaaaaggaattttctttgtgtaataaaggaaaacacaagaagcctagaattgcgtaaatatgaagaaccttttgctgctggagatcctctccggcttcttgtacatctctgaaatagaaaaccttttgtcag

SEQ ID NO: 62514 - DNA, 408 bp, Oryza sativa
tggttcttgcacctcttcttctgaagaatcctcttcagacatattattcacgtcttttctatcttggtctatttcctgtgacagaaacatgtataaccctaataagctgatgaagtggcgatttaccatgtttgacaaaaagattcattcgaaggatggatgtttaccttgtgggactgggacggatctatcactgttggttcacaaggcacattattatcttccccactcgtgaatgtgggaatgttatttccatcgtcagatgacgctggggaggtacatctggttgatggattggatactgacgatccaaaagcatctgactgcatcgcagatagcaccgatataggagaaccattctcttgatcagagccagatgaagatgagccaggagcaagcttcaattgc

SEQ ID NO: 62515 - DNA, 343 bp, Oryza sativa
  unsure (1)..(343): unsure at all n locations
agctggcgacgncattaatcgatgagtactccctgctgggctggcgcgccatgctgactgaagtcaatctgtcaccgaaaccaggcctcgtggatcgcattaactgcggtgcgcacatagatatggcgctggaagatttccaccgcagcgcgctggcgaatcaaggctggctaccccgtttcattgaatttggtgcctgtagtgcggaaatggcaccagaagcggtactccacggattacgcccaattggtatggcttgcgaaggtgatatgttccgcgccactgcgggcgttaacacgcataaaggcagcatttttttttatggctggtatgtgcggcaatt

SEQ ID NO: 62516 - DNA, 414 bp, Oryza sativa
tgccaccagaggcttcatattgttgccaggtttttgttgttattttggaagcaagaattgccgctgctgttcccgggctttctggcttgataaccccaacccacaatgttcttaattgcactttgtcagaatctacccacgggcgcgcctgctggcagaactgtttacaatatgggcagaacggatcggcgaagacgtatacaatgaccggcgcatcttttttaccgtcgaggagccaatgggattgttccatccgttgccacatttcgcgtccggctggtgcgtaaatatctttttcgataagtgtgtaactcagggtttcacctttctcgttgtacatgtaaccagagatagcgtgcttaccatttggagtcaggtagatggtgacgcccatattctgatacttttcgagat

SEQ ID NO: 62517 - DNA, 417 bp, Oryza sativa
  unsure (1)..(417): unsure at all n locations
agcttgagaagtccaaaagntttagtggttgtccgtactaccttgnggntagtattattactctatcttttttcaattgctttgcttttttgtaaccagttaactttatatttttgctttttcttattaataggtcaattacttggattttcttaactttggtatgcgaaaaatgctgcaagatactccaagaatcaaagtatggaaaggaacaatgataaaaaattttcaaagtttgataaaataagcaaagaagtctatggcaaaagaccgataaaagatttttctgagagctgttacaaaatggtaattttatacctacttttttagttctgaacttgctttattttaaattgtttactctttaggtctatcattctttttgtagaatgaaactggtactgccaaagcaacttt

SEQ ID NO: 62518 - DNA, 443 bp, Oryza sativa
  unsure (1)..(443): unsure at all n locations
tcttgaccaaatcagaactcaccaagttgntccagctacctccatcaatgatcacacgtgcacgacggttgttgatgacgaagaanatctgaaacaaattatggcgttgcaacctgtcatgctgctgtacctgcgtgctgagcacccactgcacaatgatggtcctgtagttcgttgtgtcatcacgagcaaagacttcaacatcctcatcctcaacttcttcttccccctcttcctcttccacatcggaggtggtgatgtagccatcttctgtagcaacataagccggttgactagggcaatctttctgcacatgcccaaacccttggcaacggtggcactgaatgcgtcccgtcgaggcgacagatgaagcactcttggcgggtacctgcgaggaacctttacctgactctgcttgtcgtggtggagatggtttggtgtcc

SEQ ID NO: 62519 - DNA, 424 bp, Oryza sativa
  unsure (1)..(424): unsure at all n locations
agcttcataatccccttggcttatacgctttattaagnncaaangatggattgttaagttagttggcgtatatttccttcgttccttcatccctaaataaaaatatttcttgagtttaaatttcgcttaaaatgtagctatttttcaactaactgtcatatcaacaaatcacaaccttcttgcattttttcacatatatattttctgtgtaaccaatcacaaccttaaatcactcaattctgcatactttcttaattagccttaaaagcctccgaacatacttacattttaaattttgagatcttacatggagtctagctgacacggaaaaataatagtatagctagactagagatcttgatatatagtcctgcgtatgaaagtggtcctttaagaaattgctctcatttaatcatggagagct

SEQ ID NO: 62520 - DNA, 381 bp, Oryza sativa
  unsure (1)..(381): unsure at all n locations
ttgtactnttattagaatactcttctaaatacatttctagtattgaaatactttacgactatatgagtacctactttacattatgttcatgttgtactgaatatactgctagcctatctgggagatgctttggtgcgggtatagtgtttgcttatacaattactctatgtcatgacgatgatattagagtagtatctggtagtttagacgtggtgtctagattacgggatatcattatttggggttatatattgtggatgagaggtgggccgctgatggtgacagctcaatacgggtattcctccgcgcctatatataatcctaagttaatttcctagggagggtactcctccgtatttagccccggttggatggtcatga

SEQ ID NO: 62521 - DNA, 432 bp, Oryza sativa
  unsure (1)..(432): unsure at all n locations
agcttgagggcgcggntgaacgcggccaatgtcatgtcctctgcggcctgcttgctggtgaactgcaagggcatctgaacaatgaagcattatcagtacaacagtatgtctgcacagaagataccagcttctgaacaatccaccgaattggctcacgcgctcaaagcgtgctcacaagatgggttcaaaacaagttcaaattcgggattactcggagggggagccgaggaattaccttgccgagcagctgcgccatggaggccatggagtagggcacgacgacctcgaggacggtgccggacgcgccgggcacggacagcagccacccgagcgcctgcggcgaatgcgcgctntgctttagtctatgcgccaaacagtactaccatatcggatcgaatctgccggcgaatcacggcgcggcggcgcgcaagg

SEQ ID NO: 62522 - DNA, 449 bp, Oryza sativa
  unsure (1)..(449): unsure at all n locations
tgattctagtatttgattatcttagtgctataatgtgtttaagggtgatcactatctttgtgaatgacacctangttaagtagtatttgattgcacttagaanaagtgcaggatataaggtagctctaatcttcttatagtggatgtgnttttgttatgtctgcgtctaggcaaagcatttgagtgttcacttatggtcgcaatagagcaagtgtagtgtggcggaggtaccgatagaacaggatataccttcagttgatttgtgcaaaactgatgatttgataaaataatatttgccccaacacaaggagcaaagttgggaactatntttcaatatagtatattatttctttggtaaatcccatgtacatgccctttgtagcagaaaactacnggttcacaaatttcacataactacatggagcttgatagtactattaagtattaac

SEQ ID NO: 62523 - DNA, 386 bp, Oryza sativa
agcttgatggagcaaagaccgattgatacttatttttcacttgtgaaactatgtcggttacatctatgcctaaaaccggaattgttagtgatcctctccctgttagttttattgatgttggcaaaaagaaagggaaaagtgttattattggggatcctcggcccaagaataggataaaaaatgcgaaggccgaagatcataaagttgctaagggtgagtcatctagttcccaaaagaccaaaaagccgaagctcacttttgagatgcttatggctaagtacaataaaggattatccggtcaatgatttgataatcaaactattgattcaaaagaccaagatcatcttgttgaaaaagaattggtctaacaccaaagcaatcggagc

SEQ ID NO: 62524 - DNA, 429 bp, Oryza sativa
  unsure (1)..(429): unsure at all n locations
tcacgtcttttcttaactgttcgtgggtggtngaccacattatgttctttgataacaaaagaagtgtccaatgttaatcacaggagagaagccttatcattgacatttcacaaggattcattcttcacaagctttgtgagcttctcaacaaatttcttgaaattcccaatattagagcaaggtaactcttaatataccctgcatgtccaaccctaatttcttggtttgtggaacatccgctcccatgcagntctttctcattgtatctttaatttcccatatgtcgcagatttatgagtgataatttattatctgatgtgctggaggcttttctggttattcgtgggcctaagttttgtttgggcccaanataaggggaaacccacanaaaagggggtttttttaaaaatattttttttataaaaaaaa

SEQ ID NO: 62525 - DNA, 298 bp, Oryza sativa
agctgatatccctgccgagtggactctatgtctctcagatatgcctgaggataagaaggaatattggactatgccctctgatgggtcgaagaagcctaacagcactggaactgggggtgttttaatctcccccgccggagaaagactgaactacttaattgggaaacatatacatgcgtcccataaacgggcggaatacgaggcgctgctccacggagtaaggatagccatttctctaggcattcgcccaaaaatcgtcccgggagactctaacctggttgtgtacaacgcaagaaag

SEQ ID NO: 62526 - DNA, 439 bp, Oryza sativa
  unsure (1)..(439): unsure at all n locations
acctataaaactcagctngacatagcccgtgcgccgccgaccgtttgtccgttgccgattcctccgcccgattcgctcgatatctgaaccgcttcttgaattaattgagggtaaatattcttcctatcctcctctatcttttccgccaagaatcggactttatcccgaagaaatcaacgcggaatcgagctcgattcgagtttatctctccaccaaaccctatgttttcccggcgcgattccttgcgttccaagcccgatctctctctcccatgcctataaatagaaccccaaggctctcctctttcgtttcctacctctagctcgagctcccgtgccctagtcgtcttgtgccccacggctttagggcccccaatttcgcttgccttttcttttcaccccttttctccccctttacccccccgggggggagggctccc

SEQ ID NO: 62527 - DNA, 268 bp, Oryza sativa
aagtagatgcaattctatttgtcgaagagcgggtgaatctacatactgctgaatgtacaggtgtagctgaatcaacaaattcaagattatctgaattcgcagctgaggcctagatgaatctaagtgatcccagagcggagcagctgagccgtgctcggtgctccacagttctttgtacaacaaacgcatgcacggaaaatgcctatagcaggtgcagatcttgcaaattacactcattttcctgcatcgctgagccacgaaaatcgac

SEQ ID NO: 62528 - DNA, 425 bp, Oryza sativa
  unsure (1)..(425): unsure at all n locations
ntacgctgagtctgcgcaggagcagggtaagctgctntgcattgaaagcctgctccaggacctgcataacttttcaggatggtccatatgaagatcagtggcatcaacgacagtgcacttctcatgatcagcgccaacaacgagcagtaccaccagcttctacagaggctctggtctctcacacttgacattgatgacatgctcaacaaggtctcttgctatctaacaaaaacaagggtcctctcaattcaggtacacagctcattcatccttagaaggctcccttttcgacgccgcattgtccataagatcaaacaatcaatagttgaattgcaagaatggctattgctacccacggaaccaattaatttaagggaaaaaattttccccccgggaaattttttttttcctcccccctcccccca

SEQ ID NO: 62529 - DNA, 162 bp, Oryza sativa
gcacaacccgcggccttttacagagggcagggcaaaccccaataacacccgagggacgcaccaagaaagggggcacgcaccaaaagccgcgagataaacaaagcacaaccacacgaccagaaaaaaagacgaaaagcccgcgccaggacagagaacgaaaaa

SEQ ID NO: 62530 - DNA, 417 bp, Oryza sativa
tcaattgctgcactgaagaaaaacttaactttgcttggttactcctctgcagcttcctcatgactttccgtgtgacaatatattgactatttatgtcacattctgttctccataaagtgcaagcagtttgttcaagatttgacaatgtcacaaaaatggttttgatctaagctgtatatccaaatgtcaaattaaaaaccgacatttatatgaatcaggacagcgagataacttaaaataagtactgaattgaaggcccaatacggacgagaatgtaagatagtcttccatgccagaaaacaaccaagcaaagccaaaagtcttctgcatgtactacagtacctaattttttttttggttgaaaaagggggaaccaaaaaaaatttttttgggggaaaaataaaaaaaaaaaaaaat

SEQ ID NO: 62531 - DNA, 424 bp, Oryza sativa
agctctttctttaaaggacttgggtgattttatttactctcttggaataaaagagagcacaagggaacagtggaataattttaactcatgaaaagtatgccaatgacattctgcgccgagttggatgcaagattgtaaacctgtaagcactcctttgctaacctcataaaaattattagctcatgaaggaacaccacttggtcaaaaagatgccactcaatacagaagtatagtaggagctttgcaatacctgacattaactagaccagatatagcttatcctgtcaataaggtatgtcagtatttacatactcctactgtgactcactagactttggttaatagaattctaaggtgtattaagcatactgttaattgggaacgtattaagtgcactcagaacatgccgtgcactcctgtattc

SEQ ID NO: 62532 - DNA, 427 bp, Oryza sativa
gggctgtggagaaggtataccctatgtatatgttattatgttctacatcatctatcttggatgaaaacaggacgaaaataatcaattggttgagcatcgtgattccgtataagtggtaccgtcttagtgccgtatgttctagatgccacgaaatagttaacccgacgaatatgattaacttttgaccgactgaagaatcgctttcgtagggatattaccgtttctaaccgtcttcacagtgacatatgcctatttgttgcaagctgcataaccaagcaaactagttcgattgatctcttcagctcttctacgtgctcgatcaagctagctagttctacttcttaaaagttttgtttttctaactttttaaaaggatgtttgtttaaacccttttaaaaaccccgggggggggggaaatatttttttt

SEQ ID NO: 62533 - DNA, 373 bp, Oryza sativa
  unsure (1)..(373): unsure at all n locations
agcttctgcatggttgtataagaacaatctgtctntgtggaaaatggcttttccataaaaacagctgggggctatgaagggtaccaaactccgattgctgagggcgactctagcgagagtactcttttattgtaacatgcagattcaatttattttcaattcttctatacatatcatgtcatgttacccttgagcgttcgctcggngggctatttcaacatntgtgaagactccctgtctctacgattctataccgggatcgactaagcgagtacggcaaatgttctgagtattgatttcatgaaaatcagacatcagaacaatcaagtcagatttcaaggctttgtcgcagactctacgcctactccgatac

SEQ ID NO: 62534 - DNA, 440 bp, Oryza sativa
  unsure (1)..(440): unsure at all n locations
tnctcgtgttctcctcttccgtgtgcccactttcacgttttattccgtgctccgnagcgnanccgccgctgcacgaagtccgccgccgtcgtcagtcatcttctgtcacgttgcaccgccgcctccgtcgtagccgccgctcgccgatgccgccgttaggtgcgccgtggtgtggagaagctcggccgcccctccgtttgcgccgtcgaccaccgaagcgccgccgtcgccggtaacccgagccgccgccgccgttgccgctaaccctagccagcgccgccttcttcttcgtcgtcggcctccgtcgtgcatcgtttcttggtttggtgagtaccaacggggtttgactttgttagggggcccctttttttaatctgcccggttataaaggagaaattgtgtgcccccccctttttttctctcccccgggggggtttttt

SEQ ID NO: 62535 - DNA, 413 bp, Oryza sativa
agcttgtttggaacacgagatatagtgtctcttttatacgaaggaattgatgatgagattaagatgggaatttgatttttaatcccaatatcttgtttagtagaggtgatggaaattgatagggagtttatttggagattaaaacggatggctgagatttgtttagacaaaataaaggagaaattctctcctaattacctgccactacccaagtattgaaaatgagggagatccttccttaattcctcatcccaatcttaccaaaattctcatgtctcccaaccaaaccaaacacttaataacctcatccctctgaactaccaatccctcctaaaaactccctccaaccaaacgggccgtaacgcggtagagcctctcaagagcaagacaacgcgaaatcagacgatagagtc

SEQ ID NO: 62536 - DNA, 209 bp, Oryza sativa
  unsure (1)..(209): unsure at all n locations
gacacatanaaactcagctagtatcgatctttatcagaactatatcattcttattattatgtttcgaacagtgaccacattaagtgcgactataagaatcgatatttcttgatgcttncagtactagaaatcttgaaagttttcacgtttcaagaataaatattatccagctcttcgtgaggtacgcaacttgctaaacagaaaactat

SEQ ID NO: 62537 - DNA, 117 bp, Oryza sativa
gccctaatttctctcgcctctctcattgttccctccggcttgtacgggcttttcgtgtcttaccagaccgttcaacagactcgatggactcgttctccttcatcttttccgcccgag

SEQ ID NO: 62538 - DNA, 437 bp, Oryza sativa
agcttaattataataatccgcagatctccatataacagctttaaacttcggatgatcatatcttggtcatacgaactctgaatcgacccgttcaactctcctaatgtttgttataacctaaagaaccctgtgctttctttttatgtattgatattgcttctttataggcttgtagctttgcttgtgtgcttcgcgtagcttctgtcgttccggaggttcccgaagcgtggtttgcggtcgtcgccgaaagttctgaaggccgttctctctgagcaaggcaagtcacatcattcttgaacatattgtaatcccagttataaaattatgttgaattaaattattgcattatcgctttatttaaattcccgcgttatcaccgttttatttagccctgcctatttaccttttgtaagacattattattgctaattgtatta

SEQ ID NO: 62539 - DNA, 350 bp, Oryza sativa
cgccttgggaacgacgaccgggttcgccagccactccggatggatgacctcacggatgaatccggcctcagaagtcgcgccacctcctcacggatgaaggcttgacgttccggggcctgccgccgcactttctgccggaccggccttgcgcccggccgtacggcgagacggtgctcaatcacctccctggggaccccgggcatgtccgccggtctccaggcgaagacgtcggcgtttgcccgcaggaaggagacgagcgcgtcttcctatttgtcgtccagaagaccaccgattcgtgtggtcttggaccggccgtcgcccagggcaaccctcctttgacacggaaaact

SEQ ID NO: 62540 - DNA, 438 bp, Oryza sativa
  unsure (1)..(438): unsure at all n locations
agcttaaccgnttcttttttttccctgaggagcattttaattgtacaaggagcagatgatggattgagaggcgaattcacagggtaatatgtttccctgtctcctgaattgctagttcagatcctattctacgatgtactgcggaaagggaccacatgatgcatgttattgaaaattgacactggtgcatcttgtgttctgcatatctgagccttgatggaaagaaattataattctttgagttagaactaaactgaggtatgaatggctctttttttttggtttttcacggtggggcaacgctcaagtgtgtgttggggggaggagccaagggatgtaatgaggactctgttttacaaccgtagagatagtactggtagtatgaataatcatcctcctattgtgtgctaagcttgaaagacagatgatcagatgcac

SEQ ID NO: 62541 - DNA, 352 bp, Oryza sativa
  unsure (1)..(352): unsure at all n locations
tcacctgtgattcgtagcccttctatggctggtagtgggtcatcatctgcagctgcttattcatganaaatatgtttacaataagagccaaagaaatactaagaagaatattcaataaatataatatatataaatatgtaacaccttcagagaaagaagaactatgctcttcaaggacagtaggaagataagggtatggcgggttcgcatcatcaacaccagatgccaaattatgtgagccctccggaccccattgtgcaggaggttcttgtgaaatatgcgtttcagctccctccagattttctgggacatcattcctaacgaggtccttgaatgacggattctgaattct

SEQ ID NO: 62542 - DNA, 433 bp, Oryza sativa
  unsure (1)..(433): unsure at all n locations
agcttgttagttaagaaaacaatataacatttcactttctgacatttcaaatggaactagtatgacctacttcttcagtgccttatcctctatggctcaaagaaacgtatttcctacacttggtggatgatgatctgtcccattccacttaattcactatgtgtttgaatttttctctggatatctcttcctgatcctgatgacttaattttgtattatgaacaagttctgtttatcttctagggtctatacacaccatgaaattntccaccaagctgcaaccaatcactagagggtgcttgtgttaccatttgatattaaatatccatttgtggcttgaggtgtatcagataataacatcacttgcaagctaattaaaaacacaacgcagggaannatatgcatcactatcgttctgttatcagaatatatc

SEQ ID NO: 62543 - DNA, 439 bp, Oryza sativa
  unsure (1)..(439): unsure at all n locations
tgagtgatgatgatcgatcatcttctttttccaggctgtacggcggcgttttgacaaacgtatctacatttcnctaccgaccttaaagctatgcagcacatgttcaagggaagtacaaagaagttagcaaaaagagcaatgagattttctcatacatgcaaccttgaaactgaaacttttgataagtcttgaacctgaatctgaaatccgcattgcaggtccatctgggtgacacccctcacagcctcaccaagggcgacttcgagagcttggctcgccggaccgacggcttctccggctccgacatcgccgtctgcgtaagccacaccacagccacctatcccatttttctggttagggccaaggttatattggcccaattgggttttcccaaaaaacccctttttggggggttttccccgaaaaatttttttttttt

SEQ ID NO: 62544 - DNA, 455 bp, Oryza sativa
agcttctatggaatcagcttgcatcacctatacccaaattccatagtgcatatcgccaatttcgtccatgtttgtgaagcctttttgggaatcaagcctcactttgccctgtttcgccggatcttcttcctcaaaccccaaccgaacaagagaaaaccgtgcgtagtcgggggggcaggattccagctaaggggaactctgagccagaaatacttctcaatgcctttcaagacttcaaacaagggatggcatgcgaactggttttatgttcagaatcctgagcctgctcttcctgaatattcttgtcttcccccggggtaccaagatacttggaactctcttccaatcggagatgaagctgcccaagccttggaattgttggatcgcatgttaaaactcaaagaacaaggcttgcaaggagagcagattactcggcatttcatcaaatgccgact

SEQ ID NO: 62545 - DNA, 426 bp, Oryza sativa
  unsure (1)..(426): unsure at all n locations
ntagcgaagtccaactggatcactgccgttgggagcttactcttgtgacaacattgaataagctcagttgcatatataagttttccgagatacttctccccgtcaagaaacttgtttggtcgccgtcaattagcatagggagaaacttttgcagccgatttgtaaacggcttggcaatgatcttaacagagcaattttgcaaggaaatgggtctatagccgtccggcgtatttgttttgccgggtttagggatcagcacaatctacactctattaatcctccccaggtcgtctgtttttgcatgaaaactgtgcatcatctgcattaccgtgccagagatcgaccgcccaagctgccttttnggaattagggaaaaacccccccggggggggggccccccccccaaaaaaaaaaacccaccccccc

SEQ ID NO: 62546 - DNA, 421 bp, Oryza sativa
  unsure (1)..(421): unsure at all n locations
agcttgcatcaatggagcactaactttctgtttctgaacagacagagtataagaaacaatagtatctcagatttctttcttttcaattcttatcaaagtctaaagtaacaaaatttaattaaagatattntttaaaaaaacaagcatggtagctgatgcagtgcagtggtccaagtttaagcaatcataaccttatcaagtgcagggggcaaattgaaaattgaatttgaaacatcaaaaacatgggatagataaggactgctnggcttctactggacacagtacactcatgaaatgcagaaaagaacttgagctcatatgcacccaaggtataagtcattcatctatgcactacaactgcaccaaatttgtgaaaaaatatggtctcatatgcaatgtatatacnaatgacttttgtaac

SEQ ID NO: 62547 - DNA, 419 bp, Oryza sativa
  unsure (1)..(419): unsure at all n locations
taatgataacactgcgttccgagtactngcagctgcatctattttggatcttcaggtctacttcattcaaagctttctcttctgcctcacttctttgctgtctgtgtgaacttacagttggtcaattgcaggatttatgtacaatatgtaccgactttattatttctgagctttggacatcaaactttctgcaatatcaggttagtccgttactgctgtgtgtcttatcttcacaactactcgattattttctctgtaactctttgtattaatgaagtaatataagtttatatccttgataagcattcatctttattttgtattattatctttattattcttttatcaggacccttgatttttttggcccgggggaaaggaaagggtttcccaataaaggggaaaaaaccctttttttt

SEQ ID NO: 62548 - DNA, 453 bp, Oryza sativa
  unsure (1)..(453): unsure at all n locations
agcttgcacagctaactcctgctggtgctatttacatgatgagcactgaacctatgcactggagtagagcttggtttatgatagggtccaattgtgatagtgtagacaacaatatgtgtgagagcttcaataattggataattgacatcagggcacatccaatcatatctatgtttgagggcataaggaccaaggtttatgtcaggatacaacagaacaggagcaaagcaaaaggatggctaggtaggatatgtccaaatatcttgaagaagttgaacaagtacattgacttatctggaaactgtgaagccatttggaatggaaaagatggatttgaggtcactgataaggataagagatacacagttgaccttgagaagagaacatgttcctgtangtattggcaattggcaggtattccttgtgcacatgctattactgcattatttgtga

SEQ ID NO: 62549 - DNA, 394 bp, Oryza sativa
  unsure (1)..(394): unsure at all n locations
nggaattggctcttgctactctctctntgctgttcttaatgggaaataatgcactctgctctcgtaagtcagatcatctttttttgacgcaaaatgagttcagatcattatatccataagtaggtaactcaataaatcagattgaatttagccagcaaatttctatacttcaaaagcaacctagagtcttgaactcttgaatactaaagatcaagaatttgcttgccacacaaagttgcacaacatagctattctacaacactggatagagatactgatcaatactctccattgatgggcaaggcaaaaattaaaattagatgatttgttatgactaaagaagcattgtttacccccacaattttttttaaaaaagaaaggggggggcgggggg

SEQ ID NO: 62550 - DNA, 449 bp, Oryza sativa
  unsure (1)..(449): unsure at all n locations
atgctttgccacagtattctgattgtttatcttttnggatgaattatttatgttggcaaatgtaagatgctcatgctcttacgtgtgattgttcattctcttgtgtatttcaggaactctaggaagtattataaaaacagacagaattggtgtttgaactccctgaactaccacctggctatctatctgaacatgaggatcaaggcaatgtgttgagaagtaactggaaaacacaacgcagggattgtcgttttggaaaccgtgctgataacaaaagatcaaggtatgaccgcaatgattttcagtctaagagacccaaggtacggaaccaaactcattgtgatgatggggcagtgctcaagagcagggagccaaccctcttgcagaaacttcttagttcggatgtcaagagggacaggcatatgcttcttcacacgttcaaattcatg

SEQ ID NO: 62551 - DNA, 389 bp, Oryza sativa
tgttccgctctctgcgaaaaccttcactgcgtatgtgtgtggctcccctggactgaactcacacatggaatggcaactgatcctggagctaagctaaggttctgaacaacagtaaattccaaaggttggaatgacttgggattggtcacatcagagaaggctggtgctcggaagatcatcaaaccctgcaaggggctggcgcaagcacagttctgtgaagccaccggatttgctgactggtcagcggggcatgaaatggcaccacatggacctaggtttgttgagtatggcacttgctgcttttgcttgagtgtgcagaaactgatattgttgaagcatattaacattgtccccttggaattataggttcctttggggggaaccccaaa

SEQ ID NO: 62552 - DNA, 452 bp, Oryza sativa
agcttggaccacagtgtcgttggattttatctaatgactacctaagacagggggctatgatgcaattatggtggtagtggataaatttaccaagtttgcaaaatttattccattatcccatccattcactgcttattcagtagcacaagccttcatacaacaaatttatgatgtttttgggatgccacaaatgataatttcagatagagacagttgttttacaagtgcattatggcaggaactctttaaactagctgatgttaaattgaacatgagttcgtcttaccacccacaaactgatggacaaacgaaaagattaaatcagtgtcttgaggcattcattcgttgtacagtacatgcagctcctcataagtggtcacagtggctgtcccaggcacaacacttgtataacacctcatatcatagttcactcaacaaaacttcttatgaag

SEQ ID NO: 62553 - DNA, 423 bp, Oryza sativa
  unsure (1)..(423): unsure at all n locations
tcagcctcctctgccactggccactgccgtcacgccgccgcgagcctccgctntaccgcgatgtcnttgtgacatgagctcgggtcgtgccgcactggcaagcacctcatcggcctctcccttcaccggccttgcctcttgctgccactagctcaagtcggtgccgccgcgagctcgtcctctcacgatccggccgtggggtgggtagggggtgggggctggggggcagatctgccaccagacgggttgggggaggggatccgtcccgccggccactccggccgccgtctactgctgaatgtgtgccgctccgcctcccacgccgaggagaagctccggtacgcatattttcccctttctaacctttttttttggaccccctttgggcccccctcttaaaagaaccccttttggggggggggg

SEQ ID NO: 62554 - DNA, 256 bp, Oryza sativa
  unsure (1)..(256): unsure at all n locations
ctcgacccgcgatccttaagtcacctgcggcatcaagcttcttgaaaaaaccagtatgcttctggatgcaagaggtccagccgaatagctgctgctgttcccagattctcgatcttatctgacctgctggtgatgattattttgctcccacgggcccagcaactcatcgaaagatttaagccntgccatgtttgttcactgatatcgcaagctagctcaataattatcaccccccttttgcatgaagaatagtttt

SEQ ID NO: 62555 - DNA, 378 bp, Oryza sativa
  unsure (1)..(378): unsure at all n locations
ntaatctaagctaagttcacaactatgggtctatctggtagaggctcaactcctaaatttagtttcagaaataagtttgtagtggagttatgaagctgcctaaacccaacttcacctatctagctagttcgttttgtgagagagtttcacccagctctactcctatttcagatgaaactgaaactatttggataattgaaagatagaaaaaacatcatcctatattcacgaagcaattgcgggcatagaaaattntcattgggtgatttaatctgagcttgcaaataaaaaagacgtggttctaatctcactctctnttctttctattaaaataacgatgcacancgtgcgacaccccccaattacaaaaataaattg

SEQ ID NO: 62556 - DNA, 375 bp, Oryza sativa
  unsure (1)..(375): unsure at all n locations
agcttcacaccgctgtaccatgttgttttgtctntgagggcagtcggccagaaaaatccttgtcgaaaagcttttccatccaatgtgcagccggcagcatgtgacgagatcccacagatcccttcatgtatgttgacgagatgtttaccgtcgtcggacgagacgcatttgagaagtaccccgtttggcgccttcttgtatagatcgttgctgatcatatagtagattttgacatggcgggttattttctcggcttttgcatcgtccttgggcaactcgtcgctacttatgaatttaatgagtgggatccaccagtcatctgtggtctcgatgtcggcaacaacgcgttctgcctctgtagccaccgagctgatg

SEQ ID NO: 62557 - DNA, 424 bp, Oryza sativa
tctccaccatctcgctgctagccaagttgttgcagctatttccatcaatgatcatgcggcaacacgctctttgacgacacactctgtttggaacaacgtgtgtcgctgattttgctccgccttctccatttgtgcgctaaggacacgctgcacaatgaggcgctcatagtgatccgcaaatgcagccccaatgtgctctttcggtggctcattatctgcatggtcagccgcaagcaaagcaagtgtatcatcatcgaaatcactagcagaggagtactcaccatcgtttttgactaccaaaactcgcttgctagtgcagtcacgctggacatggcccaatagccccctttttgggcaaaaccgggggttgggggggcccaaacccctttgggaaaaaaccccaaaattttttcccccccttttt

SEQ ID NO: 62558 - DNA, 302 bp, Oryza sativa
  unsure (1)..(302): unsure at all n locations
agcttcagagacagcacccggctctaatttacatcccggtgacggngattctataatttcattgttcacaagtcccaaggtttcatcatctccagaggaagcagtaatatgagccactctctctttcacaaatctggtcttttgtggcggntcatgattatgtgttcctctgtaaatgatttccaccacgcggccatcaggacaatgctcgaccttctttntagccaagcaattagagttggtacatctatagtaactcctggaattttcactacttttcacttgcttctgaccatactttc

SEQ ID NO: 62559 - DNA, 326 bp, Oryza sativa
  unsure (1)..(326): unsure at all n locations
tctgagccattgtaatctcttaatgcatggacctaccttttctgngcttgctgtggcccancctatgctttggttccatatcagatgcccattcatcatgttcttcacttttctcttctggcctctgcgctcatctgggctaaagaaaattggaatactcagcagactttgttaattcagcccatcaatatggtgcctcctgagccctctcaagattctttggatctcccagtggatcctttcctgcagagtcaagatgtgtccccatctttgccccctaaaccaaagaggaagaaatctggtaaagttgttctggtggattcaga

SEQ ID NO: 62560 - DNA, 413 bp, Oryza sativa
  unsure (1)..(413): unsure at all n locations
agctttcttctttgctacatgaacgagaattgtcttgtgtttatgctgaagtgctggagattcagacattgaacattgtacgtaacgcacgtcagaagcaacaatgcaagagaacacctaccgatcagagtgcattggaaagctcttctctgctggctctattacgcaatcatggagtagttaactggacgggaacactctttgcaacaatactagcacaaagccaattcagtagccgcgtttattaacagacccaaatgatgatgcatgtgtatttagtgagttggcaccacactccacacatatcgacgaactttacatggaacatgagcaattataactagtttagaagctgttcgncgtttcgattcttgacaccactgggaactgatgcgtgtgacgttcatacagca

SEQ ID NO: 62561 - DNA, 343 bp, Oryza sativa
  unsure (1)..(343): unsure at all n locations
ntaccatcttcaggagctctctgtcaatcctaacactcgcttgcattgtccatcccagctgaagatcgccaacctgtcaacctgaggtacatgctgacatggtatggcctgaacattcctgatgttgggaagctgacatctctccgagctctgtatcacttctacgtgaggaaggagaaaggatacgagatacagcagctggagcacctgaacaaccttcgtggcaagctgttcatcgactgcatccagaatgttcagagcaaggaggaagctgttcgagccaggctatctgacaaggtatatctcactgagctgacgctacggtggggtggcactgacgaac

SEQ ID NO: 62562 - DNA, 435 bp, Oryza sativa
  unsure (1)..(435): unsure at all n locations
ngccgtcagttagcagaatggcgtagccagaatattcatatcccggtgttatccgtgaacttgtcggcgctgcacttcgcagtaatcaactgcctaatcaggtgtctgatgcaatgcacgcctgcggtattgacggccaccagctgacggtagaaatcacggaaagcatgatgatggaacacgataccgaaatctttaagcgcattcagatcctgcgtgatatgggcgtgggcttatcggtagatgattttggtacgggcttttccggattatcccgcttagtcagtcttccggtaacggaaatcaaaattgacaaaagttntgtcgatcgntgtctgaccgaaaaaacgcattccccttttgtgcccccttttaaccattttttgggaaaaaaggggccccccaaattttttttttaaaaacccccctcccccc

SEQ ID NO: 62563 - DNA, 440 bp, Oryza sativa
agcttagcaagtgtgagctctgggtgtccttatattaattgctgcggaccccgaaacagtgaccgccgtctctgattggaagcaacacaagacagtcacttaagtccgcagtttcttatgattggcaggatactaccgaatgtttatcgagaacttctccaaaatcgctcgaaccatgacacagttgttgaagaaagaagaaaaatttgtgtggagcccgcaatgcgagaaggcgcttcaaactcttaaggaagagctggattcctcgccggtgttaattttgtcggatactcacaaggacattatgtgtattgtgaccttttcgccaaagatttgggtcgtgctcatgcacgacgggcatgtagtacccttgccttacgtcagctcgacctcatgaatgcactaccctaccatgaatggagtagccgcgtgggtatgct

SEQ ID NO: 62564 - DNA, 435 bp, Oryza sativa
actgcaacagctttctaatcttattattaaatataaccctgatatttatttcgagatgcgaattctgaaaggctagagataaagatgctccaatcttatagaactcaaacaagatcccgatattatactcgtcacaaaagattttctctaatattttaaaactttaaaattgaaatggttgaatacgaagggaaagaaataccaatgattaatatagatgggggaaaaacaaataggactgtagccccaaaatatttaacatggatttttgatggttcgataataagctaaaggagatttggatttctgaataaaggaattgaaaatgggtttttttagctcagagaagtcatattttctaacctttcccaataagggtataattttttttttgggggttcggggaaatttttaataaaaaatttttaaaaaata

SEQ ID NO: 62565 - DNA, 443 bp, Oryza sativa
  unsure (1)..(443): unsure at all n locations
agcttgagcaggtggcaacaatgatgagggagatgtaacagtcgtactgctgctctttgtgagggggtaaaggagaatggagaaataagaagacaaagggagggcatactggtaagtttcaatatttgagtggatgcaaaggttgatttgagtggtttccctatttcaacatttaagtgacactatcaatttccccagatgaaaaactactggttcaacatgaataaacacaatatttttgtgcagaaaactgaaatagaagctgaactaacctgcaatccaaataggtaccaacatgaaccaacaacatgtcccgccaaaacaaacattagaaggttaatcacaaagttagcccacgctgactcgaatatgaatccattggcagatgagtcagactgaccaccaagcaatggtacanatctgatgatgncgggaacatactg

SEQ ID NO: 62566 - DNA, 446 bp, Oryza sativa
  unsure (1)..(446): unsure at all n locations
nntactgtgctaatggcagtaggccagtagcaagatacgcttttgcatcattgtaaacaacttctaatcttctatggtgctgggctgacgcaagaacccgcttaactgacactgttgttttgcattgtaaaaaaaataactcctaccataatgagattttctacactattttgtgagaagggaaaacgaattagtgaaataagaacataaaaatagtagcgcactagatgcattttgctcaaacagggtgttttatagtcaccatgcaccacgtaaccttgtcaatttaggttaacaaaacccaaaaacgataaacattttcagcctgaaagactcaagcaaatggcccttaaactgaanaagagggggggccaaaanaagggaatttaaataaaaagaggccccaaaaaggggaaaaaaaaaaaaaaagggaggggggggggggg

SEQ ID NO: 62567 - DNA, 329 bp, Oryza sativa
  unsure (1)..(329): unsure at all n locations
agctngcattcagacacagagaagctaattatagtatttaaatatgtgtatagtcaatcaaagcatagtgagaggtatcaaagtttacaccgcaaaatatggcatctcctgttacgttcttgagaaccatacaatcactctaattaactatcagtggtatgtacaggagtacttacttcgttttacaatgtaagtcattctagcatttcccacattcatattgatgttaatgaatcaatataaatgtggaaaatgctataatgacttacattgtgaaacggaaggagtagtaattaattaaccaaacaattaaaggtagggtgatcaag

SEQ ID NO: 62568 - DNA, 388 bp, Oryza sativa
  unsure (1)..(388): unsure at all n locations
ctaagcttatatgagccacttcaattgtggatgaaacttcaaagatttgtatcttttacgccgctgacagtcttcccagatgcggcgctactcttaagcaccaggtatgccctataatccagaaattcattattttgaaaagtaacagcagcagcactgacatctggatgttcatttaaggtagattccacttcctgcagtgagaaacgctgcccataaatttttacagtacggtcctttctcccaaggaaaataaattcaccactctttaagcgtcgagcaaagtcaccggntctgtagtatgttgaacttccattgtcttcagtgtgattacttcgccatggacttcttctaaaatatttcaagttccataaaatttaaaaaaacc

SEQ ID NO: 62569 - DNA, 400 bp, Oryza sativa
agctctgcggaggagggcgagggatctcttgtcttctccattgactgcgccgcccgccgcccatcacggggctggacgaagaggatccacccgccaccaagccgctcgattccgctggctgcacctaccaccgcccgcgcccgctgccgtgccactcaatgccgccgtccacgcccatcgccatctgcgcccaccaccagtcgcgctcgccgcacacactcgaccgtgagaggagaatgagaaaggagacacagtgagagagtgagggagaggtgagagaggagagaggagagagaggattacgatgaggatgggtggataaggatgaatatttgaagtgctgaagaggtaaataggaggaaggatagacttgtacgctggtctctaagacgcccgcatg

SEQ ID NO: 62570 - DNA, 419 bp, Oryza sativa
  unsure (1)..(419): unsure at all n locations
tatccagaagagaccgagttcaaagagaatacggcatggtaagttatctattaattacgaatagttggtagtttccttctatctttacgaaagtgtggttagtgtcatataacgactttatcttttccttttatctttaggaaagtttctttcttgttcgacaaggactatcaacccttgggtataaatatgtacacccggagtctatgtaatctatcactacaatcaatacaatttggcgcatcgccaccctctntacttctacttttgtttttacgttccggcggaacctggcacccgacgcggggctgcatcgtcttcgatctccggcgaaagggataaggttccanaaattgattttttcccgcgccaaagggggtttcccttttaaaggggggcccccaaaaaaattttttttt

SEQ ID NO: 62571 - DNA, 420 bp, Oryza sativa
  unsure (1)..(420): unsure at all n locations
agcttcgtgcaaggagcgagaagatcagttctgttgtcgtcgntctgcgaagatcaagtgaagttttctcggagatgacctatacccaatctttcccagaagagtagttccgttagctttctaaatcgtgtgttgcttgcttgtgtgtaggggtatggtttgcatcattggtggggatgcgaccatactangttgtttgcttaagcaacttaaaccataaaaatctactcacaacagatcagtagacaagtggtttagtaccttatctttagcaacccctctcttccacctctttttcgttctggcagcagatggtcagtgttagagagaagagcaacgacggcgtactaaagccacggatcaatggtttagttgaaagctgcaaggtgccccaatgccagatgaaccctgctcatgatc

SEQ ID NO: 62572 - DNA, 449 bp, Oryza sativa
  unsure (1)..(449): unsure at all n locations
attacggacctataaaactcagcttcgtgtagggggatttaatctgacctctatagactatcttctaacattncacttggttcataacgggaatagttcccacgaacaggcagctcggatttactttcgttacattcagtttacttcccactattaccttcaggttgtcctcagttagcattcaacgtattcctttacacctttaaccttgatgtgttctttcccgatttctcttatcaatcacctttcgacctacttctttgcccggtaataaacacctttgctggtatcttctatcaatcaccttttaaactttgtcaaccaagtactctccactccgagagttgtggatgcttntgggtgacaaattggaagagggttccccctttttttgggggggcccttttttgggcccctttggggagcccacccccttttttttttttttt

SEQ ID NO: 62573 - DNA, 430 bp, Oryza sativa
agcttattaacagcattcttagtttcttcttattggttggtctttctcataagatatcatagtgagcatttgtgtagtcagaaatgataagatacattattttgctttctttctttcttggagaatactcgaccccttgctccatatatacatcatgatgacgcccaattattggttgctcaatcctgaagagaaaaccgacaagacaattgtgcaggtatacatgcttttgccaactatgtgtttgataattagtcatgtcatggtataagtcatttctttggcacatataccagcagatatgcaggtggtgctgctatataacatcaagggtgctacagctcattcaagatgcctggtggcggagctgatgatttggaggctggagcaacatatacctgctgacgatgacctggatgcacgttcctat

SEQ ID NO: 62574 - DNA, 428 bp, Oryza sativa
  unsure (1)..(428): unsure at all n locations
ggacctataaaactcagcttaacttactaatggcccataggcatgaggggattcctagtctcttgaagctgcgaatgactgccagctcatcttttcgcttatacttatanttatcagttaaaatttgaacttttaactttaaattcggagttaattctagaggttcttaattaaagtttatttttcagcctttgcttttagattgctaagaacacgtatataaaaattttactcataaattatttttcgtttgcaaacatgtcgtttcgcttgttcctccgataagccaaacgatgggggtttgcgtgtcggatatttggaggtacacttcatcaatggaaaaaagaagaagagaatgtggtttccaggttttgttaaaacctttcccttttactgagggggggtttttttttgggggtttttttttt

SEQ ID NO: 62575 - DNA, 345 bp, Oryza sativa
  unsure (1)..(345): unsure at all n locations
agcttcacactttccagtcctctcctctctttgtagtttagagctatgaaagaaacgttgttgggttttaatcctgattgagctgatgctttaaatggattttttcttgtgtgtgttctgtaatcctttccatacacaaattacaacactttatatatatatatatatatatatatatatatatatacagagntcaatcagaaatcagattttctacacacggatttggcacgaatcttaaggtagaatcggacggtggatgcagccacagcaccggtgccgaagagaggaagaaggggaaatcaaatccgagtcgtttgctgtctgcgacaagcaaaaaccatc

SEQ ID NO: 62576 - DNA, 422 bp, Oryza sativa
  unsure (1)..(422): unsure at all n locations
ntcttgaaggaanacctaagatgtactttctgatgaatctatgcacttctatntttagcataacatttcatcgcttgtaaaatatatatttgacatttctgcttaactaattgtacttcatgttgttacattgatccaaattgggtgtatcccttcttcttttgagtaactcacgtcattacagtttctcgcatgttggccgagctaccactaatatggcaattactacattgtaggaaagacttagctgttgaaacatttccatctcaagttgatgctgagaagatgaatgccagtgagaataacatgaattatgttgatgatggaggcaatgtgttatcaatcgaaaaaattttaagaaagggtttaaaaattgggttggggaaaaaaatttttttttccccaaaatttttttaagaaaa

SEQ ID NO: 62577 - DNA, 337 bp, Oryza sativa
  unsure (1)..(337): unsure at all n locations
agcttgaataatggcattntcaagttgattgctttgtcgatggcatttctgggatcaaggtggatgtcgatggcattttatggattttctcaaatataataaactctactgaagaaatgaagaaccaaattcaataaaagccataaaatatcaagcgatgaaaggcgagaaaagctacgtttggggtatatatatctcctttatagggtatagggattattggggtaacatttcatgtgtatgttctaaagggttggaggctagaggggattaaacaactacagtcgcttatattgtatgtgtgggtttgattagttcgaagatgggaagtaactat

SEQ ID NO: 62578 - DNA, 409 bp, Oryza sativa
  unsure (1)..(409): unsure at all n locations
ntaggaattctagtatgtctttattgcagtatttgtcttggctccacatacaccaagananaaaacaagttgtaaactctatggttagcaacagcacagtgcggataggaaatgaaccgcgccctctcactccgttgcatgttcacccggctcagacccctgagtgaagaacggggttcaaccagtccctagcttttgcccttctaggactccgtaacccgaccaagtgctgttggtgatatgccctagaggcaatcatagagatgattgtatcacatactatgtttacatatttatccgagattgtttgcttgaaatagataactcattattggttaacgaatatgntgagttctttttttcccattgggaaggaaaaccttccccttttttttaaaattggggtttt

SEQ ID NO: 62579 - DNA, 371 bp, Oryza sativa
agcttgcccgatggtactccgaacgtgctcttctctgggttgagcatgagacgatattgtcggaggtcgtcgaacatttcccggaggtcatcgatcaatgagtcgcttgtcttggtcttgacaacaatgtcgtcgacgtaggcctcgacattgttcccaagctggttgttaagtgctccttggaccgcgcgctggaaggtgtttccggcgattatcagtgcaaatggcatcttaacgtagcaaaatacaccgaatggcatgacgaatgttgtcttcttctcgtcctctttcgccatgctgatctgatggtagctggagtaagcgtcaaaaagcttaacaactcacaaccagctgttgagtccaccaattgg

SEQ ID NO: 62580 - DNA, 415 bp, Oryza sativa
tagcaagtgtgagttctggttgtccgaagtcaaattcttttggcacgtgatatctgctaaaggattgctgtggaccccgaaacagtgaccgccgtcaccgattgtaagcaacccaagacagtcactcagattcgcagtttcttgggtttggcaggatactaccggaggttcatcgagaacttctccaaaatcgctcgacccatgacacagttgttgaagaaagaagagaaatttgtgtggagcccgcaatgcgagaaggcgttccaaactctcaaagaaaagctggtttcctcgccagtgttaatcttgccggatactcgcaaggatttcatggtgtaattgatggaataggcctttttttgggccgggccccccaaaagaggggtgaaattttttggggggggggcgggggggt

SEQ ID NO: 62581 - DNA, 366 bp, Oryza sativa
agcttataacaattattcaaaataatgtatttaacttgaccatatgcattagacagccaactcatgaattaaatggaacagacttttgttaatgagtgttaacctgaatgctagctctccctgctgagaaaccatagttgccagctgtgtaaaaatgttgcttaactcatggatggttgattcaacattttggagagcctacgctctactctgcatgtaactgtcctgctgtactaactgctgctgcattgaaggccgagaaaatgatgatgatgcttcatgatctccattatgctttttcctggtgaacagaaccacaaaaaacatctataaataaaaactataaccacactaccaactgaactc

SEQ ID NO: 62582 - DNA, 431 bp, Oryza sativa
  unsure (1)..(431): unsure at all n locations
ntaattcctanatgtgctacacacagcttcctgctatcttacatggtgtaaacatggaatcctaccacatgtttggaagtgtaatactattgtggatttcaactcagccaatattcactgattggatgcacaaattctttaacttctattccttcaattctatgcaattttaaccactggtcactttcaatatgaatcgagaccctgtctggaataatggaattactcacgatatagttcaatcctatggaatctgaanatgtttggcgttcctaacagggcccaaggtcgggagtaccatatacttactatacctgctaagttttctgataccataatgtgaatcaaggcccaatggattacctttccaaanttttttttttgggaaaatttccccccttttttaaattttttttttttccccccttttt

SEQ ID NO: 62583 - DNA, 437 bp, Oryza sativa
  unsure (1)..(437): unsure at all n locations
agctntacaaagtaatgaacacatcatgtatttgtttgttactcaattcagtaattcagtgaaaaaattcactaattcaaacataacanaaagccatgtcatgattcttgaaaattgcttcacgcctagaatttgccactaaatcacacatcaacaagcacaaaaacagaaactggatttgctaagcaaaaagcacccctaaaatcaaaagcctcccctaaaacccccgaatccgcgggctaaacaaccattccccaactcataagcaacgctttgcagcaacaaaaacaacaaaatctcagatccattccgtgaacgcttcccacagcccaggaagaacaaatctccaaacctggaagcgcaacttggcgaagcagcagcagcatcacgatttcaccgaccaaaaaacattggatgccacacaaaaatgatgagac

SEQ ID NO: 62584 - DNA, 409 bp, Oryza sativa
ccaagaacaacatcatcactaaacatctgtttcactagttcttgtgtatagccctaattccaatagaccagagtatattccattgacaaaatttgttcgatgcgtattttattatggaacacatcaacaaccaatatttaaccctgtctaaaacgaatggaatctgaatatcgggatctatccctaacagcaaaaaaaaaacactgaccaaccaatgtggagtcagcttaccctcacgaaaaaatcttgccatccatcaccaacatgagggcccggctgtcaataccgacagggccactctaacctcatatcatggttgggatacaatttttctattagggaaaaggggaaaccccctaacaaagagtttgggggggggggcccctcccacgggtgggcggaaaaaaaa

SEQ ID NO: 62585 - DNA, 446 bp, Oryza sativa
  unsure (1)..(446): unsure at all n locations
agctttgggcaagtagcacggtggcgagcataattatctacagcttngaggccgaggtggaaacattgagcaaagttaggcacaagaacattgtcaagctcttctgctgtcttacgaacgaggcatgccggttgcttgtctatgagttcatgcctaatggcagcctgngagactttctccacagtgccaaagctggcatcttggattggcctgcgaggtacaacatcgcactcgatgctgctgaggggctcagctacttgcaccatgactttgttcccgcgatcatccaccgagatgtgaagtcaaacaacattctgcttgatgctgattttcgtgccaagataacagatattggcgtcgcgaagtctattggtgatgggccggccaccatgtctgtcattgctggttcttgtggatacattgctcctggtgagttccttatgcct

SEQ ID NO: 62586 - DNA, 456 bp, Oryza sativa
  unsure (1)..(456): unsure at all n locations
gacactactaaaactcaagctntctagtaattaattggagagagggtggtgtccttcttcttttgcataacagtgaaccaaaaatacacgattcgctgcactcgccggggctaccaacggctcttgtcgtttggatcattttcagcagagttatactcagctgaccaagcatgatgaaaaggaggaatcagataaggtgagagattcgacacaaactctagcaatcggctcagttctgctggcgactgtgacgttcggtgcgactttcgctctgcctggaggctacagagccgatgatcacgtcaacggaggtacaccaacacttgcagggaggtatacctttcatgccttcatcatggccaacacattttgcgaccttttaatttccttttaccggcccccgggccccccaattttaaagggcccttttaaaacccccccccccaaatttttttt

SEQ ID NO: 62587 - DNA, 444 bp, Oryza sativa
  unsure (1)..(444): unsure at all n locations
ggatcttaagcactgagctgcagcttgattaaaatntaanatcccaatcattaaataagtttataaaggctaataagttcatgttgtcataatagtgtttttaggcaaatctacgtatacaagttttttttttaaaaatatgcatttaaaaaattattgattataaatgttaaaacttaaagtcaatcctgcgataaaaatcaaataacttttaccagagtaatgcccgactacctgtatggctgtattacataggaggccttaacagtttaccttctctggtgaaaatctatgcttggattggctgacgcctgtctcccatttctgtcctctcccctaaactttcctccgtttcttaatccttatcctcccatctctttattttatttaatcacacttttacgcttattaattaatctacccgcttgaaagcgcagccaccgt

SEQ ID NO: 62588 - DNA, 431 bp, Oryza sativa
  unsure (1)..(431): unsure at all n locations
cccacatgagccacgacagatataattaacaaacctactttttttggatgacgnatcaaaancctgacaaaacatctttaatttttataatacctcagctaaaaatatatagatacgtgtaatacatagtatatatgcttatttttttatttatataattcttgatatacgtctgaatacccttgaatcatggtgggcatgcccttgaataagccccacgccatctgataatgtcggactaggatgcctccacactgaggttctgtaagatattggagttcatgacctggcatgcgaagctcaaaatttcctcgagcatttcttcccagaccggcacttgccattgaaaaattaacctttttttaatggggaaggagtttttaaattttaattttgggggccccccgggggggggttttttaaaaaaaaaa

SEQ ID NO: 62589 - DNA, 370 bp, Oryza sativa
  unsure (1)..(370): unsure at all n locations
agctntatcattcttagccaattacatcatgataatataattactctaagactactntgggcattaacataactagaatgcacatacaacctattattattacataaagagaaatattatgccgcagcagactataacacaagctatttcttcctaacaccccacagcagcaacacttgggctgcaaaacaaaaaaggctgtcctaacgatgcctccgagaaagaaaatgacactcaaacgtgctgccattgccatgaccgaacctgtaaaggccaaaacatatgtttctccttcattagagagcaaatctttgactctaggcagtgccttcaacatggaagggaaacaccattggcaggaacaaccagc

SEQ ID NO: 62590 - DNA, 438 bp, Oryza sativa
taagcttagaactgtgcagttctggtgtgcgaagtctaactgctgtggaccttatttcattgaccgccgtcactgattgtgagaacccaagacagtcactcacatccgcacgttcttatgtttggcaggatactaccgaaagttcatcgagaacttctccaaaatcgctcgacccatgacacagttgttgaagaaagaagagaaatttgtgtggagcccgcaatgcgagaaggcgtttcatactctcaaggaaaagctggtttcctcgccggcgttaatcttgccggatactcgcaaggacttcatggtgtattgtgacgcttcgcgccaaggattggggtgcgtgctcatgcaagaacgggtccaatttgtgtaaggttaaaaaccccctttaatttgtggccccctttctttaaaacccgcggggtttttttcccc

SEQ ID NO: 62591 - DNA, 428 bp, Oryza sativa
  unsure (1)..(428): unsure at all n locations
agcttcaacattgcgaccgatctgagttgtttaacatctttgaatcatgcgttgatagggtgctcctgcgttcttcaatccaaagggcatggtgatgtagcagtaggctccaaagggcgttataaacgaggacttcaagcagtcggattctttcagtaggatctgatgatatcctgaatagcagtccaagaaactgagtagctcgcagccggccgttgagtcaaccacctggtcaatgcgaggtaacccgaaaggatctctatggcaagacttgttgaggtcggtgtaatcgacacacatgagccattgcccggtcttcttccgaactagaactgggttagccagccagtcgggatggaggacttctttgatgaagcctgctgctaacagctcggctaatatctctntgatcgcatcctttctatctt

SEQ ID NO: 62592 - DNA, 456 bp, Oryza sativa
  unsure (1)..(456): unsure at all n locations
ctattacgtgacctatgaaactanagctgacatgtttctgtgcctcagttgcgtcatgactttcacctctgccttgaactccctcaacccttgcccgattgttcttgacaagattgccttctggacaacaccttgatggccacatgaaggtcctggtccctcaagtagcctttgtacacagggccaaaccctccttgcccgagcttgttctcatctgcgaaattgcccgttgcggctaccagatcttgtaagttgaatcgactatgcccattattccccaaaagttcagctctttttgtgaactctcctctatggtcgtggacccgcgccatataatactgcccaggagtacaagcattgataactgggaaaagtttaaaagaaaacaaaaaattttctccacaacacggggggggggcgcctttttttaaaaaccccctctttgggggggggggg

SEQ ID NO: 62593 - DNA, 438 bp, Oryza sativa
agcttgtgcatgacgcgattatcagtgcatgcacatgcgtgaacacggtgaaatgatattcattatatgatctcaaaaataaaaatcttctatactctttctatttgtatttttttcataatttaatacaaatcttttcacccaatatctcagaccatatgaaaattggctcttctctgagcataaagctgattcttcctatcatcaagggttactctaaattctcttgttcattcttagtcaccaggccatcggatccaaccacctagcgcaggtaagccacgagacgagtaacaaggcaaggtgagcggctcatcgaagtggtatgagaagctagccaagacgatgctacgttggttgtgtttacatttttttatttttatactctggtttactaactatcatgggaaaataaattaatggatatctacatgatga

SEQ ID NO: 62594 - DNA, 357 bp, Oryza sativa
gcttgtgtttggagtagaccggacctcctagataggcgccgtactatcaagaggggtctatgaagcgagcttgtggatgatcttgtgccatattagttcatatgcatgtaggtgcatttggtgggcttgtctagccaagtgtgatgagtattctcaagtcctaaaccaagagagaagtgggcatgtccaatacgagtgagtgacatcttgtgggtatgttcggcggatatcctttggagtgtgaaccctttatccttgacttaagttgtgttttcttgggattgggggttttttttttttacaatttgggggggtatttttgggtggaaaattatggggggggcccccccccccccc

SEQ ID NO: 62595 - DNA, 285 bp, Oryza sativa
  unsure (1)..(285): unsure at all n locations
agctnggaggtctcccgacgtggctgatttctatggctggatgatccgggttagtaatgtcatgtgggtaaagtgtaccccctctgcagaggttaacaaactgttcgaacagccgtgcccacagtcatgggcggatgtgaggtgattcctagcgtagttttgtttgactactgcttgtgaaatagctgttgagaaactgggttcgatgtttggaaaacctgcagctgatgggatcagctaggcccgggtggcccgttaaaagttgttggcccgggtggccgtttg

SEQ ID NO: 62596 - DNA, 430 bp, Oryza sativa
  unsure (1)..(430): unsure at all n locations
tccanattatggtacgttctatacaactaatagagttatttattatntgtggcacgcttctaaaaatatatttcttccaaaacttttctacatattatccagttagaacgcgccctaagtgtgatgctgttttaacgaagcaatcatcacccatttacacggataatttagtttgagtaattagtatttggagaaacatctgtatttaagaaaaagtgagcaacacgaaagatctatttttttccccgtcttgggctaatgggatgccagcggttgaagtctctgagatatgcaggaacaatttagctctccagtttgttcgggttaaagaaaaaaagggaataggggccatggtcccttttttccaagnaagattnntttttcccaaagggaaaatttgtggccccaaaaaaaaaaaaacacacccccc

SEQ ID NO: 62597 - DNA, 391 bp, Oryza sativa
  unsure (1)..(391): unsure at all n locations
agcttangcagagttagagagtataatatgttggccagatgactaagagataggtaaaatagagttgtggtagaaatcaatatattgtctacaaaatagaggtatgataaatttagttgataaccaaacatgcccatcaggatacaatgcattttctattgttagtcaagtacagaacaaatgtttcttattttttgtacggttaaattgatttcagcatgaaaacatagaacaacgacgtagaaaattgtaacccaattcaacaagaatcaagagagcacaatttgggtatggtgagtgaattttggatgaattactttatccaataaacttcaagcatcttggttaatattcatgcacaatgaggtgtgttttaatacttnnttttttg

SEQ ID NO: 62598 - DNA, 406 bp, Oryza sativa
tggccactcctcgcagctccttgttcctgacgtcaacagtgaccatcattcctcccgtcttagcacccctgcagcagcgttgcccaagaggtaaacaacatcatcatcgatgcaactcaaggccgggtaacacaaacgcaggcgacctatggacaaagaagaggttgccccttgaccttgagcctcctccctgtgttcatcaccgctgttgctgagcatgaggctatgaagcaactcgtaatggtgacttgggttggtgtcaagatggacttcacgcgattcagcagtgcagtcacggcgccagtcgtcccatgaagtgaccgggataggcatgctccatgtagtggattttttcaaccgcgaaaaccccaaaagggggttggggggaaaaaacccaaacccccgg

SEQ ID NO: 62599 - DNA, 425 bp, Oryza sativa
  unsure (1)..(425): unsure at all n locations
tctagtttctgattccagtactcgctctactgtcttgtattttgcaagnttataatgtgataacatctgattcgctgtccaagttctgactgccatcgggaacttttgtatctgttcaatagctattggaatggttgtagagattattgtcatgtaccccatccaacacatggattaccgaccacggattgacaatctattggtgcttctgattggaggaattaccattgccatgcccactgttctttctgtgactatggcaatcgggacacaccgcttggcttatcaggtatatatctggacaattctctctgaagtgaaaatatatgttatcttggtgctgttttttttcaaggacaatttttaacccaaaaatataaatatttttggggcccaatttttaaaattttttttttggggggggg

SEQ ID NO: 62600 - DNA, 440 bp, Oryza sativa
agcttctcacggaaacagatgctggcatttctggatgtctccatggcaggacgggtggcggaggagcttatttttggggatagcgaggtaacatccggtgcatcgtctgatttccagaacgcgaccaaaatggcaagagcaatggttacgaaatatggcatgagcaagcagcttggctttgtctcttacaattatgaggatgatggaaagagcatgagcacagaaacaaggcttctgattgagcaggaggtgaagagcctgctggagaatgcctacaacaatgcaaagaccatcctcacaaaacacagcaaggagcaccatgttctagcccaagcacttcttgagcacgagactctcaccggagcccagataaagaagatcttggcctcaggcaatagcacacagcagcagcatgagcatgctgttgaagctccacggaa

SEQ ID NO: 62601 - DNA, 343 bp, Oryza sativa
atgcatggacaaggcgcagggtttatgattaatgttttgttatgcaaatgaagacattcaccatgcactcttgatgataccagattatgtgatattgtgttactttgtgcgttgttttatagtagtattggcccataagttgttctcaaatttattaagagacaatttaaagcctttttgtgttgtcgacctgttctgaagtactccctccatcccaagttacagtgtgcatattttttttttatgctgataccaaggagagaacgcgtcaagggagtttgttactattatgcccctaattaagcacacagttatgtatttaatctgatcgcttcacttggtt

SEQ ID NO: 62602 - DNA, 427 bp, Oryza sativa
  unsure (1)..(427): unsure at all n locations
agacttattgtgtattagctccagtaattgaattataacttcttgatctaaataatctatggataagatgatggaagattggatggcctgtcaaacattnttacttggaaagggttatgtgattgcaaatagccaacttcaaggattaaacatttcccagaaagaggacttcttctaccgtaagttatgatgttttttcgaggaaaactcataaaaacaagnttagagaagggttgattatgatgctcatagaaaaaactcatatgatatacgctacaattcacactctttcataaactgaaatcatcaatagtttggcacaaaattttcactcactccaatcacaaacaatagtagttgtagaatatgtgttgntaacataagctatatttgttccttatgcacgtgtttggttgcaaagttttcg

SEQ ID NO: 62603 - DNA, 440 bp, Oryza sativa
  unsure (1)..(440): unsure at all n locations
tcatggccttcctattntgctctctacaggctactctgctgcagccaacctcttcaatgctccatagcaacaatctgaacactgccgactatctcagatgcttgggcatcacgtcaagctccagaagcttttctcctcttttaacagcatcctaaaatgaaatgatgcgaccatgcctgttcagggagtccgagtgaatagttgcacatatgcatgaacctaagatgccttgcataacttttgattgcgttgagccagttcgattaatcgattgagggggatcggaataagatttgtttttaatcaaaattaaatcccaacctaatcctcctcatacatccaacggggcaacccaattttaaaataccaaaccaatttttaaacccccccaattttcccttttcccttttttttttccccacaatttttttcctccccca

SEQ ID NO: 62604 - DNA, 337 bp, Oryza sativa
agacttgattgtccaaggcgtacgatcgatttgattggttgtttttggagcaatcaatggtcagactagggttctctcattgttgggttagctggttcatgaattacataaccacagtgagatactcagttaaattcaatggaactcttctgtctacctttgctcctacacgcagtctatggcagggtgacccactgtctcccttcctcttcttgtttgtagccgatggtctctccttattgctagaccaaaaggttcataacggtgatcttttccctatgcacatctgcagacaaaccccgagtatctcccatttgttgtttgctgaagaaaccct

SEQ ID NO: 62605 - DNA, 384 bp, Oryza sativa
  unsure (1)..(384): unsure at all n locations
tcaacttcgtttaaggttggaacattgtgaaacaacacgccttaaacaacgagatgtttcgtattggtggagcctgaaaaaaaatacaggtctacatcattggaggcctatanccacagaaagagaaaacaaatcaggctcaccacacatctatgaccaaaacctcgactgaagaacacaacattccaaaggaaacgaacatctaaccgatgcctctaagaaaaatgcaacgccaagggccaccgagcgcccgccttgaggaatcacgacgtggttttcacctaaagatatccatccgagagggcaaggccacgcacccgctagcgatgccgtagctggcccgaaaggctattgtattttaccactaataaaaaaatacatttt

SEQ ID NO: 62606 - DNA, 379 bp, Oryza sativa
agcttcgtgtaggcaggggtcgtaaaaccgtattgtatttaaaaaccggctagttttcgtgaaacctttttatcatcagttcgagagaacagtcatttttagccgggtttcgtatcgcgttgatcgaggatcactgggtttatcggctctcggcaaatcaatgagtgattctcactccgaaaacgaataggcaaacgctgtgtgtagcacctaggagtatactactcctctacttgctcattcgcttacgtgtatctggcgcgcaaacgatagtgagtcggtgcactaggaaaaatcagatgaaagttatctgttcagctttctaatcacatcccaggtgacacacagacagcacaagaacaatgacacataacccaac

SEQ ID NO: 62607 - DNA, 306 bp, Oryza sativa
ctcaagctaaaaaagggacacgacgaacagcgaggcatagcaaatggtcctggaaatatatcactgaaagcgttgctaagactcagcgcattggaggagagagcggcatatcattactgtactagatattgaaacatcccttccttttaagaaaccttgccgaaatcttgggagacaacaaccacaatcaagaattaaggaagcacgtggcaggaatcctcagaaaccttgccattgatggtgacacaacgaataagattgggcacatgcaggtgctcataaacaagctgaagaaagcattcctca

SEQ ID NO: 62608 - DNA, 140 bp, Oryza sativa
ctgaccactacaaccatgatgccggcaccaagcactagcgcatgactaccccgacacccagaaaccttcaacaccgccggcgcactgagggactcatcctaccaggaacttgctctaccccaaccactacccaagccgag

SEQ ID NO: 62609 - DNA, 338 bp, Oryza sativa
tcttcttgaacacccatctgcatcctacaggcttgcacccatatggatgctcgacgacatctcaagtacatgagacataagtgagtccatccactgagtaccgcttccttccaatagtcagcatcagaagatgaatatgcctccttaatggttcttggagcatcatccacaagatatacaatgtagtcatctccaaaagacttcgcagtcctttgtcacttacaatgtagttatccttctcaggatgtttctcaagcgtttgatcaatatgttctatcggcacaaagtgctcatgggataaaataagttcttgactagaagtgctatgtgcaattttt

SEQ ID NO: 62610 - DNA, 334 bp, Oryza sativa
ctttaatatcaaaattatcgtttttaagatatatactaaataaaactcgacttatcacgtgctataagcttcctcgtatttgcgcgtgcacttttaatcttcatctctggaagagtcaaacgagacagtctcttcttgatggagggagcaaatctttaaactaccaaaatgcactgtatattacttgggtaagaagaagtcgctttccacagctgggcaggcaatacattactcctctttggttttatatatgacattgactatataaaatatgctaaattaatttgtctattaaataaatagattatattaatattattaatttatatagatt

SEQ ID NO: 62611 - DNA, 373 bp, Oryza sativa
  unsure (1)..(373): unsure at all n locations
tgtgatggaactgcatggcaatggaatcaggaatatttctggctctttntagaagcagataaagcaaagggaaaaaaagttagaggccttatttgtaactgtaccctcaatttcaatgtagtggatcaattaaatttggataaaatcattatttgcctctacaattaacccgatcccttattttcctctcattctctcaatgacatatggatctaggacccaatgtcagtgactcgtcatgagtaaataaatgattgatcgtgtgtattttgcaggggcaaataagaaattatcacaatcaaattttcactgggaacatctacttactaccactatgagaaaaacgttgtgttaattttttccaaaaggaaaa

SEQ ID NO: 62612 - DNA, 390 bp, Oryza sativa
  unsure (1)..(390): unsure at all n locations
tanaggcgctgtaaccacaatctcattgatctcaaactcttagcgtgttgctggtggatcagaataaggattgttagtaatctgtcatgtttgtgcaaaatattccctactgtcatttttctcttaacgacatgtctgtatcatgtctaaacactaagatgataagcttgtctagagcaacatattggacaatcgcatgttattactaacaaataccaatactttgattggtattctgcctaacataaattagtagcaaacttgaattgttgcagacagtattgaagtatattccttttgagaaactgagttatatagtctcataatttccccatatacctttaatgtttttgggagccctttttatttaaatacgagggtattttttaa

SEQ ID NO: 62613 - DNA, 372 bp, Oryza sativa
agctctttctttattttccctcatatatcaatattaccatataccacacacatttttgcactatcttgatcttgagtatgtttagctatctgctttagtctatgattttgacttaataataaatgtgaatgcaactatgccttgtttgatccctacctagctctacatattaaaaccttaaagtatgaataaaaacggcaacaattggtgaggaattcattttgatacacttggagagactgagtgaattatttgaagaacttggcttttttttgcaaaatcatttgaaaacttcccgaataaaaagtgaataaagattgggtgaatggggctctaataactattatcttttcatcgctcaaagcaaggaaa

SEQ ID NO: 62614 - DNA, 426 bp, Oryza sativa
tcgattcaaggagaagagtaaagagagaggagtagctcttgtaaagtgagaaatgcgaggactttagtatacgtctatatatcacgttaaccaaatatgtatgggttcatagtcaagtattctttgtaggtttaagtcggaaagccaaccattgctcagtaacctaaatcttgtgagtagcaaattgtcggatccaaatctatgttgttatgagatatgatatggtaaaatagagtttctatgatcctgttctgagtttgactggatctctagatgtttggtcttcaaaaatgatgaatttataaagtttcatatttgctatatattcctaccaagaagccattatttgggaatacttttttttttaattttttggggaaaaaaagtaaaaaaacccccccccttttttttttaaaaattttttca

SEQ ID NO: 62615 - DNA, 417 bp, Oryza sativa
  unsure (1)..(417): unsure at all n locations
agcttgtgaagattcctcataccgacatatgctagcctccgatgccaaagccaccccatgtcggacttagccactaagcatgtcttatgtttggctttagttgaggaaaaatccacaagataaaagcttgtccttgagaacacccttaaagactacggaggagtcatcccttctaaatacggtcacatcaacatcggtaaaaagacaattgtagcccatggaacataattgagaaacagacaacagattgtagtttaaagattttaccaagaggacgttggagatggaaagatcattggagattgtaatcttacccaatcccattacttttccctttccatcgtccccgaagactatgttctcttgcgaagagccattnggatcaagggaagaaaacattgattcttctccggtcat

SEQ ID NO: 62616 - DNA, 412 bp, Oryza sativa
tcgtcggagatcgaacccgatgcagcccaacttcttagcaacaactcgtcgaaacaatgaaatagaaaagggtggtgatacgctgaaagtgttattgaactaaagttaattgtttacaaggtatcgggtcatatttatacccaaaatacataatgtgtccttgccggacacgactccacttctattacaactcttaggcggactcttactgaaaatatctataaagaaactactaaaatatcctaatagataacaattgccttcctcggactcaatccatgcttggcaatacttgtgcaacaccccagtcaatcccgaccatgattctagaatcaatcttggccgaaaatttacggggggttttcccaatttcggggaaacccttttttttcctttttctcccccccctttt

SEQ ID NO: 62617 - DNA, 433 bp, Oryza sativa
  unsure (1)..(433): unsure at all n locations
cccgggacctctaagtcacctgangcatgcagcttgcatgaaaggcagagacccactgtttctatcatgcacgccgaaggtatggaaacactacatcagaatgctataatatgactgctgctgccgatattgtttgcagtattgatgttttgattttcattgaagggatgcatggagctcctaacacggagcggagttatcatcaatgggaattcaacggtcctggattgccgcaacaacattgtcgggctaactgtatccctgccttttctgaaggcggatgcgaccgcatccattgttcactcccggaccccaaaccctgaaagtattgtgcgtgaagcacacattgtcatttgatacggtgggcaggctatgatggtaccattgtctacccccaaatttgacatggttcatcacaatccactgcccattc

SEQ ID NO: 62618 - DNA, 340 bp, Oryza sativa
gcttattgaactccgactacatcaatggtgatactaccgttctatatacactcccagtctctgtcagctgagatgcgcacagccgataggtgatggatatgaaacatacatatagatccttcggtcatcccagctaaaaagatagatagatagatatctactaatctacaccatcgatcaagtatagatagatagatagatagatatctacaaatctacactatctatctatctatctataagagaagagagaaattcttctaagatttgattttctacaaatctacaccatcgatcaagtatagttgcagggggaacatgatacataaaagttgggtaa

SEQ ID NO: 62619 - DNA, 422 bp, Oryza sativa
agacttatagcaataattattacagtgggtacgataagctgacccaattctatctagactctgtttaacgggcctaaactgaattcaagtgctggaactaaggcagaataagtccaccttgactctcttaaaagtgacccgaatctaatttatgaccctaaaccgtaaaaccggatatctcgacccccgaactattgaaaccggtggaattagactcccttgatggtattagagggcggattctctgacgtggcgctgacgcggcatgattgacctattgttgactgaaaacatgaagcctgggagatatgcttaactccagggcaggtccaaaactcgcctttggggatgctaagcggccagttgattatcctgcattaacaattatagcgacaagacccgcgttaacctataatgatacc

SEQ ID NO: 62620 - DNA, 362 bp, Oryza sativa
  unsure (1)..(362): unsure at all n locations
tctttggtcagtctcctcttcaccgccgaccacaaaataattcagtttgatcgctgtattggtcttgtctctcctggtagtgtgtgtgcacactgcacagcacaatttctgtttcttttcctctaccagaagatcattcttgtagtaatatttaattacttcttcaagtaattactatttatattggactggtagaagcaaaaaaaaatcaaactagagtttttgggcccttgtaccttgggcctttntacctttgaaaactttgagccagcaacagagcttgggagaaatgatcaatcatccttgttcacaaagctgcctgacatggatgctctggaagctcaatggagtatcaaaatttc

SEQ ID NO: 62621 - DNA, 344 bp, Oryza sativa
  unsure (1)..(344): unsure at all n locations
tggactcctgacgtctactaaggagtgtggttcgttcgacaaattcctacctcttatctatctctgaggtgcttcgggtttgcaaaactccatagatatgcagaagagaaatgctatccccactccgaccaagacagaacttntaccaaaagtttattgtgatctttttgttcaaataacaattaaggtgaagcaaggtcatgaacaacgaatctctttatgataaacagatccattttgcaagctcgttattacgggtagttcctacaaagaatcggactaatgacgtatacaatgcttgaattatctacgtagatgctacataggtggggtgtttcttttca

SEQ ID NO: 62622 - DNA, 433 bp, Oryza sativa
  unsure (1)..(433): unsure at all n locations
agctaaacccttttacagcgctcatgaacctctgttataatgcgatcaaacagctgctatgatacatcggaagacaccatctttcaactgtagcggtgggacatcttcacctagagcatgacagcaaacaatcaaaaacacactttatttgatgatcacatattcttattatgaaaatgttgtgtgaactgctctgagacaggtgaacatatgctgctacctagtggaagattatggtaaaatagacgactntgttccaatcccatcgattttacaataagctccagaaaaaaccaagccattgccagcacattatcatatactggcccaactctataacctttaagctatataacaagacagaaaaattattagttgaactaaacagccgaagaaggtatgcctggtaaatgctgattgaataaacattcac

SEQ ID NO: 62623 - DNA, 376 bp, Oryza sativa
  unsure (1)..(376): unsure at all n locations
gcatcattgctgcggtcatccatcgagaaagccagtgctacgagtgagttcatcacatgcaaggagngcgtgcctgcgcatctagaacaaggatacctctccttggagggtcaaccgacatcacgttcacgccgatggttcaaccaagtattcaacgcaagagcacgctctgctcccttcgattacaccggtatttcgcctctagagaaaccggccgcgcggacgaccaccccttctagaaggccactaactaatatccggcttttcttttctttttttcccatagctggcgcttgcatgccatgtcctatgaacgtggaagtttcacaaatcaagctgaataacgcagtcacgggggtgccgggttcgggttttt

SEQ ID NO: 62624 - DNA, 309 bp, Oryza sativa
agctctaagaaggacaatcatgtttgtccctacatgtatggatctgaagacaatgatgatgatgattctgagatagcagcagccgaatgggttataagcaagaaggttataccatgccaatgggtgaagagttctggaaaagaacagatgtatgactttgatatcaccaaggctgataagatatttgatttgctacttcgggagaaacagattcagctttctgctgggcacacaaccccatcggctgaggagttatgccagaggaggtattgcaagtggcataattctgggtctcattctacccatgag

SEQ ID NO: 62625 - DNA, 464 bp, Oryza sativa
  unsure (1)..(464): unsure at all n locations
acactccacaatactcaagcttctatggaatcagctggcatcacctanatccaaattccatagtccacatcgccaatttcatccatgtttgtgaagcctcttgggaattaaaccccacttcgctctgtttcgccgaatcttctttctcaaaccccaaccgaacaagagtaagccatgtgtagtcggaggggccggattccagctgagggggactctgagccagaagtacttctcgatgcctttcaagacttcaaacaaagggtggcatgcgaattggttttatgttcagaatcctgagccagctcttcccgagtactcttgtcttcctccggtgtaccaagatacttggaactctctttcgatcggagaatgaaagcatgttnccccaaaaagcccccctttttgggggaaagagtttttttggtgaaattgggggggggaaaaaatttttcccccccggggcc

SEQ ID NO: 62626 - DNA, 409 bp, Oryza sativa
agcttgccctgtctgccataagaacacgactgtatataacatgccagctgggttacttcaacctctccctcttcctgaaatggcttggtctcacattacaatggattttgtcgaaggcttacccaagtctgaaggcaaagatgtgatctgtgttattgttgataggttcaccaaatatgcacacttcattcctcttatccatcctttcactgccgaccaaattcttactcaattcttggagcacttttacaaattacatggcttgccgacagtgattgtgagtgacagagatcgcatcttcactagttccacctcgaaagaagtctttgaaaaggctggcgtcaaactccacttcatcagcgcttattaccccaaactgatggtcaatcggagcgagataatcaatgct

SEQ ID NO: 62627 - DNA, 451 bp, Oryza sativa
agacatcaactctagaggatgagaactccacacatgagcatgatttcttatctctcaaagttcctcaggggacatgtcacataaagaatcctcacagttctgtccgattagtatcacttccttgtgcgagaaccataaccacctttctggccttacctctaacttgtttagaaggtggggagacgatgctcctatttatcataaatattgcaaatctcgtatgtgtttgtggcactaatcatgcagcgagatgtctccatggtcgagcttgtgaccataaacaaagaactgccgggagatacaccggaatatcttgggacattatctttccaataaaagcaagaaccatatttttattgaattaatggaaaaattgggccaaccccccctcttttccccggggggggggtaaaaattttttttaccctttttttttggggggggggggggg

SEQ ID NO: 62628 - DNA, 397 bp, Oryza sativa
agcatttcgccgatcagcgcaatgggttctgtctccggcatccacgacctcgtcttcccacccgggcagacgtttcggttcggcagcctcgactttcgcaccaacaacttcggcaagatctctcttcttgactcggagtcagaccagtcgggagagaaccggatttcagtcccgtttggactcccaaacgcggctgaaagttacttcaagaccgtctcaatcgagttggcttctaaccactccggcgggatcgcatcttcttcaatgtcaccagatcaagatgatgaggcttacccaccgatcctgatgaagctccccgacgatttggcggccgtcttcttcacgacagcgtctccatcccgtaggcctagacggaagtccgcttcaacaccgattt

SEQ ID NO: 62629 - DNA, 424 bp, Oryza sativa
taaccaatggtgcactggtgtgcaagaatgtatcaactatcaagtgacagggttcaaagactttcttgtgaattatgcacggttgctgtgaagttctgacatcattctttctgcagttttgccatgtcgcacacaatagatcaagctgagattgatatctgctgatcgaggcaatatgtacgccccttatcatcacttgacaaatcaaactctgattcttcttcttcacacatgttcctgaactgcaccgctcttctcacgtttggcatgggaatgtgcatcatgttctacggcgtccggagcattcagaaaccaggaatgcaagtcgataacttgcaccttgggaatttctcttttcgaaaacccccttaaaaaatacggggttataaaaaaccccttggtggaaaaattttttatccccccc

SEQ ID NO: 62630 - DNA, 426 bp, Oryza sativa
  unsure (1)..(426): unsure at all n locations
agcttaagcatatgctaaatatgggttaattgcaggtcgagaaggcattcagagaaggtacagctcggcaaaatgcacacagtatttttgtgtctcttgcattagaacttttggaagagcgagtccatgtagcatgcaaagaaattattacgttggaaaagcaggtacttgtggtgattgcatagaagtcataaaatatttcatatcatccatgattttgtgcacatcaacttcgttgacacacttcttgcagaacaagcttcttgaagaagaagagaaagaaaagcatgatgaacaagagcgcaggatgaggaggagaacaaaagagagagagaagaaacacaggagataagagaggctgatagaaaaagagagggataaagggaaagaaattcttgggttgaaatcatcagatgatnattcatg

SEQ ID NO: 62631 - DNA, 340 bp, Oryza sativa
  unsure (1)..(340): unsure at all n locations
acacttagnaaactcaagccttgatcattcactgggagcctgcaggtcactatctcgaatctctgtatntcgtaagatccactatcagtttacggtagctgaacttcggtcgaagtgggattaatcgcttcttaagtattttgggccccaaagtttctctcagactctgacggctgaaaagattattacactgtcgatcgataattctagattgttacgaattgacgacctgatgaagggatcgatcgatagtgaggagtgcaatggacacaggaatggcgggcctgttgtttgttgagatggcctctctcccggcggatactgtcttgagtagactttt

SEQ ID NO: 62632 - DNA, 427 bp, Oryza sativa
  unsure (1)..(427): unsure at all n locations
agctngatgttcgaccgaagaacttggctattatggtcaccttatgcaccagcgagatttgcaggtatctagcctgatgaatattattacaggtaacttaattctctacgctggtaattaactttattgtgtgtttttatgcgtgatcaatatgtgtgattatgaatgccatgcttgccaattaagatctagggaattattgtgttggtaattctctggtttcagtagggtctacagcttaattcagaagccatggcttgatgacagtgttatgccacacaaagagtgtatctgtctcgaagaacaccaatccgttacattctgtttgccccctaattaacaaaacttctttgttggtacattgtcttaatactgaaacagctgagtgcaaatcacaatattgtttttattttaaaaaaaaacaata

SEQ ID NO: 62633 - DNA, 434 bp, Oryza sativa
  unsure (1)..(434): unsure at all n locations
tcttaatggtgatggcctatggcanaaccttttgcgcatcaagtacttatagggtgaacccctatcccaatgtcacacaaaccaggaacatcccaattttgggctggcctaatgaaagtaaaagatcaattctttcagtatggatcttttaaacctggtaatgggatggaaataagattttgggaagacacatgattgggcttgcaacctctcaaatatcaatatccttctctgtacaatgtggtccgaaaaagacattctactttggcagaggttatgagcacaacaccgttgaatgtttcattccgacgatcaattgtaggaccaaagttagttgaggtagaacgaatctttggaattcctttcttttcgggaaccttttaaaggccctttttaaacccccattttttttataaaaaaaccccccccccccc

SEQ ID NO: 62634 - DNA, 316 bp, Oryza sativa
agcttgtttacaattgttgggccagcacattatgagcagggtctgatcgggtgctccctgtgcataactgctataggttcactgctgttccaaagtgagcaatagtaattcggaatgaaaatataccaatattagaggtttccagcctcgatattcatatgttcataatattatctgacccaagtagagacaagtttcaggttcatatatctgatcaaagtagtggccttgccaaattcaggttcagagcaacatgcaacttccactatgtgacccaaaaatttcattgtggttccactaccaccaacgtaaacac

SEQ ID NO: 62635 - DNA, 435 bp, Oryza sativa
tggaagtgtgtgtgaagtgaaggagtgaagctacttttattggcagttatgacggttgtgagaaagggaatgtctgaactgccccgcaaccgtcattaggagagcatctggagcattcacgccaaaccccatgatcaatggcgatcagaggggttcggccgaactatggggttcagccgaacttgggctgggccctcccggcctggccttctgtctgtggactcccctgactctcctctgtccatttctcggagttttgggctgagtctttgatatttttatgactagtgagcgtgcacgtgcaaggcatgttactatactgaatttataaaattaaagataaaatacattttccccaattccaaaccttgggaatttggggccaaaacccaaattttctccgggtatactccccaaatttttttttaaaatttt

SEQ ID NO: 62636 - DNA, 431 bp, Oryza sativa
agcttggaccgcacacagtatcttgttcatgctgatgggacgataatggaatcaaatttctccggtgcagggtcacatgaatactcttccccaggccttcaatgcgctacttgcgatcttcgcggttttttccatacaggccccgccccgccggcacgctcctacttccttcgtactaccaaaatttcatttcatttggatacaacgtttagggcccgggttaagttccaacttataacttttccatcgcatcagaatttgctacaacacagattttcaacttttccgcacatcggtctaatttcaacccaactttaatattgatgtgaataaacacaaacgttcagagttttcttaaacttcaactttttaatacataaaaccttcttcacacaaactttccaactttcatcacatattcaatttaacca

SEQ ID NO: 62637 - DNA, 425 bp, Oryza sativa
actctagccttaagagcctgtgctcagtgccacagttcgctgcttactcatgctctcagatagacactggtgaacgctatactgtgcataaaccattggaaacctggtctttctaaagatttccaatacatctgaattcctcctcatctcatcaccatccttctgtcctgaagtcaggtggctgcaaacaaagcacaaacatgtttggtgcaatgacatgcttatcgaaatcgaaccctgcaaaacagatcctttaccgttgaatacctaagctaagaagagattcttggttgcggtcacaccatacaatgctaattagtcaaaaattgcacttgttcttctacattgggaaacatatgaaatttattcattttaattttgtttctccaaaaaggggggtgaaaaatgagctccctcccaatatt

SEQ ID NO: 62638 - DNA, 345 bp, Oryza sativa
agcttctggcgcaaagaacgcaggtttttttctagtggttaacgtcgaggtcccaaatgagttgtacttcctgaagggtgcggttggagattgggtgaactacattacgcctgagatggctgagagcctggattagtttctcaccgagaacgttcgtgggtctggttttactttcgcagagtgatattaggttgcgatttcattggctgctgctggttactccttggcgctgaagcagaataagtcgcagtttgttgcgatcgaagcggtgacaatgcatgttgttacttgtcagtggtgtgcgtgtgtgtgcgctcaatgtgcgtggtgtaagttgagtggagt

SEQ ID NO: 62639 - DNA, 427 bp, Oryza sativa
tgtcgtgatcccatttcaagttagcaaccataactacctttaatcgaataagccatacaaattccctgcctccacctcgagtagaggcgaccttccacgacagcataaagctagtcatcatttgattaaaatacgtggtgccttggtgatgataagatatataggtggatcgcaaatatgaattgatcgtaaataccacacagacacacgttgagaactggtgcggaattacgtggaaagcgaatgatttgaggccaatccaaaattccaaatccgtccttgcaaacataaacgagaaataaaatggcaaaatgatttctgctactttctgcgaaacctttctttgttctcccccccaatttttccttttttttgggcgcttttcccgggggggggagaggaaaaattttttttttccccccccccc

SEQ ID NO: 62640 - DNA, 249 bp, Oryza sativa
  unsure (1)..(249): unsure at all n locations
ctgcagcatgcaagctctcacaccctctcgtgaccaattatatctatatctgcggcgaccaagcaaatattaatatgaagtgtgggacgtgataacatatggtctcacctcactatagacaatattatcactcagaacataagactggagttgtgtgcaatataatgaaagagcgctccagacgaaaattcatgnacttatttcaatgaaagcccgccaaggaacagatcgttcaaaagtacaaacttg

SEQ ID NO: 62641 - DNA, 439 bp, Oryza sativa
cgctggtgtaggactgtagggcaatttcattggctacttgctgatcacacgattagcaccccatattagtgatacgtgtacgttagcaaattctcaactgcgaaattaatcaaactttcaccaaactcttgtatcggaaaatttctatgtagaaattgtcagatataaacctcatttaggctgtgttatttccttatctttttcaactgctactttctcgttttttcgtcagctataaacctcatttaggctgtattcttccctttctcaaccgattttcgtctttcatgcgcatgctttttaaattgctaaaggtaacgttgttttttaaaagcagtttgtatttggaaaaaaaagggtttaattggggggttgtaaaaaaaaaaaatttattttcccaattttaatatttatttctttaacaaaaaaaaaatttttt

SEQ ID NO: 62642 - DNA, 433 bp, Oryza sativa
  unsure (1)..(433): unsure at all n locations
ntgccgngacgcgcctcatgtgttgagacgaggctcatgtgttgggcattctctgattgcgagtcaagcgttcatcactgcagtgtgagtgaacctaatctattcgaatagccgtgctcgcgggtattgagcaccgcgacatgtattacacttggctagtctctaaattcttaacttatgtgggatggggtgttgcatgaccaatatttatgctgttggagccacttcctgagaaaggggaaggtgggcgtcctcagaataccataacgactcaatggcgggaagctatccttgggatcacaatggatggtggacagaaccgtcgctgtttaatacaaacactgggtactaaaaaattttttaggaatttcaaagggttcccaaaaaattggggccccttaatatggagggctttttcacctcttcttttttt

SEQ ID NO: 62643 - DNA, 440 bp, Oryza sativa
  unsure (1)..(440): unsure at all n locations
tagcttacaattatcacttactgccataactatttatctttgcatcacagntagcacctggaatcttgttgactagaatacaggccttttctgcacgtatgagaataatgagagcacctctggactgagattatacactgttgtcactcctgcataaggaattaaatgctcagtacttcatagctttataatatatgtgggataacacatctcactattagacagaacaaccatactctgctatagacttcgagccatcttttctcctcgcatgaggatattcatctctcaacttaatctaatattactttactgtgcagagcttcctccttcgctttcagattctgactattcatgtcagcaatcagntctgaaggtttcatgttccctgactaataagagcctgtatattcttatgggcaactgatgtgctaatacaa

SEQ ID NO: 62644 - DNA, 371 bp, Oryza sativa
agcttgcatacatggaaaagccatggaagaatatatatcattaacatccatcatatttcatctaaaatagaatcaagaatattcatcacattgcacacaatgcttggttctgcctataacataaactcctgcatattccctttccccccaaatccaagaagacccaacacataatcaataaaaccaccaccccgacgccacggtcctcgccattcttcttgccaacgtggtagtcccaagcttggggctgccggatctggccctcaccacccaccactcagtgccagcgaccagcattggccgtaactcctgtgcctgattctagactacagtaagtcacaggccactatattccgagagcactgaactct

SEQ ID NO: 62645 - DNA, 450 bp, Oryza sativa
actcaagctggctgaaatcgccacaacgacatgctttacttcacttctttgcacctatatactgcattcctgtctctacttaagagagggaaccatacctgaaccattgttttcgaatgaagtctggatggattacacctttacagattacagagatctctgctgacaataagttgttctcgcatcacttgaagtttgtcaaggcagacatacaaattgtgtgaaactcctctgtgcatatcaaattgagttttgaattgaaagcttggattgatctatagtcattttcggtgtgtgatggtatcaaaatattttggaacaagtttgttagactatgtgagctgtaaagtgttaacatttcttatttataaggttttaaaataagggttttttttgaggggcttttggggtttccctttaaaacgaataaaagaggaattttcctttttt

SEQ ID NO: 62646 - DNA, 398 bp, Oryza sativa
agcttatactggctatccaactaacatatctatctatatcaattgtaaacacggtatgagaaaatttatttaaagatcatgtacacgtgagagcattaccaagaaatccctacagctactcctaaatcaaacttttgggttttttctaatataaaaaatggatcccacagatatcaaaactatagctctgaaaaaattagagaccctaataccgtgctgtcaacagtacgtgatgaatataagatgatttattttacctataatcaattattgagctaggaatatattgagtttctagtgcactaagaagtagaaaataataatctttacgagagaaatgggtgctttgagtcgccaattgtgaattattaaaataaaacatatggtaccatgaaata

SEQ ID NO: 62647 - DNA, 443 bp, Oryza sativa
ctcaagctgacacgtggcgcctatgtgccaatccagtcagcagatataaatattaaagtattcaggcccacctgccatcttttagcacaaccaaatctcttcccatccccagcgccctctctctctctctctctctcgggcgactggcggcggaggtgtaccatgttccggcggcctacaacgcaagtggacctcactccatcggtcgacggcggaggtggacctcgctctacgccgagatgggcggcggacggcggggcgtgcgatgactggcggtggacgattgcacacggaaacggccgctgctgggtgggcgaggggagcccgaccaggactggcgaagcaagtgctgctggtgtgggaaaacaatttccataaggggggtttaaatttttaaaatttttgccttttcccttttctccccccttttcccacgggggggg

SEQ ID NO: 62648 - DNA, 414 bp, Oryza sativa
  unsure (1)..(414): unsure at all n locations
agcttattatgagagtaaattgcatggattgtttaatccgctgcactcttcaatgctgatccatttgtagatgactgtcccttatatatgcacttttcattgactcgaacaacatatcattgcagggccctgttattcaatttaaatttataattatgccaatgccaaattatgtaaagataaatttttcaggttcagaagttcacagtataaaatctatccatatcctgaaattagaaatagtactacgtttgtatcgtcaaaggaatggtagtgatattttatcgcaacacagcttgcagtcnagtaaacatctcagctaaactatcattaccacattgttacaaacgaaactagagagacagtgctagctgttaattgttggattatacaaatgtgctttaagatggtaac

SEQ ID NO: 62649 - DNA, 334 bp, Oryza sativa
  unsure (1)..(334): unsure at all n locations
gacactaaaaactcagctacaattcgttccagcgatgtgtgttacttgtctatattaatatccacaaacgagtctaatgtctanagttctacctgcacggtatatgtatcttgtgatgtcacctttgacgaacaagtgcttcctttgcaatcttcattcaatgctggccccgctccaactgaaatttttgcttctctacttaatcatggaaaactctgatctagggagagaacatatatcatctgttaatatctctatgccaaatgctactgatatttcatgtgcagaatcctcccagaatatgtgaattcacatatactcgggggccatttgg

SEQ ID NO: 62650 - DNA, 451 bp, Oryza sativa
  unsure (1)..(451): unsure at all n locations
agctnttcctatggaccacgcactaataccatggcaaacaagtgattatccatatggaccacataatgatcgttgcattagctcacaaactactagaaagaacaaaattattgtaaatttagttacacatgcatgagccagttaacggcatgattagcctttctagaaaaacaacatatgtagcacaccgttttatcttccttgtcatnttggagaacgatgtagtcaagaaaacttgtattttccattattgtttctaatcattatatgatataaaaactattaaatattttatatgtgatgaatccaaacatttctctagatatttgtcatcgaagtttgcagggttgaataacattttctagtatgtcctaaattctatttgagacagatcaaagtagatcattttttttttagtagtgcatatatatagaannatcctcatatatat

SEQ ID NO: 62651 - DNA, 422 bp, Oryza sativa
tctgaaatagataatgatccaataccatacggaatatatctgcatgaacttcataaaaactgcaacatgctgtaatgttattctcaagtttaccacaatatatattattggcttgtagtcaaatcgtcaaatctattatataactatttttttacatgttctacttctatctacagtttcatatacttcacaacgcattcgaaagatacggctttgcgataattttgcgaatcatatgtatttgatgaaatttacttaaaaagattttatgatcaatgattttggaaagcaatctgcacggtgtatgcacaaaatgaaatcagccttcctccatatagggtaagtacaaaattgggttccaagagggaaatttccggaaaatttgagcccccccctttctcaaatttttctcccaaaaaaaa

SEQ ID NO: 62652 - DNA, 426 bp, Oryza sativa
  unsure (1)..(426): unsure at all n locations
gctctatgttcggcgcagcactaatactggaacttatgagctttaatagctctatcaatcaccatctactgtaacatatcttctgaaactttcttcaaatccaaaagtccagtatcttcctacaaattagtgaattaggaggagctctttgtgccgaaaaaagaaagagcatggcaatatttcaaacttgcattcgaactgcgaaatatttattcaaaggaggagagatcaagataatgcagcagggttggntatctaattggctagtcaaacatgaggtggttcatagatctttgggcttcgatcatcgaggaatagagactttgccaataaaagccaaggattggggatttccattttgggccttggtgtccaattttttttttaaattaaaattggggttaaatttaaaattattgggggggg

SEQ ID NO: 62653 - DNA, 362 bp, Oryza sativa
agcatggtgtgttctgcaaaaatagctgtttcctttcttattattgccagatcaaatagaagtgagcctgagtcaacatttttgtcagcagcatctgcattataattaaaaacacattacattctagataggcctgaattatgaatacgtcgatgttcaaacattgtcttcgcgctttgtagttttatcataatattttgtatgtgcgtcatggacaacttactttctctggttacccaatcaaagcacacaggtggctcgacaggactctagaacaacactctaggcctatatctcagtgggcctgtcctaaccaagatattaagctttcaaaactttaaaactagcttctaccctttatg

SEQ ID NO: 62654 - DNA, 401 bp, Oryza sativa
ctagtagttaagaaggctcaactaattattctgttgtatgtgacttggaatatatctcttttccgtgcggtatttatttgtaaccgtatttattgggaaagagtttcagcttgcatggattgctttatcgatctgcttcaatcatagatccatctacccaagttgcatatgaaccaaagatttcatttgtgatttgcattgtctgtaactgaaataaaccataggttgctgatccacaccaacaggcactaatgtgatgaaatatagaattttctcggagatagattctaattaatcactcgagtggatgtccaccccgtatagtgatgtcaactaaatgatctttgaaaaaaaaatttttttctaaaataaaagaaaaaaaaaaattttttttaccccca

SEQ ID NO: 62655 - DNA, 378 bp, Oryza sativa
  unsure (1)..(378): unsure at all n locations
agcttctgaacctgaatattctgagcaatcttcagacagnaaagaggtgatctttagacagatcactctataggctgataacctcctctggttagctgagatcttagctgacagaaatgcagctgatgagctgacatcaatttgggcaagccagggagagctggccaagctgcattgcaggataccagtgatgcaccggcatctcatcagctgtgtcactgcaaggctcttcttcgcggtagggaaaggcgaagcgttaccgtctaaggagacgaggcagctcctccttgatgtgtggcttcagcctctgatggatgattacaactggttgcaacatggctgcatgtggtttgatcggaaagtcatccaagaaaggat

SEQ ID NO: 62656 - DNA, 439 bp, Oryza sativa
tccacagtagcaaatcacagcccaccatattctgattctatgaggatgccaccatcatgccccatggtgggtcgatctctgaaagctcatgcttgccaatgtcatatcccagaattttcgtgccatactcacagtagaagtagagtggtgtttcggcgaggacgctgggcaacatctcaacataggaatcgagcacaatggaggcctgcgagctccactctccagtcttcgacgagtatacacacgcccatgagtgatcatgccttcctgtgcccacgaagacgacgaagaaggggccttggtgacagtccaaatggtggcagtcgcttgcagcgcatagcaccgggggcccaaggttgggcccaaatttaaaaggggcccggttttgtctcccggggggggttttgtggtccccccgcgggggagggggggggggggg

SEQ ID NO: 62657 - DNA, 422 bp, Oryza sativa
  unsure (1)..(422): unsure at all n locations
ataatattgtgcctgctgccggagcagcattgcttagctcattcatggacagaaatgcanagggcgaattctgaaagaaattaattatctcttcttgggtgcaagcctggatttgatcttctccacctccttggtgccaacctggaatgccttggtgagcacgccgttgggcacctccggcgacgccgcgaagagcgtcatggcgagggactgcgtgccgggcagctggctggtgaaggcggagatgactgcggcgggggtgtcgccgttgttcttctggaagtggagcatgccgcgcgggaagacgaatacgtctccggcagagatggtcttggttgtacaaggctttttgggttatgggtccggggtttggggggtcggggaaaatttggtaaaaaaaaagggccctcccccccgggggg

SEQ ID NO: 62658 - DNA, 360 bp, Oryza sativa
  unsure (1)..(360): unsure at all n locations
agctngtgggaaaccatcgaatctcacctttcctatgcaccggcttgcctataagctacggaatacggccaaagaactaaaacggggggcgagaaccacgtgctctgagactaagctgaaataccatatggccctagatgtcatcctacgactggatgtggcccaggaacaacgtaccctttcgccggaggaagggaacctaagagcggccctgaaaaggagagatttgggtttagcggtgattgaaagagcgagaaagagacaagcgtcacgaataacgaacataagagcatgtgatgcacacaccacgctttttcaccttcaagtacactccacaagaaggaagaatcatatacatcg

SEQ ID NO: 62659 - DNA, 429 bp, Oryza sativa
tactgataactcgtggtggagacaagttgattacattctttctttcactgagcctatatattcgagatgcgcgtgacagacactgaagagccacgccttcatcttatcaatgaaatgtggaatactatggtcgagaaggtaaaggctgccatttataagcatgaatcaagagagcctgaagaggagtcagcattttactctgttgtgcatggcattctataagattggtggagcaggagcaaaactccgctccagtgtttggcgcactcactaaatccaaggtgaatcttgctttgtagttaccaagtgatttgtattcctgaagccattatttgatatataatgcgcttcctttttttgggtgggggtgccttcccttttttttttttgggtttaagaagggggggttaaaaaatttttttttttttt

SEQ ID NO: 62660 - DNA, 449 bp, Oryza sativa
  unsure (1)..(449): unsure at all n locations
actatanaannactcaagcttntgttncaccatgatctacatgctcaattcagttctgtgttgaatctaatatatttgccttatcaaagagaattttatacagaagaatgggtgacaagtgtactcattaacaatttcgattccattttcacttgtgcatgccaatgtatactcttaatatgatagtgcgtaactttggaaccttactcttgctgacagttgctgacatatataagttgttctttctgcatgctttgtattcctttcagcaatgcgctccatgttggtacgttcatctaatttgctactacctctcttatgggaccggtaacagttacagatattcctacatttttaggaatgcatgtaagggtaatgtagtaagaaaaatattttttcttttttgtggaagagaaaaaagagtttttccctccccttctttttttttc

SEQ ID NO: 62661 - DNA, 429 bp, Oryza sativa
  unsure (1)..(429): unsure at all n locations
ctaagnnactgcagcatgcaactcacacagaattggtcagctgtttgttgctgcatctacgaacaggagaaaatcctagattatgagttcctctgtaacaaaagcctcgacactatccttttcggttcttcattcagataaatccaagcctatctaattttatatatcctcggttagtaagctaacaaacagaatttacatggacaattcagacacctcaagacagctagaccttaactgggagcaaagattcaagatcctttgaaggatcggaagagggactttttatcttattgaagattcaaggctcaagatcatccaccgtgatctcatagctagcaccattttgttagatgtagacatgatacccaaaatatcaaactttggccttgccaagaatttaacaaggtagcgagcgtagcaacacta

SEQ ID NO: 62662 - DNA, 427 bp, Oryza sativa
tgcctccttagcagatctctatgtcaatgatgcattcggtacagcccacatagcacatgcatcaactgagggagttccaagttttaaagccttctgtcgcaggattccttttgcaaaaggttactaccgtttcaccttacattttcaagtctgatgcttgaaatttttgaaagctatacctagaccagaaattttagagtaccctttcttttctttcaaaaacaatataaagttctgagcctcaatgtttatcattaatttaaatcacaggagcttgactaccttgttggagctgtttcaagccctaaacgcccatttgctgccatcgtgggtggttcaaaggtgttcatctcaaaggaaaattttggggtgggtgtttaattttccggggaaaaaaattttccacccccctttttttttctttttt

SEQ ID NO: 62663 - DNA, 337 bp, Oryza sativa
  unsure (1)..(337): unsure at all n locations
agctngtttcatcgttnttcatacaaaaatgtgtcatttacagcctaacaaacgatggtggacatcagatagtcccttgtcctggtgaatataggatctttgacttaaccaagacaagttgtcttatcttgtggctgcactttgcttattgcttattgtatgagaggctagaagtggggcatgctataaccctgcggcacccacaaggggaaaacagaaatggcaatacatcatttgcattttctgttatttctatactcttgtcaggcacaactaaatatgctaaaaatggtttcagttgaccaaccactgtaagaagttctgctagaggatgtgt

SEQ ID NO: 62664 - DNA, 438 bp, Oryza sativa
  unsure (1)..(438): unsure at all n locations
tgtactgtntcaatctctctcctgaanacgcggaaccagtattgtgtttttattntaagttagttgtaaccatgtcatacagatatatctatttcagataaatattattatataattaatttatttgtagttgttgcactgaaattttataaaattaagatcgccactgccatcatgtttttcatcgatcttcttcattcttcgtcttctccctactatcttcctatcttcttgcattgcgacgggggcagtagcatgcgagcagcagtggcgacgattgccgacctatgggcttggctacttgctacccaacagcgggacaggtggcagatgacggtatatagaaaggttaagggcccggggaatttcttaaatgaatataaganccgggaacaccgtgtttgtaaaattttggggggtgtccccccgcgtaaaaaa

SEQ ID NO: 62665 - DNA, 441 bp, Oryza sativa
  unsure (1)..(441): unsure at all n locations
agcnttggccaagctttgtatatgtgttgtagcacaactagcaactgaaagtctagggaataagaggattaggtggtgtttgtatccacggacttaactttagtctctgtatttagacactaatttagagcattaaatatagactacttacaaaactaattatataaatgaaaggtaatttgcgagacaaattntttaagcctaattaatccatgattagcctagcatcacataggctaatcatggattaattagactcaataattcgtctcgcgaattagtccaagattatggatgggttttattaatagtctacgtttaatatttataattagtgtccaaacattcgatgtgacagggacttaaaagtttagtcccatttaaaccgcgtcttagtggcaagatagatagttgcatgcaagaatagtggagcacgttgtg

SEQ ID NO: 62666 - DNA, 432 bp, Oryza sativa
  unsure (1)..(432): unsure at all n locations
actcagcttggcaagagggggatgagggatggctcgacgctgcgaacttgtcttctatgataaggttgaccttcgggtcnacngagggatggagcttctgagtcttcacttgacgatgcggcatgcatggtcgatgaagaatacgatgatgcgacgcctactgtgtaaaatgagctgaggaacgactctccggctgggtgggaggggcatccataggaaatagatgaaggcggcgttgtggtcgtcggcgtccacggctcttctgatggtctctatcgaaacggatgcgaggtcgacgaagatgatgccgctgctaagccgactgaggtggcgccgtgccggggtcctgcactgatttggttctattgagtgggggaaaattggggggggggattttttttaaaaaggtaaaatgggtatatggttacaaat

SEQ ID NO: 62667 - DNA, 432 bp, Oryza sativa
  unsure (1)..(432): unsure at all n locations
agcttaacatagaagatnctcttactcctctctctcttacatgacgccaaacttgacttctttagttgacaaccataaaatctattaattgatttgtagatgcccttacctccattcctagcactcgtcgtaattatgggcaataccagagcattatgttttatatatatgagagaacattccgaaaataataaccataatatcctatgaaattcttgaataaaaatgcatctaaaattagacatttggcaaaaattaatgtatttggcgttgtatgtattatttattgtgttgcttctttaggtcaatatagtgaaacaaaacaagcatgtccgccgcaagtttctttgcatttggatcatttngcatgacatccaagcggataccaattacttaagcaaaaaggaacaatataggttgtgttatcatata

SEQ ID NO: 62668 - DNA, 439 bp, Oryza sativa
tctccatgcgtttctcatttatatgacccaagtgacaatgctcaataaaagtgggagtcaaatcttaggacgttgcctttttgcattaatgttatagactgaacatccatcaagattcacaatgtataagccattcatcatgggtgcatggaaatagataatgtcattataatagactgaacaaccattgtccacagatctaaattcataacactctgcttgcatacaagaaacagagataacgttcttacacaaagctggaacgcaataacaattatttaactcccaaactaattctgacggtaaaaataatggcatagtgctgacttgaacaacaacaaactctttggtttccttaatttttgggcgcccccaaacccgacccctgaaaaaaatttgtggtttttcccccccaaccccctttttttttttttttccc

SEQ ID NO: 62669 - DNA, 439 bp, Oryza sativa
  unsure (1)..(439): unsure at all n locations
agcttccccatacaggcccaaagtttgtcttctttagagttcacatgaaaaagtcatgaattatttttaaatataaagtctctagaccgtcctatttgactcagatgatattcaaatccaagtttagagaccggggtgacacaactgaacaagttggagaagagcttaacgagtgatctacaagtttagggaccaggatgatacagtcgaacaagtttaaggacctgaacggtcgatttgcgaagttatggaccgggatgagacagcggtacaagtntatggaccggcgatggactctactataaaaaatcaatactctacagttagtatagcctctcatctgctatcaacagacggttaatgacgacagagtccgccagccagagcacattggtttttttttcctttgtcgcatcagatttatatttgcaattcgaca

SEQ ID NO: 62670 - DNA, 394 bp, Oryza sativa
  unsure (1)..(394): unsure at all n locations
attacggacctataaaactaagcntttcttataccatcttgatgtaggatatggagatacttgattgaaaatccatattggcaagacacataacgaaatacaagcctcgggtcttccataggaccagcgatggaaggtggtcacgttactcaatagtatcatccagctaacattggtgctctctctacatgcggaacaaggggatatatacttcatatataatctctccttcgttagaacctgtgataaattgtggtgtggcaacacaggatttcttttgaacagcgggcatcaatcccagtcgattctagatttctttctcctgtgagttgtcccatgtaatcatccttggaaggtgaatgagggaattaatatttcaaaggaattttttttt

SEQ ID NO: 62671 - DNA, 439 bp, Oryza sativa
  unsure (1)..(439): unsure at all n locations
ntgcgagtctaggactatcggtttggctatatagtcaactttctcaattctaaggataacttccgggcaatgtgagttgcccttatattcctccaacgggaatgtactatcattggtacacgtaaattttgggttttccaaccatttcttttcacaaaagcttgtgatatgaaagaatgggaagctcctgaatcatatagaactattgcgggtactgagttgacagagaacatacccatcacgacgtctggagtgtcctgagcggtctcagcttgaatgtggtttacccggcctcgaccaaaggtgttggatgcacgagaacctttgtcaattgccttgagagctttgtacggaagaaaattttgaagttcctttggcccccgggcctcttggggggcgaaagaggctttaaataagtgggtataaataaaaaaatctt

SEQ ID NO: 62672 - DNA, 396 bp, Oryza sativa
  unsure (1)..(396): unsure at all n locations
agcttggaggagaggcagggttatttttgtttatctttcggtctgaaatcattttgaaatcactaagcgatttatttctttctaagcttgggccgaaaagagacttgcgtcttgattccactttaagagatgtttttcaacagctcatttggtaatgtaccgacctcctgggtcagatcattacttctcggcttccaaagccattccacttgattaatcggctcccagagcctttttcattntctctgacttccagagtccagctacccagcagcacaacaattcgctttcactcgggaagcctagtctatgatgcccgtagacattccgaatcaacagattcgtttttgaccactcnggcattcatctgccacataggctgattctgggaatgat

SEQ ID NO: 62673 - DNA, 442 bp, Oryza sativa
  unsure (1)..(442): unsure at all n locations
agctnttggtcagggccatcatggaacatgagatcaaccttcgcgtgccgttcttttctttcttttcttcttttgctcttttctaaatgtaatttgatgatagagaaaacaggaggagatcgaattgatttgtggagggaagaagaaaaaaataatctgtacatgtgtagcgagagttttgataggaaaagaaaaatcaatgggaaattaaccgatgagttgttgattcttaagtccaaatagattgcaattgcgtgatcagaagttcagaacagccacatgtacatctccaaatcattcacaacttttgggaacaaagtgaaatgttcatttcaattctattgcgtggtagtagtagagattacaaatccgcatggcgtatattaatccaagtcagagagcaacacgtatggtcatcagagaggataagcctaatgagaca

SEQ ID NO: 62674 - DNA, 423 bp, Oryza sativa
  unsure (1)..(423): unsure at all n locations
tttcactgctatagttcttgagtcatggagaaatcccttgaatacagaaccaaacccaccttctcagctcttctgagaagtntttattcgcatgctgcagatcaatatatctaaacgcaacaattccactctcaccttcaacattgtttgatgtgcaattatacctcttacttttgttccaccaaatcactagtgcgattgccagcataaacagagcagcgaagcttataccaagggcaattgcaatgatcaatcctcttctgttctttttctggctttgctcctctcttgaagcaaggcgaatgtaaagggtccctccattagtatcagttatgccaataaacaacccttggcctttggccttgggtttattttttaaaaaccaaatttttctggggagaaaaaaaccccccaaaaaaaaaa

SEQ ID NO: 62675 - DNA, 353 bp, Oryza sativa
  unsure (1)..(353): unsure at all n locations
agcctgacgacaaagttgtacgtcggatttgaacttaccgcgttgaacggagaagcaccaccacataaggccagtgttncgtcttaccactaggaagagagctctatttgtccctcgctaccacgtggcgcctaaggttcgcgtggtggaagaagaagaaattgtccccatcttagcgaatcctttcgttgttaacgcatgtgatgatgattggtaaaaatcttagcgccacccttcaaaggccgagtggggagctactcataatgatgtgggcaagccgaacgagccttctatcaattccgaggcccggaagaccttgaaccccttgtttaactcgctgccctatatacttg

SEQ ID NO: 62676 - DNA, 466 bp, Oryza sativa
ggttgtcacgcccagaaatttagcccaaatttccaaacttattttgtgtattaaatctctgtccaggaccagccagtgtacacaaaacgacaagtcaatatacatattccaaacgtaaataatgcgtaaaatacttacagaagaggcacttagtcctcacactgagatagaatgacagcagcggaaaaggcgatcctagcggggcttcagctctactccacaggcaaaactcaactggcgtctgagccttggtcctctaacttcgtcttcagctcagaagcactacacttctgaaaagggggaaccatagcaagactaagtacaaccaccgtactcagcaagccacactaatgatgcagacgtgcaatgggatacaaggacggcttgtggctatttgcataaaggcagttgtaaagcattttattgagcataacagtaaaacaatagagttattaaggtaatatta

SEQ ID NO: 62677 - DNA, 412 bp, Oryza sativa
  unsure (1)..(412): unsure at all n locations
agctntgagctatatctgccaagtccatatattctccatcgggagaatgagggactgacaatgccggtccacggggagcctcaattgatagcttacacttgggaggtgtaagctccgtcggtcgacttggatgaggagtcatcttcacaactatgtcttctttgggccattgtatgaacgtcttgcgcgcatcgcccaaagtcatgatttcatcatttgggggcacgggcagcggatagcctgaccaggtgtcctttactgtatcgatggacaccttggcatacccagctagcangtctgcgccgtggaccttgtctgtaaccgagggcttgaaagccatgccctcagcgacttcaggagcgaaagttgggtggactctcgctagtaggacacactgtgctgcgccctgcat

SEQ ID NO: 62678 - DNA, 356 bp, Oryza sativa
tatacatttggggattgataagaccgttcacaatttcttgaagctcgatctcccccccagatgaaccatatagccaagaaaaaccatgaaccagaatagaagagcttgccccacccatgagtaaatatttcatagtagcctcattagaccgtagatctctcttggtatatccagacaataggtaggaacataaactgaaacattctggagctacaaagatagttattaaatcgttagcaccacataaaaacattccccctagagtagctggtgatacgaataacagaaactctggtatagccatttctgtacattcaatgtactctaccgattgaggaatacataaagttgaacat

SEQ ID NO: 62679 - DNA, 312 bp, Oryza sativa
catcaatggactcctgacgtctactaaggagtgtggttctttccacatattcctacctctatatctatctctgaggtgttagggttttgcaaaacctcatatatatgcagaagagaaatgctatctccactccgaccaagacagaacttttaccaaaagattattgtgatctttttgttcaaataaccattaaagggaaagcaggtcatgaaccacgaatcttttatgataaacaaatcattttgaagctcgttataccgggaagttcctaccaagaaattggcctattgacgattccaaggcttgaataat

SEQ ID NO: 62680 - DNA, 410 bp, Oryza sativa
agcttgcattggctgcttgtgctatattctatcagcctttttcactgtactagactccatcatctatatattcatcgatccatctgttccaacaaccacttcaattccttcttttctgcttctttcggaatatatacgtacgtcttgctatatattctgcttaattaattgccaccgctatatactctacttgcatatatacttgcatcaaagacgatcgatcgagatgcatgcatgcacctgcctgcgggatgctatactagataccaagccaatcgtcgtatgcagatgtcactagctactccatccgtttcacaatgtaagtcactttaacatatttcacatttatattgatgttaatatcaatatatatatatatatatatatatatatatatatatatatatata

SEQ ID NO: 62681 - DNA, 410 bp, Oryza sativa
  unsure (1)..(410): unsure at all n locations
actcaagcttcgcctcanagaccccatcgcacgaggaatagggacagtctttcatgtttgatcacaatataagagcaacggttataatacagccgatttattggctataagctcagcgtacccatataatagttagctctttacaattaatatatggctcacttatctttctcatagaattttctggatcttatgtttcaacccgctgtaagtttatagtccgtttctcctcttttctctcctccacctcagcatttagccagcttatagcttactattatactctgctctaagatgtggtgttttcacgttccaaccatatgaccgtgcctcaaagtagtatggagtggattacatggctactacgaccaaatataccaagatctggtaaaaggagaacatgctaggcg

SEQ ID NO: 62682 - DNA, 292 bp, Oryza sativa
cccagcccgccagacagccgagaacatgagcgacaacgaggacaccggacggcacgatgcccaaaaagaaggccaaatagcaccacaacccgagcgtgaaaaaagggcggagaccaaacccaacggacaaaacaactgacaaaagcaagacacctaatcgaccaatgcccagcgacgagagaaccatcgagacacccgcggaacaagactgccaaagagtccccagcgcaggccaagacacgctcctcaaaaagacgcccaaccatgcaccaaggaacgaaatacaacacca

SEQ ID NO: 62683 - DNA, 422 bp, Oryza sativa
tctcacagccacattcattctgggctataggggttggtttatttgaatatctgattaagaccttcacgaacgatatcgacttccgtgccatcaataaacggcatcgcttgcagcgggacaaacagcttcgcgccgtcgtgttcaaacagcagatcgcatttgtccggcttcgctaacactgtcgagcacatagccaaagcccgcgcagcccgtttgcttcacgcctaagcgcacgccgaccatacacggctgctttgccaccagctcacggatgtgtatcgccgctgccggtgtcagcgttaagccttgccaggcgaaatcttgtgggttaaaggttcctgaatgcatgtccatcgatttacctcacttcatcgctttcagcgtataacagcatgttagtgataatgattattagttcaacc

SEQ ID NO: 62684 - DNA, 400 bp, Oryza sativa
agcttgcttaccgcatacctgttttaaatggcctttttcctgccaaacttgttgtcaggaaaacttttgccgacagagcgggtctgtcaggccaaatgctgccggcaaaagtattttccgacagataaatctattttgacagatgggttgacagtggtttttgttctttaccgacagacaatatttcccgacagatgaacttttgccgacatatggacttctggtgacagatacgttgataggaatatttacctttgctagcagataatatgacacctagactttacaacgcaaaataataataataataaccgagctagcttattgcagcaaccaatactgtgacatgcatggagccctcgacacattttagtagatacctacttcacatacaatacat

SEQ ID NO: 62685 - DNA, 385 bp, Oryza sativa
  unsure (1)..(385): unsure at all n locations
ggaactatgatactaagctcaataggagcccggaccagattcattatcatacaagtttaacatgcacggcaaagtacaggagttattaacaggaccatctaaccgtgcattgaaacgccggacccgtccagccaagcccaacatatttcactttttcttttgctgttctaccgtattttctacgtacaaatcacaaatgtacggagtagaatgcaacacggagctcacggnggcggtgcatgcatggatgaatactatagacgatggatgaatctagtcgtggcccatagaacggnggctaagcacggacaggtacacaggtgcattatcacgggaccatctttgacaagggcacaaggcggtgctcangctcacatgcaacgct

SEQ ID NO: 62686 - DNA, 392 bp, Oryza sativa
  unsure (1)..(392): unsure at all n locations
agctttcctacgaggacacatgcgctcttatttgtagctnggaaaagagatagntatgcggagctactgtcggggaagcattattgtgcgaacaatgctctcactgaagcgacttggcgcttggagacattgacggccatgtgcaaacaatactttcagaaccaacaattttatccaccgagatcaattatcattacttgatattttagtaaggttatttacacgaaattcaattgttttacatggaaaaaaatagtaactacaaggatggcagggaaaaaaagttgtggggtcaaccgatcccacagcttgtatgtggcatcaccattgcgattatgcgtttgcaaagtgtcctcaacaacgaatttaacttatgtagcgcacacatacca

SEQ ID NO: 62687 - DNA, 166 bp, Oryza sativa
tctggtataagcgtgacacaacactaaaacaaaatctgatgccgcgggcccgcgacgataaacctgaattggctcatcagcgtacaatgcgctgaattcacttgataatgatgaatgcgccgaacctatatccattgagaatggtctgaataccccgcacatagat

SEQ ID NO: 62688 - DNA, 186 bp, Oryza sativa
cgacggtcctgatgaggatcaccttagacggttgcgccattctccacgcgacgtaccacaccacaggggtacctggtaaccgcactaatgataaggccaaaagagagaagcttgcaaaccaaagaagagaagataagattcaatgcgaagagggtgccgatagagaatgatgtgacgaaagaaaac

SEQ ID NO: 62689 - DNA, 405 bp, Oryza sativa
  unsure (1)..(405): unsure at all n locations
agctagccacataatattatcaagatgtantttagatgctttcaagtcactgtgaacaatgctgtggggtttattggaatggagaaaaatcagtgcagaacaaatattggaagccatgcgggtacccaactgccaactaacaggctttgaatagtgcttgcaagccaagcggtcatgtaagcttccattgggcatgtattcatagacaagagctcgggcatacttgcatgcccctataagagttacaagattctgatgtcgcaccctgctaaagatttccaccttgtaattatcagcaagaacaacttaactgtctgaaatacaacagtctatttggaccaacacaatgtcaatcaagtttatcgaaagcatgttataactagaacaaaactcttcctcatgact

SEQ ID NO: 62690 - DNA, 342 bp, Oryza sativa
tgcgatgtctggacagattcactactgttattctatctttgcaactctagataaggcggcatgcttgcataatttcatgtgccttatggcatcgtctcgtgtgagaaacgacttctatgatctgcgcaacaagtttcacactatgcttcaggtagtaccttatcttctccattggctattgacttacaaaaattcactaactatgaagtgccacacatgggtcgatagtatatcatataactcaaataatcgtctgtggtatttattagactgataatctccgtgggtatggcatatatgatttgacagttgacaccaagttatggcggaagtgtctgaaat

SEQ ID NO: 62691 - DNA, 311 bp, Oryza sativa
  unsure (1)..(311): unsure at all n locations
gatgtactaaatttaatgtccaatcttaagaagaagaggaatgaacgatgagctctgttagtagatagattatggttagcgcgttagaagtcataataagtagcatggctgttgaaaatgatgatgattcatgtgtaccactccatgatcttaaacattgtctttctagtcttctattcacgggtaacgatggctatcaactagctaccctctcatgttgtgcgtctactatctgggtacatgcaatgtttcttttaagcatgcattattgnggtgcggtcagtatatcataatagctgcgtgaggcttac

SEQ ID NO: 62692 - DNA, 295 bp, Oryza sativa
atctttaaaggccaccaccacaaaagatcgatagggagcctcaccctcaacaagaaaggcaacaacccttattgcaataacaaagaggctacttaaaaacctatttagactctttcttgaggaccttaaccggccctacgttacataaaaagaaatgcgctgacattccacctttatcaagatcaacgccccaagagccaaaatgggataaacaaaaacggtcatttctttagaagattatctgctatggttgcaaaaagaatactcgcgtatatatacccgaatctttcaaaaa

SEQ ID NO: 62693 - DNA, 255 bp, Oryza sativa
tgaacaggtggacatggtactacttgagtgatctgcctcttgtttgatctgaccatgcaccaccggcattgaggaaatgaacactgaaattgttatccagatcatagatccacggtgaaactctaactatctggctagaacgaagatcgttctaacccacagccgtcatgggcgcttgataggcactaacactctcctgcgatgaactgtgacgagatgagattctccttgccttttttctaaagctcttaaata

SEQ ID NO: 62694 - DNA, 379 bp, Oryza sativa
  unsure (1)..(379): unsure at all n locations
atgaagcttgaaccttgctcgtcccgaagaattantattggaatttttncnnngnnngtggcangagttgctactattctgcatatctcanagatacaggtgccacgtatgcgaactctcttctaaattaaataatctttggcacgggggcatacccttacccttgattttcaagaaacactgctttttcttgccttgagcggtagaaagataatagttattggagcaccaatcacctaatctttattcaactcttattccggaagttttcaaatgattttgcaaaagaaagacaagtttctcaaataattcactcagtctctccaagtgtatcaaaatgaattcctcaccaattgttgccgtttttatttttatttta

SEQ ID NO: 62695 - DNA, 277 bp, Oryza sativa
ggtttatggacatgaagctgtattgccatgggaggctcttatcggctcacggagtaacggaatgcaaagaaattcgacagctgaagagtattataatctcatggctgatgaaatggaggacttggtccaatccatattaagagcccttgtgaaggttaccaacgataaagaatgagttgctcggcattataataagaaagtagtgcccaagactttttctgagggtgagcttgtatggaagttgatttttgctaattgggaccatggatagcaaatt

SEQ ID NO: 62696 - DNA, 327 bp, Oryza sativa
ggcaatcgacgaaagaaaatctcaacgcacgacgggtggattaaacctacaaaccgaaacttgggaggctcattatgaaaaatcctgcgattcccacaagaaccttctctggtacaaaatacacaacaaccgataccacgacaatgatgaactgaaagaatgcagttgctttatgatccctccaacataacaaagagtggagcctctcccccctgagatgttacatcacccacaactgtttgaaccctgccggctacgctcccaatctatcgacctaattctaccaggcaatactacacttgagcgacactatacacacctcaaaat

SEQ ID NO: 62697 - DNA, 408 bp, Oryza sativa
  unsure (1)..(408): unsure at all n locations
ctcagaaactaagcttacaccgttgtaccatgtcgcaagcgtctntgagggtgtatgttcatataaaatccttgtcgaaaggctgttccgaccaatgtacgaccggcggcatgtgacccgcagaccccttcatgtatgtcgaggaggaggtgcttaccgtcgccggacaagacgcattttagaagtaccccgtttggtgccttcttgtataaatcgttgccgatcatacaatagatttttccttgacgggttattttcttggcttctgcgtcgtcctcaggcaactcgtcgctatttatgaatttaatgagtggtgtccgccagtcgtacgtggtctcgatgtcggcaacggcgcgttctgcctctgtagccccgggctgatgtcggggggtactggccaaaatttac

SEQ ID NO: 62698 - DNA, 144 bp, Oryza sativa
  unsure (1)..(144): unsure at all n locations
aaaaaaccacactcccaaccagacagtgacatgaccatgaacccnccaaaaagcccaaaaccaaaagaaaacggcgcaaacatttccccaaaagcagggcaaagggcgaaaaaacaaccgcagacacccgcaaacaaaaccaac

SEQ ID NO: 62699 - DNA, 337 bp, Oryza sativa
  unsure (1)..(337): unsure at all n locations
agctnctgtacctcttatcttcaaaggctgtgttttggttatatgnnacatacccaggggttcaccttcatattttgcaagaaaagncagtggatcaccttccacctggagaaagccttgcatcaatcatcgagggccggaactaatggttggtatccaggacagaaagaatccttcctttttttttatctcaagcgcccactatgttgtttttctttagaaccttggagtccaatcaccaatctgggctccaatcccagaagaacatctccggcacctctcaaaatgctaaaccatcagctgggaaaaccccgcctatgcctatgattgcttttgc

SEQ ID NO: 62700 - DNA, 433 bp, Oryza sativa
gcactacggactaagcttcaatgtgccatacctcatctaatgatcttcgatttttctccatttctttgcatagcttatggtgtacttgaatttgatctcgatgtgcctaataattgaatttggtgcatagccaatgttaccaacaacactgctgtacatctcacttgccactaaagctgaagtgatgttatctggatacttctccaccccttgtaagaagcacttgtgctcggtcataatgctaactttccaataattatttcatttacccttatatgcatggacacgccacggacaatcatcctttatgcacctcacttcatacccataatttgttgactagaccaccctaaactctctttgctaggaaactgccacagcttcaccgctacttctattatccttatgacagaacgtgcacccttcattacct

SEQ ID NO: 62701 - DNA, 83 bp, Oryza sativa
gaccaactccagctcatcaagcgacacacttgatcttatgagccttgtttatttccggacaggctgagtaccagctttttgtt

SEQ ID NO: 62702 - DNA, 402 bp, Oryza sativa
agcttgcataacccgcgacgtttctgtcttatttgcgggcccgcgcttacatcattggcatcgcatgattaaacatcagcaccagcgaatacgctagagatattaaatagttaacctagcgctattagttgataagacgagtgaagcggtactcgcccagggatttagagggtctttatttagcgaaacctccaccaggcggaaaagaacccatccgcacaacgccgccacagtttccacacccacccgcagtctcgcgcgaagcactttcatcgcttcgctaactgctcgttcaaaggaaagatcggagggcgatcaaccctttttttctttcatattcgattgggtcccgataatatttgatattcattcccttgcgcctgcgcatacgttttcttgctt

SEQ ID NO: 62703 - DNA, 445 bp, Oryza sativa
  unsure (1)..(445): unsure at all n locations
gacactataaaactaagcttggtggccgaaaatatgcccactgctgtgatgtatttatctacctcgctctatcctttgcggctctcgtagctagcttacgttttcagttcgattggattaatgatcaccgataagtgattgattatagacagtgatctatcgatggatcgatggcgctcatgaattggctaggtccaatctccattttaagctggtgaggagcttaatttcgtgaacgcgttgtgagtgattatggttcaactgtgtgtatcaattccagagatatggtgatatgcatgtatcgatagatcaaaatggtaaagcttgctactctnacgcgttatcgacgaaactaattaagctaggaattaagccactgcatcatactatgtctcatatgcatgccagattgaggctgatcctgtttcgatgcacgtggacttaa

SEQ ID NO: 62704 - DNA, 302 bp, Oryza sativa
  unsure (1)..(302): unsure at all n locations
ccagtacaaccgagccatctatccatgtacataattatcaccaaatccagacaggagaagaaactgangatccactgatcaattctccgtctccttagcgagttcgtgccccacgtttcggatgtggatcacacttatacggctccgccattcttcccgcaccgcaccacaccacaggtctacctgttaaccgtactaaggttaaggccaaaagagagaagcttccaaaccaaagaagagaacatattattttacgcgaagagggtgcggatagagaacgatgtgaggaacgaatagggacg

SEQ ID NO: 62705 - DNA, 399 bp, Oryza sativa
  unsure (1)..(399): unsure at all n locations
agcttgtatggatagacatgtgctacaagtactacttccttnggcaggctgatctccaagaaatacaagctgacaatgcaaaaaccagagattagttgtgtaagaatagcatatgtaccgctccaaggcaatgtgacggtatgctgcggtataagattgactagctgttcagtgtcaaggtcaataagttaatcagtctattcatttgatatattttaattttgatgatgagtttatgacaatgatgttttagcaattcagcacttgcgagcattaagttacttatattccagggtagaagtgcatcaaaaaatataaaggaaaatccttactgaatgcaaatccacattagtcacaatggatgatctgaaacatattaggagtactctatttgaaaca

SEQ ID NO: 62706 - DNA, 345 bp, Oryza sativa
tatgacgttatgagtcattaccaaaatttgtgcatatgttctatatctcttattagcacccattgtcgagctcaacatttacaatgtagcttactgccatgttgtttttaaatgtggtggtggttccagaaatctcctccagtccatactgcatcttaacatttgttcttcacttgttaatatcatttccaatcattgtttatgagatgttgacctattaaagctcacatattagaatctttcaagtaaacatcagatgcatttacaatgatatcttttggcgtagtacttcaattaggacattatttgcagcatctttttgcttggcctcatgatattcttatt

SEQ ID NO: 62707 - DNA, 396 bp, Oryza sativa
  unsure (1)..(396): unsure at all n locations
agcttctattcatcatcaagnngtttgggttcttcgcagngaccggccacatcatgcggagccgttcctggacaagatcctcaccgcaacgagggagttcttccacctatcgccgaaggagaaggtgatgtacagcaacatggtcgacgccgacgtggcggcggtgagaggttccttcctgaggtctaccgcatcgaccacatcgacaccaacaggcagatcctcaactggtgcgaccggctatacctccaggtctagccagaggaggaacgtccgctggatttctagccagaacacctgctagcgctccgaggacttgaagaatacacaagaggaacgaacacgcgtggcgatggtgtctcgctcccctgaccaattggttgggtcacaaaagcc

SEQ ID NO: 62708 - DNA, 445 bp, Oryza sativa
tgtcactccgacaagaaccactatccgacgatgatgacttctatagcgacaaggtcctggtgtcctatccacaaaaccaggaaacacactttgcaagcctgctgggtttttctcaacgtccgcgctgaaattcgctcctgcaaagagcgtggaattcagcgtatttctccaactcgtgatgtctattctcctattcacaagacaaagaatcacgacctctcaagctgcaaggtctttctcagcgccatgaaggcgccatctcctaaggtccaacagtcacacatcctcatcagggataaagacaaggaatgaggagcgacgccaactctcgatcgatttgttggggtaatcgacatcgatccccacgaaccatcagtcttgcacttcctcgaagactatggatcatctacaacgagcgtgccaccggagatatttgctattgatg

SEQ ID NO: 62709 - DNA, 297 bp, Oryza sativa
  unsure (1)..(297): unsure at all n locations
gcttagcttgaacgatcatacacacaagcgtgntcatctgaatgacttgctcacatagcgtcggatgtctcatatattatgttattacctaaccctatctcccatggattcttaaagcttttgctcttgtgcacgttaacccttcttctctatctggaggagtttagatttaattacccacacatatcaaaaaaaatataattgtgaaaggttgtacccgaccactaccggaggattaaccttgtatgagatcttcctcttgccaattcccttcagccttttcctccaacgggtgag

SEQ ID NO: 62710 - DNA, 99 bp, Oryza sativa
  unsure (1)..(99): unsure at all n locations
aactaagctnaggcgcaaccgaacaaggatgagagctcagaaaaacacactcgctccttacctggcgcgccagatgatggagcgtggggctcctaaccg

SEQ ID NO: 62711 - DNA, 401 bp, Oryza sativa
gacgtggtaaagccagaaatctttatctatgtctatgtgtcagaaacatgcttactccaacaatacatatgaattgattcccgcacatgtttctagaagaatctatgtgcacttatagttcatacacaaaaggcagaatctgaaacatggaatgtgcaatgaaaattcatagcacgcttcgctcagtttcaaagacaacactacttgcctaatagacaaaaactccaaatcttgcagcaaagcaaattcaattcatgcaatgaacaatattacagtgatatttcattcaaggaccataaaggtcatacctcttatacatctttctagcttgcttgataccatctctttgtaaatccatccacaatagcaaagaaaccgaagctctcaatcatttcacagca

SEQ ID NO: 62712 - DNA, 385 bp, Oryza sativa
tttgtcattcttgtttacacttaactacacatgcttgtagcttatacttgttttttctgttacctgatagcttatatttctaattaccttttaccataggcccccaagccatcttctggtcctcacaagtccagggagtgcctgcctctgatcctcattatcaggaacaggctcaagtatgctctgacataccgcgaggttatttctatcctcatgcagcgccatgtcttggttgatggcaaggtcaggactgacaagacctacccagctggtttcatgggtatgctcaatccgtattgcaatcaatatatgcttcagtgtatgatgtaaaaacacttggtgctatgtgctaaacataatcttttttggcagatgtcattttcat

SEQ ID NO: 62713 - DNA, 402 bp, Oryza sativa
  unsure (1)..(402): unsure at all n locations
agctggcgccttatcactaatctgaantttgttatattatgagaggactcgnacagtgcttaaatggtgggaaagccaataaggaatgcaccaacatctgcttggcgaacaataaaaagatgggggcctgccatccaaaaccagccacaaggctaccaagggcatccctttacaattttaatcttcagctttcctctgcaagggtaattgcaagctggcaaaaaaacaactacaggaaggagtgagacttcctctatagcgatgcccagatgctaagccatacgtatatacaagcatgtaatcaacaaataagcatcaacagtacaagagatatgctgatctgataaatcagctctaaactcaaaattcctaatccgtttatgtgacatttaccattctcag

SEQ ID NO: 62714 - DNA, 247 bp, Oryza sativa
ctaatgttgatgatgtagtcgtcaagaccaagcagaaggattatctgatcacggattaagaagaaactttggcaggcattggggctttcaggatgaacctaaaccttgaaagtggattattcgaagaaccggaaggaaggtggtccgaattattaaatcttcaagaaggattacagcccacccgggaaaaattaacgcttttcttcacatgaaacggccaagcttccaaaagaaggttcaaaacttg

SEQ ID NO: 62715 - DNA, 305 bp, Oryza sativa
  unsure (1)..(305): unsure at all n locations
caaaaagagcacgcaaccggggcgctaaacccggaancagaaccacaccgaccgcaaaaaacactaaccgctagcacacaatacaaacacaaaattaccccccaaaacgaagagcaatcaacaaagtgaaaaatggcaaaacaagataagctatcacaacaaaggaacgtacaacgcggaaaagcagcaacagccgagaaaagcgcagcgtcgaataaaaacccatcaccactcaaacaaaagacaccccgtaaagccgagatgtcaagaaaacaacagaagtatataacacacactcttcgcaa

SEQ ID NO: 62716 - DNA, 421 bp, Oryza sativa
  unsure (1)..(421): unsure at all n locations
agactaacaatcaaaattcatgaggtcaaacgacngagtttgttacattttaacatatacatagggcggagaataaacactagacacatatacctattgcatttatcactctttctcagataacctttagcacacaataaccaagagaattcttaactctgtcttttcttgaggcctttttctcatatatgtctcttttattccggatacgtccctgtcgtcaagacagtttccagagattcggcacctattattttgctcacatcgaatacgtccttgtcgtcaagactgtttccacagattcggtattcatttttcttcatatttttattctcttttcacaatgagcaattaaagctattggaggaataacaacttaataaagcatatatatagagaatttacaaatcaaccatatgct

SEQ ID NO: 62717 - DNA, 70 bp, Oryza sativa
ccccatgggcgagcccatttttttttcgccacccacgggggcggttgggcgtctgatagcacacctaccc

SEQ ID NO: 62718 - DNA, 179 bp, Oryza sativa
  unsure (1)..(179): unsure at all n locations
taagcgaccgcaggctgcagcttagagacacaaattgaaagtttttatcaaaacccgagacctggggaactcctgcgnttttaaagatgacaccataactttaacaccagctgatcatcggctttttaaaaaaactggagaggatacaaaacatcatgctaagtatgtgagaacaaaca

SEQ ID NO: 62719 - DNA, 209 bp, Oryza sativa
  unsure (1)..(209): unsure at all n locations
tggttatntgaagacaatgatgagctcactattattcgtcatttttgaaaaaaattcaaaccacagtgtgtttgtattgtagtataattcctaagtggatggttcgaacttctaacaanagaagtgtctgattaaatcccgattatctataaaaaaatcatcattccaaggcttattccgcgaatcatttctagttaattcccattcca

SEQ ID NO: 62720 - DNA, 365 bp, Oryza sativa
tgaactcgaagagcctttacatacattatcaagcagttagttctcactacactgtaaatttttactcgatactttttttttggatgagagacgctagggagaaaccctactataatgggttggacctgtacaaaaaaggcgttctccacttgtaaatattaagtaacccactgtgaaaactaactatcccagccactgagagatctcagaattaagaagttacccacttctcagaaattctatatcaataacgagagagtttccccatcataagttatgggcttatggtgcacccatcaaatacctcatggttattctcatgactcaacccagtgaggatcagctcaatatcctactaccagtct

SEQ ID NO: 62721 - DNA, 408 bp, Oryza sativa
  unsure (1)..(408): unsure at all n locations
agcttatnntgttaaaactttatctagaattgttgaaaacatcaaagcaaacaaagacaacactatcgaaatttggtaatgccaaaataccaaaatgtgttagggttgatttgggcaacaaactgaacaagccattcgtatcttttgtggggaaacttcacgaaattttattcgatgctttaggatttaagcaagtcgatcaaactttatagattttggtcaataaccagccaaagtacaaatacacatctaagggtataaaagttgtaccagtagattcgtagattcatatttcacggtcctttcacaaagtttatggttttccatatgtacttcttccgtttcatattaccattttaacttnttttctagccatcttatagaggagnatagcaacatatgtaacac

SEQ ID NO: 62722 - DNA, 346 bp, Oryza sativa
acactatacagtactcacactcggagcttatagggctattattactgtggtgctaacattgtcagtatgacgaccaccggagaaatgatgaactatctggaacaaatagtagtagttcgatagtactccgtacaatggaataccacgggcatgtttggagaattttaaacagctacggcttcttctgatgaaatcagagcagttttgattcttacctagaatattataatatgtatttatagaatctaagaaaataaacaataaattataagttgaaaatttacgtttttctttaatactactactactcagaaggttactgtcaataatgtacttctcataatat

SEQ ID NO: 62723 - DNA, 399 bp, Oryza sativa
  unsure (1)..(399): unsure at all n locations
agctgncattagcgatctaagcgttttgtttcttcncanngaccggccacatcatgcggagctcgtcctggacaaaatcctcaccgcaacgagggagttcttccacctatcgccgaatgagaatgtgatgtacagcaacatggtcgacgccgacgtggcggtggtgagaggttccttcctgaggtctaccgcattgaccacatcgacaccaacaggcagatcctcaactggtgcgaccggctatacctccaggtctagccagaggaggaacgttggctggatttttgccagaacacctgctatcgctccgaggacttgaataatacatcataggaactaacacgcgtggcgatggtgtctcgctcccctgaccagttggttgggtcacaaaagccattg

SEQ ID NO: 62724 - DNA, 304 bp, Oryza sativa
agacgggaaaccagccaggccaaccgcaaaaaagaaacggacaacgcgaaccccaagcggccgcccaggccgacgaccaaaacccaagcaagaaaagcaaacaacgaaaaccagccagcaaccgccgaccaacacaaagtcaggccgaacaaccacgcgcacaagggcaccaacaacggccgaaaaacaacgacgccccgccccgccactcaacgcagaacaggaggaaagcaacaagcatcacgccgacacggaagccaacacagacggcgcgaggaaaccgaaacggcacaggaaaaaacac

SEQ ID NO: 62725 - DNA, 401 bp, Oryza sativa
  unsure (1)..(401): unsure at all n locations
agcntggagttgaaactgagtcggaatctttacttattntatattctaaaacaatttcgactgcaaacccaaactaacctatctaaacccatccaaacagcgatcatgcttaatcgagaagttatcaaattaaaaagtggtgttcatccaatgcttaccagaatttagacatttagactgcaggtgttccatcacttaatgattttttcaaacggttttgctatttcacttgtgatagatatttggttcccgtctttcgatttttcgtcagaaagatcttgcatccagattcatgctcatgtatatccaatttatagataccctcgattacagagcacttatacttggctatagagaatttgtacttagttacaattactaaaatagaatttacagggttt

SEQ ID NO: 62726 - DNA, 400 bp, Oryza sativa
  unsure (1)..(400): unsure at all n locations
atggtgtagagtgacataaatagtatcttcgcttgctgcttgnatatatagaagtgtatgcctacaattgttgtccatttgaaatccttgcatttacaaatnctagtacacatcagatccaatcacatagaaatcaatcaatcatagtatcttcaattcagctcacatcatctaaacattatattaaatagagaaacaggattggtgcaatgaaatgctcggagagtcggaggggtaattacgaagatttacagcacatgataccaggacatacggatttttaagtacagtaaccaataggcttattacttctctactctcacgtctaatctgccgctacaacatagagccaacattaagcacactaagcagtatgccaagagggcatgataccacatag

SEQ ID NO: 62727 - DNA, 144 bp, Oryza sativa
  unsure (1)..(144): unsure at all n locations
agctnggccttgaaataataanagagcataaaaaaattatagcgagaaacacaaagggtgagaggaagaaaacgaaccacacacccgcaagaagagaagccaaaaacagggaataagtgagaacccccaaaaaaccgaaccccc

SEQ ID NO: 62728 - DNA, 70 bp, Oryza sativa
cctgtccaggctgagctcagtttcttcattaaattcctacactgaaaccatcaagcatgcaataacgcag

SEQ ID NO: 62729 - DNA, 412 bp, Oryza sativa
agcttgaactggtaagcatagagacagatgtgcaccgaccttcttcacaacagtactttccaaaaccaagaggaatctgagcgcactaagcaattctacccagaaaaaacacatcaacatactctagttcaatctaaaattggaaccagcaaacctgaaagtacacaactacacactatagtaattgctgccataaagacaaatcaacttgtgagaaacaatgttgcatgtaacatttgtacatagtttttatgtgtttatcacctacgagaggaaccaaactgcatagcaaaatgacaaaatctacttggagggcatattatgatatggactaacatgcaagattattgcagttgcaggagctaatccgatcaatcgcagacaacataacattaaataaacacccagcaca

SEQ ID NO: 62730 - DNA, 389 bp, Oryza sativa
  unsure (1)..(389): unsure at all n locations
actagctggaatgggaccttgacgaagactaggggggcttgttttttttcagtttccacattatgaatgctgaatagaattctagaatagaggcatctgcataacagtagatgtgagtacactgatctaagcatgatgcatagtggatggaagcaaacagacaaatatgaagcttcatggaagtgatgcaaagcacataaattgtggggttcaatggggagaggaagatgctaaaaggtgatgtaagcatgagaggaagcatatggcagcaagcaatgatgtatgtgtcctcttgatgaanaaaggttggatgtgtacatgcatgtacttgttccaattgatgaagtaacaaagcttggaaacatggagaggctttcagcattgtcatg

SEQ ID NO: 62731 - DNA, 136 bp, Oryza sativa
agcacctgcagcagcagctgaatggatatgttagtcaaaaatgtgcgttttcactgagagatatacctgtgtatgctgtcaaatgaaggcctactgatctttagtatatctgaagttagcttaaccttccgctgga

SEQ ID NO: 62732 - DNA, 184 bp, Oryza sativa
ggaccgcgacaggagcagtgcctacagtactgtatatagatatataacgtacacacgcacatcatcataggcatatcacatcaggcagcagcatagaggtgagcgggcagctggtgctcgacgacagcctcaagcgggaacttgcgcggcgttgacaagccgaagatcttctccatgctcagct

SEQ ID NO: 62733 - DNA, 407 bp, Oryza sativa
agctaatcgactcaggactatagacttcttggagcctttttatttccctcctagggaagactatagtcgaataatacaactggctcctctattcatatatgctcataactttatatatttcacattaagtataagttctatgagtggcggatattttctatatatccgctttatcctaatctaggcgatccatgctatggtaacggccccaagacctctataagtggctctagcttcaacctgttcatctgcagggggagaaacccacgggaatcaccgatattatttactggcataagcatggtgcttaggctataaaaacattgccggatgcggatgcgccccaaggaaagtgaggtatgcgggaagaaatgaatagcatatccatcctttgtgatcctctcctt

SEQ ID NO: 62734 - DNA, 455 bp, Oryza sativa
  unsure (1)..(455): unsure at all n locations
atcggcaggttgcctgatacccaaacagactttcaattcaatcaataataaggctggtcatgactgtagtaacaaaactgattgacttatgacaaagctaaaacgacaagtaattcgaaacagatgtatcatatgtttaaaggacgcaaattacacttactgtctggactcttcatcggttacttttgtagtcaagctgtacaattcgtctagtataataggatcaggcctcttaagaaataggtggcgctgtaccaagaacggtgacttcaactcctcatttggtttcaccacaatcttagatgtgggagaaacattttttaagagtccatctacttgcatngcattcccatcaaatcttagtagtcaaagggaacttctgattctatacaagttaaacataggaagtacattggaatacaagtataataactcactttcaaccgttaaacatc

SEQ ID NO: 62735 - DNA, 403 bp, Oryza sativa
  unsure (1)..(403): unsure at all n locations
agcttaacgtcnncattagtataatatttacacgcatgcatactatactttatacaaatttacaccccacttacacaccacttacacatataattactgtgtaatttttggacttacatatgtaattttggaacttacattataaatacactaaatttacatatgtaatttaaggagttacaatgtaaatatatgctgactatttttttggtgaaaaatatgacgccataaatataactcctccctttacatatatgtgtttctcttcctttttttttctttttttgcaatcgcacccacccatgcatttttaatgttcgtcgagcttgattgtgtgcttgcacgatctacgtttcgtgttcaagaatacaaaacgggaatacattntaaaactttattgaac

SEQ ID NO: 62736 - DNA, 434 bp, Oryza sativa
  unsure (1)..(434): unsure at all n locations
tgatactctactcaaagggggggaagncttangcactgttggcaagactacactattgcattttgtcgtgcaggagattatccgaacggagggctcccacctctctgctagcaaccaatcaactccacgaactcaggcaaaccctttactggacgagctcgagtgcaaaaagcttggcctccaagtagtggctggcctcggaaacgagctcagcaatgtcaagaaggcagctgccatggactccgacgtgctaagcagctatgtctcgaaacttgctggaggaatagagaagatcactgaggtgttgcggttgaatgaagaagtcaagtccaaggaagatgcatggaggtttcatgattcaatgcagaagttcttgaagagggctgatgacgacatcatcaaggttcaggctcangagagcgttgcgctatcac

SEQ ID NO: 62737 - DNA, 232 bp, Oryza sativa
  unsure (1)..(232): unsure at all n locations
agcttctaagtnggaanggattttttacttctacanccnccgcctcggtgtggtgtctctcctctgacggcgatagagtaacgcgaagagaaataataccggaaataaaagggaaaccgtagaagaaccgggcttaagtattctagtggattttgttcctagcctacatgtaagntagacttcgcgggtaaatcggcaaagcggccctcggctgtgtcctctccattccttt

SEQ ID NO: 62738 - DNA, 441 bp, Oryza sativa
gacctaagatactaagctgacgctgtaaggcgatttcagcgactttattggtcttaacaatagcatcccatactctctctgttaacagaggatcaccctcctgcaattctttctcattgtcggtggggcaagaaacaggaaacggaaacgcatggtgagcatgtcaattgctaaattcaaaaaaaaaaaaacaggtgagcaatatcaagatattggcacacaagtataaactatcgacaggtaaatattagaacgaggaacaatttgcacttgattgtcagaccatggacattcacacataaatttcacacagacgaagttatacgagatagaacgactatatgtgttactagtgtagtaagtaataactcagtctatgttgcaccactgagcatcatgaatagatacttcatattactttccaactggcatcctaacgat

SEQ ID NO: 62739 - DNA, 415 bp, Oryza sativa
tgagcattacatgagtagaaaggtacatgaatagaaagtttatactaactgctaagatagcaagctaatggcatcgttttgatctgcaataagatcatgttctttaatacatttggttttcgaagatatttgtgacaattggacatactcatatccatttatgttttttccatgtcttgttgcttggacttcctgatgagctattatgtcgtcaaaacttttaaaataaataaggagtctcaaaatattaaactcagaaagatgttaatctgtgttatttaagtttttgcaatgacttgttgaaaataataacaattaacagattcaaaaataatttttagcgacataggcacttcttgtcatgcatgcgttggtatctgctcttggaaaccggaaaccacttatttcaaacaat

SEQ ID NO: 62740 - DNA, 402 bp, Oryza sativa
  unsure (1)..(402): unsure at all n locations
agcttggcattttcttccagtttgcaaaatatttttattctcacaaggngnctatattcaaacatttaaattgacaagcaatggcattaagtactacattttttgaattgttacagccaacatatgctatttacaacttatgcataaatagtaattggtttaatttgcccaagaaacaaatatgcaacaccaatgctcatgatcagattatacataaagtggttcaaacagaaatgttcaagagaaagctcatcctcgcattagtcttatcttgtaccataaccagattatacaagataataagaaatgctgatagttggatatcaatcccaacgttccaaacacgcttttgcaagtgaaatctcatttactatgaatttccagcatacagaaaagctacac

SEQ ID NO: 62741 - DNA, 441 bp, Oryza sativa
  unsure (1)..(441): unsure at all n locations
ntagtaaactatgcaataataaccacctctgcagctttcatagtctcaccacccgttgtagtcatctagtaaagccgagttaagaaaaaaaaatacattgcaataacgtangaggaaaaaaaaaccggtaaaaacatcataacaaacagagaagaaaaaaacgttattgataatccacgtttcgcacaaaatttcaccgaaataaaaaggaaccagatcaaagatcatcacaatgctaacaaaacgaaaaatagtcaatgttcgaatggatactttggcggtcaaatcaacatgagaatcaaccagtggcctcaacataatcatccctgaggttatgctcccaacttgatcgaagtaatcgtcaaacaggcttccgcgctgagcttcccaacatgacctcgacgccggaacggcatctgccaaacatgtcaacacacttag

SEQ ID NO: 62742 - DNA, 210 bp, Oryza sativa
agcttccttgtagtaatgtaatatgtcaaatttatttttatgtaggatctgcaaaataggtgaatttactagggttttctaacttgctatatataagttataaagttaagttagataatttacataccacagatgcccccagtcaatttttatcctgcgtccgcccctggttgcaatccaaccagaggtgattgatcctcatatttggat

SEQ ID NO: 62743 - DNA, 304 bp, Oryza sativa
tatgccttacttggagggtcgtgggcacatgcatgaaaaatcatttggggggtgggcccatgacaattaaggaccggttctctggaatccctgaaagatatactcggactaatcataaaccataagggctctacgctgaatcgtaaatataaaaattacaaacaagcaccccattggcgaagatatatgtgatggagcatggatggacctggatataggtctaagctgctctcggatatacctaagcacaaacggaagctgtctgctcctggatattggagagggggcaaaacaggagtgggca

SEQ ID NO: 62744 - DNA, 302 bp, Oryza sativa
tagggaatcacgctaatcatttttcgcttgtaatatggacaaacgccagctactctcctgtgatattatatccttcgaaacacgcccaacgtatctttgaaacacagtcacattatccgcgatataacttaatatagatgtcccttttaagctgcggtgccaaatgaacccccagaaccggcccctccggcgccccgtaacggggtgtctacacccatacgcttactggctcgacgaccgccgtcccggacgccaattgattaagaccggagatcatggcaagggagggaacggataatata

SEQ ID NO: 62745 - DNA, 323 bp, Oryza sativa
taagtcacctgcggcagcaagcttggagaggcaaaagagaaacaaatagtgtgttatgacgaacaacaacatgcccaacaacaacaggtcgaagggctcatctcaagggaggaagatggagaaatcttaaaagggcttttcataagtttggcgcccgtttcgagcccctaagtgatgtagatggggaaaggtggagatgatgataaagggaagaacatctccgatggttgcttcatgggcgcgtggtgaatctgacatagagtattaagataactgagttagtgcgtctgaggaagctattaatattttgagtgacaaaaaag

SEQ ID NO: 62746 - DNA, 97 bp, Oryza sativa
  unsure (1)..(97): unsure at all n locations
agcaacctgctatgataccaattgaacangtatagatgtattctagagggggggtgaacaggctttcctgaaattttctcaacaatcgcagcggtta

SEQ ID NO: 62747 - DNA, 412 bp, Oryza sativa
  unsure (1)..(412): unsure at all n locations
accttaagcacctgagctgcaacttggactctttggaatagttttattctcaatcctgcagccgtacgatagtgagataatgaagtgacgggctcatttccaggtgtatactccctctgtaccaaaatataatagatatattctaggtgatatattttaggtggatgtaacatgtactagacatattttaggtggatgtaacatgtactaatcctataaatttagacaggaacacgtcttactacttaatgaatctggacagactcctgtacagattcatagtactactaggatgtgttacattacatcatctaaaatcacttatattttacgatggatggataattaatcattctcatattcagccctagctagtngattaatgatattacactctatggctactcatgct

SEQ ID NO: 62748 - DNA, 379 bp, Oryza sativa
ttcgtcagagatcatgcataccatgcatatatacatacttgcacaattataactacttagacagatatgtcattggaaggaacaattattttaggtccaaatatggtggctaccaactcatatcacactagcactttacactaatccccatcatgtgtgaattcaaaacctagcaatggtaattatgtttacacggccactaacacttactaccaaccaccaacctacccttgaccacacaagtgtaaatgtgtgaccaagctgacccgatcgctcggacgaaccctgatcggcaaccggtccggtcgaaccacttaccttacctaccgtgtggatactttcccacctctgttgaggctggccccacatgttggacatc

SEQ ID NO: 62749 - DNA, 357 bp, Oryza sativa
cctacacagcaacatgcaatagaatcaccatccaaagaactgacttttgcacacactaaactaataaaagaacaagcacgctccaccgcacagagaaaaagcagcctgaccgcttaatacagccacgttccgtgaggacaaaaaaggggggcacacatagctgctaactacacactgcaaaaacaataacaaggacatgagaaccatagccgcaaaagaaaaccagccaacaaatgcacgaacattaacaaaaaaccaaaaaacggcaccaataagaaaccaaaaaccattcaaactcttcgtagcacttgcttgagcacaaacggtaaaatccccgcaatcaataacagaactcaa

SEQ ID NO: 62750 - DNA, 317 bp, Oryza sativa
caaagaaaacccccacaaggcgaataggacagcggacccctaaaataaatggcaatgaaaataaaaaagagcgagaaaataagaaaaaaagtgaacaacgaaatagcaaaaaatggaaacttcctagcgttacaacggataacacggacgaacaaaacgaaaaaacaacacgagaattatcagaacataaccacggatggaaacaaccattccctacccccaagggcgtaggatagggagaaaaaacccaccctactatccgcacgcaaaaaacccccatcatgctaaagaaaaaaaaaaccataatacgaaacaaa

SEQ ID NO: 62751 - DNA, 347 bp, Oryza sativa
cggcgcagagccagagatgatctctgcacgccaaaggtcttcaacactaaaatgaatgaattcaacgtgttcaacaatgtaggcacactgtgtgccctttccactcccaggaccacctgtgttaattcttggttataaacagaagataatatatctctttatttatatataatatataactattgtagtacttaaattttatcatgtcaattcaatggatatctaaagatttctataaagtccgtctcctctcatatgagacttacattataatcatacataaggtagaaggttagcagttcctagaacaatacaactgtaactttttgtcccccacatgttgtcag

SEQ ID NO: 62752 - DNA, 339 bp, Oryza sativa
caccatctaaaattatcagagtaagcgtcaaaaatgatggtcccctagaactaggccgaatgaccttctcaccaggttctttgtcagataagaactgcttcaggagggttcatattagattttacgacaggagaaactaaataaacagagtggggaatatctgatcgataagagcttgactaacctgcatagcttcttcagctgtcaagttctgaaagtgaggatggacaatcatccggggtttgaaatgtttctttgccagttctttctgtttccgaagcttatcttgttcattctgagaagtatgtcttgtcatgttgtacgataatgttacctctg

SEQ ID NO: 62753 - DNA, 359 bp, Oryza sativa
cgcagacgccatctgagcaaggttagaagcagtatcagatgcctttggatgaacaactgcctatccaaccacaagattgtgcaacaaataaggaagatcgaggagaagatcgacaggcttgtgaaagaaagacagctcattgtgcccgatatgagcagtaccatggacagagaagagatcaaagagaggccgaagaccagctcactaattgatggctcaagtgtgtttgggagagaagaagaaaaagagaacactgtgaagatgctgttgactccgaacaactccaaccatgccaacgattctggtctttccataacgggatggggggactaggaagacactctaacacagctgctaca

SEQ ID NO: 62754 - DNA, 176 bp, Oryza sativa
  unsure (1)..(176): unsure at all n locations
tgtctcccgttgacatgttatctttctaccacattcttcttattccacataacatttagtncaatatggacgatgggaaaatatattaccgcttgttgactgtggggttgaaaaattcttacgctcctagtattggtttgattctacttgtcctatatgtactattgctcgatcct

SEQ ID NO: 62755 - DNA, 391 bp, Oryza sativa
taagacacctgcagctgcagctgattacttttttggacgctttttattattcatttcccttatcattttgtgggagagtgcctgaacactttaagtcttgttcatactgttcatgggagatgaatcataaaaacctatacttgattggcaaacaagggtcaacataatcaaaggagttacccgaggtctttgttatctccaccaagaatcaagaatgagaggtattcacagagatcttaaagccagcaatattttattggatgaagagatgagccccaaaatatcaaattttggtatggcaaggatctatggtggcaaccatcattaaactaacacttaacatgtagtctgtacattttgatacctcttgccctactttgattacatacta

SEQ ID NO: 62756 - DNA, 146 bp, Oryza sativa
gcgaggaggctgttttagcgatgactgccttgttatactaaaggaaggggctactttggcatatacccatggacaattcagggcatattgtccttgtactctccaatcgtgacaaaagggaacaacctctttggcattggagctca

SEQ ID NO: 62757 - DNA, 316 bp, Oryza sativa
tgcagctagcttcacgccatgggatgtttttcaagttctcttccgcccggacgccgagttcctctcggcgctcgtcgacctctcctgcttcaagagcgtgccgtacctgagcaagatgagctccttcgagctccccttctacatgtcctactttgagtcgccgatctcctagtgcgacatctttcatggggagtgggtgccccacgagagctcgccgtagtacaccaaacctgacctgcttctacatccaggagcaccaaaactgcatgatgtatggccgccccgacctgtagttcctcaagtggcggtggaagcc

SEQ ID NO: 62758 - DNA, 168 bp, Oryza sativa
  unsure (1)..(168): unsure at all n locations
agcttacatatgtcggccggcaattccaagatgtgcatgaacccncgacccaacgggaagtgggttggtaagcgaataaaagaataaaaccaccgaaaaaaccctcaaacctaaacggttcctaaataagaaacgggataccggcaagtgaacccttccaaaggagaa

SEQ ID NO: 62759 - DNA, 246 bp, Oryza sativa
  unsure (1)..(246): unsure at all n locations
tgaatanaaatatactaacacttttaatacaaaacaaagtgattattaaaatatatacgcatgtaaatggaatagaactagtacggtatcgcacatgatactaacttattcttgaaccttaatcaaggggtaagcagtttgactataggaaaagtcaaacgattccgagtaataacaaacggcgggagtatatcgatcggacctgtccgatggaatccacgatacatcgatatgggccgacgacga

SEQ ID NO: 62760 - DNA, 405 bp, Oryza sativa
  unsure (1)..(405): unsure at all n locations
agctttattttaaatactactgattctcttctttagnnaaangaagcaaaggatcattttcctcaaaatgctggtccttaataaaaaaaacaagaagattcaaaaaaaatattgaaataaaaaataaacttccatgataaatgaacatgacaaatgaacttacatgattatcagaactttcatcatgattagataaatgaacatcaccatcatgattatcagaactcaaactacaatcattgtcactgctagattcactagaaatatccacttttgatctttttctatgacccatgactgcaaggagagaaaaaaagatctcaaaacataagtattatggactaaaatatataacaaaacagaatagncatacaagttatatgcaccatgtcatacgaaaataat

SEQ ID NO: 62761 - DNA, 378 bp, Oryza sativa
  unsure (1)..(378): unsure at all n locations
aactataaatagtaagctttctanaaactaataagccacgacacgagatanatatatttgtcttangangagagcacgaggaaatttagaccgttggatccatttatgtgtataccaatcacacatcacgaaagttccagatgaataagacaagtgcatcgatcagcgcatatacagattagttcagaaggtagtcagagcacaactagtatcaactaaaaccacctccaatattgtcatgggatctgattaaaccggcttttatcttttaaaaatgctggaggggacggtggtgaaaaaaactggtataggggttacgatgtctataaactccatttaaatgaaaaaaacactggattaatcttttaccattcccaa

SEQ ID NO: 62762 - DNA, 350 bp, Oryza sativa
agcttggcgaagaccggaggtatttccttttctcttccgagatcaaaacacaacggcgagctcttggttgatggcgacaacaggcttcccgggggccttcgcgcaaaagaacccgctgccgggctttctcttgacctggcggacaccagaaaagcggccgaacaagagggccaatgacgaggcgggtacaaaaccgagttggagcggctgcccgcggccgagagaaaaaaccaacgcggggaggccgctaaagctaaggaaaacctcaggaaaaaaaaggaaacccgaaacgaggccgacggaccgctatttatacccaaggaagaggagatcggctcggaatccggaag

SEQ ID NO: 62763 - DNA, 416 bp, Oryza sativa
  unsure (1)..(416): unsure at all n locations
ttatgttatggtcaaagctgagntctactttatatgcctattcggggtactacagagatgtgtttctcttgacgagggcagacaattcgtgcaagatattcactcgggcatttgtggaaatcatgccactgcgcgcacactatttcgcaaggcataccgacaaggtttcttttggcctaccgcggtgactgaagctgagaagatcgtactgacgtgtgtacgttgtcagtcttttttatgctagacagactcatctgcctgcccaggaattgcgtacaccttcttgtgttcccaatgcctccctttctcagtttttctcatcgactatatgatagccatttgcagaattaattactactctcaatcagttcaaagacgctgcgtaccgatataaatcgtatgtagaaatactacag

SEQ ID NO: 62764 - DNA, 152 bp, Oryza sativa
ccggatcactctaaaacttcttgctcaactttaacttcagctctgaagggactgatcacctagtagcaggatctatgctaatcctgagagagaaggcagaggcaaaagaagttgcagcatatgctggccgatcccacgtgacttaagccttc

SEQ ID NO: 62765 - DNA, 332 bp, Oryza sativa
aatacttgtgtcgggcacacatgcatgtccttatttatatgaaaaaatagttcaaagtggtttgcgcgcatgcgtcacgttagcgcccgattatttcacttctccatcaggcgcccgatcctgagttgcgttcgataagctttatctcactgaagatttcacgtggcgcgctaaaagggggtgatgaagggatgaaacttcattttctttactatgatatacctgccttgactaccccagcttgatacgaaatgcatgtgcctgatgggttcctatcttctttcatatagagatatgaacggattactgaacatcaagcagtacaggggcac

SEQ ID NO: 62766 - DNA, 397 bp, Oryza sativa
ctacttggaaccagcagcgaaagaatatatacaaaaatgcaaaaaagccaaaaataagaaagctccagagaacccatattgttcaaatattaagaatgaaggatcatcccaaaaacctacgtataaggaatgcttgactaagggagtagatcctttggatggcgaatatatcgattggaaaataattgaaaaatttgaagaagcatcccccacattaaaaaagaattgaaagaagaaatacttaaagaattaaagaaagaaatgaatgacaaatttgaagaaatgaacaaagcatatgatgaacaatttgaagtctccttttctgatgtagatactatggatttacgtggtcatgggcacgcttgaccaataagcattatatataaattgattataa

SEQ ID NO: 62767 - DNA, 396 bp, Oryza sativa
  unsure (1)..(396): unsure at all n locations
agcttctaaacggatcgatttatttgaatgtttactatagnngggtattttgaaacgaactttataacagctaatgtgtattcgcttgtacctcatattaattgtcataaatatcggatactatatcagcttcctttatttttttaaaaaaggtcagatgaaaaagaacttgcgtcttggccaataagtgtgtgtactcgcgtttagtaggagcgctagcacaacacccactggaatctcacatatcaggagacaaaggaagagcacacacctccaggctcgctcaaccagcagagtggacatgactgcacacaatggacattctcgaacaaggcaaaaatcgttgggagcggcacggccaagngacaacaatggcttaagagtgtcgcccacttc

SEQ ID NO: 62768 - DNA, 414 bp, Oryza sativa
  unsure (1)..(414): unsure at all n locations
actaagcttccggtcttggctctgttcaggcattttgccatttcccanaagattcgagctatcgagcggatgcgcccccccagcaaacttaaggatgtgcaatgcgtcgccggatgcatggccgccctaagtcgtttcatataaatgctgggagagaaagcgctacccttgtttaagctcctcaatcgctctgggccgtttacttggacggaggaagctgaaaatgcccttgcccagttgaaagcgtatcttagctctccttcagttctaatcgccccggagccaaatgagatcctgctactttactttgcggcgaacccccaagtatatagtgcatcgctagttgtggagcgcgatgaggattatccttattctgcgcacccccactctgtgccactatgcccgggagcaagc

SEQ ID NO: 62769 - DNA, 369 bp, Oryza sativa
acgctctagagacatttttttttatctctaaacagagttccatcaaaatccctgtataagacccatatgaaatatggaccgggaagccgtcttatttggcttttctaaaaaattggggctgggagggctatgtgaaacggttggcatccggccaactcacccctaaatccaaataaatcttctttgggggggaccccttagcaaccaaagggatttaatttttttatcggcaaaggccaagcgtttgccgccgtcacctgcgtctcatacaactgcctcccttctatttctttccccctgctatccttttttttcacttcctttccatcaaaacctacctttttcttatccccgttactcatcctgcca

SEQ ID NO: 62770 - DNA, 100 bp, Oryza sativa
ggaggctgttttagcgacgtctgctcttgctaaaccaaaggaaggggcttctttggcatatacccatggacaatacagggcatatggtcttggtcctcta

SEQ ID NO: 62771 - DNA, 289 bp, Oryza sativa
tgcctatctcgagaagatacgagctatagagcggatgcgccccccagccagcttaaggatgtgcaatgcatcaccggctgcaatggccgccctaagtcggatcatatcgaggctgggagagaaagcgctactcctatttaagctcctcaaacgctccacgccggttacctggacagaagaagctgaacgggccttcactcagttgaaagattacctcaattctcccccgatcctggtcaccccggagccagatgagccgctggtactctacctcgcggcaaccccgcaa

SEQ ID NO: 62772 - DNA, 338 bp, Oryza sativa
tggctctggctggaggaggaagatatagtatattaagctgtgcaactttagtcccagttggtaacaccaaccgggcataaagatctcaaatcacattagtcccggcttgtattaccaaccgggactaaagatataatccttagtcccggttggtaacacgaacagggactaaagatcccaagccccccgacagaggtctgacatgccctgtcaggaggcgaaccgggactaaagatccctttgtcccgttgaagtaataaaccgggactaataagccactttagtcccggttcgttttggaaccgggactattgtggagatcggctgaccctccaaag

SEQ ID NO: 62773 - DNA, 356 bp, Oryza sativa
  unsure (1)..(356): unsure at all n locations
agctntagtgaccatggcctaagccctaatccttctcatatggaaaggccaatgtcaagctggcgaagccttcaggtcaaacccgtgcaaccggaaagttaatggggcctcgagggatgaccaaccatttgaccccaaagaactggaagggaaatatagggccgcccaggaccccccagggccatggacccatggggcaatcactgcagctggggccctggtaccaaacatagcttcccatggctagctgctggttatgccaagggcgtcgcaccccacgcacggcttgcagtctaccaggcgtgctggggactgggggccagctggcatgatgcgggcatcatcaaagcgcttga

SEQ ID NO: 62774 - DNA, 156 bp, Oryza sativa
ctctccttccaaatactcctcaactagctaagtctaagttcatcgatccaagcaagctaagccatggtgctccaacacagtgatcgcatggacagcctcttttcccacagacgagctgggtgagcggcccgatcatcgtggccgcccggcccgtcg

SEQ ID NO: 62775 - DNA, 348 bp, Oryza sativa
  unsure (1)..(348): unsure at all n locations
tgctatcgccatagccgatattaatcatcacaagctcttcacgatctttctgtaanaaaggcgtcgaccacgtggttgatgtcaaagccctacatcgggccggtatccaatcccagcgcccggcaggcgacgatcagataggccgcctgcatggaactgttgcgaaacgctgattcttctgcaagttgtgggctggaggtaaaccaactgcgggcatcaccgtggggaaacagtaatggtaaccgttcataaaattcactgtcccaggcgacgatagccgtgacgggcgcggacagggttttctgcagattgtcgctggaaagtgccgggcgcagacgttctttttct

SEQ ID NO: 62776 - DNA, 384 bp, Oryza sativa
agcttgtttcttgcacctctttttctgtttattcctcttcagacatattattcacgtgttttctatcttgggctatttcctgtgacagaaacatgtataaccctaataagctgatgaagtggcgatttaccatgtttgacaaaaagattcattcgaaggatggatgtttaccttgtgggactgggacggatctatcactgttggttcacaaggcacattattatcttccccactcgtgaatgtgggaatgttatttccatcgtcagatgacgctggggaggtacatctggttgatggattggatactgacgatccaaaagcatctgactgcatcgcagatagcaccgatataggagaaccattctcttgatcagagccagatga

SEQ ID NO: 62777 - DNA, 379 bp, Oryza sativa
cgcacattccaacgatggatcaacatagctgccataaaacaattaaatgtacgatgtactccatttgtgacaccatgtactctacatttgcgagccatcagccagacagaaacaccaatcgcatatgtaagtgttaacaccaaaactcccaggctaactgctaacctaccacgaataatcatggtctatctatgcttgctcactgctaactatgactcccggtgtcctattctatctacctttctcgctgagccacctgcaattatgaacgaaaatgaactgttacctcacatacatatcacacttgccagaaaaccacgatagcacttggctgtagaatttaaaggactaagtatcaacatgaaaaatggatggggta

SEQ ID NO: 62778 - DNA, 177 bp, Oryza sativa
  unsure (1)..(177): unsure at all n locations
agcttaacgaatctgngaaccacagcaaaatggctaaaaacccgcaaggncccggcatgcgggccccttggcacaaaccataaggaaggcctggtccaccttctccaaactcgaaccatccatacaagggagctgtggaaaagcacctagaacatccacttggatgatgccccagca

SEQ ID NO: 62779 - DNA, 158 bp, Oryza sativa
  unsure (1)..(158): unsure at all n locations
gacactataaaactacgctntaatagctgccccgctgactatataatatagtcatggtgtgtttgggtttttaagcaattgattggatacaatatcgttgcttattgccacgtaagtgtgcatttttattgaccaatataatggctcaggctgaatat

SEQ ID NO: 62780 - DNA, 408 bp, Oryza sativa
  unsure (1)..(408): unsure at all n locations
ctgagctgcttcttaaaaagcatcatcttattttgtctnttaaccgagagatgttggggctgtttggttctcaaccacactttaccattacttgccaacaaaagttgccacaccttgcctaaggtgaggcgatcaaattgttagccacaacttactaagcctaagggaatcttgccacacttttttgaaccattgacatgtgggacccaatttgttggaggggaatcttgccacaacttgtaactacaaccaaacacctgtcaaatatgcctaaccttaggcgtggcaaactgtggcaaagtgtggcttgcaaccaaacacaccccgtttaagtgacatgaaaagtgtataaaccacagctccttttgcagaaaaataaactacagctcaatgtcatgtgtcactttt

SEQ ID NO: 62781 - DNA, 345 bp, Oryza sativa
ttatacatacacagctacacacttgttgtctcttcatttctaggaatacctgtgaggctttttttcgtttggaggatatcgatggggaataattctatactacaatatccaggcacggaataaaatttctccctgcattaagcgaaccacgcctcaaagaataaggaacagcccttgcaaaagaccacctcctatataacatctaccacagcatcagaccagttactaccttcgtcccataaaaatcgcatttctagctaatttacgacaaaaaagtacgattggaaaatgacccatgataccttatttaaagaacccactacatgcacacattccatatataca

SEQ ID NO: 62782 - DNA, 292 bp, Oryza sativa
  unsure (1)..(292): unsure at all n locations
agcttatcttntttttttctgggatctgatatcttatatttctaattaccttttaccataggcccccaagccatcttctgcgcctcacaagtccagggagtgcctgcctcttatcctcattatcaggaacaggctcaagtatgctctgacataccgtgaggttatttctatcctcatgcagcgccatgtcttggttgatggcaaggtcaagactgacaagacctacccagctggtttcatgggtatgctcaatcgttattgcaatcaatatatgcttcagcgtatgatgcaa

SEQ ID NO: 62783 - DNA, 384 bp, Oryza sativa
  unsure (1)..(384): unsure at all n locations
tcataccttaagaactactgtaacaccctatttatcatttcatttgaaacatgaagaaagagatagttttgaagttcgaaaatatcacacgtaaccccacattggattggcaacagctctcgataaaaatgaagagttactgaaagatcattgaatgatgtataaccatcggagtttcaaatactttggactagtaactactagaaatgcgaatgatataacangaggtatctctcatctttcatgcgcttgcatgcacattgttaccatgtactaaacatcatcatatacaaactttgcacaagaaattcagaacctgataagacacttgagatcagattacttgtcacaaacctttctttgaaataagcaatcggagcgagc

SEQ ID NO: 62784 - DNA, 286 bp, Oryza sativa
  unsure (1)..(286): unsure at all n locations
cagcggggggaaaaaacacnatttgtaaaaaaccgcaaacccagaagacacagagcaggacgaaagccccgcggaaggggcgaccagagcccagccgggaacagnacacgaggagaagcgaataaggagggaacccaagcaagcaaccaagcctgccaagggaagnnagggccaagagcgacccgaagaacgggcccctatagaccgacagggggaaaccacaaaaccgtgggggcgccaaccaccgacaatcatcagcacaccactaaaagaagagaagaaaaaa

SEQ ID NO: 62785 - DNA, 444 bp, Oryza sativa
  unsure (1)..(444): unsure at all n locations
tcggtattttcatcccccatcctctctaggtgtggttcttcttttataagtcaaggggatactacacacgccaccccccactttctcggggagagagtggatactgtctatattcagcacatatcttgcgccttggtccggaggcgatccgtacgccatccgtcatgcgggtcccatcatacctctacggttgacacgagggacagccccccgtcactcggtatttaatgctcggcgactncataggcgcacacacacacacacacaccatgttattggacccggtcacgtccctttcagtcaagcctactgctgaccggatgggggacatatggctcctcattatccacgatgggacagggcatacctgtcctcacgccgcctaacaggagcttgaggcgtgggtgccgtctgcgctatcacatctgtctatcagctggtcat

SEQ ID NO: 62786 - DNA, 369 bp, Oryza sativa
ggatttatttcaaaacgttctttgtcaaaatcaactcatcaacaacacaagcatgtaaaacaaatcctagagcaaaagaagagtccaactttttagatttttcaatctcaaattccaatttcttgcaattaacataattgacatctcgcaaagcattaatttcagaaaataaaacttcacaatattgacaattatcatcattaggaatcaaagatttcaatggagcaatttcagcatttagaatctcaatagtatgatccttctcatcaagcgcaacagaacatgtttgaagtgtcttagcaaatttataagcagcatattctaattgatcataactaagcttttctttattatcatcatcagattcat

SEQ ID NO: 62787 - DNA, 301 bp, Oryza sativa
actacgctctcatgttaccttagctatttaacacttttttcaatgagtatttttaaaaaacctattctacggatatactttgttcacaacaacaacgtcaatgggacggtactcaacgcgctaataatgatagggccatcctcctccctccagtgcaagtgtcactctgtctgatgattctttctaacatgacccacttgtataaaaaaactaatttggataaaatatatttactcataaggccctggcgaacaatgacactgtcaccgaagatccatctatatacatgtttttattacca

SEQ ID NO: 62788 - DNA, 179 bp, Oryza sativa
catgcaagcttaactgtttgacaccttttaagatgttttgttccaactcctaaaaagtcgagtaactgcggtataaaaggatttaagggattgggcacttgatcacgcgcactttggccttagccaaaagtggcttagtcccttaaagaaccggaccaggcacacctggaaatatgggc

SEQ ID NO: 62789 - DNA, 287 bp, Oryza sativa
ctaagctaagcttacgtatctgaggcagcattcgtcatatatgatgaatttatagatcctgttgatgtgtctctacatctgtacgacactacttcgtactccctccgtaaaaaaaaaaagataaaccctggtttccgagcctaacgtttgaccgttcgtcttatttaaaaaatataaaaagacaagtcacgcataaaatattaatcatgttttattatctaacaacaatataataacgaattatataaatatgttctataagacggccgatcaatattgtacactga

SEQ ID NO: 62790 - DNA, 295 bp, Oryza sativa
aacaaagaccatgcaataaacaagggccaaaaagaaaatgaccccaaaaaggatacatgcaagccccaaggggcaaacaagaggaagaaaaccccgggccagacatagtacacaaacgggcagaacccaaccgagggcgaagaacaaatgaggcacccaaagaagaaatataaccaaagccggaggacgccccctaggcaacccagaaaaaaaaccccgccgaagaagcatgcaaaggacacacaacggggtcaaaagcaagacccccaccgcgcccaggagaacccaaaaaggc

SEQ ID NO: 62791 - DNA, 350 bp, Oryza sativa
  unsure (1)..(350): unsure at all n locations
ctgcagctagcgaggggtttttttttttttaaanctaggccgggattctgttaaggagaagctgtggaccccgaaacagtgaaccgtcgtcacccgattggaagcaacccaagacagtttctcaagtccgctgtttcttacgtgtggcaggatactaccgggaaatcatcgagaacttcttcaaaaatcgcttcgactccatgacaccagttgttgaagaaagaagagaaatttgtggggagcctgcaatgcgagaaggcgttccaaactctcaaggaaaagctggttttctcgccggtgttaatcttaccggatactcgcaaggacttcctggtgtattgtgacgcttc

SEQ ID NO: 62792 - DNA, 213 bp, Oryza sativa
  unsure (1)..(213): unsure at all n locations
agctnggatattctccatgtgtcatatnaatcgtttgtaacgnggaaccatnnncaatcgacggttgaccgcacnatttggggatggccggcacggagaggggaaaaacctataaatacccccctccattccatataaaaaggctttctatgctaaaatccattaccatctattttaaaggtggccatggcttaaaagtcttataatgtgaaa

SEQ ID NO: 62793 - DNA, 339 bp, Oryza sativa
  unsure (1)..(339): unsure at all n locations
tagactttggcaccaccgactatcgaagaacttgtctnttgctctgtcacaagtgcgcgtgagatgaccctgaggcgtacatgggcgacttgtgtgagctgtgaagccgactgcttaatcaacacaccgattgttatgacgcaggaatgggacgtgtgtcttttcaagcctccgcgccttcttctcttatgtttaaacttatttatttctccataatacattctgtcctttactctttatcgtttcatttttttctttttcctactactatacctttcttctctctatattctctttttataatttttacctcttacttttattatatctatataattt

SEQ ID NO: 62794 - DNA, 355 bp, Oryza sativa
tgcgaaatggactagcggtgtgatgccagtcaatttcacagcaaacacacaatactacccgcgcaagtgctccagaactatcgcctcttacattggacggttctcgtgcatgggggctagaatatacttgtggccatatcccacaaaagacagagacgggtacaggttcctattcgtggcgattgacaaatttactaaatggatcaaagcagtacctacgggggtaatctaggtcaacaacgccatccaattcatcaaggggaaatttgcagataccgctactgcaccgattataaccgacaactggtccctttcaaaaccgccgtttttcggatactgcttcggactgggagtc

SEQ ID NO: 62795 - DNA, 349 bp, Oryza sativa
  unsure (1)..(349): unsure at all n locations
taaacacctgcagctgcagcttctgcctcaaacttttttttttttctgtcgggncatataattatatctgccttggttggacgctcgacgggtccaaaaaatggaatggggcaaaattaaatttgcaagtcactttccagatttctgacaatcttatttacaatcaaagtattatcaattgcttgttctgcgaggcctcatacctacaattcaaactaatcatataacgaatctgcgtatattggagctttattctatgttgggatacttctatcttgttagaactttcgacatgaggacttcagctgttataaaggggctctgcatctgctaggaacggccttaaaat

SEQ ID NO: 62796 - DNA, 310 bp, Oryza sativa
  unsure (1)..(310): unsure at all n locations
gacactataaaactaagcttaatcctctgaatcaagggccaaaaggataatacctatttgatttgaatcctatcaaattcgtacataaatccttcgattcaaaggggccctcaaaatatgaaaaacacaggattntgataggaatgtaaaatgaaaatagaggattgctaaacacaaaaaaaatacaggaatggtcgcttgattggaccgcatgaaaaacgcaggaattagaggagagataaagactcacgcctcctttgattcaaaggaaactcatatcttatatatattacacaactataatttatat

SEQ ID NO: 62797 - DNA, 112 bp, Oryza sativa
  unsure (1)..(112): unsure at all n locations
agctaatctcttacgttctaggaaaggatcancttaacatcaccaccggccgtcttgttcgtcgtcgactggtgttttcgcctgcacggtttgcctattatgccgcgcgttg

SEQ ID NO: 62798 - DNA, 174 bp, Oryza sativa
  unsure (1)..(174): unsure at all n locations
tgcactgngagcgcttagctgaaccctccgccggatgctgatcgcgcgcagttcatccagcttttctctgagctcatggagaagatcgctgcagccgtggtgagtagacggccggtcaactacttgacgggcagggggaggctttctcctctgaccctatctgctcatatcgtc

SEQ ID NO: 62799 - DNA, 356 bp, Oryza sativa
ttaaatggaccccatacaggcataatgttcattgaaaaaagagtgcaacgaggggggaagttaatataataaataaaaaaagaacagccctaaagctgtaaaacagggattgtgaactactaccgatataaatatttacaaacgaaaagaagaaaattgtaaagttaatctgcaaatccctcccaagtgcacgatttcagcttttctgtggcttgagcacagatgcagaagcagaacaacaagcaatgctgtcaaggtaatcctgtgtcaaatagcagtgagccttatgattcaattccaggcttccagcatggggttgctttcccattcaatcatattctgaaaggaattttatt

SEQ ID NO: 62800 - DNA, 428 bp, Oryza sativa
tgaggcagcaactgcataacttgcaagaatattatcggtatgatcttcagccaacctacaataaatcataaatgtgcatgagttctatgaatatgaataattgataaattgataaaagtaaataaataatgaggactgtgtctttcattgttttctagtatgctagtgcatatgattcacttgagaaccattaaacaatgtttatgtaccaaaaattaaacagaacattaaaaaaaataaattgtctccgtattattcccatctcactactcatgttctccctattcctgagatatttgagtgtatgttcatatttaactccactttctcttggttttatactcttcccaaatcttgtgcccactcaaaataagccttatattttgaaagaggggagtacatggtttactttgaaacactatcattgt

SEQ ID NO: 62801 - DNA, 344 bp, Oryza sativa
cgtactacaatatggcggttatgcccaataaggatgaaaagctgaacacctcaagtatgagctgctgatgctaaaaaatgtcatggcacgtgtaatattgatatcaaagaagataaattgtttcagtagtaaaaccttgataaacactactctaacataagcaagacgccagcacatagtagacttgatcaggctggccaagaataagctaccactgtcagagagaccatatgtgaacgcaaaagcagatgccacattatctagttattggtccacacatatcatagcttggataaaaaaagtaaatcatagcagacttcctttaacatggtgtgatcttatga

SEQ ID NO: 62802 - DNA, 354 bp, Oryza sativa
tagcatcttcattctccaatgttttttttttcatattacatttggagctaagttttgcacactattttgtctccaaaatattgttgttagttgatgagagagaaaatttatgtggagacgaaagaatatatagaaatttagtttatctggtaaagaatgttttataaataagttgataacgaaaatatagtgaaagctattcttgaataatataatacaaagtaacattgaaaattaaaataagtacaacacattaatattatgttagaactttatatatagtaaatatattattattcgggcgaatatttcctaatattcgcatgaataatgaattgtcattaatgtgtgact

SEQ ID NO: 62803 - DNA, 332 bp, Oryza sativa
cgcagcatccagctctaacattcagaatcctcttttacaagaaaatatttgagctatattatgcctaaccatggccaaactctcataatgaataccacgagagcaccaaatgaatagcaccacagtatcagagtagcctcaaaggctcaaccataacctagtatcccttgtaatgtcctaatattattgacaacaagataaaggctgaaacactattggacaacacgaaaaagtatatacaaatcattgctgcgcaattgcgtaaatgagtaatcgactatccctaattccatggataaaattttgtcttctgtaattcgcatgaccaccaa

SEQ ID NO: 62804 - DNA, 311 bp, Oryza sativa
  unsure (1)..(311): unsure at all n locations
tcacctcactaatgcaaccgntcctcataaacaattcctaaaagggtcatccgngttgacgtctaaagaataacaacctaacttgttctcctcgaggaacagccaatcccaggctcaatgggcaaaagttgcagccatccttggcaagtaatgaagcccgtatatttgctcactgaacagatgaattactacaaataccaacttagtacccgtacttgatatcatctgcaaaggctttggccaggagtataatctcatgatgagaatatttgcacctgcagctgaataacaccacaaggtgcatatttaat

SEQ ID NO: 62805 - DNA, 448 bp, Oryza sativa
  unsure (1)..(448): unsure at all n locations
cacgcatgacagctcggaactgctcgttaacctanggtatttctcatcggttctattaaccatggccaagtttcccacctaacccacaaccaacagaataatcagacctgctacaaaaataggacgaaagcattttaatagttttatcatatctataacagctggtgtataggtaaaaatattcaaaacttgcatactggttcacctgtctatcaaagcaaaagacaaattcattgaaaatgttaaaacacattttcatatgttatatcggaataacagacattactttcttttattattttatctgatcatacacaacattaaaataatacagtagctatactacatgcaaatgtaatacttacttgacattagtgcacctattagctaattgttgtcaaattaaccaacgctgaatattgaagagtgaggctaattgcaaataacg

SEQ ID NO: 62806 - DNA, 352 bp, Oryza sativa
ctttgtttaccgatatacctgcaccctcttttgtacaactcttaaatagcttctttactcattatacaacattgatttggcctagccgtgctatacaagccggctttacagagatgcaagaatagctatagagattcatccccgacaagcattgaatatttccatgacgccacttaaaagtagcatcggtcattgcaacctctgccgatgtatccgctagaacatctcaacatcattgtccgctattgaattaaacattgatgcaaggcagaaagaacacaacaattggcatggatctacaaccacccaaaataacattggagttccctttacatcaacaatgaaaaaagcg

SEQ ID NO: 62807 - DNA, 435 bp, Oryza sativa
  unsure (1)..(435): unsure at all n locations
agcttaagcgtagaaacgacgaagatgtttattgttccaagagttgtcgacaagtgtaccgtcttcgcgcttgagtcgataggaacctggtcgggtgacttcagagatgataaatggcccttcccatagaggagataacttgtgccgatcttgtgtagnttgaattttcctcaaaaccaggtcgccgactagaaaggcacgggatcgaacattgcgattatgataacgtcgcagcccttgtaagtatcgagccgactgaatcaaagccgtttcgcggacttcttccaatcggtgcaagtcatccactcggtcctcttcgtagcgttcttcacggaaatttcgaaagcgcaaagactcgaattcaacttcactcggcaacattgcttctgccccatatacaaaggaaaaaggtgactggcctgtggcccgactggg

SEQ ID NO: 62808 - DNA, 381 bp, Oryza sativa
  unsure (1)..(381): unsure at all n locations
agcttggctgagcggacaaggaagtgggttgatgagaggaggctttacgcctggaaggcaagtccccggcggttcctttcggccatcggcgaagtgaggccaagcagaaggcccccgccgaggacatcgatgatggcaatgatgacctatgtttccaagagcctggggccaccattgccactgtcgatggaggagcgtgtgcgcatgtttctcgccggagcctcaaagccatgaagcgagagcttctggccgcggcccctactcatgaggcgacgcgccgggcgcggtggtcggaggttgccctcactttcgaccagaccgaccacccaccgtgcgtttgccggngagggcagattgcgatggtggtttctcccaccgttt

SEQ ID NO: 62809 - DNA, 216 bp, Oryza sativa
  unsure (1)..(216): unsure at all n locations
gcacccctatgtggcagtgctcgggcagatcccaggtggagcttggcaacggatccatgaaacagcatgccggtggatccaagcggggctctaccgcggattctggccgtagcacgcgggcagatccagatggggcttggcagntgtgctttgcgacgagcaaatccaaagtgggggctctcggcgaccgcagatcaatgcggcgacacacggaac

SEQ ID NO: 62810 - DNA, 419 bp, Oryza sativa
agcttgttgcgggtaataaatcgggtacttatgtatcgcgtgtcatgctcttgcatgattattatttcgcatcatgtgggtaaagtgtacaaactctacagagttaaaactaatcgattagccgtgctcgcggtcatgagcggcgtgtggatatgtattgagtatagacttgtgtttattctcctaaatgctgaaatataccttcaaattctgatgagatttgaaaatgatctccttgctgccatggatggcaatgaggtgaatatttatacatgattaatgcctactttgatgcccatatgctaagtactagcttgctgaaattttatttgaaagcacatccgttttgaatgtgtgttatgcaaataaaacttgctttatgctaaaaagaaccatactatgcctttcttgattatata

SEQ ID NO: 62811 - DNA, 306 bp, Oryza sativa
cttgtgcaatttactcttatttgtgactgttatgatgctattgacccctgcagtgtaatggtattaatactagtcatatgcccgaggattgcaatgggatttgtgaacgtgattaaatttgatctacgaaatatggttcattcctttctattctaaattatctcttggttgggtatttatttaattatcagcgtttttctttagctgaaacggttgtttatatgtggcatattgttgaggacatcactaacttggatatgaccatggcaactctatgtattcatcaaccgaacgtgcatgctttct

SEQ ID NO: 62812 - DNA, 422 bp, Oryza sativa
agcttgacttcattcttgccaacacgactttgtccttggtcttgggaccaataacccatggtgtcattcattagcctcatcgcaattagatctattcctttgcacggctcaaaggaaaacattaatcccaacaaattggttggcatcctccacttggtgaccaaccggttgcatatgaaagatatggatatgtttgttgagtattcattaacatcataagtgtcatatactcgtatgcaagctcaagtgcaaagatccgatatatataataggtgaacaacatggatctaaaacatgcacaataaatgtataggatttgctccccctaagtatatgcatacaaagaaatatcaagagagacaagtgtatgcataagtaaagaagacccatgggggtttatcctatcacatagagaagcatat

SEQ ID NO: 62813 - DNA, 372 bp, Oryza sativa
atgtacccttaccactttaccatgctgcattcgtgatatcaattctggttacacgttgagcttagagagtttatagtcgcgcccgaacacaagccacaaacgtagaagtgagagtttagtcagatcaaggacacaacagtgctcagacgtacgtggcaggcaaaacaaggtgaaaagaaatcgcaccatagtcgttaccgcacctcgccgtgctattggggatatcccacttcccggcatatttccagcggcaatcttctttccaaatgcactgtatggttgttgcactttagcccgttagccggagctaacaggtacccagcctttcgtgtgctcaaggtcgtccgtgcctggctgacacaagcagcgcaa

SEQ ID NO: 62814 - DNA, 405 bp, Oryza sativa
tgcggcatgcaagcttcactctctttatagcatttgaatctatcatcaattatttgcggccaatgaaactccactctcctaagcaaccaatttatattacggccgattgatgaattccacgaatcccttcatctactactctcctagcaactttagattgatcattatctaagtaatacttcatctatttttcggcgatataatatttgaacacttgccaccgaatctttcgatcaaccttaagtgtaagatctttcaaatatctaatcaaaggaattccccaagctattctaactcatgggcactaatgtccgaattcacaattaattctgccttttaatcaattgtaacgtgccccccagctctctgcccgagatctgtcagaccaggcgtgcaatgccggtc

SEQ ID NO: 62815 - DNA, 303 bp, Oryza sativa
  unsure (1)..(303): unsure at all n locations
atgctcctagtgggatttggtttattgatgacaaacgattaaaggactaatgcacttactgagtgtataagcaagtgattattccgatgaagaagctaggaaatggacttatcgattggatgagaattaaagagaagatattgaagatgcgggtatgaagtgactacctatggctagacngtgaaccgcaagcgacgcttaattgtgatggaccatgccgtggtgaatggcatactaagggcttggcgccgactaaccgaaaccggtggtgaaaggcgagtgaagactgtgtcttgttaaccg

SEQ ID NO: 62816 - DNA, 417 bp, Oryza sativa
agcttgtcggtagtcttagggacgagcgtgtgatttccaagagacgagcctctgcccccggccgaactcacgagaaggggggtctcacgactcctcgctattgaggatctttcctcgatagtatcgatggtgttgatgtcctcatcactttaaattcgatgcatcgagtttggatggcttggataacgtatcaattatcccacattctctcttttttttttctcatagtacaatctatttgtatttgtaactcataggtactaaatctaggaagacaactagagtgttagaaaagatatatcaagcccaataaactgtaatattacttgtgagctgataaaatagtgattaaccaatctttcattatatttgtaggtagatttacaatagatttcatatatctctactatataaaaa

SEQ ID NO: 62817 - DNA, 404 bp, Oryza sativa
  unsure (1)..(404): unsure at all n locations
tgaaccgggtgatntagtttggttgcactttagaaatgttatatttccggaattaagaaagactaagttgatgcctcgtgctgatggtccttttaaaattgttgagaagattaatgataatgcatataaacttgagttgcctcccgagtttggggttagtcccacgtttaacatttcagatttgaagccatacttgggagaagaggatgagcttgagtcgaggacgacttcaattcaagatggggaggataatgcggacatcacattatgaacaatagaggggacaaagagacacatggagaatggcttagagccatgaacgatcatcgaggatgtccaagtcaaggtggaggcccaaacccattcgacctcgggtgcaattcggagtctaataccaatctgta

SEQ ID NO: 62818 - DNA, 423 bp, Oryza sativa
atcttaagacacctgcagctgcagcttactattcctgttattccttttaacttgttaaaaacatcacatcaaatcttttacatatgtatagagtattaaatataaattaaaaaaaatcaattgcacagtttgcaggtaaatcacgagacaaatcttttgagcctaattagttcatgattagcaataagtactacagtaacccaaatgtgttaataacagtttaattatgctcaaaagattcgtctcgcggtttgcaagcgagttacaaaattagttattttatttatgtctaagaactcctttcaatatctggtcaaacgttcgatataatattaaaaaattttcatttggccgactaaacagacccttactgggcttaactggaatcgttcgtcgatccaaaggggacaggactaactgact

SEQ ID NO: 62819 - DNA, 407 bp, Oryza sativa
  unsure (1)..(407): unsure at all n locations
gttgtctttctatgtttggtcangcagaacatcataatatattctgtgtataaatcatttgtactgcactactgcttggttatgttaaagtgacatccacgtattagtacagcatagtatgttactctgctttctcccatctaaatcagagtgctttctttagattaaagtgatacttggtgactacgatgctattcatgtaagacggngtgatctactgaagaatangaaagatcgattnggtgttgagcgaagccttcatcctcatctggacagagatacccatcctgagaacatcaaaagaagaattgcaaagtggattccgcgaggccgtactcttttcattgcttcaaatgaaaggacaccaggcttcttttcacctctatcagacaggtaatcaacacatt

SEQ ID NO: 62820 - DNA, 411 bp, Oryza sativa
  unsure (1)..(411): unsure at all n locations
agcttctagaagcgctntgctctccgcgttcttctgtgggcgaagtactcggtttccaaaaacgcacggaagctttgcggccgggagcggctgacacatgggccccacatgccagtcttgcgttttgttcgcttgctagttcagatcctactctaaagctatcgttctgatgaaatgcctagatcatgcggggaaggctacatttggaacgcagtgattttacaaaaaaatttgctgtaattttacgaaacaatttcagctacggcttgtaggatctgtaaatcgctcgtctcctctggttggtttggattttggtgtagaattttgtttgtatgcttgtagtgttggtaaacttgctcatgggctgatctgaagcatctgtgctgctctccatnnttttttatttttgtt

SEQ ID NO: 62821 - DNA, 405 bp, Oryza sativa
tctcatcaactcgagcaggcaagctttacacgacttctcttttaatgcatacctccaaggctccaactgttcttgtcacactctcactgtccacgctcgtcttggccgcttgactagatacaaccacacagccatgtcttttgccagccacgccggcgccggcgccggcgaccagcagcacaggtgctgctccaggacggtgcacttcgtgctggtcccgatgatggcgcaggggcacaccatccccatgaccgacatggcccgcctgctggccgagcacggcgctcatatcagactcgtcaccactccggtcaacgccggcaggatggcggggttcgtcgccgccgtggaggaggctggcctgccagtgcaactgctggagctccccttcccggctgctgattt

SEQ ID NO: 62822 - DNA, 285 bp, Oryza sativa
atacaattcctataaatagatgcaaactgggtagtcctagttatttcgctggcgcatgacaagcagacctcttaaaaagtagcaatgcattcacatatcttctttactttttttgctaacttatataataaaaattaatcacatcatcatgtttcgtttatggaggatgtggatgacatctatttatatcgcctggggttagaaaacaggcatggatgcacagtgcaaaatggagatcgttggccaactttctcgttgaggaattcttatgcaattgctataaat

SEQ ID NO: 62823 - DNA, 447 bp, Oryza sativa
acctgcagcgcatgcaagctgaatcaacaatcaaaattcatgatttcattggatttattatgcaacatcttaacaagcacataggttaaagaataaacactaaacacatatacctattgcatttatcactctttctcaaataagcattctgcacaaaactaacaaagagaaatttttttaactttttcttttcttgagcctttgttctcatatttttctctttcttattccgggtacgtccctgtcgtcaagactgtttccagggattcggcacccattattttgctcacatcgaatacgtccttgtcgtcaagactgtttccaaggattcggtattcatttttttcatattttttattctcttttcacaatgagcaattaaaactatttgaggaataacaagtcaataaagcatatatatatatatatatatatatatatatatat

SEQ ID NO: 62824 - DNA, 257 bp, Oryza sativa
cacttatcagatagattctataatatgtggtagccacatactccaggcatattcacatagttattgcgaatttggcatatatatcatgtactattcttatatgtggggaattttaacaacaggtgcactcatgacaccatttatctatctatctatcttcgcttatattataacagctcatttgctaataacactcccggatcgtgactgtacaccctataaacgctctcataccacctgtggcatcgtataaaata

SEQ ID NO: 62825 - DNA, 433 bp, Oryza sativa
  unsure (1)..(433): unsure at all n locations
agctntccgtgaagtacttgcacgcccatatcggagttcgcatgatagtcgggcggccgtcagaagttggcgctgccctgcagtccgaatccaccccgcgcgaattctcttccctttggatcctctccatcgttcctgagtaaaacacgagtgcacgcatctccggggtataaagacgaggaatatgaactcaagaaagaactcacctgataatttagttaacatgcacgagcgcgggtaataggaccatcatgctgtacatggggggacgtggatgtatcgatggtgttgatgtcctcatcatcctccccttcttgcatttgagtcgtcctcgactcaagctcatcttcttctcccaaatacggcttcaaatctgcaacgttaaatgtggaactaaccccaaaatctgcaggccaatcaatcttatatgcat

SEQ ID NO: 62826 - DNA, 326 bp, Oryza sativa
ctcggcacacacgaaagagtgcgagagctcagaagatcactctcttagctctctacctggcgcgccacatgacggagcttggggcttctcaccgggagaccgcgcaggcccccctttgccggttcggccacgggccctgggtgagattctaagctcctggtctgtgtgtggaaagggtcgcgagaatgggataagcccatgacacgggcgatgtatacaggttcgggccgctgagaagcgtaataccctactcctgtggtttggtggatctgtgtatgaagaagctacatagtgccagccagccccctgatcgttctctttttttt

SEQ ID NO: 62827 - DNA, 434 bp, Oryza sativa
  unsure (1)..(434): unsure at all n locations
agcttggttgcttataacactgcatacatatgtggatacgtcagtagtaagaagtgacaatcgtgatgtatataccgaataaatgctgacataccggccatcatccccttatgtacagnttctctctacttgtattctttacatacccgccgcgtttcttataatggctgtgtgctctacaaagataaaagtaattatttatgataaatcgacttattacaaatgatctttacgtaatgttggggggtttctttcgaacttacaagttaagcaagcataggaactccatgtacgcgtccttgtcatagtctgccggatcaagaactatgaacggttggtccgttggatagaccaggaatagtatatagtgttggctgcgaagacagattatganattacgtaagatatattntcatgtgcgggtattaatctat

SEQ ID NO: 62828 - DNA, 288 bp, Oryza sativa
  unsure (1)..(288): unsure at all n locations
cttctggccaaccgccctcataaactcctgtgacatggttcagcggtgtgaagcctgttaattccacaataaacacacaaggttaccagcgcaagcactctagactatccctctcacttggtcgntctcgtgctgggggctagatatactctggccattcccacgaggacagggtggctacagggtcctattcgtggcgatcgacaagttcactaaatggattgaagcgacacccacggggaaatcaaagccgacaacgccatcaaattcatcaaagggatattttgc

SEQ ID NO: 62829 - DNA, 403 bp, Oryza sativa
  unsure (1)..(403): unsure at all n locations
gacccggaacttaagaactgagcatgcagcttnttacttctttagnnaactattatagctaantatacagagccatacagacacccttcatgatgggccaaaaaatctcaaatatgcagtacaagagggataacttgaacgtaaagcagagacaaatcgatacagagcaaagacatgggaacagagcaacaggacattagtgcagtacacattgacgatgcagggatgcacgatgcaatacctgaggacagcgcccgttgtacagaccaatcgcgagtgaagcggttggcgatgcaatagctcggcggcgcaaccagctcggcctcgcactccacaaccttgcgggagcgcacgtcaaatcgagaccttcgtccccgccacccgcgtcgtcgtacccccgtca

SEQ ID NO: 62830 - DNA, 295 bp, Oryza sativa
  unsure (1)..(295): unsure at all n locations
tcctataattggaaaagcattattatgttgtttgcaacatgccttattagaatcacacacttaanttggttggcgtcggtttgcgtgccaaaccgactgacctacccagtagacacactaattcctgtaggttggactaccctgattccttgtcgctttacccttgtggtacttctagatccgtgctctctgaacgcgcataccaaatatcccacatacgcctgttgattgtcgaaaactctggaaatgggttgtgaagtctttaaacccgaatgtggtgtggggtgttgaaaat

SEQ ID NO: 62831 - DNA, 398 bp, Oryza sativa
caagctggattcacgtctgcgaggtactttttgaggtcttctgcttcgcggaaggggaggccgggcttgctttcttcgctgcggtgccgaaggaagtggcagcgctggacgaaggcaaccagggaagacggcaacagcggctgaaacggcggctggtggcggagagagaatgtggctgcggggagaagggttgcagtgactgcggagcgagggagaggttgcagccgaaagaggagagggaaggggccctatatataggaacaggagatcaggatcgagcccacatcgacaggaaaaactctgggaaactttagggttttcgccggaaaaatgaaagattgatccgcgaaattggaaagaatttccacataacattttagggatttcttggggaaacg

SEQ ID NO: 62832 - DNA, 299 bp, Oryza sativa
  unsure (1)..(299): unsure at all n locations
aggggctcggaggcgacggcggatgcccacngctaccggcgacgaggtatgaaagctcgagaggaatgaatccgagacgaactcgaatccgacgctttccaaagcgatttgacaaagattccaaagaggaaaaggtagaggagatcccggagaacatttcccctcaaccaattccgccggaaaaggaaggaggcggccggattggaatgaaacagcggcggcggctcggcggcggcgcgctatggtttctgcccgaggaggacgacgatcctgacaggtgggacccacctgtcaacggc

SEQ ID NO: 62833 - DNA, 420 bp, Oryza sativa
cgcgaactcataattgttatgctatgtgtataccatgatgtacgccgctatatggcgcacacattgtattctacaaaccactcgggatatcactcggatcatgtgatacacggattcacaccggatatggcatactatagcactcattcactgggttgactacaattagtaataccactcagatggagcatctattaggtacaactattcgatgcacctgactgtatatttcaaccctccataatccttatatttgggaaaagtactctggagatcatggcgaagaagattgaagcactcgtctttggagtaatctacttacacagaagattatctttcctactgagaaggtttcaagggctactgtggagattatgggtacaccatacccacacggcgtggatagccgactagtcattc

SEQ ID NO: 62834 - DNA, 271 bp, Oryza sativa
  unsure (1)..(271): unsure at all n locations
gcatgagacggatgactatttagagatctgttaaatcaanccgaggaggcgcatcagttggaggagacttggctgctgccacccacgtcgagcttcaccttttggttaccgcgtgcttgtgggtgctcgatgcggcacagatcttgctgaaccaagtccgcgtgggatggggaaggagatgaaatggcggcagcagtggacatcgaactcgcaaaaaagctgcggcagtcgcccgttgcttgatgggaagacgacgatggtaaccactggc

SEQ ID NO: 62835 - DNA, 420 bp, Oryza sativa
  unsure (1)..(420): unsure at all n locations
agcttgccctcctgtgccatcagctgcgtcttctgcttcattacgtacctcggcttctccaaattatccggcttctccagggttctcgcccaaattcgccacactccgagctcagctaacctgtggaaggcaagttgccttttcgcggtgtctgatccgaagaacagccccaatccctcccccggaatttcacagccaagccaagagaattgggggcgaaactttaggctctgataccaattttgttagctactcctaacaaagacacaagaacagttggacacgagtggatacgagaacacgatagataagttttctctcgatccgacaggatcaagccgnncgcgacttcgccttcgccgggttcttagatcatacctttcgccatcgttctcctctggttaatacaatctcccacaa

SEQ ID NO: 62836 - DNA, 385 bp, Oryza sativa
  unsure (1)..(385): unsure at all n locations
ataaccgctgagctatatagcagacagtagattcgttctatgccattgggggttgaacgccgtgtcgatgtcttcccccgaccggtcagcgaccagcgacaggggaaggaacccggcagcgccaccgccggcgactacacccctctctcggccctcctttgccccttccacgccggcgtgagcggccggctcgctcccgtcggcgggggcgggcgagcacggtgcatggcgagcggtcgatgggcgtancagacaggcggagcagcgatggccgattaaatgtttcctctaccgtggcggcgtcgctagaagcacacttggctccagcttcgccacccacttcgccggttcttctgccggcggccgcataccgcgctcgccatca

SEQ ID NO: 62837 - DNA, 266 bp, Oryza sativa
cgccgctgcagctggggctatacacagcaacatttggtgtccgcttttattaaagaccatcatgagtattaccgtataatgctgacaaccggcatcattccttaagacagttctttctactgtagcttacataaacccggttattatatggtgtgtgcttcaaatagaggttgaatttggataaatcacttatacaaatgattttcgtaaggtgggggtttttgtaacttacaataacaacatggactccatgtacgctcttgtta

SEQ ID NO: 62838 - DNA, 403 bp, Oryza sativa
ataattataaagtgatttactctgtattctttatttttatttatggattataaaaggatattgattgcacgccatattactaataatgtctttcctctacgcgctggcttcgcaggttttagatttcaaataagtaatgtgcagtttaaccaaactagcatggtggcccgcgcagattgcgcggctagcatcattatattttctctcatataatagcatatatgttttctcattatattattcagatatattataatgacgacataattttaaattttgtaataactgtacaaaactactaatgtgtaatattcatattatattttatatacgcgctatctattaattatttttactatcacattttagctatttgaaaatatatatattgctatatggactc

SEQ ID NO: 62839 - DNA, 412 bp, Oryza sativa
agcttctattagtagggaccttgtataatttatgcgtgagagctcaaggtcccatctgcaaaaacaccaccgcgacgaacgagcgaagaagtgggaacaagacttctagagagagaggagagagatcgccgccggggacggagacgatggagacgcgacgagcaacctacagatccgccgcgctcctactcctcgccgccatcctcggctgcgccgcctccgcctcctccatcggcgacaagtgcgccgcctgcaaggccgatgccgtcagatcccgtattcttttctttctttatttttttgcccctctcgtcagttcatacgcgcacaattcactcatcctttggagcaccttgaagcagattagttcgtattaatatcgttttataccacgatgggaagacattagcat

SEQ ID NO: 62840 - DNA, 405 bp, Oryza sativa
  unsure (1)..(405): unsure at all n locations
cgcaatagagatgattgcaatgtggcaacacctagatatgctaaggaagntctgcatacatgaaacgatagcacacatcttcttctacgatgggtagtgtagcgtccacaccacacgctggaatattggccgacgatagacagtcgacggtggctgtacatcaacgggatggcgtatgtatcaaccgcgcgtggctcgtccttaaagatcgagcgtgaactagctgaccatacgccgccatgtcctggtgagagcgcaacgcggtggacattntgcttcaactcactatcgtcccgtgcaacgcggcaacatgatccgattgatcatgacagtccctctcgctggctgcggtgaccagcaatcaagctaagctaaattacactggggagtagttcatacttcctg

SEQ ID NO: 62841 - DNA, 451 bp, Oryza sativa
cctgccgcatgcaagcttccataaaagctagactaagcaatatagtaccgcgtattttaccttctgcttctggctgtctcgcaataccttctacagcttgtcctgcagcagtacctggctgtctcgcaataccttctacagcttgtcctgcagcagtaccttgaccaactccaggcccaatagaagcaagacctacggccaatccagcagcaataacggaagcagcagcaattagtggattcatgatgagttcctcgtgtcaaaaaaaagaaatggttaaggatacaatcaaccaagaaattcatatttctaagctctattggacagaagtaactaaaaagtacaaattgaaacgataatctgaattctccgaactgcttcgagatctccttaatcattagaggtttgggtactcattattctatatctctttctttccaaccaactgatc

SEQ ID NO: 62842 - DNA, 319 bp, Oryza sativa
  unsure (1)..(319): unsure at all n locations
ctatatatattggtggtattgaaattctttccgagnatatgagtacctactttacattatgatcatgttatactgattatacggctagcttatctgggagatgctttggtgcgggtataatgtttgcatatgcaattactctatgtcatgaccatgatattagagtagnatctactaatttagacatggcgtctagattatgggatatcattatctggggttatatgctgcggataagaggtgggcccctgatggtgacagctcantacgggtattccttcgcgccggtatataatcctaagttaatatcctggggagg

SEQ ID NO: 62843 - DNA, 437 bp, Oryza sativa
agcttctcgtgctcactaactagcaaatttcacgaaaagttctttttaaaattagacatttactcctattagtattacacatatatgcaaagtttcgtattcaaattcattaaattttagcagtaacaaaagatgaaaaatctgacagttttaagggtaaaaatctgtcagaattttatattttttattacggctaaaatataataaatttgaagataaaattttacatatagatgtaatactgtttgaagtatgtgtacaattttttatagaatttttcgtgacatttgctagttattgtgcacggagtgtgcacaaaaagtttgtatgcataggatatgttcctactaaaaagacatgaatattaggaaatgacctaatatcaaattattagaaggggtgaagcttcaaacttaggttgtctaactcaccactct

SEQ ID NO: 62844 - DNA, 347 bp, Oryza sativa
tacttctatatttatattcatatttgggaactacatgttaaattggtattggtgaactacatgttaaattgctaataacttgcataccatgtgtttttgttcttgaaacaaacagcttcatccacgaagtaagctgggatgaaaacctggtgaatgagtccttcccttgtgtggaggacaaagatcgtccagtggcctaagatcgcaacctggcaggctgcactaagggatgggctacttcaagcatgtggatctcctctcaatggcttcacatatgaccatgtttcttggaccaaattggtggcaccatctttatgagactggctaccgccacagcagtccactta

SEQ ID NO: 62845 - DNA, 431 bp, Oryza sativa
  unsure (1)..(431): unsure at all n locations
agcttcctcattgtctccacctaatgccttttttgtaactaatttggaaataataatgatttattaacttgatgtctccagacaaaccaatggatggaacatgcctgcctacatgtatccagcaagcagttcaagtactaactttgaaacgtgttgtaagttctcccaagaaaaaaaacaaagaaacttttcaatgtgttgtaacaaatttgtgttcttcagttgagataaagctacatctacctcaataggaccttcagatctctgcgtttgtttttcttaagtcaatattttgtgcaatataagaagggataggttacctcaaaatgtaccatccttcaggtgcaatcttcagatactgggtggaataagcagccactgatgcacgaattgacanaagctttgaaatcagtctcttcagatctgctgga

SEQ ID NO: 62846 - DNA, 287 bp, Oryza sativa
aacgatatatcttctacaatgacataggaagacgcgtttaaataaaccaatgtattttcatttttttataacgtgtagataaataaacgcccgctcattatgattgtgggtgtgctcgcagcctaacatgcaacacttattgaccgaaaagaacacgccccatattggatggtcatgctaagagcagaaaagacctctaaattatcttgcatccttcttttttttactatttttttaaatgtgcaccacgactacatggctggaatgattggtatcatgggcggttt

SEQ ID NO: 62847 - DNA, 432 bp, Oryza sativa
  unsure (1)..(432): unsure at all n locations
agctntctagttatgaatcgggtatagatctccatggggggggcttgtttacaattccgaatacgctattacatgtttgcgctagtttttgttgtttttgatgtggaaacggtctttctctacccttgggcaatgagtttcgacgtattgggtatatccgtttttatcgaagctttcattttcgtgcttatcctagttgttggtttagtttatgcatggcgaaaaggagccttggaatggtcttaactgaatattcagacaaaaaaaaaaaagaaggaaaagattccattaagacagttatgagtttgattgagtttcccctacttgaccaaacaagttccaattccgttatttcaactacactaaaagatccttcgaattggtcaagactctctagtttatggccccttctatatggtaccagttgttgtt

SEQ ID NO: 62848 - DNA, 428 bp, Oryza sativa
  unsure (1)..(428): unsure at all n locations
aacggnggggtctagcgagatttgagatatttgtacctttactctttgccgagatgtaaggggccattttatgattccatttcttaataccatgaccaaaatgaactcccgcttctatcatctctttcaaattgatgttccaatatcttcttgtcattttttccacacttccttttgaatttttcttttttttcatcctacctttccattacgaaatttctttcttttcgaagattaagaaagagccgaaatagcttgaaataaataataattgttccgatggaaccttctacatggtataagcataaccttaatgaattaactaaacttcttttttaattaaaataaaaatagaagatctaacctcttatcgttctaaggtcaaaaatctatgttaaaagtaaaaaatctgccttatgtattcttaa

SEQ ID NO: 62849 - DNA, 429 bp, Oryza sativa
  unsure (1)..(429): unsure at all n locations
ggggggagcatacaggcctttattgtgaacaacgtgttttcattttcagatctatcaagggccagnctgtgcattggctaaaatgatatccaatctatatgcacccacaatagtgacataaactttggacctaaggaccagcctagttaccttttgaaaaggcatgatatataagaaaaatactatgataacaataagtaaaaataatgtgtacagtagctatacgacaatggcggatgtatgaagaaataacacgagggtctgaagaaactagacaaggttgtagccccccttctattaacttatagcacaaaaatttattggggcttcgtggggctgccatggtactcatactattagaggaggctcgagaccacgcgcccatgctacatcagcccctactagatgatattacgntacataagatga

SEQ ID NO: 62850 - DNA, 358 bp, Oryza sativa
cttatgtactgttcgcttgagaaaaataagccactatgcgtgcagctctgaagcccaaatagtagtaccacactggacgttgaaaccgtatatgccggaaaatttactggcgaacgcacaatggaaaaagaacagaaacttttcgtaccggttatttaaaaaacgcacgctcgtatgataaaaaatattaaaaaggtgccggtcacttgaaaaacaatgcctgtatgctttccggcagtttacaaaatagatgttggtctaaaaataatattttgtatagtaggaaaacaaaacttaataccccccactatgggatagaacctgcaacaaaatatatgattttgaaatatattgtttc

SEQ ID NO: 62851 - DNA, 389 bp, Oryza sativa
agcttgactgaatttgagagcagattttttatatggaattacaatgtgttgaaatggggtggagtaccctctcccgggcagttggcttaagtagtacacccacaacggtcaacaatgacatgtgggtcccactagccgttaccctgccaaaagtggcaagttaccgctgcctggccgattcggccaaacccctggtgggcccaaccggccccactttcggacgttggatttcaacggtcagtgtggacatggcacaataaattttcgttgaaaattgtattttggtttgctctgagaaatctatttgaagaatttctcaagatcaaaaatcctaatgcaccttgaaattcaacatgtgttatacaaagatcaatttttgaagcaaaaat

SEQ ID NO: 62852 - DNA, 395 bp, Oryza sativa
acttaagacttaactatttatttcaccgcaccctattagaagtgtgcaggtgaaaatggattttaacattttaagagatgtggtctatatttctctttctaccatatatatggtaccatgatcctcacggaggctcattggttaactcacattaattattctggaaagcgcctcgataaagagagacttcttatgggttttaagggcttttaagaggttctaaaggttactggaggtttttttcttggagaatttgatttctcatcatgctaaagataccaacaggtatttacaatgcaaagaaattatgatatagctatgatcattaaacccgctcgatttacgcacgacaatttccatcaaattaattacttggttctgtactacttctggct

SEQ ID NO: 62853 - DNA, 384 bp, Oryza sativa
tcgccaatcatgttttttttcccaatttgtacaaggcttcagttttgaagctagcaattcgtctactcccatcccccagagaatatgacacttcgaatttgactagttaaacattccgaactttatatttgtggggaaacattctgaactttgaccactacaacatagagaactatcttacatttctcatgtcgaaataatacaattaagtgactaaaaaatgtttcggtaacacaatgtattacagttactttgacggtcaaatttacacactagcgatcttatcatgtccaaagtgtcatatatatgttgacagatggatctagtctattggtttcatttgtttattcaaaatgggataagcatacaacgcggtagatacca

SEQ ID NO: 62854 - DNA, 425 bp, Oryza sativa
tttaacagattactttccttaaccgaatatagcatgtatccaactattggcgacgtggtgattctcttaagggcttacgaaatttcgatgttaacaacttcataaaattaacattgccaaactgttttggtctcattcgcataaactagacaagttcgtgtactgaaacgaatattttacaattttatatactaaattgcattcaccttacaagattgtgtatcaccgatgcaaatatgcaatttactctttacttaaagtttacagcttttctagaagaacctgtttgctgctcaccacagtaaatgctatccattttcagcacttcttcattctcacgaacgtgccttctgtcttcaccggccatcattgttgagataggtgagggcctcatatctaccccctccgtcccaaaagaatccaat

SEQ ID NO: 62855 - DNA, 394 bp, Oryza sativa
agcttgcaactttcttcacaccttgggttcttaccattgaatcggatatttgatagatccaaaactgaagagatgacaatgtacaaaaggtcgaatcaaggctgccggatatgctgataccgttgattgacaaatatgtgaggttggtgcactgtccacagtcagacgatagccgaccggtgagcttgctcccggatatgtccaagtattccaagctggggtgtatgccgaatgcatctgatatgtcgccggtgaagtggttcccgtccagccgcacccggtataagcttgtgcagtacttcacacatggcggtagcgtgccgcttgagttgttgtggttcgccgcgaagcgctacatcgcgaaaccgtcgcagatgtggcgcggcagctcacc

SEQ ID NO: 62856 - DNA, 333 bp, Oryza sativa
  unsure (1)..(333): unsure at all n locations
ttcatcaattttgtggggaggcccacgctatcctgcgatttcaccatatccaatcctccttggtatcttgggtaaggtaccgaggtggtacctggtacattggtatcagctggtaccctggtatcgactatcgactgatacctggtacaccctattatcgactgatacctggtaccctgggtatcgagctgatacctatgtatcaggccttggtacctaggtatcaggtcttggtacctgggtatcgactgatacctggtaccctgggtatcgagctgatacctaggtatcangccttggtatctgggtatcagtgtgatatcccaagagaga

SEQ ID NO: 62857 - DNA, 338 bp, Oryza sativa
  unsure (1)..(338): unsure at all n locations
tttcaagcatacgtttctagatgttatgacgatctctagacaganggttcttatatgaatcgcatgatgaagtaccacatgagtggatatataggaaaggaatccaaatctgccgaatcgctcatgttatgatcttctacatcctatgtctccgcgttccgtcatctggcttatgttcttcatgtagcattcagatcgaatgactctatgaaattacgtcgatacttctacatattatgggtaacgtatgagacatccctattttcccccgggggtcttaattaccactgcttagctttcaattcgcctctgaccatcaaattaaatgtgaataaccc

SEQ ID NO: 62858 - DNA, 259 bp, Oryza sativa
gcatctaacggtgaccccttctaaagaacccaaacctcccgggacttaaatatattccgacatagattaataacctggcactataaatatcccatatatccccttaatttcaacatcgattatacttaatttatgtgggtgctttagcgacaaaatatattaaacataaataatctattgtaccaaatgccttcttatatattggcacactatttacggaaactattatctaatcacttgccatttataaacctataaa

SEQ ID NO: 62859 - DNA, 330 bp, Oryza sativa
cgcctcaccgcaagagagagaacctgtccaccaccttgtcttcagttagcttcgaagattcgcgtgatgggtggagcggtgcccgatcgtgctgaacctgtcatcgacatcataagtgatgaggaagaagaggaagatcctgaagaaagagagccagctactccagaggaagaagatccatcgcttcgttccgacgcaaggtgggattagtcgcttagttagatcgttgccgtagttcgctgtgttagattgcttgtttaagattgcttgtgagtgtgtgggttttaattgttgcttacatcaatggtgggatgtaacagcatgagtcta

SEQ ID NO: 62860 - DNA, 406 bp, Oryza sativa
  unsure (1)..(406): unsure at all n locations
ncagcttatcagtttatcctgtgagcagtgttgcgggtgtcaccctggaattagcccgggcgattgatcgaataaaagtacgtgtgattaatggtaaaaaaaaccgcacgtgtgaatgcgatccaacaacacctggttccaccacacatgcagttagttaaactgataatcggaagaccgattccattcaaaagagatcaggtagttaaatatttcagttgatcattgctaaaacattatgtcatacatgggtgaaaaaagatcactaatagaaatatgaaccatgccaccctatatttacaaaatttgagatatgccacccgtatctcanagacatgtatgaaccacatgagtcaatgacatgtgggtcagggtggcatatcacaannatttgtaaaattgtgtg

SEQ ID NO: 62861 - DNA, 354 bp, Oryza sativa
  unsure (1)..(354): unsure at all n locations
ctcatacacttaatgccataaatgctcggattaacatcataggcatatcttttgtatttgaacatgagagacgatatgtttccacatacagcctccttgtgctcatggctgaaggtgcgctaacttttttgattaaggttatcactagcaacatgcctctgagtctctagtagttcatcacgacctttatttgccatctcctgaacttctttaagcttgtcaatttcatcatcagtatctgatagataaacctttgccttccttttgcgtttgcctttaacattacgttgcgccttaacagattttgttcctactggacgtttaatatcttcaggactgttangagtggacatt

SEQ ID NO: 62862 - DNA, 412 bp, Oryza sativa
  unsure (1)..(412): unsure at all n locations
agcttcttgatcttaccaactattacatttaactgagcttgagatttgattttacggtctacaaaacacatttataataagaatttgctgcattaaagagaggaaagttcaaattgtcagctggcagtaccttcaacctccttcaaggctgagtccctttgcacagctagttctactttgtctcttttcaaggcttcaatctgtttctccatttgtgccatcctggtagcttgtgctgtttgaaatccaaatatttgaggatacggntatgacagcataaatcaatggaatacgtctggaaggttaccttttgatgaaccacttagctcgaagttngaatcctggagctgggcaattcgngcccttaactccttttctgtctttttagcatactccttggcctcatgcagct

SEQ ID NO: 62863 - DNA, 386 bp, Oryza sativa
  unsure (1)..(386): unsure at all n locations
tttcgtggaaattttagtcaactctgcagctngggcagtgttattgctgacaacaacggaatttctgaagaacaagcagcagctgctggcctcatagctgatcttcctccgcgggactcagtactcaccagacgtcttctacaagatggggcctttttcacaatcataacacaagtgacaatggttcggcaaggggatattcgtggtggccgctttgtcaatccatttcttgaaggtctaggtagggtagtttcccggatcacatttatcttggatgatctagatatcattgatgttgctcgtgactacaatctcactcccctctttactgacctacttcagatgaatggactcgacactgtccagatttgctctgctactgcact

SEQ ID NO: 62864 - DNA, 278 bp, Oryza sativa
  unsure (1)..(278): unsure at all n locations
gcgctagcggngacgacagcgagcagaacccacagttgcgagctcgtactccaccgcccccctctngccgaagtcttatgcgagaggacgcgctcgagggggtctaaataatccggactttcccgcgcgcgggcgattgacaaagaccgcgaaacggggaacgtcgtcccctcatctaccgtgatgggagaacgccccaaggcgcgcttcatgcttggggcgccctcctacgtaacccgcccgttttccctgtccagagactccaaccccacgttggc

SEQ ID NO: 62865 - DNA, 421 bp, Oryza sativa
gacgatgaaggcagttaaaatgttttgcgggacctcttttactttatccacaacgagtgctgtcatatccaaggacggttcttcgacccataaggcaccctagcgactagcgatgaattcaagtctcttcgggagtggaacaactcgatgccataatgtatttattaattagatagcgcatttgaaatgacaaatattaaaaatattgtaacatattgatgacacttttcactaatgcaatatatgtatttctgacaatattaattgtatgtgagttcctaatattatttatgcataatttaattagttgcaacattattgataaaaaatattattaaaaaattggcgtgtattttcctacgcgacgaggtcctcttattacaagcgacttctacccattttccaagcggagcgtcatgct

SEQ ID NO: 62866 - DNA, 391 bp, Oryza sativa
agcttaattatgaacgctagctaaaacattttaacaggtggttttttagagtaatcagtattcaaatacatgtgtcaaaaaatatattcattgcagtcactcacatataacgatccagaaatgaagaaacaacaggtggagtaatcccatgatgcatgaagtagtatacttgtaccacagattacaattagtagtgctgcactactactaatgaacaaggattttggtatgcatgctatcttgtcaggttaaaacatggcaactcattatcagtacaaaatcaacattgctcactgactgccacactgttagcatccacaccaacatcaggcaaggttatgcagttactaaaagtctaaatgcataccacaatctcactggaacaaagttg

SEQ ID NO: 62867 - DNA, 404 bp, Oryza sativa
agcttgcacatactgaacaacagtggctctattgcgaggccaagcaaacagctgtttaacgcgctgataagtgacttgtattcccgaatggcctccaactgccgttgtgtgaagattagcaagaattttctggtgaacttctacattgtgaccaacccaaagtctgttctgaaaataaagcaccccattgtgtatagaaaaaattggtactgctccagaattgatacagagagtttgtaccttgctgcacgcatcttgatcagaggaataaccggccacaatttcattgatccactctggaactgcaactgataaagctgagagttcacctgatcagagcctggataatgagataatgcatctgctgcgtttgtgtccacccccttcttaaaaataatcttata

SEQ ID NO: 62868 - DNA, 334 bp, Oryza sativa
ttcattttgtccataatattacatcctcttttattgtcactggaggaatgttcccaggcgtatttctgatgccatttattgcttaaggtctccaatttacatgatctgctgcaatgtttgtgcagcttttgggatgaatgttggtggtgtgccatggactgagcagaataacccttgcaatctagatggcttcttcaatggcatgttaatatgcgccgggatcttggtgaacctgctgctttgtttcctatttacttcattgatttacacgtgtcttgatgggaaacccccgtgcactggtccctaccattttcagtacaagagacattgaaac

SEQ ID NO: 62869 - DNA, 425 bp, Oryza sativa
agcttgccatgcagaaatgggtccagaattgcaggcctcttcagagttgagagttcagacatgctgatgctgaattgttgcatcagttgatctgcagctgcagaattggagctatagccaacaaccaaccaggtgcagttcagttcttggagagaattagcagcagcaggagaagaggaggagatcgacatcgatctctggagtggggtgcaagcgattctggagcactaagaaaagaaaaggcaagcgaattgaaaagaggagatgactaaaagaggtagtgtgatagtgcagtgcaagatggaggaaggttgttgctggtatggttgttgcagtgaacacgtcgatccaaccctacactgatacggaatgctaagttgctcactcctacatacatatgcatactacctgtacctacattgata

SEQ ID NO: 62870 - DNA, 353 bp, Oryza sativa
ttttattgaccttcctcccttgggaggtgtagtcctacaaagactttcatctctcttcaaacactttctcatattcttcaagggtgatgttctatttcaaaggaattagtcagcaacgatctaaggtttgaacacttaacggtgaacctcatcatgacaagtgaagttaaatatagagaccaacctttctctcttcttccttaaaaacctctggcttctctgcttctttctcagactttcccgaaaccctagaaacatgcttcttctttcacttccctctagcggaaccgctaatagttgtgcgcaccttcttcttttcaaggtcacctccattcttcttccaattgtcttgc

SEQ ID NO: 62871 - DNA, 420 bp, Oryza sativa
tagcttgatgaatttattgtaatacgaatatttggccctttcatgaagcaatttgcaagtactcccaagacctattgctaccttgtccacaatgatcccattatgaagcttgtatgttgtaacctggaaaaagctcatgcttcctaatgttcgaactgtataattgcctgtggacaaatatgcagaattaaaataggaaatgtaagtgcataccgaattagatggaagaatgcagtcgttgttcaggataattcatcagaagtgacaaatcttctacagaaaaaagtgaaaatacaagctgaatctatcccctgatgctagtctgatataggaggtaaatgtatatagcagtgtatgtcctcaatcatgacatgggagttgtgtgcaacggttctcgaatgcgaaaaaaaatgcactatt

SEQ ID NO: 62872 - DNA, 339 bp, Oryza sativa
tcaagatggcatttgcgagagccatcgtatttctagtgtatatcgcctttctggagctccagcttggagcttgctatattgatctataccccccccccccccccaaaaaaaatccaataaatgtggcatttattttgtatgcatgagagaatttaaaatttcatattaatgcctgcacttgatacttataattgtgtcgcactttatttttgagattttacatttatgcactttaaagtggaaccgttttctgttacttattatttttctggagctggcaggaaatgaacatgtttttttattatatttatgtgaaagcacttgtttttaacttatttt

SEQ ID NO: 62873 - DNA, 317 bp, Oryza sativa
gctatacccggtgtcgcgtcggtgacgactacatactcgacttcgtctttggctggccataatcaaaagcctctgaacttctgcttcataagctaatgcatctgaactcctgcttttgacggttactatttcttcggcttgatcttgtaaatttatctccctgtaagttatctgtctgcacttcacgctgtgcattgtaacttgtgcctatcctaaagttgccatatggtctagtttatcctgatcttgaacagagatgaacataatatgtaaatcgagagttgcctgagagtaaccaagccagcttatttctggaa

SEQ ID NO: 62874 - DNA, 404 bp, Oryza sativa
  unsure (1)..(404): unsure at all n locations
tcgcccttngnctacgttggctctggcttcaacgctcctttcatccttatcgggcccgacctcaanggcaccctggagaggagcgtctcccgcatgctcgtggctttcaacttacttgtgccatgggacgggacttcgaccctcttctggtcgcaccagtggattcatggtcattatccggggccttcctagattcggacctcttccttgcagtgcccccgcaatatcgagcaacacgcacaggagcctccgcccttgctgacaactccttggtgagggacatccgntgtgccctcacggtccctgtcatctctcaatacttgttggactgtgatgcagtgcttcctatccagctctcttctgcactgaggacagtctttgtttgcgttggataggcaataatg

SEQ ID NO: 62875 - DNA, 363 bp, Oryza sativa
cagcttaaagtccaacttcgacttccttctttgatggttgagggaaagattattctttgcgaagatttttgcactgtaataaaaccttcagcgtgttttctggctcttattgcttttcctttgaactacgaggtgcacctcaaatcctcaatacctggtatacctggtatttacagtggatgatcgtcatgtctgtcagccttcatgtacaacaggatcatatgttgatccaaaagaatcaatccgacgatctatgaaatggcgcattctttgcgccattcaactgcatctttctttttctctgaatttggcggactgtttcacaaatcaatagattcagctttggcactccattgcttgtca

SEQ ID NO: 62876 - DNA, 387 bp, Oryza sativa
  unsure (1)..(387): unsure at all n locations
cgtntgaanggtcgatctctagtgggcttgattggggctattcatgactctttgattctatataagaggatagtcttaccattaattgagacttcacacgctcttttggatgtatattgttcacgggcacttagctcatgatgtgtaatatggccgtatgcatttctggtcgggagaggccacgagattatttctttatctgatctaaagaaatagctagaggagtacccgttcttgcctcgagttttcataattttcctcaacaattgtgagtaactttgtctttatccacactataccactgaggtagaaattgtttctaggcaatatatatacactacgccggactacgtcatatatgacgggcccaaaccctcacctttgacg

SEQ ID NO: 62877 - DNA, 415 bp, Oryza sativa
agcttcttgatctcacgatcattgggtatacaaacacgtccgccgtaccagatggtcccatgttcatcttcagaaaacccaattgcttttcccctcatcatattcttcttgatctcttggataccataatcacctttttgggcttctcgaatttggtaaaggagtagaggtttcgcccctaaggtcactatttagccataactaactattcccaaattcaaggcctcaagctctcagcacaatccaggaggacactgttcatagatgatagcattgcagtaactcttccgactcacagcatcaaccacaacgttaactttccccggatgatagtggattcccacatcgtagtctttaatgagctctaaccatcttctctgacggagaattagatctggttgagtgaatatatact

SEQ ID NO: 62878 - DNA, 331 bp, Oryza sativa
  unsure (1)..(331): unsure at all n locations
ctcagcttgtaacaatctcatgtctattgtgcaactntcgttcatcaatcataatggaaagatcaggaagatttttcacttttctaaacctttcatctttacacatcttagtgaggaagagtacttggctaactaatacgtgtacatgtgcatatattgaagtatacttgtttcttgataaaaaaaaacttgggtattcctggaaatacgtaggaatcatggtagctccgcccatggcactacagccctgttcccccaacaacacaaacaagctttatctacttgctgcacaagccttcctaacatggaccaccagcatgaataattagct

SEQ ID NO: 62879 - DNA, 407 bp, Oryza sativa
agctttttgtatgacgttgtatactatgttccaccacctaaaccacgctaaactatgggcgcgatacagcgtgtggcgtgaggtggcctgcattggccatacagtgacattaagacgtttctttttttttattgtcactttttttacacttagagaaatgaataaggttgtgttcggttggaaaccttccctagcaagtaaaagagctatggattagagtatgattaattaaatattaactaaaaatacataaaaaataggttaatatgatttttaagcaactttccttagttttttttctaaaaaaattgtatcgtttagcaattcgggaaacgtacgtacggaaaacgaagtaatagaagttggaaagaaggactataaaacacacgttaaggcttgattggaac

SEQ ID NO: 62880 - DNA, 434 bp, Oryza sativa
  unsure (1)..(434): unsure at all n locations
agcttgaaagtgtgtgtgagagtgaaggagtgaagctccttttatatggcatttatgatggttgtgagaaggggaaatgtccgaactgccccgcaaccgccattaggagatcatctggagcgtccacgccaaaccccaggatcaacggtgaccgggagggttcggccgaacctgngctgggccctcccggcctggccttcggcctgtggactccctggactctcctctgcccatttctcaggagtttgggctgagtctcttggtatttgatgaagttcacaacccatccttgtacggatacttgtttctcctcactntaatcttcgtttccttccaactttaggggttatcacctgcatacaaatatacacaaacacttgtgaaatatgtgagattaagcgcctatcactatgttggatgntttattatatgaa

SEQ ID NO: 62881 - DNA, 299 bp, Oryza sativa
cgaacttttcgagcatgcgggtgtggcgcacaccacccctggacgcgtaaatcaccgcgtgtgcatggatgcatgggatggtatttttgacttggcagaaccgctgaatggactagcgaagcgacttatcatcctcctcgctggaccgcgagcaagtccgcttcttttcctgggcgccgatatgtgcccttgaaaatcatggggaactgttggcacaaatctttcccagagtggacctacacaggtgagatggtcattaatcatacccgcgcctgtcccttcaaggccatgtgaaagaa

SEQ ID NO: 62882 - DNA, 434 bp, Oryza sativa
agcttctctgatcctactagatccatgatcatgctgaatggtgtatgtgttaggattgtacagggagcatgccctatagatattcttctgttttctcccctaatatttttatggctaattgattatttagtgttgagaatatttacagctcatttattatattagcttgatcatctcctctttaattctttttatgcgaagtgtggcaaaattttcaactaggatgtatcctttttagctattcacatatacataattcggctagttagaatattatgtagcatgaaaaataaagcaagaccaccatgtatgtcaaattgtgcattctttgttatataccaaattctgaatgagttggaacacagtatgtatgataatctaagttgcgaggaagaaatacctctgttcacctgataactggtactgtgtcgtac

SEQ ID NO: 62883 - DNA, 421 bp, Oryza sativa
taaccataaaaatgtagatcacatctatatctatatattctatataaggttgtgactttttttctccatccgatatcgtttggaaattttaaatattgacttattcaaatagatccgagaccttgtaacacattttcggacctcgaaagaactttaaaacgagaagtcatcaactacaaaattgtagatatcatcaagctctacaaatctgatataatgtttatcttcatccaactttatatgaaaaagttaaataaaaaaacacatatatgggttacatcatcataggtgccggttttaattgtaaactggcacctatatgtagagggtgagttgtagtatgctccgttcaatgctatattattaactctcaatatgctcgggccttcagaagttgacagcatgcttgagctcagcaagg

SEQ ID NO: 62884 - DNA, 360 bp, Oryza sativa
  unsure (1)..(360): unsure at all n locations
tgtagctgcgccgaccactttgctgtgcaaatggaccaaatacaccgaaacaaatcggccggccggtgacttttcaagacggcaccggcgcaccagttgctcgtcaacaccgtgttttctttttatcatgggaagaaactcaactgaaatgctcccagctaggcatgtctgtactatgcactgtcttgacagtgccacgtacacagacttcaacgaataaccgggttctcttttgatagctngcagatatgagcttttctgatctgtgacgcctgggacagcggcaataatatgtacgggcaaattacgcgccgcaacgcgttactaactaggagcctgtgatgactgacataacatata

SEQ ID NO: 62885 - DNA, 306 bp, Oryza sativa
aaaataccaaattatgcttcaactttctagtgcctctatatattattagtgattgctgagtattctttatcacaggctcatacacgcaccgatggcaatgcttcttacatggctccacctgttcattatgcgcagtatgacaaccaacacacccatgtgcaaagatgaatgatgagtcagggttactttgaccctgagtgtaatcctggcattgtcaatgtaaatgctgggtcaccaaattaaaggtatttgccggattctttccatggaagtgaaggatacactgctttgccctattttttcatt

SEQ ID NO: 62886 - DNA, 329 bp, Oryza sativa
tcgatctgacgcgaatcacagcaggcgttactttactagcttggcatcggggtctcaccatgagtttgtgctcaatcacctccctggggaccctcggcatgtcggacagctgccatacaaacacatctgcattgtcgccgatgaaggtgatgagcgcgaggtcctatttctcaaccagtgacgccccgattttaacagtcttatcggggatggcactggagagcagaacgatcttgatcgcgctgtctgggttcgaccacttgttggtgctgttcactatcttgtgtggctcaactatgcgcggcgggttgggagcatgctcaaccatg

SEQ ID NO: 62887 - DNA, 211 bp, Oryza sativa
tcagcttctacctacgcgaatttgattaacctacttggctgggctggaaaacacatagcctacattattcctataacaaccggatcatgaatgacctcttatgttctggatgtaatgcacccgagttaattacatgggtggctgcgttgcttctacaaagatgttgaaccctcttccttgttttccggcacacgtttttaaactgaaaatg

SEQ ID NO: 62888 - DNA, 417 bp, Oryza sativa
gctttgccgggacgcgtctcatgtgttgtgacgaagcacatgtgttgggcagatgcggagtgcgggtaaagtgtacatccactgctaagagagtaaaccaaatctattcgaatagccgcgctcgcggttattgagcacctggacatgtattacacttggctagattctagattcttaacttgtgtgggatgggatattgcatgatgatctttatgctgttggagccacttcctgagaggcgggaaggtggatgccctcagaacaccatgacaacttaatggcgggaagctatccttgggatcacaatggatggtggacagaaccgccattgtttaatatgaacactggtactaaattttgatcagcctatgctaagtcttaggcttgcgaatagaaatacaaaacgttgctttgcgc

SEQ ID NO: 62889 - DNA, 384 bp, Oryza sativa
ctgaccctttgttgtgatggtacttcttcttggcggcattttctttgttattgtccatcatcgctcgcccttgtagccctatcttgtaagcaacgaactcgtaccaatgatgccttagctttgggaatacgtccaagttcggtgtcagccacttcaggatgtatttcttgtagagatctcccttgaagctctcgaactgttctggcattatcttaagagaccactcgttcactatgttctccgaacccgcagggagcgtaaacgtgtcgagcattggggaccacagcatctttatctctgaattcgggacgaagctgtcataatatccgcggtgccttgttctgcgccatgacaccttgctgacaggcacgttatccctcacaa

SEQ ID NO: 62890 - DNA, 340 bp, Oryza sativa
taacaacaaaggcgaggggttcatgattattcactttaatacaccaggggaattccttctgccatgcacgcagggttggacacaaaacacgcgaacgaattaaaatgcctggaacgggaaaaatgaaacatgtcagtttgactctgcaggttgagaacgacctgaaacatcagcttagtattggcgcattaaaacctggcgcacgcctgattactaaaaatctggcggagcaattaggtatgagtattacacctgtgcgtgaagcattattacgtctggtttcggagaatgcgctttctgtcgcacctgcacaaagcatttacagtttccggaagtgggg

SEQ ID NO: 62891 - DNA, 344 bp, Oryza sativa
tggagtgtgcaaactataaaacctgagtcacaaagtggaattgtgaagttgtggaattcatgaatgaccataattaatactgtatgctttatgtaaaatttatgcaatactgacagcattacgcactaacacatccttaacacactcaaatttaccgagaccgaggtggaagcattaattgtctgtataccttaacacaatgtacttttacctatatgttactccatactacatatactgcttttataaatgattgtaaatgtgtcagaaatgtgatatcatttcatgttatgatcagaatacccgccctgcttacatttgacaatggtgacagtccagatatg

SEQ ID NO: 62892 - DNA, 340 bp, Oryza sativa
  unsure (1)..(340): unsure at all n locations
taactatgtgatctagtgactcttccagctctttcatgaactgctggttcttcaagagcgccttaccctttgatacgtacctaaaacatttttatcctanacttgagaatcatgtgcaggatattcataccagtgttttaaaaagggtctacactgccatattcctgaggaacatgtgtgccaaccttgtcctgcctatgccgcgtaagcagctgattatatctcataagcagccgataatgccacataagcactacaaggtgaggtggtcaccccaaaacgtttaccgcttttttaacatccatttagactacgttcacgcgctttcactatttgatta

SEQ ID NO: 62893 - DNA, 406 bp, Oryza sativa
agcttcactccctctatagcatatagaactatcatcaattattttcggccaatgaaaccccactctcctaagcaaccaatttatcttatgggccgactgatgaattccacaaatccctacatgaacttctcccatagcaactctagattgatcattatccaatcactttaataacactccatctatatttcggcgatataactctccatcaagcaaagtgtattctattcaaaggaattctccaagctatttctaactcatgagcacaaatgtccggattcacaattaattctgcattttatttaattgtaacgtgccccccagcctcctgtctgggatcgatcagactggccacgcaatgccggttagaccgctctgtctgcctggtcagaccggccatgtagag

SEQ ID NO: 62894 - DNA, 406 bp, Oryza sativa
  unsure (1)..(406): unsure at all n locations
agcttaacatgtatagatgccacatcattatccactaacaagatgccacattatcatccactaccaatcattaaatntaaacatcatgtaaacatgctatattatctatgatttcatattatataatttattaaattttagagcttttaaaatgcaaacatgttaaatcatcatcccacataattcacaaaatatttcaatatatatctttattattttttataatgtgctatttacctatatagttcatcctcactaattagntaatgttatttatctcttctctctctcattaagccatatcatatcaattgtacttaaatgattaatctataagcagccaaattatctctctcattaatctatatcaccttaattatttttaacctttatatgattaatctac

SEQ ID NO: 62895 - DNA, 451 bp, Oryza sativa
  unsure (1)..(451): unsure at all n locations
gtcacctgcggcatgcaagctttngacttagtaataaatgtgaatgttttatgccatgtttgatccctactgagttccacatatcaaaccttagagtagaaattaaaaaggcaaatcttgtgaggaattcatattgatacacttggagagactgagtggattatttgaggaacttggctttcttttgcaaaatcatttgaaaactttcggaataagagttgaataaagattggatgattggtgctctaattgttgttctatctttcaaccagccaaggcgaggagtagcagtgtcacgtgggaatcagggataaggataagccaccgcgccaaagattatttaatctgagagagagtgcatataccttgcacctgtatcttagagatatacagcatagtagcaactcctcagcacccgtacaaatgtgtgaggcaggttatgaaccaactg

SEQ ID NO: 62896 - DNA, 392 bp, Oryza sativa
tcttaggtggagttctggcttataccccagttgagctcctgcgaagatggagccggaggcccgctagtccgctgctgtttattcttgattgacaggccttatgtgcctgtgtaataatgtcaacattatcgatgtaataaagatgtgtcttttatatcatgtttgtatggtgtaccccggcttttcctgtgacggcgattaatacactatcgttcgggaaaaggcaatttttccggtcgcgacagtctgggggctgggtcatgagccatccgcgcgccttgaccttgagagccattgtgaaataattctccctgacctgtgtcggccccacccatacacccggcgccacgatgatcatggtatataatctgaagaactccgagtgattgatg

SEQ ID NO: 62897 - DNA, 382 bp, Oryza sativa
  unsure (1)..(382): unsure at all n locations
tggcattcgatttactcaccgcgttcggattaccacccgattcgatagcgataatcggcgngatcaattgtggatcgacgccccaggctgcaccggctttctggcttattggcatccactgcatcgcacgttgcaccggaactttcgcgttccacggcgggttcgtatagtcatgcttcgatgaacaacccgcttataacacaatcaaaaaggcaaaccatctcaatttcacttcttctatccttatagcctggaatcgccgctgaggtgacaacggcacacctaagcggcatgatatacatttccgttctgttgtcagcaaggaattgccatgtctctgtttcacttaattgccccatcggggtactgcattaacaacacg

SEQ ID NO: 62898 - DNA, 330 bp, Oryza sativa
  unsure (1)..(330): unsure at all n locations
cgcaagctggaggtctcccgacgtggctgattttcacgggctgggatattcggtttagtaatgncgngtgggtaaagtgtaccccctctgcagaggttaacaaactgttcgaacagccgtgcccacggtcatgggcggatgtgaggtgattcctagcgtagttttgtttgactactgcttgtgaaattgctgttatgaaatcgggttcgatgtttgaaaagaattcgcaactgacgggatcagctaggcccgggtggccgtttaaaaagttgttggcccgggtggccgtttgaaaagatgttggcccgggtggccgattgaaaggtgttg

SEQ ID NO: 62899 - DNA, 307 bp, Oryza sativa
actgataagggaacagctgcaaagtactcttacaactattccatctcaatattggaagcataagaggtgcacaaaaaattgaaatgcgggcacacgctgttaaaataattaatagaatttatattccccaacaggcatgtcatgtataggaattatgtgccgggaacttggtaaaactgtacaaatttccaaaccaaactgctagtaaacctaacattttgaatggctttcatttcagagtgaaatattgaaaagatgttatgagatcatgctgtcaactgggacgtactcttggcatgcatttgtg

SEQ ID NO: 62900 - DNA, 417 bp, Oryza sativa
agcttggaagttattcagcctgacaatttctttgccggattgaaagtaagagctgtactgcaagaacaacatggatatatgttgccacatcagtaaaaaactatacagttgacactacacctaatttgaatttactactggagaactcatcttttgtgggccatgcaaaaatgatattagtcctggttcgaataggaaacgggactaaagatcatttttactgccggtttaaaatcgcaatgggactttataatttttggtcccggatcactttctgtcaggggcagggttggaaatttcggactgaaatttccgaaatttcagtcatttcgaacctctccgatacgatattatttcggctgaaaattttcattattataatcttctcatgaatattggtaatatttgttcaaattc

SEQ ID NO: 62901 - DNA, 419 bp, Oryza sativa
tcgccgcagcctccctcgggatcgcagctgcgaggagaaccccatccacccctcggttgtcgtctcccgtcactgaaaagccggcaccaccgtggacagtacctcgtcgccgtcccgatctcgtcgccggccatcttccgtcgccatctgtcatcgcgtaagtgttggtaaggaccggcgcctcgcgctctttctcccggagccctccgtttgcatatttgtgccgtggttcgccggcaaccgccgctcccatgccgtttaccggcgaaggtttttccctggggccttaatccaatctaacctaaccacgtgtctatctagcgttcgtgtcgtctcatgtcacgccccgaactagtcccgaccggaactagtttggtgcgtgacaagaaatggtatcagagccgactctcgcggttcac

SEQ ID NO: 62902 - DNA, 405 bp, Oryza sativa
agcttgcattaattatctaagttcccgttacttgctgagtacgaaagtactcacccttgctctatataaatatatatatatagctcctccgccctgaagagaagatatagtaaagtgaagattatggtttcgtcctggtttccagccgtcgcctgtggtgttgggtgttagtccgttggttccgctgctgctgctgctgttggtgtttcctcgtccgcgtcgtcggttgtaatctcgggctgtctgagctgcaacctaagttaaggcaaataagtcctctatttagtttaaggattgctatgattcatatttgtcaccgtgggtaccagcactatgtactgcgactggtaccgtgatcgcagtttcatatgaagcaggtcgcgcccgttttcctacgacacgctc

SEQ ID NO: 62903 - DNA, 195 bp, Oryza sativa
  unsure (1)..(195): unsure at all n locations
tctncaaatccagccgtgcaccagcacggtccgcacccctatggcccgggcgtatgcccattccatcgaacaactccggggcgctctgacctcgcccccccgctttgccgctttctgacaaaattccgcgccctttttggtggcggcactgaaagataggagccgangtgagggggaggatgagaaaatgcgggg

SEQ ID NO: 62904 - DNA, 378 bp, Oryza sativa
acctgaggcatgcagcttgcaaagtgaggttgaggccgcttctttattgtcgaagaggacatcctctctgaggcgctcggaaccaaagaacatcctgtgccgaactcggggaattggtagcgatgtgccctgtaagcatggactacctgagtacagctcccaatacaggaaacggaaagtctccaaagaagagagggacgctcgtttgaaggcccaacttatagttgaggtcattcaagaactataagctaccatgaatgcaacggtggaagaatgggttaacaaggttctcgccgacatgaatataccccgagtcacagcacctgctgtgcaaccaactcctcgtgtacaacacgacgcgagtcctgcacagcatag

SEQ ID NO: 62905 - DNA, 409 bp, Oryza sativa
tctccaatgctgcgtgcgtcgcatgggatgagcttggagacgacgaccttgcactctacccagctctactcgatgatcaaagccagcgacgccgcgctcgcgagctctgaccccgccgtcgcgtacgtaccatcctttgaacacgtgaaattttctttctaatttgtgtgagatgatatgagatcgaattgaactgattcgtgtcaaaatcatggcaaaaaaatctgtatgggttttcaggtcgacttgcccaccaggcacgcttgaccctgagaaggtgaagaacaaaatcgtggggtgcgtgcgtggcggcgacatcccaagggtgacgaatggcatgaccgttcttaacgccggcggcaccgggatgatcctctcgaacgaggagatggactgcgacgacatcgtc

SEQ ID NO: 62906 - DNA, 418 bp, Oryza sativa
  unsure (1)..(418): unsure at all n locations
agctgttatctgttgcgcactatttctataccttattattctacattgttatctattaaacctaaaaagaagtaatgacacatttcaccgggttaaattattaattgtttaacaatcagaacaaagtaaagaaaccaagcgagttaggtctaataatcacttagcaaaactatgagaagttgattaattaactaaaggaaaacagggtgtttgcacgtgtaatgctaacaatagcataactggtttgctttcataaaacaatgcatgnttttattacctgctaattgcatgaactgtagtgaattggtcaatctaccggcgtcagtgaactttcaccgatggtgtcattggtataaacaaaaagtatcgtgttagattggagaagggcgtcggtgttactgacaacgtaagaacaccg

SEQ ID NO: 62907 - DNA, 356 bp, Oryza sativa
  unsure (1)..(356): unsure at all n locations
ttcacctgcagaacccacacgcacacctattgtctncatctttaaggcctggtacccgaccaatctctggtagcccataactccgatgcaccaacaccccaacgccggctagctcattcccgccttcgacgggtctccacgtgccaaaatcgcctaccgcacccatcagtgtagctcaccaccgacaactgcttatcctgcaatacatgccacgaccaccagcctccattgactcacccgcaatggtcgcctacagctgaccggcgtgctggcctccttgctgtgtccaatgtaaacctcttgtcgcgccggctgtgttagacttccgggcgttgccggaccctactggccgctag

SEQ ID NO: 62908 - DNA, 395 bp, Oryza sativa
  unsure (1)..(395): unsure at all n locations
agctngactaaactgatggttttactggttataaaagggggaagtagtgcttagattggtctcgctgtgagctaagactgtcaatacatttagacttatttaattggaaaaaacagcatgctgagattggtatcactctggttgtgcactangatcatccttgcanttaaactgcttttggtggggagaaaggaaccggtgctaagctgcttgtgcgttaagacggtccatgcatttataccgcttttgaacttggtggactangtggttttatggtcaactggtgtcaaaccagcactggttgaactggctgagccagtgattcaccaagaaggaagacccaatgtctccctcagggctccaacttcattntactgtaaanaatagtgaaaata

SEQ ID NO: 62909 - DNA, 331 bp, Oryza sativa
agatactaagctcgagcttgaagtactccacatagttaattctcagccttcttttatattggattggtgcttttattaaaggggatatgggtcctatatattgagcgatgcatggtgtaagatgcgaagctggtgtgtgagccaattatcaccaaaaaggcattactagaagatcctgagtccatgatgaatgagctaaggtggagaacataggaagatttggaaatcaaaatattggcgtggaggaaggtggcaaacgtagtccatgatggcgggagcaagcatcacactaatggacttggcaacggctcaaagatgaggttggaagctt

SEQ ID NO: 62910 - DNA, 426 bp, Oryza sativa
agcttcatgctatctattggaagaaggattatgatgcaacaaagaaaatatgctagaatcaatcaaagtgctgttgaacacagaaattcatcaaaatgaagcccatccttcacatctgcttgataccactgcttatgtaacttatattagatatatgtaatgagaaatactaatatagcatattatacaaatgctacatcaccctgaatgcccttttggaaactttcctcaactccaatgtggaatgctagaactttccctttgttcctcttaaggcttggaattgtattgtataaacttactctaggtgcaaaagaaacattgatatgtcatgactcatgcatgagctatgacattcaacagcctattgtataacttaccaacttaccttcttcaacttttcaatatctgtaaggaagattgcac

SEQ ID NO: 62911 - DNA, 384 bp, Oryza sativa
cttagatgagcttcgttcgctgcgctcctctctcactgggccgtgggccatcgaagcgatttcaacctcattctcgaagatcatgataaaaacaaccttaatctcaatcgtgcgatgatgggacgttttcgtcggctcgtcgacgagctggaacttcgggagctgcccctttacggacgtcacttcacttggagcaatgagcgtgagtcgcccacgcttgtttagctcgaccgcgtcctcttctctgcggattgggaggagcttttcccctcttgccttctccaagcggactcttctatcggctctgatcactgtgctcttcttcttcatacctgagtgacctcgccgaaagcgcatcgctatcgttttgaagccttttggccc

SEQ ID NO: 62912 - DNA, 435 bp, Oryza sativa
agctctttcgtgcttgcttgcgagcattgttatggcctaaatggtatgaatattaatataaatagaagaaagaaaataaaccattgagaaagatatccattcttatattaatttcctatacttgaccgaacaacttccaattctgttatttcaactacaccaaatgatttttcaaattggtcaagactatcctgtttatggccctttctatatggatcgtgtttcattgaatttgcttcaggctcgcgattcgactctgatcgttatggattggtaccaaaccaagatcaagtcctaggcaagcggacctaattttaacaaccggcactatacatatatatctatctagattcattagcatcaatatgaatgtgggaaatgtataaatgacttatattgtgaaacgaaacgaagaatattctttttcttcttttt

SEQ ID NO: 62913 - DNA, 300 bp, Oryza sativa
  unsure (1)..(300): unsure at all n locations
ccaatctagactggacacttngtagaccacggaaatgtgaacgaagtgccgagttatcggcaccaaaacattgctgctcgacccgatatgaacgcaggatctgtcaacattttctactggtccggagttatatcgataaagcgggtaccacaggtgatatacagtaaaacgctggcccttgcctaatacttgtttcaactgtccccagtgctgtatgagatactgattactttctgcacaggtctgcccccaacgaaaatacagtttgaccggggaatgctgcatccggatattggcgaa

SEQ ID NO: 62914 - DNA, 402 bp, Oryza sativa
  unsure (1)..(402): unsure at all n locations
acctgccgcatgcaancttgcattacctgcttaattacgaattttctacaagtcattttgcccttgcttccactccacccagaaatataaggggaaaatgcttacctatgtgataaataaattaaagttgtgaggaattcagcattaataaataatccaagttacttactgtttaacagaaagtaaaagaaggcatcataattatcatgccgctaaattaattactaacaaaattaccactggactgcccccaaaatcttttattattttgtttatctttatcattctagctctgcttgcaaccacatgtcaaaacttgtgccgcttgatccaacgtgctgggaatgtggagaaaaacggctgagagctcagtgcattaacgtctgagctcgaggagggggt

SEQ ID NO: 62915 - DNA, 433 bp, Oryza sativa
  unsure (1)..(433): unsure at all n locations
agcttgccagtattttgcactccactgagttgcaattggcactatttctaaaggtactagtgttgttatttgcttggcgtgcttatgcctaaatttcatatgtaatctctattcgnatatgattatatgtcaaatcaatgaatgctaagtttgaaatggttaactacaaatagggagagggagacggtgttaacatttcggcaaatgcaataaatcccggtgttgttgaaaccaaaatgttgacgcacaacaatattgctaatggtacttcgcataacttataatatacctatgtgtataccattatattatttttaaactgttcttatgcatcggttctcttgcagctctagtgttccccattggaagaatcgtacgtaaaactatagagcaggtgactctttaagaagaaaatattatgtccgtttttatg

SEQ ID NO: 62916 - DNA, 418 bp, Oryza sativa
ggaatatttattctctagctaagaggactgagcagtttatgatcatatattaccctgctgcgcctttgaattctggacaactatatggacgaactcttctcatcagtcgaatactagatgattcaccggcatttaggaagcgactttcttttcaagcgaattgcaggtgtatactgaggaaattggcagtgggcactggagctaatgctgcttgatcttgttagactaccatattgattaacatactaattatctataacacttgctcacccagacttgtagccacatgtgattgctgacatggagcgcacaatgcgacatgctaccattttgactaacaccaacctagcacagagactggcaatcacatctttcaatcaagctttcctatgggtctcacttatcataagcaagagac

SEQ ID NO: 62917 - DNA, 387 bp, Oryza sativa
  unsure (1)..(387): unsure at all n locations
tgacgcatgcaagcttntttatagctatgtcgctatattactcatcatattctatttagcagattggatatcacccggatcattgtatttggaggattcacaccgcatatgctatatattgatatcaagtcacttgggtgagtacgattatcaaaaccactcggttggctggattatttattccttgactatatgcttggattggtcaattaaccacattgtcggcggctacacctattatgtgcatctagtcggtgcacctgacattatttttcatccctccacagtcttcatattaggtataagtactcgggagaccatgacaaagatgaatgaagcactcggcttttgagtaatctgggtcgagagaagataattttttccact

SEQ ID NO: 62918 - DNA, 294 bp, Oryza sativa
  unsure (1)..(294): unsure at all n locations
ccccgctgctnagcgccttgctcgctcttatcanagtgtttcggccggcggcacgcgtgcactgtgcgcgcgcctgaacggtggcgggcggcgaaagcgatcgatcagatcatgttggagagggagcggccgatctccgacatctctaagatggaccggctgaagtggtccatgggggtcttcttgccgacctttctgaactgcttcgcgcagccctgcatgttctgcgccgccatgcccatcatggcgcggatggtgacggtgtccttgaacccgatggcgcgccgcgccgct

SEQ ID NO: 62919 - DNA, 424 bp, Oryza sativa
tagcttgaagacgtattctgtgcacggatgataattagacttttcgtcttgggctggctgaatacaaagcatagaaagaaagaggaggagcttggatgggccgacttgggctgcacagcacgcgcgcgagggagagagatgttgggctgaaatcagcccaacggcttaagagaggatttaaaaactttttccaattaaaataatcactgaaatgatctttgaattgttaaaaatacttccaatgctcaaatagtttcaagaaaaatcctgaaaatacttggacactcaaagtacttaacaaaattataatcagaccatttaatgattaatttaatatgtggataattactgaaatgttctttgtatggttaaaattacggatttgagctccgaaaaatccgagagaattccagagagtataatt

SEQ ID NO: 62920 - DNA, 420 bp, Oryza sativa
  unsure (1)..(420): unsure at all n locations
ngcttaagtgatggcgggtgccttttttgttgcataaaagataattgaattcaagcaccaagctgtctagtttgagtacctcgcatataggttgacccgccctttctggataatccaatgctgctgcattccttgcacctccaccaaactacattttgaaaaaatagcaactacttaattttgatgttccaaaatcaagcgaagctttactacctatagactagcataggcaaatatggcatcccatgcgcacagacaaactaatcaatttcttaacgaaaacagaaacatggaaagtagataggctatcaatagacatgagtttcataaatcatttagaaagatcacagttgcaacagaagaatgtaaacttataacaagaactactgaatagttgctatatcttttgcaaacccaaca

SEQ ID NO: 62921 - DNA, 407 bp, Oryza sativa
  unsure (1)..(407): unsure at all n locations
tgaccaaatcttgtccaagatgtcaagttttgctggcctagcatataaatgtcantttttttatgactggagtggagggagtagncattagtgaggacatgaactatttatgaccagagggagtagtcattaatggaaaagagcaaaacccataacaccatattcgcaattattactaccaagcaaaaattggttcttttaaagaacagaatcctctacacgatggaatgatgacatgacaagcaagcatgatatgctattttcacccagttggcactagcttcatcagtggctggcggtaacaaccagataaaagtgagactgccagatcaaggaaaacagaactctgagcaagacagaattactaaagtggaaagtcccattttggttcttcatcttcgcactct

SEQ ID NO: 62922 - DNA, 376 bp, Oryza sativa
agcctatcatattttcgatcaaattccttctaacagtcctggcctaacgagctgaccaagggaaatggtttgctataccaagggttaggaaatctcacctgggagagccacgcctgatttggctccgctccgcctgataaaagaaggaccatacagagggtgaggggacaaaaacggtggaatccatgaagagagaaacgcggcgcgagctagctaacgaaagaagtggaagttgtagttccgtggagctcacctgcgggagaggaggcgggtcggcgaagctctgacggctagcggtgtggagatggccatatgcgccattggaggctgagctggatcgtggtagggagccgactctaggctacgactgatgatt

SEQ ID NO: 62923 - DNA, 270 bp, Oryza sativa
tcaacgtacgccttctgcgcctacttaatcgatgagatctctcttcgtgccgatgatccgactcgcaggaacacaccaccagcaaagcaatcatcgatctttctcaactctcaactctcagctcgactgattcgattccacaatgatccatggatggatgccgctatcataggagccatggcgcgaactccaagtagtcgtcgtcttcgtccccaagcgaagaaggcacctcctcctcctactggtggtggtggaggtggtggtggcggt

SEQ ID NO: 62924 - DNA, 266 bp, Oryza sativa
agcttctggtgcgatccatggaccagcgtggtcggtccggcggcgccaccaaaacccaccgcgtgcagctgtcggacacggccacgctctccgacgacaaggccttcctcgtcaccaagctgtccgcggtgcaaaccgtgcccgccgagtcggtgcgcctcaccatcaaccgctccgaggagctcctcacccccgacccctacggtacccttccggacctcgggctggcgaccggagaactcctttactatacgctctcgcacctc

SEQ ID NO: 62925 - DNA, 400 bp, Oryza sativa
  unsure (1)..(400): unsure at all n locations
tggntcttgagcatatagaaagcattgcttttgaacggtttaagtgacaaattgcgaacattttggagggagcataatcctttaaatctcgtcgctgcagtatgagagaggatcagatgcacgttatgacaaacacactttaaccctacttccagatgaggtttatcttccgtagacctccaagggatgaccttatcattttttgcatctgtgttcatgatacagcaatggccaattagatcacatgcaatcgccaacagttcaatacatgaataaatactacttcatggcttgaaaaatacattgacaacctctacaagatactaacatcagaaacaggttgttgtgggtacaccagaatcaggtcaatttgcaaatatcttgcagaatcaataactct

SEQ ID NO: 62926 - DNA, 407 bp, Oryza sativa
  unsure (1)..(407): unsure at all n locations
tagtatatatgatatgatcacacaaattttgtatgaattcttccattattattactggggtaataagatttcctttcgatatgatcacacaagattggnatgaattattccattgttatttttgtacaatacgatgtcttttcagatttcttgatgctcctaatgcaatggtagggaagatactctttcaggcttcctgacagtgatcctttntattctaaaaaaaaagagagagattcagagacttgtataagaatttgaaagtgacatgtaaattcttgtaattcgcaatgtcactgctacaaatataatatcaactagtaaattacaacctgggaataccaaattaaatgaaacaacaattgcatcacattatcttcacaaaatccaccatgtatacttatata

SEQ ID NO: 62927 - DNA, 375 bp, Oryza sativa
agcttggatggtccttgcttcttggcatttcgtatcctcaaatgtgctgatgtcatactatcagaagacacacagcattctggaaagctacttcaacattataacatcaagacacctcttgtgagttaactgcattctaatgtttttgttcatgaatcacaagtagttgcacatttgcaccatgttgtgtgatgagtgccattgaacttagtctaaactgtaaaccttgcagctcagctttcataagtttaatgagcgtgaaagagagcctaatatcttatagagacttcatgaaggggaagcacttgcattgattagtgatgctggtactcctggaattagtgatccttgcatggaactggtaaatcacttcac

SEQ ID NO: 62928 - DNA, 317 bp, Oryza sativa
  unsure (1)..(317): unsure at all n locations
tgcttccgatgatgttaagtccttctttgtactcaccgttagtcctacctatctatctttttagaagccacttaacaagatatttccagtcacacttgttctagctaagagtttatcgtcttcccatgcagttccacccgaagggaacacttctctaccgataccgattcttcagacgcctatgcatgatgcacgctagaaacgagaacaaaccgaagaggtgtctcctatagggtccttagcataaacacttgtctagaacaaacgtgcangattcttaatgaaaattacttcatattatacagataagcttacat

SEQ ID NO: 62929 - DNA, 436 bp, Oryza sativa
ctgcacgcatgcaagcttatgtggaaaagagatatacagaattgtgatgagttggctcttaaagtttgtttaggagtatagctgactactatctccaaatcatctatagctaatttaatagttcattcatataatagtttttttttcgaacggtcgatcgttgccaacgttttatataaagaaggggccccattttaagggtaatacggtgccaaaccttacattacgctcaattaattaagggaaactgagtgaaaaccacaactacaacaacccaccaactaacctaacctatgctaccacgacggagcccatcgtgagacattggcaccaggcatgccatataagcgacacggcaactcacatgtgttattggtaccgagcttgtcactagcgacacgacagttccaactttaccttaaggaagcctcaacgc

SEQ ID NO: 62930 - DNA, 370 bp, Oryza sativa
ggcgaagttaaagcaactacaaaatgggtttagaattaaataaatcgttgttagattttctagtaagacgagtgtataaatagactaaataactgaagagaattagagaaccaaaaataattggatattaggcttaccagagaataggacatcaaaacaccgaatttaagagcaattgtaacattaaaagacacaatactgctaaaatattcaactagagaggcataaccattttggaataatatatagaagattgctttcaagaaaattaggatagaatcctgttaagaaaattgacacccaagtatttataaatattacctatagaactggggacaagaatttattatgaaaaattcacagatggctg

SEQ ID NO: 62931 - DNA, 433 bp, Oryza sativa
  unsure (1)..(433): unsure at all n locations
agctctacaacagctgaacagganaactgttgtccctggatgagtctaacatatgcagaaatgttagttttcccatatgtctgattatctcacacatatgtgacattaaatcggtttccttcctctgtggcaagtaacatcgtcctccatccccaaaggctgtgttcaagcccatgctatgcacagcttactttntgatattttccttcttactcaaattatatcttgtatactgaaccctgtgttaatgtgagcacacttaattacttccatgtgttgtgttgtcaacctatttctggcccccatgttggtggaagtgctgcancaaaggatgtgaacaagtggcttgatgagattattggaggctatgattcctctatcatggagtttcatggaggaaatgatcagaagatgcttatttcactgcttaaaa

SEQ ID NO: 62932 - DNA, 401 bp, Oryza sativa
atgccagttaaggttactgcgaaagccttgtgtgctcttcttgctgctcgcaggaaatatggggaggtggggttggcatacgctgcaaggagagcattgtttgagattgatccggagaatgcaggtaactttgtttcacttgcaaacatctatttatgcatgggtatgcatgacaaggcttaacaagtgagaagggagatggagcaccgaggtgtgctgagattgcctggaagcagatggatgatacattgcaagtcaaggtgctagcatcatttcctatgaataacttttgcatgcccagctgcctatatgaccatttcagctttattatcacccaaagcatgaattaactgactgttctgtttgctgcagtgaactggtctgaaatgggaacacacttt

SEQ ID NO: 62933 - DNA, 362 bp, Oryza sativa
agcttgtgcgcggagggtgaggacgatgttgtagagaaccgctggatccatccgccggaaaagcctccaccgaattcgcctgccagaaacaacaccgccgccgcctccgccggattcgccagcgggagccgccgatgccacagccaccgttggatccagcccacgggagcagttaacgccatcgctgccgcctcctctgctaccgacaagggagagactacaatggtgggggcggggatgagagggagtgatcgagatggatatagatggaccggtgagaggaggaggcgagtggataaggatgcggttatccactcgcggggctctttctcggctgatgcgtggtgcgtgggagaagaaat

SEQ ID NO: 62934 - DNA, 337 bp, Oryza sativa
  unsure (1)..(337): unsure at all n locations
aatttcctcctctatgtgtttganagctttcacggcggtcccgcctatagacctgggcctatccttgacaccaacatgatggcttggatatactctatctcctgtaaccacaaaaaccgaaccccctcatcaaggaacacatgatgctccctcgatcttgggtattcactcaccacaatcattaatttacagctcgaggatactccacttctaaatctaaaattgacgttttgaccagcgttttcattctctttgaaaactaatggcaccattagtgttcataacatgtcgggaacttatcccactgcagatcgacatccatctcattacccttctg

SEQ ID NO: 62935 - DNA, 390 bp, Oryza sativa
cgcagcatgcaagcttttaaacaataaactaaaattttattttttgataacatttttctcatttttgtcttttttgttagtttaccggtagttttcgtgaaaactggatatactgctcgtgctagagaaagttttcagtccgataaagggattgtgaagcctgccctaaacacatgaaaaatgtaaaattcaactttgatttttttgcaagaatccttttccttttttttgggtgcttttcttttgtatagcactgtaccgtatacaacactgaatacaacaatgtaggccgagtttagttccaaactcttttttcaacttccaattttttcatcacatcaaaactttcttacacacataaactttcaactttttcatcacataattaca

SEQ ID NO: 62936 - DNA, 423 bp, Oryza sativa
taactacatcttctgcccatgttttcttttcgaacttcagttacacttttatgcgctgaaacaccgaatgaaatctatctatcatcaatacttatgctctttgttactattctcatctgcgtgccttacaaatatactactacatatgaccattagccctgaactatgcatgtagctgatcagcgtccacttgtcaccactgttaccagatgcaagatatcaagaggaacagtcacccacactgtggtcggaatcattgcaaccacacacataagagcaggtactatagcagactattagccacctctaaatatattttaatgagataaacgatgagagagaagagcagcgggctacagatttgtagccagctgcagcacggactccaagacatactgtgtgtatgacaggtgagaccatata

SEQ ID NO: 62937 - DNA, 375 bp, Oryza sativa
gaccttagaaactaagctatcgcccttttgtgccatttgaatgctggctttaacccaaacgcggttcacgttaatatttattgcgtgcatgcatctgtatcgttcattggctttgtcccatgatggatgaatcaattgctcattggtcttagtggcaacaagaagatagtatatgtaagtttagtgtcacgctcataattggtaagattaagttgaaaattggaacgatgtgactggaataagttgaaagattattgcctgtaggaaaatatttgattttgatggacaagtctgaagctcggagaataattttggagctaaactggggctacttactactgatcagctgaacatgaatatgtacccgcacgcgct

SEQ ID NO: 62938 - DNA, 353 bp, Oryza sativa
tctagaatgagagctcctcaattccagccttatgatatccctaattacctgatacaattcaataggaaatgaaggtatcccatgatcagcttagcacctgcttcatcaactagtcaatgctggcatgacgggaaaaattaaatcaaaaaaaccgtagaaggattaaattcaagctcccataattgttgataacaaacaacatgcagtacctttatcaggcaaaaaacctacagtgatgtaccgaactgaaaaacagccgcacaaacaagagctccatctgaaattttgacaccatgggtgcagtcataccgctctcataggcacgcagaatagagaatgaatcctaaatgctg

SEQ ID NO: 62939 - DNA, 400 bp, Oryza sativa
ttgtatcccacctgccgaggtccgggtggatattcttccttagatgacatatgacaatgctggtgcctagtccctgttggaggttcttccaaagatgacaaatgacaattgtggtgttcccaataacgtggttttggggtgccatttgccacatggtcatgatatgccctcttctccacccgagggagatttggagaagctgtacagaacgccccttccttcagttgtatcgaccctttcttcgagcgcacctaacacagccgtcgcattgactgtttcaacatcccatgggagtgttccttcatctctcaatgaaggacatggggtatctagcaagatatctgcaccaaacgaagagcatgttacttccactattgacccttcatctaagtgtgagcat

SEQ ID NO: 62940 - DNA, 420 bp, Oryza sativa
  unsure (1)..(420): unsure at all n locations
agcttcatgagtttcaacacgcatgacaacttgctgtgcttcgactggcatccatcatacaacggcatctggcaatcttccaccaacttactaaacttctcataatctctgtcgttgtcctctgcgtcttcaatgtcatgcaacattgtagatagacattgagtgtccaaatctatggtctctccacctataggagaaggtacgaacatgccttctcgagctgcggcggtgttctctacatcctgatccaacacttcttcagctgcgacatcaggcgcctcttgctctccatgctnggtccaacaggtatatttcttcatgaatccattcattatcaaatgagcatgcacttcatccttgtcttcgatcatctgttcattcttacagtccctacatgggcacaacatgtgcatgctcatc

SEQ ID NO: 62941 - DNA, 412 bp, Oryza sativa
  unsure (1)..(412): unsure at all n locations
cgtacaagctgagatccgtgcctgcaaagagcgtggaatccaacgtacttctccaacccgtgatgtctattgtcctattcacaagacaaagaatcacgacctctcaagctacaaagttcttctcagcgccatgaagacgtcacctcctaaggtccagcagtcacaaatctctcttagagatacaaacaaggaacgaggagcgacaattatctcagatcganttcgtggggtaatcgacatcgatccctacgagccgtcaattctacacttgctcgaagaccaggcctcgtcgtcaacgagtacaccacgcgatgtgttcactatcgatgggatcagtacgtctgcgcgcgctaacgcagaagtggaggatcaagtggttacaccggcccagcacatcatggccatcgacgca

SEQ ID NO: 62942 - DNA, 404 bp, Oryza sativa
  unsure (1)..(404): unsure at all n locations
agcttgtccacttattagtatttctaaaattacatatggagaagacagcaaggttgaacacataggacatttggtagaacaacaaaattatgcaaatntatctctacgttcttttggtcaacaaacagatcgaatagagacaatccttatggaaggctacaaaacaggaagacctgaggtaaagataaatattccctctaattctcagtcttctagttctcagtctgttagtcctatgtttggcccaacaattgatcctaacatcaaacttggaaaacaaaaggggtttggacccgcattttctgaagaactagtcagtgagctagccttaaaactaaataatttaaaagtaaataaaaatatcaatgagaattttgataatgaaaaatatgatatggtcaaca

SEQ ID NO: 62943 - DNA, 429 bp, Oryza sativa
ttccatatttatgtatgtatatgatgaattgatgaccattgttgcctttgaaccacagtctagcacaactcctctttaacatttctatgatgatttcttcaacatcaaacggcaacaatagtttctcaagcaaccttttaatatacctctctgcatatgtatacctaaagagatcaccaattgttatacatttctattgaagattgcaatcaacacagttttgtcgacctttcatgttttttaggacttccttttaagttataaataatagcatctgccatatagaaatgttaaagatgcctgtattagttccattttgatctatatttttttctatgtttatcttgtaggattataaagcgtcatacactatcactttttgttggagatgaaagtgggatgattaatcgaatcgctggagtttttgct

SEQ ID NO: 62944 - DNA, 296 bp, Oryza sativa
atacaaacaacccggtatgactcaacccaagagacacgacctacaaacccattatacggtttgatatccattgtccaaagcccatgacataagcatcattaaaactttatgtttgtggtataatccaaagaacacggtaacagcgaggaatgagcatgggtgcttctgttatttatactatactgcatacagatccaatgggattgacgaccctgtgtctatcgatacatgcacataacatagtgattcggcgatcttgagagataatataaagattctagagttcatgccattat

SEQ ID NO: 62945 - DNA, 429 bp, Oryza sativa
tggagctcggctctgatcggagtgcgcaggagcatttttatacacccgttgtttatgaagtgatggcctaattgacggcgttttcgttgatgatctcattgtcaccggagaaaatacctctgaattgaaggttttcaaggaacaaatgatgggggagcttgagatgagtgatctcggtttgctcacatattatctccggatagaggttgatcacgatgagagtgctaccacattgaaacagactgcatatgccaagaaattactgtctcagtttgggatgatggagtgcaactcaatttcaattccaatcgatccgagatcgcagctgatcaaggatccagaatgtcaccccgtggatgcaactgaatatcggcggatcatcgggaggcttcggtattttgtttacaccaggccggatctgtcatatgc

SEQ ID NO: 62946 - DNA, 417 bp, Oryza sativa
agcttagcttgtcgccaatggagtcctttttctctcctctctctcaggccggctggcttgcagctgcagcctgggattataaactccacgaaagggacccagaaggcccagccaagtcgcttctttgctatgtaccctctcatttctctgattttgcttaatagtcctcgtaattaatgtcacttcaagtcttccctagtctctcttgatgatgattaatatttaatcgttgcaatttttcagtggttatggaagatggcaacacctactccctctggttatataattgacaagttttaaataatgatacggtctctgatatatatctttaaccatgtccttctattataatatatgtatcacaagtttttgttttattataatactttgtaaattaaatctatatatgttattcta

SEQ ID NO: 62947 - DNA, 208 bp, Oryza sativa
cgaggtagctcgtttgcaaatgatatcatcatatccttttatacctagcgcttgtgaactagtcccttatttttttaattacatcaaaactatttggattctgtgaggctaatggttattatggtaatatattacaaaatcatcattttggaactatttacatgagtttaatgagattgagctcggttacccagcttacgaacttaac

SEQ ID NO: 62948 - DNA, 406 bp, Oryza sativa
  unsure (1)..(406): unsure at all n locations
agctttatgttttgctctgctataatgtctgtatgtgaacgntgatcctgaaaagaacaagagagtatttttttctgttgccacatgcttcaattgattagctcgtatggaggacagatgcctgatggtccgtgccttcaaattttctgaaataataataattgatagttttgactagatccaccctgctgcaaacagaaaagcaacatattttggctgcaaatatttaacttttttacttagcaacatttcttgaccaccaaatgaacctattgatttgatcggttacttgatattaagtatacaatntgaggcaccaagaactgagatataagctcttttccatgttctgtgtgcattgagctaaaccgacaggcaatttgaacctgtggcagtcaataatatg

SEQ ID NO: 62949 - DNA, 370 bp, Oryza sativa
cgagaagaaggagaagcacaagcatagcaagcatgatttctatggccaagctcaccttgggatgatcttcggctccgactccgagtcaagctcaagtgatgaagaaggagttgccacgttcgccgtcaagccttcatcaccaccgagactcttcaactactcaagtgatgaggatgctcccatttgcctcatggcaaaggagcctaaggtaccctctcccctcaagtcatttaatgttgatcttgttagtgatttggaggaagatgttgaggatgaggttatggatgacgagttgttcaaatccatagccaaggaatccataccacacttgagtgagttgcttaggagaattgagaatcaatatgcaact

SEQ ID NO: 62950 - DNA, 422 bp, Oryza sativa
  unsure (1)..(422): unsure at all n locations
agctntgacagtgtggaactcttaagaaagtatcttacagtaataaataatgaccaaaagatggtcattgtaccattggtcaaactacagaaagttttcccttcgaacgttcacttctagaagaataccaaaacaaagtacatggtcgaaaccgcaaccacgcagtgtgaacatttggtgtaataatatgtccatgcaatatgttatgacctatgcagaaacttagcagaatacttgaataggttttggaggggaatgagaagcatgcaccttangcgtcgttgaaactggctcagctggctgatctgaattaagtggcagaagattcatcccatctcctgaagaagaacctattaaaggtttgaacttgtctcctgtaggtaaatcactcatgagtgctgtgctagctatatccaacaagc

SEQ ID NO: 62951 - DNA, 411 bp, Oryza sativa
  unsure (1)..(411): unsure at all n locations
agcttataaaaataaaacaatatttataactcattacaaacaaattattaaaatatattcaatgtcatatttaatgaatcaatgttacatttaatgaaactaatttgatgtttctttacttgaaaaaataatttgatgttgtggatgttgatattttttctataaacttaattaagcataaagaaatttaatcagaaaaaattaaaatgatttataatataaaacagagtaagtataataagtccagacgccattatagctttttgggtttatgatttccaacatctggagccgacttgaaatgcactcgacctattttgttcatttgaaattaacgaaaaatcgatgtctcattggtaaactcttactacttgtgctaccctanggcagctcanaatagtggtgggagat

SEQ ID NO: 62952 - DNA, 422 bp, Oryza sativa
agcttattggctagcaggtccaatacaaatgagctatgggaaaaggtgagtacatcgacaggatctgtattacaagaaaatcatgatcttgagggcatgaaaactatattgcctctgagttataatgatcttccccactatctcaaaccttgtttactctatttgagcatatttcctgaggattatgacattgaaagaggtagtttagtgaggagatggatagcagaaggattggtcagtgaagattatgggcaaaatgtggaggatgttgctgaaagctacttcaatgagctcattaataggagtatgattctgccagtggacattgactacgatggaagggtgccagtttgtcgcgtacatgacatgatgctagaacttatgaaatcaaaggcaagagaagagaattttcttacaatcat

SEQ ID NO: 62953 - DNA, 425 bp, Oryza sativa
agcttttagcagtgtgccgcaacaactagccattctcgagccatacattgagggacacatgaacgagataagagcatgcaaccctagaagaccggcgacttggatctcaaaggaacagaagcgcaaatttcctgaatgcctgaaagaaaaaacatgtcgttcggtgaatcgcttgcacaggttggcaactggcccaagtagcctcatgaactcatggcaatggtacgacatcggcggatatacattttacacgataggcaagaacaagaaaagtgcagctcataatagtggagttcgtgtggaggcgttggacgcaatatgcgagaagaagtcatactatggataatacaagacatttgggagcttgactatggcattaacatccaggtcccggtgctatgatgccagtgagtcaaagacacaac

SEQ ID NO: 62954 - DNA, 420 bp, Oryza sativa
agcttgaacttctgctcttgatttggatctctctggcgccagcagtggagtcgcaagctcctgcagcagggccctgcttgttcgtgctgctgccgctgccgacgaggacggcgtgcttgtgtatttgctccgggactctacacttgcccttctagatggcagacgaggacgcacggcgctaacggcaagcctacgagggggaagagcggcgtcggctcaccaacaaccattctgagataaaaatatatcttcatccctattcctcaccattcaacctgcttttctctcagtgagctcaccaacaaccattctcagcggtgaggttgctggtcaaagaatatgaagagaaggtggacgacacacagacagtgggtgggaagggtttgactgggacgaagagtcgagcatcccgagcttctc

SEQ ID NO: 62955 - DNA, 420 bp, Oryza sativa
  unsure (1)..(420): unsure at all n locations
agcttctgataaactgagattntcggctatctcatcactaactcttcgatatatttcttgctgaaagtatccctgatcccactgataacgagtaggcccaaacaattcaattggggtagttgctgacccataccacatagttccggcaactacgaaagctgcaaaaaaaacagcagcgatactactggaaagtacagtttcaatattgcccatacgtaatcctttgtatagacgttgaggtggacggacactaagatggaataggcccgctaatatgcccaatgtacccgcagcaatatgatgagaagctattccccctggaacaaaaggatcaaaaccttctgcaccccacgcaggatttacagcttgtacttttccagttagtccataaggatcagacacccatatcccaggaccata

SEQ ID NO: 62956 - DNA, 427 bp, Oryza sativa
  unsure (1)..(427): unsure at all n locations
agctnggtatattggattgcactgtgttcattactgtaacagaactcattttgctgacattgtagatgttctgactaaaattacttaatttttgaacatcagtcggcagcatggaatatacaatatgtttggtaaattaaaaaaaaaaggaaggtaaatatggctatacgcctatgtctagcacaaggcatccacttttttttaatgacactttgaaggtcgtgtgatttttctatcaaatgcatgctagcaaagatataaaattaccttcctatcaactcatcagtagggttggcaataggcggtgggtggcgttggcaacggaggaaaacaacgaaactgattangaggcggcggccggtggtggcggatctagctacggcgagccaccggaggtgagaaagacggagggacggnggactcggtg

SEQ ID NO: 62957 - DNA, 413 bp, Oryza sativa
  unsure (1)..(413): unsure at all n locations
agcttggctccaataaagaccacatgatttgtcgatagctccccaccacttgtcaagggccagaagcgtgaacgaggcaaggggaaggtcggggagttggcgccggagccaaaaaggggcaaggctgcgacgtcgatgccggtgagcaaatcggggaaggtcgtgagggcgccagcccaatttgagctacgcatgccattggtggaggacaatgtgttagctgtgatgggtattgcttgccgagagctacataagcaatacatggagctaagcaatgccaagcggaaaatgagggagtcatccatagttggacatcacgaccaccagccgttcctatcgtcgcctgcctatataactataggctntgatgacctcttcgaccttttcaggatccggaagttggacactggtct

SEQ ID NO: 62958 - DNA, 415 bp, Oryza sativa
agcttgcaacggttcggcaatgttcaattggtgcccttcaccgtgttgaaccctataatcaaaccatggccgttccgaggttgggctttggactttattggtcaaatttatccttcgtcatcaaaggggcataggttcatgctagttgctaccgattacttcaccaagtgggccgaagccgtgcctctcaagaacatgactcatacggaggtaattgactttattttgaaccatattatccataggttcggtattccacaaacattaactacggatcaaggtgcttcttttatgtctaaggaagtaaagagttttgccgaatcttatggtattaaattgttgagttcttctccttactacgctcaggctaatggacaagccgagtctagtaataaaacattgttgaagctagtga

SEQ ID NO: 62959 - DNA, 420 bp, Oryza sativa
agcttctatgtggagctatgtgattggtgtgttatttatacttctggtgaatcgaggtccctttggtgagattaattctttatttgagatgtgtggcttctttgtgttaattagccggatgacgaacccgacttaagtgaggggtgccagacggtattagccgatctaggtatctcggtgaacggttgaatatacaccactttgtgtatgggtctgacggcaacatttatttacatattaccttttgtgtataaaaggggtcaagctatgtatgtcctgtgcaaccgtatatttaaatatatgcggctgtgttctttgccgtgagtcctcaacacatctccctcgttgtccgtgtgcacgcttttcaaactgctaaacggtgtgtgttttgcaaataagttctataggaaagttgcttta

SEQ ID NO: 62960 - DNA, 426 bp, Oryza sativa
gcttgagcttcctctccactaccagtgcacatatacaagcctagggggcttgagccataggcttgtcccctaaactcctatttaaatctattaaaaattagtgagaattttgaaaatatatggtgtatatgtaagttgagccctactcttacagagttgctagcttcagccagccacttacctttccatgattaaagatggaggccaggttcaagtttttatgtggaggagaacgtggttgttgctcctatttctgaaattgaaaagcaacacctataacacactataaatgctagtttattaaaaaccgttactaacaatatcagtatctgacttttaagaaaaagcagttgatcaatcagcaagtgtaacatcccggcctagggcttaataggattaatagaatactcatatcaacaagttaca

SEQ ID NO: 62961 - DNA, 411 bp, Oryza sativa
agctttgcacatatatatatgcacgtgtatttcgtacaaactagcatgatggcccgcgcagattgcgcggctagcatcattatattttctctcatataatagcatatatgttttctcattatattattcaaatatattaaaataacaacataattttaaattttgcaataactttacaaaactactaatgtgtaatattcatattgcattttatatatgtgttagatattaattatctttaacataaaattttagttattcgtaaattatatatattcctatatggactctagactcgccttttaaatttcttctttctgtagattgtatgtctatatagactatatcgtcttcttctaatattatctatttttattcctgaaagtgtattatttgtaactatatttctat

SEQ ID NO: 62962 - DNA, 436 bp, Oryza sativa
  unsure (1)..(436): unsure at all n locations
gcatgcaagcttcaccgggggattnttccttctcatttttcttaacggatgccttatgttttacgagcttagaaacaatttctttttcagtgtaattgataagtcgggatttgtgatacaggacacattatctccagttatttatactatgctattcttttcatcatccattacctgatttgttctatgaaatggttggcatgtttcttcagcttcattgttcaattaaatctattggtagcacgctatatggtttacaaacatcattgtttcagggcacttgtattgctaacaccattattttgcacgctgttgacaataaatggctttttaccattttcccttctgaataggcgggcgggcagacaggtgctccaggttatcaagacttcaacgacatcagttctctcttcttcccatggcagccaagtgccga

SEQ ID NO: 62963 - DNA, 421 bp, Oryza sativa
agcttattcttataccctggcggaagtacttcttcttctttgtatgtctagtacttgattccaatcttcttcttactgtcctatataaattctcataaacaatataaaagaatcttgtagtactgtgtagcaagctccttctatgctatatttttcactctagtgctgaaggacttcatagatactaataaagaacgctgttttgtaggatttgtttttgttctagacaatatgattgttgcaagcaagaatccagatcttcctctttttctttacacttttccttttccatttttgtggtgcctggtagcaaggcaagcatagaacttctccttttggttctataaatacctgaataagaatcctgctgtcatcatccctccgtgtcgttttaaacaacttgatcaggtgatcaatcaaa

SEQ ID NO: 62964 - DNA, 184 bp, Oryza sativa
agcttcgccgaaaagagaaaccgtgacaactaacttgtctctctccgtctcagttgacaaatcaaaaaccaaaaactaaaaataaaaatgtttttcgagtttttttttttttgccgattcaacaagagagcccacccttttttccccatttcggataaggctcacctcgccgttctatggtggg

SEQ ID NO: 62965 - DNA, 417 bp, Oryza sativa
  unsure (1)..(417): unsure at all n locations
agcttggagaagaagtcctaggtggagtctctggcttataccccagttgagctcctgtgaagatggagccgtangcccgctagtccgctgttgtttattttttattgtcagacctgaagtgcctttgtaataatgcaaatattatcgatataataaagatgtgcctttgtatcatgtttatgtggtgtaccccggcttatcgtgggacggggattaatacactagtgttcgagaaaaggtaatttttccgggcgtgacaccggcctatgcgagcttgcaaggagccaccgaacccgcggcaaaagcagaagtctaaagacgagaggggggggggaaagagtcaagagagcaagcgcaggagcgcagagatggtgaaaagctaagagcacaggtagagaaggaaagcgcggcggtagt

SEQ ID NO: 62966 - DNA, 432 bp, Oryza sativa
agcttgagggtcagcacatcataacggatgtttatattatggacgtcctagtgccccggccgaagccgccaagaactatgtacgtcacagcggttgggttgtgcgggataacgtgcctgtcagtacggtgtactggcgaagaacaagggcacgcggagatcatgagagctttgtcccagattcggagaaagagatgctgtggaccacaatgctcgagacattcacccttcctgcgggtacagaggacaaagtgaaaaggtggattctgaagaaaatggcagaacagattcagagcttcaagggagatctgtaccagaagtatatcctgaaggggcagacaccaaacttcgacacattcccaaagctaagggatcactgggacgatctcgttgcatataagacaggtgaacaacggcaggcgatgatggaaag

SEQ ID NO: 62967 - DNA, 432 bp, Oryza sativa
  unsure (1)..(432): unsure at all n locations
agcttggtgccctcggccaccgtgccttcttttgttgtccttgcccgtgacatcgctacaaggtgttccccaacccacgccacgtcacgtcagcggtggcgcaggcggagcgtgtagcgatgacaacctgtggtaatgaaggaggcggctagagagtcgatggtgaagttggtgacagcgagcagctgaaatagtggtgccatgtaagatggcagctctccgaagagcttccagatgcatggtgcgactgccgttgaccaccacgaaagtccagtggagctccttgtagcggcggtttggggtgaggtggtcgggatgtggattgtgtcatgtggcctggtcagtggcaaagcatggccgancanggcggttgccgtgaggcggtgggtgtgtgttgtcgactagctttggtggccgaatgacttttgaaat

SEQ ID NO: 62968 - DNA, 421 bp, Oryza sativa
agcttaaaggcatccttcctacaagctcttcttttctcaaaatgaagaaaaaacttcttgcaaagaatatattttgtcttctctagaacgggccaagaaaaggaatcgtgctgcactgggtacacccaaagtaagacattttaacgtcctgttttttgatatcttatattcttctagctctcagacccattagcagactgctttggcatcgtgtatatgtgatttaacttgctttcatcaagtacttgatttggatttttatgtgctacaggttcctaatgtcaaatgggaggacgttggtggtcttgaggaagtgaaaaaggttattctagatactattcaagtaaaattttcttatgttcatcaatgtttataggaacttaagaatatgaagctgctttagtaagtttgtgaatagtaa

SEQ ID NO: 62969 - DNA, 421 bp, Oryza sativa
agcttgagacggcgaaccacatcctcatcgattgcgtgttcgctcggcaggtctggctccgtgtgatgtcccctcctggctgggctgccctctctccccttcgtggcagctggctccaggattggtggtcatcctccagggcctgtttacctgagcaccactgcagcggcttcgactccttggtactcctagtctcctggcagctgtggaaggaacgaaactccagggttttcgactctgcgctcgcttcggtcgcagtggttatggagtccacccgctcggagggccagctgtggtctttagccgacgttgctttttttggggatctcttaggagtgtagcgtggctctgtcccctcccgttgtttggagttgcgtttttaaccgtcgtagtagttcctagcttcaagttcttttatttt

SEQ ID NO: 62970 - DNA, 421 bp, Oryza sativa
agcttgttcggatgttcagcaatccggtttctttatcttccttgagcctgtcatcactggaaccatgctcgtccttgtccagccgcactgacagcgactccaggtagcggtgacacgagacggcagaacacagctcctggatgtttttccagttgatgcctgaaaccccaagcttgcgcagctgcgtgagattcttgagctctttcaggaaggccttgccacctgcgacgccgacattgacgacgcccagcgtgtgcaatgccgtcagctcctcgatccccctgggcacctcaataccagagcaaggatcaccagcatgcctgcctctgcacagatcaggcagccaggatagcaaagcatgtgttgacctgcattttggtgtgtctctgtctcagcagctgctaggcttgcagatgtgcct

SEQ ID NO: 62971 - DNA, 430 bp, Oryza sativa
agcttctcatgagaaatggtgagtctctcatgagagatctttagctcctcatacaagacctccaaagaagcatgatccttctttagggccttaaacttgacaatctccttctcactataagcatggagctcctcaaacatactcacaagctcatcataggaaacatcatcacaatcatcatcactctcactatcactaagagatgttaccttagaggagccctttgccatgagacaaagtggagcgaagagtgatggagcctccttgatggcaacaacagccatcttcttcttcttggagcttgcatcatcaccgccttcttcctcggacccagatgaggtggagctctcctcatttgagtcccattccccgatgaaggcctcaatcttcttcccttccttcttaagcttcttcatgagcttgtagcctc

SEQ ID NO: 62972 - DNA, 419 bp, Oryza sativa
agcttccccttccggctcggaggtctttgtgatacgcagctggtaggcggctacgctggtggtgaggttcgctgtaccggacggacggcgagaggctctctcgggtcggggcgtacgtgagaattatcggtcgacggtcgttgccggcacagggccgggatggctcttctgttgacggctcacctcctccgaggctccgactagtagtgtgccagtagtgctaggttttgtaccgttgtggtgggtacgtcgttttccggttttacttcgaaagaacaccgttggttgcaaataattatattccacaccaacttactagtatattttttaaattctaatcattttcacagttttgttacagtactagctccttataattaaacagatgatattcattctattattggttcatatgagca

SEQ ID NO: 62973 - DNA, 427 bp, Oryza sativa
gcatgccagcttctagagctaattaaatctattttattatattagcaacatttataaaaccaaaatagttgtattaaatttaacattgaatatattctgatagtttatttattttgcattaaaaatattagtatattcctctatagtttaactgagaaaaagttaaataacttattatatgaaacatactatgtattactccgtgttagaaatgtccaaatacaaaaggatcataaaaacacgaacgcacacacggtgatcgggtgcgtgaactctttgctggcaccgaattcccggcagtggcaacaccagccaaaaaacctgcggctcctgcaaatctcggcctgtacggcctgatagcccagccaggcctggcccatcacgcaacgtgcgcaattatcaggcaggccttcaccttgggccctac

SEQ ID NO: 62974 - DNA, 418 bp, Oryza sativa
agcttgaagcatcgacttgatgaatcttatcttcttcttgattcatcgagtcagcttttttgtttttcatcgtgagcctcaaaggtgccggttcttgaagctagcacctttgaaaggactcaaaggtgccgcttgccgagtgtctcttgccaaatccggcaccaatgtggggttggcaaccaacaccaaaaggccattctgtagtagtgcattgcggtaaaataaatgttgaaatttctattactatggtccatgtataactaaaaatatttgccatgagattgattaactttcttgtacacattacaacaaaaacaactgaaataaacaaaattatgaaacatctattagtacactgatgaggacatttgtcacgccctaaaaaaaatcgtctaatgtaaaaatacattgtttaaat

SEQ ID NO: 62975 - DNA, 426 bp, Oryza sativa
  unsure (1)..(426): unsure at all n locations
agctnttgtggttacgctaccatgtatattttataacagtagaagcttccattngtaactaccacttgtgtgcgtctttggcttgctctgcaaactgaaacggagacagtggagttttatattcttgtcctagtcagacatgttgaatactggtagtaccaagtaccaacagtctagcaataccactgctgcttcagcctacggccggccgtatggtatactgtacttagctgtcgttgcgacttatattgattggttaaccaagcaacatggttatggactcccacacagagactgtgacatatatacatggatagcgtaatcctacagtattaaggactgcaaattctgaaatacttcctccgtccaaaaaaaaaaccaatctagataggaatagaacaccacttagaacaacgaatctagaca

SEQ ID NO: 62976 - DNA, 385 bp, Oryza sativa
agcttccatgatcgtaggcatgtgcatacttatggcttacctagtcagaggagtggtgctcgatttttagctaaacttacaagcgcgtctgatatgtagttgcgaatacttatatattgcattgtactcgagagtgtgtggcttcagtaataaatattttttggtcaaattcatagtgagtgaattacatatgctttgactgctaattcatgtattgtatattttgagattagcagcctctccatccacatattgagggcctggttgaaaacattgaatttttttccacttgtaaaatatttacaagtgtacttttacgtcaccaccttctaccaccaagaatacaccgtttttttgacaaataggtccttgcttcaaacttatt

SEQ ID NO: 62977 - DNA, 451 bp, Oryza sativa
ggaccttaagcgacgcggctgcaagctggtcctgattgaatttaagttatttatccttttgttgtagaggaatctgatctgtatatgttgtcggaaagttcatgtgaacaattcttctttgttactacctctgctgtttcctgaacagttcttgagctgcaaccatgtagctgaagctgtatacttgtatttcgctttcagagatcacatatttccatcgcacacctctcttacatcttccagagttcagtctatgttttttttttgttctcatgttcttggtttcaatgcaatacacaaaatcctaatgaatctttcccactgagagtttggattgaatcttgttctttccagttcatagctttacacagtgatctgttgctcactgactttgcagagtaacaccgtttaccaagtctgacagagtttcatggagcaggtaattactctg

SEQ ID NO: 62978 - DNA, 433 bp, Oryza sativa
agcttgtctcagtgattgctcttgcacagtttattcttatcaaaatagtagatgctctgtctggcatgggaaattacttaatgtaaataaaaatgatggcatttacattaatgcggacaatgttctgcaccttcgtcttgctgccacagatttccaagatttgagtaaaaacaaaagaaaaacaaatgttgaacttgttgtgggcgcaagcattgttagttttgtgttagcattgatcatgatactgctaatgattagagggaacaaattcaagtgttgtggtgcaccattccatgacaatgaaggccgtggtggaataatagcctttcgatacactgatttagctcatgctactaaaaacttctcggaaaaattaggagcaggtgggtttggctcagtattcaaaggagtgttaactaacatggctaccata

SEQ ID NO: 62979 - DNA, 425 bp, Oryza sativa
agcttataatggatctcagataacattgatggtttatctattgaaaactaatcatgtataagatgcaaagtttatatgctttagaagtaagtttaacaatttttaaaagtaacttcaatattaaaggaaagtaacttttacatggctcaaaaataacttcatgtaaacctctttcgactactaattcatttttctccattttaatttttttaatgcagtattagagaaaggagatgaagattgtacatcactttggaactactaaaaggatttaataagatctcaatgttggagaaaggagatgaaggatgtgatggattgtacataactttagaactaaaaagaattttataggatctcaagatgcagcttgttggttttcagtgcttgttttgtgctctcattatgtgaacgaatctggcatg

SEQ ID NO: 62980 - DNA, 413 bp, Oryza sativa
agctttattgtaggtcatggatcggacatggatgtacaacatgaaaagagctcatccaacgttcttgaaggaagcagccaaatttgttgagctcgcaaaggcacatgctgcgagggagaatttgaggagcattttttgcccatgcaaagtttgtaagaacgagatcttgctgcaagatccgaatgaagtattgtcgcacatcgtagaacgaggatttaagaagggatacgagatatggacttttcatggggaagccggtggtcgtaacgaagagttagatgatttctgttctgatgatgcagaaaattttataatcgaagacatgtctcagggaaacatcccggaatacagtggctcacgtatagagaatgaaggtattgatttcgatctggaagatatgttgcggcacgttg

SEQ ID NO: 62981 - DNA, 430 bp, Oryza sativa
  unsure (1)..(430): unsure at all n locations
agctngcagctcctactcgatcaggatcttttcttcagctgtcgngtcctcgacgaccagttgcgcagtctccttgtagagacagggaacaacggttttggtggcactgaggccggagtaaggagcaagcaaacaagagtgccctcaaccggatcgggtcccggctttccctacaagaaactggcccagagcagcgctgctccctatagcagaattgccagatggctggactacccgggaggggagccggaggcgggacgattgaattgtcacccatcgagtattcgagggcgggatatgtagaggatacccagcttgcagctcctactcgatcaggatcagtacttcagccgtcgtgtccttgacgaccagttgcgcagtctccttgcagagacggtgaacaacagttttggtggcaccgaggccggac

SEQ ID NO: 62982 - DNA, 421 bp, Oryza sativa
agcttggcttcatcatgaggggggatgcattgccttacaactggccgtaagacttcacacctcccgtcgagacttgaggtcacacccatggtcttccttcggggaggaggaacgattcctaccgggggcaaaggcagcccgggccttggccatgccgagaccatggttgtcttcaccacgtaacttgatgagaagatgtccttgttaaggagataggagagggaaaccaagagagagagagagagagagagagagagagccgcaaacctgcctggacagacttagctcatgcccaggctcctgggggtggctgggcccgagttagtccgagacccagggcccatggctatcttagagctattctcccaactccccaggatgcaaacttgggggccaaggcaacccccaagcaaccgggaga

SEQ ID NO: 62983 - DNA, 431 bp, Oryza sativa
agcttgacctcattcttgccaacatgacgatgttcttggcttggtgaccactaacccatggtgtcattcattagcctcatcgtagtgggacctattccttttcacacctcaaaggagaacattagtctcaacaaatcggttgtcatccttcacttgatgaccaaccggttgcatatgaaagatatggatatgtttgttgagtattcattaacatcacaagtttcatatactcgtatgcaagctcaagtgcaaagattcgatataaataataggtgaacaacatggatctagaacatgcacaataaatatataggatttgctccccctaaatatatgcatacaaataaatatacaagagatgcaagtgtatgcataattagagaatgaccaactggggtttatcctatacatatagtgaaggcatatgtagt

SEQ ID NO: 62984 - DNA, 432 bp, Oryza sativa
  unsure (1)..(432): unsure at all n locations
agcttganaaccaaaacatgaagtatcctttttatattatacttaaataccctgtgaacaccacggaatccccagcccttcttggggtctacgccttggggttctaactctcgtcttgaatctgtataatcatcatcacctcccatttcactcttctcatcaatatcagaaaaggaaacagtagaactccaagcttgagattttctgtagaaatctacacagacaaatatttaatcaaaacttactcagtaaaaactgagtagaaatcttgaaacaaccatgaaaaacaacccaccaattggttttctctgctgttctaagaccctcctcaagcccttcagtaatccattgctgagagaattcatggtaaatctacgcacattgaggaaaaacgttaaataataaaatcataaaaataatcatcagaacata

SEQ ID NO: 62985 - DNA, 426 bp, Oryza sativa
  unsure (1)..(426): unsure at all n locations
agcttaagagtatgcactgattccaggttattcttattatggggagctccaaacaagattgacttcctctctctgtcttatacaagacacgcggaagatgtgcgacaggttagtgactaattacagtatggatagagatgcattttcctcatatttcctgtttgcccgttgtgcttgaaagttttgcaagtctactgtacagngaaaatattgcatgtctatattccaatatatactctcctctacctcttcatttggtatttgggaagaaattctaaacagtgctggaatttctccttacattacaggcacgtgagttcctctcaaagttaggcgaccttagccaaactcagatttttgccaaaattgagaatgttgaggtatttgcaacatactctttatatatttcttagccaactttgattt

SEQ ID NO: 62986 - DNA, 426 bp, Oryza sativa
agcttaatgaccgcaactgtaaggatgacttatatttcatcgatgttgtccacctctgcgtttcaactaggtacatctcttggggccgtacctatgatttgtggattgctcagtattcatggtagcacacatgcccactgcacacgctgcaaaatgaagatgaacacgctttatgctttcgcgtaagacaacaggattcttagtgccgcccatttctatagttaaattggacataaaacgcgtatgagcatgttggttagtcccttgtcagttgtcaccttagatttctagctagcacttcaaccttattttgctatgtttttatatagatgcaaacacaactgtttctaactttttattactacttgcccactagttttgtacgtacgtccttcacccttcagagtccagagtaagttaaatact

SEQ ID NO: 62987 - DNA, 422 bp, Oryza sativa
agcttggcatacaattgatgttgccgcacatttttctactgatacggagatggagccgctgtgcttcctctgagtgagagtatatcataatgtcatcgatgaaaaccacaacgaacttatccaagtattccatgaacactttgttcatcaagttcatgaagaaggcaggagcattggttaagccgaacgacatcaccgtgaattcatacagcccatatcgcgtagtgaatgcggtcttcggaatatcttcttcacgaatacgtaattggtgatatccgtaacgaagatcaatcttggagaatacagtggcacctttaagctgatcgaacagatcatcgatccgaggaagagggtactcgttcttgatggtgacttcattgacagctctgtagtcaatgcacatcctcttcgtcttgtctttc

SEQ ID NO: 62988 - DNA, 428 bp, Oryza sativa
  unsure (1)..(428): unsure at all n locations
agcttcagctccggccagatcaactgtgttcttgccgccgggcctncgtggagagcaggtaggcctcgtctctactcctagcttggtctgcgcgacgcgcttcggctcgcactgaatccatcccgcaattagttttgtcccacctcgctgattttgcgacagagcgacctctttataaactctggttgattctgttgtgttgcctccccggagacacccacaccgactagatacagcggtaagatccccaccgtggccacggtttggcggacaccttctgctgtaaaaattaaaaatggagcagtcataaggtcccctcccgttacggggcacggcaggcgcctgccggttaggctgcatccatataaatacgttaagatgtcaaatacggcatacatacagtccggtctcccgtggaggcagcgcta

SEQ ID NO: 62989 - DNA, 426 bp, Oryza sativa
  unsure (1)..(426): unsure at all n locations
agctntatcagattctattttccgaagttgctcctacaactattcattgaaaagaatcctactcttatgggtaaatgctcaatatccaagtgggcttacaaatttgatcatgatcaattgctttgtggattgtctcgcgtctcttgattagttggtatttatcccccccaatattgcaagtttcttacgtccaaacaaagtatttacttgttactaataaaaaatcaaaaagtttagcctacgttcttccttagatcccttcttttactccgatagtattgcagatcgcaatcgatgcaaagaaaatgaatgcatttccatactataataaaaagtaagtgtaataaatagagaattggatcatgtcacatgacttattccatttctactctatgggatcttaccgagcctctttatggatgacat

SEQ ID NO: 62990 - DNA, 360 bp, Oryza sativa
  unsure (1)..(360): unsure at all n locations
cggaaggatgactaccactagcctactcctcctgggtcccctccacaaacgtttccacgtgcccctgcaggttctcctccgaatccctctccacgtacccttactcgatcaaagactaatttggatccacgcttccctccttcttcattccaacactaggctgcctctctccgcgacagcatcgcacaacaactgttcctcatcgcgggcagccatcctgccgatacaacaaacatctgctaagacacaagacaattatgatctaacaatctaagtcatgtatgctaagagcaaatgtccgacattataaccctacacaaccttacgcgctaagtactagcacaaatccngatacaaact

SEQ ID NO: 62991 - DNA, 423 bp, Oryza sativa
  unsure (1)..(423): unsure at all n locations
agcttgagtgaagtagagagatgcaatctatctttctgcaatgataccagnattgtacataaaaataaggggttgttcagattatagccaaaataaaccttgtggcaatgcaaaaatttttggcaatttactaatattgccaagttttgataggatttcttatgtatttatcaaagtttggtgaaaaactaaatggatgcacctttttgataattttatcaaaagatggtatggttcgatattgtatcagtctgaacaatccctaacattcataaattatacaatatacaatgacattaaaaataatacatgaattgtattataatcatatattttgcatataaagagttacacataaccatttagaacttcgattttgtttgacaataaaagtacaaaacccatgacaaggcgcgaggtgcc

SEQ ID NO: 62992 - DNA, 418 bp, Oryza sativa
agcttgatgattggtgctgctgttggtgctgtatttggaggctcagcagcagaactaataaactctgccatcccgggtaacactgctgttgcacaccctcaagcttatgcactagtaagtttccttttttgagctaggaaggtagcctaaagtttgatagaaacgaagtatactgactgtctgcttaattcaggtgggaatggctgccacactagcatcagtctgctcagttccattgacttcagtactactactattcgaactaacaaaagattacagaattttactgcctctgatggtgatgtctcatcccatatatttgctattttgcttctaagcatgaaagtttgcacactccttgtgacataagctcacccttatttttaatttacagggagctgttggtttagcaatatgg

SEQ ID NO: 62993 - DNA, 428 bp, Oryza sativa
agcttggcatgacattgtgtgatgttgtattcagtgaattatccgcctttactcattaattttaatatgaattagcctattagttagcaaaactaaagaaaattctctagctcacagaggacttaatttttccattaattattagtaaacatgaatataatatacagattgcaatgccatattggcattacactcacgcggcctgatacatcctgatcaattcaaccatccttttctctgagtgatttttctcttgtcgatcgattctaacttccactggctgcatgcttggattgcttgcacctactttattgatcaattgcccctaggaaatgattgtggagaagaaacattgggtaacggccgctatattttttttactagatttgagtaaactgcatgccaagtgaattaattatattggacta

SEQ ID NO: 62994 - DNA, 430 bp, Oryza sativa
agcttgcttcttgctatggctcatggcattgttcatatccctggtagcggtgaaacgtttaccaatcagcttgctgttgttgcatcatagtgttgaagtttgcgagctgtgcatcaacagactgctgccattcccttgactgtaccacatgatccttcaaggtgtgttgctcattccctgcctacagttctaagtgtatccatcctccggatgagttctcccagatcccctcgagaggagactgagcaatgcatcaagaggatggaggtagaccacttgaactgaaggagcacgagtatccctagtgcagctttccggctcatgccaccagtcgttgctagcatccggccaaaacgatcctccggcgtcatgttgcaggatttgggtccaaccggggacatacgcggtcgggtcccaacagtctccgtac

SEQ ID NO: 62995 - DNA, 377 bp, Oryza sativa
  unsure (1)..(377): unsure at all n locations
cagcatgcaagcctggtgcacttcactactatgngattgtcttctggaangttccaaataagtgctcaagatgtccttccacgtctgtcttctttggccctctcacctgtaaaactaaacaagaacaccagtggctaaacccagcttttcaatataaacattcagtcggtcccactaaatttagcgttcttcattgtattccgacctgacatattcaaggagacatcatcttgctgctctagatcgaactcatcatcttctagcgcttgcgactcatgcaatgggctatgttcactgatattgccatctccactctggtatctggcactgattcttactacaattaaccctttcgctcctgccatttcacctggaaa

SEQ ID NO: 62996 - DNA, 423 bp, Oryza sativa
agcttccatggtgaacccaacatcacttatgctgctgcactgacttctgctttgcttgtgcctccagttctgggagatcatcaaaccacagctagcacgccaaggaaacatcaaggaagttgtcatccgagccttgcctgaaacaaaagaacaaaaaataacacgcctcggatccctttttccccttgcatgcacaatgtttaacttttaacctcatatcaccaagccagtaggaaaaaaggactaaaaaggcaggagcatgtgcacgcgcggacagaggcttcagctggtagtaaaagacaacgctagtgctatctactactccctccgttctattttaagtgcaaccataagttttcgtacctaagtttgatcgtccatcttatttgaattttcttataattagtattttcgctgtatgag

SEQ ID NO: 62997 - DNA, 420 bp, Oryza sativa
agcttcaaataattaagttgccacatatcttcttaattattgtatcaaaatcgtacctaccttgcaagttggtgcatttatgtgatcacttataaaatttttatactaaattacacctatctaccaagttgttacactagattgctcatttctcaagttcttgcactattttgcacccacatgccaagttgatacaccggcgatgcaatttactctattttttgggttggattgccctaatactttgctttcttgatgatttatttatcttgactcaattaacaagctttgatcgatggtgtttgaaagttctaagtgtttaagacagcttaattttctcataaagaaaactaaaatactaatattctacagttacggtattttgtgcttataatgaaacggtcaaaactttaatcaaca

SEQ ID NO: 62998 - DNA, 419 bp, Oryza sativa
agcttttaacatttgcagcggcagttttttgttcaacattccaagtcaggttaagccattttgcaagaagtaaagcaatattagtagcttcctaagctttagtttcagtttctttatcagtggtagaatgctgaccatgatgccggggacggcaggggggatccttctgtggaggagcttgagggtgtagtcagatacttgctcaggggtggccctgtccttgcactcggcaccgggtgtcaccatgcttggcttgaggaggatgccctctaacatcacattgttctcggccatgtaaaagaaggtctccgtccacaccttctgcgccacctcgaaggtcctgtcgatgccatgctcaccgtcgaggaggatctcatgctcgacaatcggcaccactccgttgtcctagtattattcaa

SEQ ID NO: 62999 - DNA, 423 bp, Oryza sativa
agcttaacatgtaagcatatagtaattatatctataatttatttcattctaaaactaaacatacacatgctaaatcattattctcaaatcattttcataatatttcaatccaaatcatttcataatttctccaatatctaacatatatcccgcagctaaacgcggcatatcatctagtcatttttaggttgagagccatgtttttttcccaatcaactactataagcacataagtaagacaataagggtgatattgacacttttgaagaaatctacggtcaaccgacaatcaactcatggaatgagcatatatgggatcaagatgaagggatgaggctaaattaagggacacataaggctaagggatttgaacgttcataggtgggtaaaggattttctctataactgtgcgtatcataaact

SEQ ID NO: 63000 - DNA, 345 bp, Oryza sativa
agcttgcttcttgctatggctcatggcggatatcaaatccttggtagcggcaaaacgcttgctagtcaacttgctgttgttgcgtcatagtgttgaagtttgcgagttgtgcatcaacagactgttgctattcccgtgactgtaccacatgatcctccagcgtgtgctgcatgttccctgcctgcagttcaagtgtatccgtcctccgggtgagtcctcccagatgccctcgagaggagattgagtgatgcatccaagaggatggaggtagaccacttgaactgaaggagcgcgagtatccccagtgcagcccttgcagctcatgcctcctgctgtcactggcac

SEQ ID NO: 63001 - DNA, 430 bp, Oryza sativa
  unsure (1)..(430): unsure at all n locations
agcttgtccgcgggtacaccaaacacgcacttatcggtgttcagntttatgcgggcggagcggaggttttcaaaagtttccgctagatctgaaagtaaagtttcttggttgcgcgtttttacaaccaagtcatcgacatacgcctcaacattacgtcctatttggctacccaaagaaattcgagtagtacgctgaaaagtgggacctgcattctttaacccgaagggcattgatgtataacaataggttcctacgggggtaatgaacgcagtttttttcctcatcctccctagccatgcgaatctgatggtaaccagaatatgcatctagaaaacacaaaaggtcgcaccccgcagtggagtcgacaatctgatctatgcgaggcagggggtaaggatccttatgacatgccttgttaaggtcggtgtag

SEQ ID NO: 63002 - DNA, 429 bp, Oryza sativa
agcttatcataaagggcttcgacaaggggttttattcgttctttgagcaaaaagataaagatcggatagattcgaaccgcaattgcaaaggtaatcactactatgccagcccaaatcatgatcttcaccaacttggatttggttctctcgcgaaaatcgcgagttgcagagatgagaaccatgaaaagcaagatcccgaataagataacagaaaccgaggaaaccacaagagtgaagactagtagagtctcgtcttttgtcattctttgctcctttttcactcaatgattcattcgaatttcccgaccaaaaattctatatgtctattcatagggcctcgctgctaagtgctacaagatctagtgcactggaactcgtggttatggacccgaatcctttagtatggaacattgtcttttcaagtaaaaa

SEQ ID NO: 63003 - DNA, 395 bp, Oryza sativa
  unsure (1)..(395): unsure at all n locations
gcttcgacaaggcgttttattctttccttgaacacaaagataaagaacggatagatttcaaccgcaattgcaaaagtcatcactactatggcagcccaaatcatgatcctcaccaacttggaattggttctctcgcgaaaaacgcgagttccgagatgagaaccatgaaaagcangatccccaatatgaaaacacaaaccgaggaaaccacaagagtgaagactagtagagtctcgcatatgaattctttgctcctttttcacctcaacgattcattcgaatttccccgacaaaaattctatatgattattcatacggcctcgctgctaaatgctacaagatctaatgcactggaactcgtggttatggaccacaatcctctagtatggaacatt

SEQ ID NO: 63004 - DNA, 406 bp, Oryza sativa
agcttggtgataaacgaagaaatcagatatgattttatgcaagatcatgatagaataccaaaaaccaatcaccataggagatagacatatatagatatccttgcaatttgtaaagatcatcgagtgttgtaatatgtcccaataaattttcgatgtcatctatgacagtggcaaaccaaaattacattggaccattgacatttcctccttagatgactgaggaagcatgttcaagcataaatattccaagaaaatccattgcatcagcctagatatggctagtagatgcaatagaaaaattaaagggaataagaaagaggtagacacaaatgtagtggtgtacgcttcctgtgggagatgtattgcttagtggttagcaataaagggagatataatgatatgcatg

SEQ ID NO: 63005 - DNA, 308 bp, Oryza sativa
cgctcatatagctcttagatccctaccgtatattgtagttcttatgccatctgaagatgtaatttcgcttttctgtcacgcatgcagcctttggatggaagggagggcaaatgagctgcgttacctgaatattaccgagagctgcactttggatgaagccttgctttgcattcatgtagggcctcttgcgtgttcaggaaaatcctgatgacaaggccactcatgccttttgttgcgtccatcttggagaatggaagcatcacactggctaccccaaatacctttcatattttgcttcaaggaaaaat

SEQ ID NO: 63006 - DNA, 416 bp, Oryza sativa
catgcaagcttcaaatacttcaaaaatatgtttgtcatgccaaaacttctattgaatttattttggtgattacatacaaatcggaggtgcctaaaaggtttgcaacttcatcctccaatgttttatttgtcatactacatttgcacctatgttttgcacacttttttttgtctccaaaatttagttgtaagttgatgaaagagaaaatgtgtgtggggaagaaagaatatatagaaatttagttcatttgctaaacaaggttttataaaatagttgagaaggaaaactctagtgaaagttaatcttaaataatagaaaacaaactaaaatgaaaattaaaagaagtaaaacacattaaaattagtttaaaactctacaaatagtttttaagaattatttggtgtaatattttatga

SEQ ID NO: 63007 - DNA, 412 bp, Oryza sativa
agcttgtactcggctcgtccaatcctctatctttcacgagcttgagaggtataataagttgaaaacaaaaaattgtgcacaaaactaatggttctattactaacaagttgtgccatgcacacctttatgggaagaagtattacttgttggtaacagagcattgatggcgatgtataaaacttcacaccatagtagtatagctgcacacgcttttgtagggcagtactatacgctatatggtactgtgctacagcactatacgatagtagtaggtactactagcacttgagcatacatgaggctttgttgtgacgtgtgttatgtagcataacatttagaacaaaaaaaaaaatttaatccaactaccacaagggtctattggactaatgctaccatgcgtgagtgctgatct

SEQ ID NO: 63008 - DNA, 426 bp, Oryza sativa
  unsure (1)..(426): unsure at all n locations
agcttacctgagcttgagagctcagcattatcttctcagtcttgntctcccttcacagtttcagatttatgctctttggctgtcaagactcgagcagtctgttgccttcaccttgtgcttatgtgagttagtttctgtcttctctcaattattactagcacttgattcttcagaggtcatgtgggtttgaccaattagcacattgcagttttctgtttgatgtccatggtgaatttgtggatacaccttatggttttcaaactagtgttttggaaacaacttacatgctacgcattgaaatgtttgctttctgaatatcttgtgtagaagttctcaaagaacatacaccagctctattgataaccttccagtatgctgacgattcttctcccacacatttgcaggttgaggatagaggctctgttg

SEQ ID NO: 63009 - DNA, 423 bp, Oryza sativa
agcttgagacttggtactatgggacatattatgtttgcacatgtgtgtctgtctgtccctgtatctaaaccttctctatggaccatatggatggagtattacttcaaccactggtcaagctaagctagcaaaacgaaatcatgtaatcgttatagttgccaatacactgtccttgctgccagctgccttataacaagcttcagagtaggagccaggctaggcaattcagagtaacagtccatgactccaacagatatttcctcaaacaaaaaaaaaaggttctacaagtacatgaatgaacattcttctgatagataattttttccccagaaaaataggaggcccttaaaagcagttttacacaagtacatgaatgaacattcagatatttacacacaagctccaagtcatttttttccatct

SEQ ID NO: 63010 - DNA, 369 bp, Oryza sativa
catggcgctgctcggtcttctaagcaattgactatatacaacatcgctgctttctgccacgtaagagggcattattattgaccaatactacggcttatgctgattatatattgcggccattcatcaggcgggtggtaaatcctttatgagtgtattcactcggattctataccacatatgccatatatttccaggtgtggtggaaccatgtgtcttctagggacttaagcacatctattaaaacagcgtgcgcatggcgtatgaccaatactttggaaatttctttattcacaacatacaagctttattatagcctgcttgctatgtgaattctcaataatgcagccacctttacgcacactcatcata

SEQ ID NO: 63011 - DNA, 376 bp, Oryza sativa
agcttcccctgctcgactagccccattttgttgcatgccgacagaatggccacgaatgtggctggtgttggattcactttaacccttgtcatctcttcttaaaggttgagagcttcgcggatcaaaccatggatggcataagctgtcaccatggtgttgtacatgatggcatcgttggttgctgatgaaacaacggtgaaagcgctctctgcaaaagtaatctcaccgcactttgcgtaggcattaacaacagcgctggctacgcagaagtgattggaatgacctgtcttgaaaacaagccaatggatgcatttgcagtgcctgatcaacgcagcattcgcacaggcatttatgaccgttgccacgatgaactcat

SEQ ID NO: 63012 - DNA, 423 bp, Oryza sativa
agcttattaacatttgaatttgaggaggagtttcttggatcaaggcaagacatgcataccacaagctcggaggagacttcattgaagtgatgattcatttcatgcaaagttgcatctaagcctgctaatggactgggtttaagtggatatagtgggttggatttcagtgtgggttagctttgggcgggtggaaatgggttgctgcacctgatggactggactggtttggatggagatgggaaatggtttggattggtttagttttggctgcaaaagtttggtcccagattggattcaacccatgggtatccactggattggccccaatcccatcgtctccttgagaagtcgacaaccacatcgccgccatcgctagctcgacttcgtcgccggtggcttgctaccttcctctccctcctctgg

SEQ ID NO: 63013 - DNA, 471 bp, Oryza sativa
  unsure (1)..(471): unsure at all n locations
ntgtaagtcatacatctaatgaactaacatgatatacttatgttaccatgtcatggccaacacgagcgtggctcttgctaccagctgtatgtaacatgcgcaacattccgcgatttgccttgcctcttatggagcgggcctacacaacagttatgaacacaatatgtaggctattttaatgtaaagtacagcaaataacactggatgccttaccacagcttctggagatctccaatggttaataagccacttccattgtgcctcgttgactcttaagtcacgtctgttcataagttcctcatcagtcagatttgcatcaaaatgtttcttcttcaaatcagccttataatccttccatatcatatgtgatgtcttcaacacaaaatgtaaaccatattcattgatctcataatgtttctcgtttaatataaaaaatattgaattagtaggatatacaataataatggaaca

SEQ ID NO: 63014 - DNA, 445 bp, Oryza sativa
agcttcttgatctcaggatcattgggaactctttctcgttcgccgtaccagatggtcccatgttcatcttcagaaaacccaattgcttttcccctcatcatattcttgttgatctcttggataccataatcacctttttgggcttctcgaatttggtaaaggagtagaggtttcgcccctaaggtcactatttagccataactaactattcccaaattcaaggcctcaagctctcagcacaatccaggaggacactgttcatagatgatagcattgcagtaactcttccgactcaaagcatcaaccacaacgttaactttccccggatgatagtggattcccacatcgtactctttaatgagctctaaccatcttctctgacggagatatagatctggttgagtgaatatatacttcacacctttatggcccgtatatatctcac

SEQ ID NO: 63015 - DNA, 464 bp, Oryza sativa
  unsure (1)..(464): unsure at all n locations
tacggacctatgaaactaagcttgtaacaatctcatgtctattgtgcaactntgtttcaatattttaatggaaagatcaggaagatttttcacttttctaaacctttcatctttacacatcttagtgaggaagagtacttggctaactaatacgtgtacatgtgcatatattgaagtatacttgtttcttgataaaaaaaaacttgggtattcctggaaatacgtaggaatcatggtagctccgcccatggcactacagccctgtttccccaacaacacaaacagcttttatctacttgctgcacaagccttcctaacatggaccaccagcatgaataattagctcctacttgctagaaaagtctataaacaatgcatttctatgtggtgcatctaaagcatatggctcactggtagctntagtccaccgcaaggatcaactttactactaccaatacaacttt

SEQ ID NO: 63016 - DNA, 413 bp, Oryza sativa
agctcgaggcacaaattattactgcattactaccatttctattttaatcataccaaaattatgaggcatggaatactgccataactcaacaatagcaaaaactgtgatacaactaacaagagctccatacatccgcaatcgaactaacaaaagatctatggaggacataataacacaaagggtccatttatttttttattcagtaacatcgaaagaaattttcattcagaaaaatggtgcacgaccaggaattcccttccgtccgtgacgaacaacccttgttgatgatagtaatttcttattcttgtagcatcactacatatttcatcctcatttccagtatttgcaatagtaccggtggtgccacaaatctctatgccccttccagtaccaattgtggtagcagcaccatc

SEQ ID NO: 63017 - DNA, 440 bp, Oryza sativa
  unsure (1)..(440): unsure at all n locations
gcttgactgcgccctatacactctctcctcactggagaccaattttttctgtatatgaataggagagnggagctagcaaggagaatacaacgttggcctagagagattacttttagaggagcacagacggagagagaatgaaaagaaccaaccgtatgccagtccataatgacccttccttttcctcctgcatctgtcagtgatggagaaactaactttagtctgtcgactcaaaaccataatagtctcggcttcaaacataaccgggactaaaaattatctttagttctcggtaagaaccccacatccatttgatgatctttagtcccgcgtggcgaaatatcatctctagtacctggatttcttctataattgggatcttacgccggacgaagatctttattatctcgtggtaatactaatcgggactaatgatcata

SEQ ID NO: 63018 - DNA, 380 bp, Oryza sativa
  unsure (1)..(380): unsure at all n locations
agctcggggggttntgttgacggtcgttattgatcattttcgaccgtcaatattaccaaaatagaggagaactagtgatgcttgcaatgcatatatatatgttagaataataatattccactagtattaggtatactaacctcttgcagggaatgacactaaagtggaggagaatcgacatcaactcagacgataaatcaatcggacgatgtcaagaactagacttgtgtatgaatgggccaagaactcagaattgacacgatgaattgggcaaaaattcacaagtctgcggaaaagaacaacggagaaggccgccagccgaaattgggctggattgaaccggccccaggttcggctgaacctccctcgccttcattgag

SEQ ID NO: 63019 - DNA, 425 bp, Oryza sativa
tgagctgaatataagaggctctattgtactatattgtatactataataggaagagagtagagtaggagtcggaagaattccgaagttgtcggtaatcttctcctatttcttttattctgtttattactctgaattcaatataatattcttcttgagtaatttagatttatcttgtgataattatctcttggttagttcctaatcagcatacaggattattgttcgctataatcaactaaagtatagtgattgctttggtgagttataaacactaaagtagatattaatttattagatgtggtgtttaggtaattattatccagtaattgctgcgtatcccacaatatgttgaggtgggtgtagaggtggtgacagccctcgagatcactgaagtcctccctgtccaggtacctagtagagtgaca

SEQ ID NO: 63020 - DNA, 396 bp, Oryza sativa
  unsure (1)..(396): unsure at all n locations
gatgtcacggagaaagagagcttctggccagctggcacgttcatatgctgcccacgaaagagcaaaaccgtgaaagctgaagatcatgtcataaatcttctaatctcttcacatgaaaggagaaattgataatagatgttatggtgccaaacttctgtggaagtcaaattcaacccttaacttcagaaatataaaatattgattctagcctttcgaaatacacagcatcatgttatcgccacattaaaaactgaattggatctgtaataggcaccatgaaagactcccattggggaacattacatcctaaaataattacttgctatatgctactcccttcgnacttgaaagaaagttgttacgacaatgttcgagtcacacattgggaatataaat

SEQ ID NO: 63021 - DNA, 464 bp, Oryza sativa
actcaagcctttcctgttcagcctcatggctgagcaagcaaaggcgcacgatctctcttctagtgtgagtggcgacgacggggagccgaacccacgccgtcgagctcgtactccaccgccccctccacgccaaagtcctaagcggggggaggcgctcgagagggtcgaaagatccgcgacttcaccgatcgctggcgatggaaaagaacggcgagatggggagcgtcgcctcctcgtctacggcgacggcagcacgccccagggcgcgctccaagctacgggcgcgctcttacgccacccgcctgtcgttcctgacccggagtctccagcccaacgatggctggacgacgtggccaaattggtcatgacggcgcggcagcgcctagatgctggtgggcggtcctccgccaccaaagcctctggtgctgctaccaccggctccgcgtcgtcaagacagagggcac

SEQ ID NO: 63022 - DNA, 442 bp, Oryza sativa
  unsure (1)..(442): unsure at all n locations
agcttcaatcgtcccaaaatggactttgctttcgtatcaaatggatttctgcttgccgagcctgcttccacttaagagagtagaagaagctaagatcgatgctttcgtatcaaatggattttttctagccgagcctgctgccacttaagagagggcagaagaagctaaaatcgacagatcagttagcagcttcttccaacttggggattntcaaaatgtgataaacatatgatgtattttcgatattatggaaagcttcaacagttatttctgaaaaagctatgccataatcatactcataccagctaattgtgctgtttcactacataaacattgtttgttagcatgtaatgaacaaaagtcactacgaaaaaaatcaactaatcaacatctccgacaaacattgtgcttgacttctactagaaaacttcgtagtagtcac

SEQ ID NO: 63023 - DNA, 464 bp, Oryza sativa
ggtggataagagggcccacaagtcaggtgtaactatctttataccgtcttaactgccacaaccgcctaaaggacccacctgtcagtgaccctgccgaggctggaggcctgctgggccggctcatgttcggtcgaacctagggttcggccgaaccctagctgatacggctcaactcggccctccacgtggacgtccaggatcgcttctcaatgacggtcacaagggcaaaaccgacattacgcatcaagataaccgtcataccggccctataaaaggaggagctcactcatctctctcgacacactcaagcaagctcaaagtcctcttcatactttagtattagtatcttagtgttaagtggagtagaatagaatagtgttcggagtcctctgagtcttcggaagagtttcggtatggctctagcagctcttgtattctcttctataatactttcaatattaatg

SEQ ID NO: 63024 - DNA, 446 bp, Oryza sativa
  unsure (1)..(446): unsure at all n locations
agcttggggggttntgttgacggtcgttattgatcagtttctaccgtcaatattaccaaaatagaggagaactagtgatgcttgcaatgcatatatatatgttagaataataatattccactagtattaggtatactaacctcttgcagggaatgacactaaagtggaggagaatcgacatcaactcagacgataaatcaatcggacgatgtcaagaactagacttgtgtatgaatgggccaagaactcagaattgacacgatgaattgggcaaaaattcacaagtctgcggagaagaacaacggagaatgccgccagccgaaattgggctggattgaaccggccccaggttcggctgaacctccctcgcctccattgagatgaagccccaatgacggttggaggctattaccaaccattccaaccatcacaaccgtcatagttca

SEQ ID NO: 63025 - DNA, 423 bp, Oryza sativa
cctatgaaactcaagcttacacaaacacctccatcatcctgtgtgataagcaactgtggccactcttgctccacaacaaatgaacaatgcaaaggatttcaacccttttcattggtaccaccagtcatgcttatcatcctgctaatgtttcccaatcagctgattttatcccaaaccgcttagtcatctttctgaacaagctgccaataagaagcatctctcaatcttcaaatctgaatgtgtgctgtgtgcatcacaaaacccaggctcggcatgccaaatttcccaccaacaatcatttgtcctgtgttgctagccaagttagaatctgcacttctcaaagaggttacttgccggataaactacagaagcgctcatgcactctcagctgggaaaaaacccatgttcccctcgccctgagct

SEQ ID NO: 63026 - DNA, 432 bp, Oryza sativa
  unsure (1)..(432): unsure at all n locations
agctgtctctcataaactnttaatctatttactataagggaaagatcaatcttaaagagagctttccaggaaacaaccgaaggtggtacattctgaaaaatgagagcatttcgttgcttccaaatgttccatgcagcatagagaattttttcaacaaaatgagtggatctatatgagatctttgcctgcagcagcatatcatcaaaattgagagaaaggttccagacaattcccagctgcgcccaacaatctgagctgaattgacattgaaagaaaaggtggaaagatgtttcccttgcttgagctggacaaaggacacatgctagatcagaattttcaggagggtagtgccttctctgcagcatatcataagtgtttaatctgtcaattaggagaagccaagcaaacaccttaactttcatagaacatttg

SEQ ID NO: 63027 - DNA, 487 bp, Oryza sativa
  unsure (1)..(487): unsure at all n locations
tattacggacactatgaatactaagctaacaaggcatcttccaagttgcgaaaaccagaaatgaacgacattgccatgtgctttctaatagttcgaggataatagagaacaccaatacgaatattatattttctctcatttatgaaaaagtaaattaaaacactatcaggattgaagttatctggaagaaaccaggattacagcattacaggagccctttagtattggcgccatgtttcgagcagcacccctgacaaccagtcgaaagtcccttttcaacccaacatattttgcatacttctgcaggccaaagataaaataagagcaaaattagtaaacgagtgtcaatctgtgccaactttagaagagaatantaattttagatgtccggagttaggatagaagacacctaanataacaagaagctaataagatggcaggggttcanggtaggcattaagaagagagaatggagtaataacttaac

SEQ ID NO: 63028 - DNA, 407 bp, Oryza sativa
  unsure (1)..(407): unsure at all n locations
gtcgctacaccactcgtccaagctatgttccttaataacagnggtccgagtgcacttgacgcaaccgaaatctttgacaagctgagagttgcaccggatgtatatttcaagaatatcaagaaagctggaagtatgggagctagtatggcattggcgatgaccaaatccttgtacccgaggattgaaattgataccattgatggctttgcagacgggacaagcgaagaggctgctcttgatcttatcagtaatgctcaaagtgcggctgacaagattgcaagtgatgttgtaaatcaattccgcaacaacgaccttcagtcgagcaacaataactctgatgatgaaagaactgattctgactgagtataaatgtagcaaatggaggctcaattagtataatactggtg

SEQ ID NO: 63029 - DNA, 457 bp, Oryza sativa
  unsure (1)..(457): unsure at all n locations
tggccgatgccttgtgtcgggctctgtcgtggtagcttatgataagttagctgctggtgtggtgttgtagttgtggttttcgctcagttttccctaattaactgagcactgtaaggtttgatcccgttttctcctcaaaataggatatcttcttcttaatataaaacgtcggcaatggcctgaccgttcgaaaaaaaaagttgttgtaattaagtaattaattacgatagttaaggacacctaccatgattggcacaatgagggcacatcagactttcttagttgcgtgtgccgtatatttgatatgcacaaaactaggatgtgccacacggattgttaagtacgtgctactatgtgntttagagaaagaatgtcatatctttgtaatttgatcttgttgtcagtactagtacaagatgacaaataccattgtgcatttgtgcttgacgtgcataca

SEQ ID NO: 63030 - DNA, 431 bp, Oryza sativa
  unsure (1)..(431): unsure at all n locations
ctgcagctgccacccattgatctttaatgtagnatgatatagctatggtataaccacaccggctaaaataatgcatatgccgctacctattggatatatttatactggcttataggttgtatgatatttttgggaggttttagacttttattattcttaaatatctttgaagattgttctaaagcatgtgtagcacactgagatagttgtgttatggattatgtagtatactaaaagatatgggtgaaagtatatctaagtctctaatgagttntggattgtattagtccctattgtgatattgataatgcatgacgacccctacaaatgaaagcaaggtaaaactctcaaggcatttacattattttttattttgaattcgagtcataggaaatgccacactatggagaggtgttcgagtcaacgcttac

SEQ ID NO: 63031 - DNA, 457 bp, Oryza sativa
  unsure (1)..(457): unsure at all n locations
nccttttgttttctcactgtccgcaagctccaattccttctcataatccttcctagacagaccctgcgattgttatctagaatgaattaagtacgttggaacagaaggcttggtctctcataattcaaaataaaaatagatggcagctagaacacagtccatacctctcaatcttctatccctgtagttgtaaaatatgaagtacatggtgtccttcaagatactaaaaaacatgcttccacaaggcttctccaaattagcccaggcatcctgccgattgcagtcagagtctcagagttaagttattttagactctaagaagcactntacagcttgcccatttctaataacattggtcacattagccttgtatattccactaattccctagaaagtggctatcacacaagacctgctgtttgcccttagacggtngaaattaaataaacataagaaa

SEQ ID NO: 63032 - DNA, 429 bp, Oryza sativa
  unsure (1)..(429): unsure at all n locations
agcttcaacggcatgctggattggtcatttgtcccacaatcaaggactaattctttcagtcctttttttgatggaaaaacttctttactcatcttgctaataccttgcaggaagcagatgtactgaactatatccagtccttgctcatccttaactagctcattgtttatggaacaattcagtcatttttcaacattgtaaggatggaagccataaaaaggcttcatgcctattacatcgtttctgggctgtacaattgccattatgcaatgtctaaggttctcagatcctatgccattctccaaccagatttggttnttgctcataaagtgtttgatcagattgaagcaccaaccacttttctttggaatatcctaattagagggcttgctcaaagtgatgcaccggcagatgccattgctttctaca

SEQ ID NO: 63033 - DNA, 446 bp, Oryza sativa
tctcatcgtgacatgttcttccgaaggcacgatagcttcaacattggaaggacagatgctaccctggagagattttctagattcaagccatattttgtccccgagacagtggaagggagcttaagtaatttccaaagacagtttagtgataaaagtgagtctaaattgagttctgttactgaatctgatttggcctcttcagttgccgatcaggaggaccacaaggacctcgatgaaaaagatttgcccaatgagcatgggtctccagctctgcagagacaggatagcgaccttgcggatgttggaagtgaatgctcggatggcatcaactccgtggatgttgaattagacaacagtgacattgatgatcgtgagattgctctacaacactttgtctttgaaagatcacaggagagagaagcatatcttttctcaacaaaaagaaa

SEQ ID NO: 63034 - DNA, 442 bp, Oryza sativa
  unsure (1)..(442): unsure at all n locations
agcttctctagtactggagagctcctcanaatgtaaaccaatgggccgaagccagcatccgcatccgaaacattaagcaataatgtttttagcttgctaaacgttgggcgcataagcaaatcctttctgacaatgaactgcatgaagcacaacagaatatgaacaatttaacatcaaaactccaaaagttttgacccatactggattaaatatgagcattctgcaggatttattttatgttttgtagtacaagattttgcatgtttatgtttttataaaatacttaaatgagtcataccagctaaatacacatccttcaatggatacaacactaattaatctcaaatccatgcatttgaatattgtgctgntagaagtacttgataccaacgtaccgtattggcattcacaaaananaaagaacattangaagatctgcgta

SEQ ID NO: 63035 - DNA, 465 bp, Oryza sativa
taccgaaccactatcagtcgccatagattcatccgttggatcacaatcgagcagcccagaatcattctcgcaataaatatataaatgctcaccaccaaatccttagatccagccctgctcttcccgattctgttgtctgactctgttgtctgtcgctatatagaaatgtatgtcgggaaagctaacatatctaggtcagactgtctgtcggcaaaggttctatctgttggtaaatccctttaccaacacgtttttcagcgccacacgccttcagtcgcggtaatagccttttccgagagataagatgatctgaaaggtgacctctgctgacaaatgttctgtcatggtttttaggacatggcgtagtgaaacctttgttgcgaaacagctcatttcttctcaggcttagccaaatcattgatttctcttcaaccctcacttccaaatggacaccacatgccccat

SEQ ID NO: 63036 - DNA, 431 bp, Oryza sativa
  unsure (1)..(431): unsure at all n locations
agcttgagactgtcccggcggcgtcgcttcttactctgtatttgagaaggtgaaacaaaaagaaacacagcaaaaaaaattagtactacctctgttccatagtaagtgtagccatgatattccgcgtcaactttgatcgagctaactttgatcatcccgtttatttgaaatttttttataattagcatttttgttgtcatgaaatgataaaatatgaatagtactttacctcgtgacttatgtttttaatttnttttaaaaaattttcaaataagacgaacggtcaaaggtggacgcggaaaaccatggctgcacttattntgggacggagtaagtacttccttcggcccataataataagggattttgagttttgtttgaaacgttgaccactcgtttattcaattttttaaattatatttatttatttg

SEQ ID NO: 63037 - DNA, 462 bp, Oryza sativa
  unsure (1)..(462): unsure at all n locations
tgtgtgacttgccgatagagcatgagaaaaggaattagtttattctgttacagcatttgtgagaaaatatcagcaagagaatacatatattataaatatgtctgtgttctagaatgaatatgcttaaaccttacctatgtcctacatgatccaaggatggctgaacacgctcaagagacacaatgtgtccaccaaaatcagatttgaacttattaatatatctcatcatctcagaaacaggcctctggcacaaaaaaaaaaaggagactaagtaaaaataaaataaacaggcctcttgcagagagaataagtaaaaatattctagatagtaattttctgatttataggggaagaggtgaaggtagtcaaaacacattaaaaagcatggaagagtangttaactgaatcttaacggttacattgaaaattgaacaacgaaaatgcacttaatatgaaaaatca

SEQ ID NO: 63038 - DNA, 124 bp, Oryza sativa
  unsure (1)..(124): unsure at all n locations
ccccccccccccccccccccccccactaacaaaagaaganngggggctnnaataaaaaaaaaaacccccccccccnnnnnnnnnnnncnaaaaaaaaaaaataacccccccccccccccccccc

SEQ ID NO: 63039 - DNA, 422 bp, Oryza sativa
  unsure (1)..(422): unsure at all n locations
acctgaggctgcaagcttaccacttcgtcaccgagggatcattgctaataaacacgcctgcaaagaagatggagtattggactatgcattttgacgggtcaaaaaggctttcatgcactggagcaagagttgttctaatctccccgactggagagaggctgagctacgtattgtggatacactcttctgtttcccacaacgtggcagaatacgaggcgcttcttcacggactaaggattgcaatctctttggggattcagcatttaatanttcgtggagattctcagttggttgttaatcaagttatgaaagagtggtcttgccttgatgataacatgaccacttaccgacaggaggtatgcaagttggaagacaaattcnatggacttgagctcacccatgttcttcgacacaacaatgag

SEQ ID NO: 63040 - DNA, 435 bp, Oryza sativa
  unsure (1)..(435): unsure at all n locations
taatgcatgatgatgagtacgtagcttacaacttggttcattaagctaaagagtgttggcttataatataagagattntgtttatttagttatataagttaaatctcttatatatcatagcacgtagttagttatagacagctcaattcggcttgtttagaacccgagtgcattcgtccaaaaaattaaaaaaagacctcgagtttgagcgaatagaaagttttgagtcacccctagatgattgtacttgtttactgtgaacttttaagttgcacttcgaaattttgccacgacttaaaaaagaaagaagaaagaactatgaaaaatggttcaatttcaccgtgaaatagaaaaggtccatggaagaggtctagaaagcaccctcgatcaacttggcccaacctagcaacttccgatccanagctgatcatatca

SEQ ID NO: 63041 - DNA, 441 bp, Oryza sativa
agcttgtcaactgaaaaacaggtgataactactctcatcaatcctaaaaaactgtcatttctcttcttttagacctcttccaatctcattatctttagtcagtacgctctttttgagcaccattcaagcaaagacatgaatttcagagaacggaccccattcaacttccacataaatttcggaggaaacaaagcaccctacctttttaaaagctgcaaatcatagtgcaatgggcatcggaactttggaagacaaggccaacctatactactcctcctaaagtgccagtatatcattgcattcatgctgtagttcttcctacaatcacaacatatcgtccatactgccatcctgaatgcatgctccattcacaacttcaggaaccttaatgttttttctgcaagtgaatattaagccttgcacttttgatataagtttaca

SEQ ID NO: 63042 - DNA, 426 bp, Oryza sativa
ggccatgtatgttgacagatgcaccggaataatcggcaatggaggccctggaatgttggtactacaaacggaatatagaaagttcaagatactagtaccctacaaaataacagcactctgtagaaaaggaacaataaaaaaatatgcaaagatcatgcatgtgagtactatggtgacaggtaaaatgttggagacatccccctagaggaataatctcaatatgagcattgttttgcatagagttaagttcatagctatctatatgctcaacaggcctacaagaagaaactaaactctcaagttaaattaggcctgttgatattttacatgtttcagttcatttagtttaaggataacatatgtagttaataatgtaactacccaaccctcatccattaggtggtattgatagacaggtgccacttg

SEQ ID NO: 63043 - DNA, 430 bp, Oryza sativa
  unsure (1)..(430): unsure at all n locations
agcttattnntgaaatataaattgaaaaataatattaatataaatgctccaatcttatagaattcaataagaaccaaatataaaacttgtcaaaaagattttctctaatatttttaaaattaaaatagtcaaatgagaaggaaagagaatacaaataatttgtactaactttggataaattttgggatggtggcaaaaatggatggaggtaaataaattggactttagcctgagattatgccacaccctgattttcgtttcaggatttataaattatttaataaattattattagaatttatattaaatgttcattaatttacaagtaaagttaaatgtgggaaataaaatttcctaaatataaagcatggatgtattctaattttattaaattctccattgttaattatactctctggaatattctcgg

SEQ ID NO: 63044 - DNA, 485 bp, Oryza sativa
  unsure (1)..(485): unsure at all n locations
tattacggacactataaaactcagctgctggggggcgcatccgctctatagctcgatcttcttgtgttggcctcnatgcctcgggcagagaccaagaacccaagaagcttgcccgcaggcacgccgaacacgcacttatcggggttcagctttatgcgggcggagcggagactttcgaaagtttccgctagatccgagagtaaaggctcttgtgtgcgcgtcttcacaaccaagtcatcaacataggcctcaacattgcgtnctatctggctacccaaattaaatccagtagtatgttgaaaagtaaggcctgcattctttaacccgaaaggcattgttgtataacaataagatcctatgggggtaatgaatgcaagtttttcctcattcttcctagccatgcgaaattgatgataaccagagtatgcctcttgaaaacacacaaggtggcaccccgcggnggagtcgacaatctgatctatgca

SEQ ID NO: 63045 - DNA, 400 bp, Oryza sativa
  unsure (1)..(400): unsure at all n locations
agcttctgaaaactctcctgtggaaagcttggctagtctccagttgaaaattcggcggaagatagtaacccatcttggcacaaggtggtactgcgaaccacggagctcgaggccgacacctttctgcaccataaccttcacttcggtagccgcctgggcttcatttagcaaatgagctgattttgtcaggtattttgttaagcactcctcaaggtataacttctggtcttggatttgactgcccatataagagcctttgtttagccaagacatgtcgtaactgaattctggaagcttgcaactctttatggctgcaaccagtggctgaattctcgatggcagtgaccatccaatgctangtanaaacatttctgcaaatattctctcactgcttgatctc

SEQ ID NO: 63046 - DNA, 377 bp, Oryza sativa
  unsure (1)..(377): unsure at all n locations
tattccatatgattcttattatcatgagataagacctcttataanaattcctaagaaataagatgcatctaacatcctaattctttaccttccctgtacctttgatttgggaatcctataaaccgaattagccttccatctgtccccccccccccctctctctatcatcaggctcaataactaggcccatccgcaaaatcggcccgatgtttgaggcccaactaggcccagagaaggttcgagacgcgtggagcagcttcgtctccgcggcgacctaaaatcgcgaggactacgaccaaatcacgcaccttcgctctcttttccattgcagagccctcacgcttccgcaaccaccaccgcgtncgtgatcccatcca

SEQ ID NO: 63047 - DNA, 310 bp, Oryza sativa
  unsure (1)..(310): unsure at all n locations
tatctacaacccacttatgtggagatgatacatgataatctgggctgccattattcatatactcaacataagcaacaaccctaaccacaactctgcatgcagagatcggatccatcctacaatgcaacggcnaatgaagagaaaaaggggatcccaaatcagatccaccaaaccatgcatcctaatgcattccaatcgaatcaaagagaggaaaaacgaatctaagagaagaggaatcccaacttaccctttcggaatccatttcggcattggcggcgctgccgccagcgcaaatttcaccgcctcctac

SEQ ID NO: 63048 - DNA, 301 bp, Oryza sativa
  unsure (1)..(301): unsure at all n locations
tagaatcagagtgacaatctgtttggggaggtggagattttgtgagaagctgtttctgctanaagctgccctaaacagggctctaagggctgctgnngggnntngngcgttgggaactaatcctctaagcacgcnnnnccnagcaactcattagcgcgcgcatgattatttaagtattagttttttgcaaaggaaataatatggtttttaaaaccacttttggatattatttataaaaaacgcaccatttaataatttggggaaacgtgaccccgaaaaacaaaatttgggttgaaaactt

SEQ ID NO: 63049 - DNA, 447 bp, Oryza sativa
  unsure (1)..(447): unsure at all n locations
agctntgcatcatatagttcacagcaaaatgataaaatgcatggcagaagaaggcgaccgatcgacattgaggctagatgggcgtcatcatactgtgtgaacttttgaaaacgaactgtccaactccatcaatggcacgcatcgaaatttggaagatgagatgtcgatcggatattcattgtgactagcattgacaataggtttgttgctgttttctctcatactttccttcttaattattcccaatgtctcaaattataaaggcatgcacacattttaaaattcaaacttcattaatctcgaataacaataattagtcaaaacatatttataggtttagtgatataaataagtattggtagatttatatttggatttcatataatgttgatttcaattcagataatgctcatatataatatatactctgaccaacgctcttatggg

SEQ ID NO: 63050 - DNA, 460 bp, Oryza sativa
  unsure (1)..(460): unsure at all n locations
tgtattgcagccggtgtactggtgttgcatgggtacctgtgcatgaaggattntttgttgtcagcaatgctgatggaaatttgtttgtgtatgacaaagtaagcccaagcccaaaacttattctagaatgttattgctaagtatcatacttaattaagtagagtttgaactgattaattttcttttacatgaccagtccaaggatgtaaatactgattggacatttccaactgtagaggatcaaagtgagatgaagatttcatatgcaaagtctagtaaggtatcttaagtatctttatatatttctactaaaaatatgcatttacatgtcactgacactctatatantttactgaaaattcatnttgttgaattatcaatgtcaaatgagatggttcaatatgaggtgacaagtgaaatacatgctangacattctctgttcagaaaggaaaaaatgtt

SEQ ID NO: 63051 - DNA, 409 bp, Oryza sativa
agctttgccgtgacgcatctcatgtgttattacgaggctcatgtgttgggcagtcgcggagtgcgggtaaagtgtacatccactgcagtgtgagtaaaccaaatctattcgaatagccgtgctcgcggttattgagcaccgggacatgtattacacttggctagactctaaattcttaacttgtgtgggatgggatattgcatgatgatttctatactgatggagccacttcctgagaggcgggaatgtggacgtcctcagaaaaccatgatgactcaatggcaggaagctatccttgggatcacaatggatggtggacagaaccgtcattgttaatatgaacaatggtactaaaatttgatcagtctgtgctaggtcttaagttgtgaaaagaatataaaacttgttt

SEQ ID NO: 63052 - DNA, 355 bp, Oryza sativa
tttcactcctacgaacttctcgttcttatttcgccaatcaccgaaagggggccgaacgcaagactttcgcctaaaaccctgccaataaggcgtagagtatggggccgtgtcaaagacacgacaaaaaatagggatactggcgaaatcagctacacgtaacaagaaaaacaagtaaatggcaaaatattaacatttcattaataggtacaagaccagtcaaggctacaaaatgataatggccactggccgaatacacaaaaatatccatagatagtctaactatggtggtaaggctaaaaagtaaaaaaaaaaaagcgagggcgaagagcctcacacctcggggtgatcttggcag

SEQ ID NO: 63053 - DNA, 330 bp, Oryza sativa
cggatgcccccccccaacaaacttatggatgtgcaatgcgtcaaccgttgcatgggccgcctaaatcggttcatatcgagggtgggagaaaagggcgtacccttatttaagcttctcaaacgctccggaccgtttacctggacggaggaagccgaaaatgctctcacccagttgaaggcgtatctaagctctcccccagttatggtcgccccggagccagacgagcccttgttactctacttagcggcgaccccccaggtagttagtgcggcatttgttgtggagcgcgatgagaacaattttcattttacgctttcccaacctgtgccg

SEQ ID NO: 63054 - DNA, 423 bp, Oryza sativa
  unsure (1)..(423): unsure at all n locations
ntnntggcttatgtgagggtattttggcttatgtgaggtagatgtatgactcaaccactaaacttaggacattaaatccattgtcttataaatcatataagccaataagctgacttaaaagtctaggccaataagcctaagcctaaacaaaagagggtcttagattcggagctttaaatcttatggaattttcaaccaacagatacattccgttttaaataaaataaaaaaagagacctaataaaaattcctcaatctaagaaaaaaatctatactcctttaaaaaaaatagcagtggtggtagttagcggtgaatgtgccaccacccatgccaccaactctctaccttttagaatgaagaaatgacacgtggggttccaccaacaactccctacttcttttgagtgaagaaaggatatgtgt

SEQ ID NO: 63055 - DNA, 453 bp, Oryza sativa
  unsure (1)..(453): unsure at all n locations
ctatagcagtcggctcagaggaagccttgatccgcacttaaaaccactgaaggagaggagggaacagcctaagacacacgctccatcacttccggagacatgtggaacatccgctagactaaattgcaaggaggtacncacttgctcgtccgactttaaatgacaccaccttcgacacacaggtaaaaagcatgtatctgcattaacgcttcaagtagttgaagtattgcaatgtcacatgctggaatttcaaaattgcatttagcaattccgaatattgaggagattcttctcatgaattattttgagcagaccagactaacattctcaacgaacactcactgtgccactaccacactgaccggtggaatccgacagactaaactcgggaccggtgggcccaccatcgggtactgctggccgaactggagctgctgccgnggctgctggtgg

SEQ ID NO: 63056 - DNA, 441 bp, Oryza sativa
  unsure (1)..(441): unsure at all n locations
gcttcanaattctctgcttagagactcatatgtttttttactcgcttggtatatttctctggtgtacctatcacaaacagtttgctgactcagaatcctaggtaccacaggcacagatgattgtagttccaaaccatttgagatagcgattaatttctcttgcatatttgtcaacatacggttaaaaacagtatcaatgatcataacacttacctctatctctatctctatctctgtctctgtctctatatcctttccttcctctccttgtctctgatgaagagagtgtctatcacgatcttcattatgatgtctatcaggatcttcattatggtagtagctgtgcttattcctccttgatcttatccctnttttgactgacttgattattacaccatttgaaactggtctagtgatanattacccaagaacaactattac

SEQ ID NO: 63057 - DNA, 467 bp, Oryza sativa
taattagaacagaacatgggatatttatttaccagagaagttttattaagaaaattgatcggggctgaagtaaaaaacagcaggaatgcagacatgagaaagaatactgataagggccgaagtaccaaatgcttttattgctaatttggatgtcttaataccctgaatatgtgatgtcacatccgcatatcggcatgagtttcaaaaaacattctcctgcatgtgtgcgcctaaacagaattagctgcttaatgagctggggttcaccacccaggataaccttcactaagctccgccactagacggagttagtacgaaatgaaggggcagagttagtacaaaataaaagggtatcactcctttattttactttaatttggatcgagttaacgctgatgtaagtatttaagtttggacagacggtgcaaataggatggaaatatatgaagtatacattaaaaatattt

SEQ ID NO: 63058 - DNA, 444 bp, Oryza sativa
  unsure (1)..(444): unsure at all n locations
agctntngtttgattatgggttgtggcacatgcactatacatcctcaaatatagtgctactccttttgatttaaatctgtagataatactaggtcggcatggttcaaacttatggaatcatgatgccactgaaattttttttggatggaagttgtaaaagttgaaactttatcagtggtgtatgagcaaagagatgtttcagtggtatctttcggaatggttgtaccagtccaattttctctttgctttgcccttatcaagttgatcggagcgaaattatgctcaaacatattataggctatattttaaggccatgtttagatcccaccctaaaatttttcaccctgtcacatcgaacgttcaaacacctgcattaagtattaaatataggcttaaaaaataactaattgcatagaatgtgacttanttgtgagacgaatattt

SEQ ID NO: 63059 - DNA, 403 bp, Oryza sativa
  unsure (1)..(403): unsure at all n locations
cttgtagtgcttgtcaagccggcaagcaagttgcatgttctcatcctactaagagtatcatgtccacatctagactattggagctcttgcatatggatttatttggcccaacaacctataagagcattggtggtaatagtcattgtcttgtgattgttgatgattattctcgctatacttgggtattctttttgcatgataagtctattgttgccgagcttttcaaaaaatttgcaaaaagggcccaaaatgaatttagttgcactcttgtgaaaattagaaatgacaatggttccgaatttaagaataccaatatcgaggactattgtgatgatcttggtatcaaacacgaactttncgctacctactcacctcaacaaaatggtgtagtggaaaggaaaat

SEQ ID NO: 63060 - DNA, 368 bp, Oryza sativa
ctttcctttctttccttttccgcatctcgcgctccctctcctttaacttggcccgggttattacataatatatgtgaagctacaaagctacattcagtaaacaaagcatcagaatacatcagttaaattgactgacttgttcatcccagttggccttggcagcttgctctgcttccttttcagcggaatttagttctgctatgtactcattaaaagcaacctctctttcttcgtgcttcatggctttgtaccttgcatcgctccggaaaatttctttcacctgcatgatgtaatacactaatacttaactcatgagttgtgtacagtgagcaacttaaaatgtactgtgactctctccgttacaatgt

SEQ ID NO: 63061 - DNA, 469 bp, Oryza sativa
  unsure (1)..(469): unsure at all n locations
ntcttctgcatttgtttcttcatttngaagttgctgttatgtactagtatttgatctgtttcctttttgtccaaatagcaatatgtactgtagccaagtgtggtgcctatagaatttaatgtatatgcgtgtgaggaatactttaagatgatattactaataatttttagcaaggctgtttcaacacaataactgcaagatgtgatggttttgctgccgatcaaatgtacatcaatcacaggtgctccagaaaaaaatcagagttcaggcaaagtacctgttgaggagcattattcagtggtttggccactcaagtgtgctttatccctcgtttttttgcatggcttaacatatcagcaacaaaacatgctaatgtcaccaagtagacgactagcaatatgagttgttgttggttggccaacttcaagctatgccacagaccaacagcccataacctgggtggtcaact

SEQ ID NO: 63062 - DNA, 454 bp, Oryza sativa
  unsure (1)..(454): unsure at all n locations
tgcaagcttcttaaaatnttcaccggctgaagacaacattgttgcttttcaaaatctctccaactctctataaacaaatatgtagtcttttatttttgttcgttggagtcaaggcccggggataactaatggagctttcagcccaagccaacactatgtctaagggccaagggcctgttcactttgatgtcattttcaaccttaccaaattttggtaaagttacaaaaaaaaagtggctacatttagtttgctgccaaattttggtaactatataagaaatcctgccaaaattttggcaagttgctaaaattttggcatctatgtcaaaattttggtaatgccaaaatttagtaagttttttttggcatcaaagtgaacacgccctaaattaccatagtacttaggcccaagactacttaagttgacctcccttcccctggttctcattttccc

SEQ ID NO: 63063 - DNA, 400 bp, Oryza sativa
  unsure (1)..(400): unsure at all n locations
tgcaaaggaaccaaagatntcaaatggtgtttctgaaccacttatgaggggatattctgaattactaagtctattntatttttgaactcattaaaatttcacgatggacaaatagcttcaagtgagaaaaatgaaaaaaagagagaaacttttgaatttacattgattatatatgaacgtgtattccatatctataatattaccttagaaatagcaattgtatatactaccattgctctgtaatattggtggcttaattagatacttaaatttacagaaagtgcaaccggagcaatcaacaaaccgaccaacacgtgttttcaatgccaaaaagtaccgaggtttcatttcatatgagcgagagagtatttcttaccgggatccaaatgagcgtgtaaag

SEQ ID NO: 63064 - DNA, 428 bp, Oryza sativa
gcttggcgaggaacgcctagatggagtattttaaggaagagaaaaaagaaaggggaaagagagatgacgtgtatcatgctgacatgtggggcccacgtgagacccatgctgactcagccgccacgtaagccaaaaccggggtcaaaaccaccgaaagacctcgggtgaccggttttgtatagttaagggaccccgcgtatctgattttgcggttcaaggatgtttttctatcccgatgacaagttgagggaccttcggtgcactttttccctctaccggacattagaggtatgggctttttgcataggatccgataacaacgtgtccaacaccggtccgtctaaaataaacacgagtaacaggattatactaccctctcgatcatattatgtttaccaaacatgatgagtaaccgggtactacttcgt

SEQ ID NO: 63065 - DNA, 451 bp, Oryza sativa
ggagcacacctttggagtagcttctgaaggttttttttttttaaaaaaaaaaaactattaaactatgccagaataggattcgtatatataagagaaaaccacttgagtggtatttacgacacggaggacatactttcactaccaccaagcttatttacagcatggacaaaagattcatgcaattccggggtccatctcatccgttgtttacttgcagaggcattgctgttgttgggaggaggacttgtgacaggacaaatatcgccactatgggatgaagttgactgattgaaagcaggctgtgatgcaccaaaattggaaggttgggccatggactgtaacaaaagagatccataaatatttagcattctgaccagggtagaaacataaggagcgctatctatagcatcagggacaaaaaaaatgcgttaaaggtaagatgcagtataca

SEQ ID NO: 63066 - DNA, 452 bp, Oryza sativa
ccggatccttaagcgacgcggctgcagctttaagatacgttgatttctggatgattggaaaaagaatgaaaaaaagatgctttagagctctcgaaaaaagaatttaaaaacatgagggtggacgttacgctagaatcctccaagaaatgaaagaaaatttcctatccatcgattttttttctttgaagcaatcgtacaaacgaaatgagtcatataggaattgctcctttggatcgaagcactagtggagaaaccatctttcgtcggtcaggctaattccacaatagtcccggttgcaacaaaaaccgggactaaaggttaaaaagggtaacgagtatatttgatctttagtcccggttagtaaacaccaaccgggactaaagaaagatgatctttagtcccggttcaaatgttgtcaacaccaaccgggactaaagatcccggcaatcttt

SEQ ID NO: 63067 - DNA, 446 bp, Oryza sativa
tggtcaaatttgagccatgtatttgtgtagcccccgactctatgattagttgggaaacaactgaacatagagtcgagaattatagcttcttgttgtcgagtagtcatcacttgattgaagatatgtgttgaagatgtccaagtagaaatcatgaatgttggagagccacttgttgtaattaaataacacggcatcgcatgccgatatgtcgagattcacaacaacgtcatggttggtgatgtagcaaaacttgtgaagtagcagcaatagagtttgccagtgccgaagataataaagatgaagtcgctccaccatgatgacaaagttgtgttgccgtgatgaagtgaacacgagtcggcggcaacagaagcaaaccggtagtgaagacgagtcgactgcggaagacgatgatgtccatcagtagtggtagcttgataaaccagatg

SEQ ID NO: 63068 - DNA, 346 bp, Oryza sativa
  unsure (1)..(346): unsure at all n locations
agcttgcctgccagnccttctttgctgcttactttgtcatattctttgagccatctttgttatcactactgtctaggacacaagtagaccagcaactaagggcaagtgatttgggattttaattcaacattactatctgtcattggattgtgtaccactcatatatatatatttggccttcctagctccacatattacttctggatagcacaagttcttgatccttgcaatcgctgactacgccttctaggtatcctttgctttgctggtaagaaccttataagagcttagttaggaactccatattgctgagaatcgtcgagaggcaccactacacctgcgtagt

SEQ ID NO: 63069 - DNA, 426 bp, Oryza sativa
tggaagtgtgtgtcgaagtgagtaaagtgaagtctttatatataggtaggtatgacggttagcgaaggggaaatgtccgaactgccccgcaaccgccatcaaggagtgatctcgaatgtccatgccaaaacctgagatcaacggtgatcaccagggttctgccgaacttgggccatgccccccaggcctggcctttggcccatgtcctcccctgatcctcctctatccattcctcggtattttgggctgattctctggtattttgatgaagttcacaacccatccttgtgttgatacaagattctcctcactttagtctagatgtccttccaacttcggggtttatcacctgcatacagatatacaccaacacttgtggaatatgtgagattaagcacctatcactatgttggatgtttattattt

SEQ ID NO: 63070 - DNA, 379 bp, Oryza sativa
  unsure (1)..(379): unsure at all n locations
attcatgaatcatgttacttcgaactgtagatatacaaacaaatgagtgcttggagaacaatggtggctgttggcaagacaaggctgctaacatctctgcatgcaaggtatttcttatggtgttatcttcttcagaaacttttccatctggctatgcatatcatacttggctgtgtacgtgtaggacacttttcgtggaagagtttgtgaatgtccagttgtgaaaggtgttaaatttgttggtgatggctacactcactgtgaaggtatgctaccaaacattanggcataagttatcagntgggatatttgtggctgcatgtgtagttaagatttaaaagcatacttatgtagattaataaaaaagtataatttttgt

SEQ ID NO: 63071 - DNA, 395 bp, Oryza sativa
tctccaacatctccatggtgtggaggcctgtatgctttctgtcaccgtgctcctccatgaatgagtcttgtgactttgccgttgcttcttcagctgctcttgttgatgggtagaagagacgattcgcgggtatgcggcgcagagaatagagtccaccggcgccctgcaccaccaggttcacaaatcgtcgtcgtcccatggtacgtatctgctccaaacgccgagacgatacttatttatccggcctgattctaatccagattagacacaccatgcaaacacagctagcaacgagaagatcaattattaatggagagagaaattaaagaagaaattaacctcatacctaccgaccagcagaaattccttccctggagtttacaccacatattatg

SEQ ID NO: 63072 - DNA, 376 bp, Oryza sativa
  unsure (1)..(376): unsure at all n locations
tgctctgacggaggttgatctgtcgaataacaatctttatgggaaactccctacctttgcagcgaagaatgtgctggtgaaagctaatggcaacccgaacattggcaaggatgctcctgcaccgtctggatcaggtggtagtggcggcagcaatgcgccagatggtgggaatggcggtgatggaagcaatgggagtccctcttcgtcttctgctggaatcattgctggctcagtggttggtgctattgctggagtangccttcttgctgcattnaggttctattgctataaaagaaaacagacgccttttggaagggttcaaagtccacacgctatggttgttcatcctccgcactcanggtcagatcctgatatg

SEQ ID NO: 63073 - DNA, 458 bp, Oryza sativa
tgacaaggacctattgctcatgttattctctagcaatgcagatattatgtccttcccctgtctttgcatgggaattctgagatattttagattgtttaacttcacctaaaatcatgacaatgagagaccacatattgtttctccaggccagattgaactcttcactcatgtcccagttctgcgtaactttgttgaacatttgaaacggaaaaatttcaacgtttgtgctgtgtaccttcttgattcacaggtttggactcttggatcactaaccaaatatatttatccttgagaaaacatactgagcccaaacacaactacacaagtcttacttgagttttgttttgcttggttaagtttgttagtgatgtgacaaaatacatcagtggttgcatggcttctctttctgccatgattcagcttgaaacttctcatatcaacattctttcaaagatgga

SEQ ID NO: 63074 - DNA, 474 bp, Oryza sativa
  unsure (1)..(474): unsure at all n locations
ntttccattntttgttcatctactttgacacataataatatatgctntgatttcaaattatttcctgaagtcaagctgtctggagaacatcttgaaacggtattcaaatacaaaaatggcgatgatgtccgggagatagccaaaattaacattactctccaaaaagaagagggtggtttatataatttacgtggattggattttaaggggtgcttcttttctggacagaacttcagtaactatgatattcaatatgtgaactggggaacgtcattgtttgatgttgatactccgtgtatttntaatgcgcctgcttacaacaagagtaatgaaaaatcattaaaacctgtgagcgaaaacggtttaagtggagtattgactgatcgtaataataaaataaaactcatcacgggcgtggcaccattcgatgatattttatttatggatgatgactntgatgatagntcctctgag

SEQ ID NO: 63075 - DNA, 433 bp, Oryza sativa
agcttcgtgcaaggagcgagaagatcagttctagtcgtcgttccgcgaagatcaagtgaagttttctcggagatgacccaaacccaatccttccgagaagagtagttccgttagttttctggatcgtgtgttgtttgcttgtgtgtaagggtatggtttgcatcattggtggggatgcgaccatactaggttgtttgcttaaacaacttgaatcataaaatccattcacaacagatcaataggcaagtggtttagtacctcatctctagtaacccctcccttttccccctctctctggtgcctgcagcagatggtctgcatgagggacaatttcatcggatcaggatcccgtcagtttcatggatcaactcagctcaattctataagcttcccacgtcaacctctcaaagatcagccacaaccccaagtcatg

SEQ ID NO: 63076 - DNA, 462 bp, Oryza sativa
  unsure (1)..(462): unsure at all n locations
ngactnggtgtgaggaggctggtttagcgatgtctgccctgctaaaccaaaggaaggggcttctttggcatatacccatggacaattcanggcatagtgtccttgttctctacaatcgtgacaaaaggggacatcctcttctggcattggaagctcattgacctgngtggcaaatgctcgatcaaacacatactgattttggtcttgacttccaaccaatggtagctgtgaactaagcagcatgcttggaatggaccaagggtgtgcccttgttaactctcttgaggacagtggtggattgagttgaaaacttgagttacttgaggcatacccgctgacattctttcctttntctctgttaaacatctgtgacagggattgaggtgagagaggaaacaagccaggaaagaatagaccagaactagagacaggaccttaaaggaactaactcttcttgttgat

SEQ ID NO: 63077 - DNA, 443 bp, Oryza sativa
  unsure (1)..(443): unsure at all n locations
agcttaacccctatattattaccccttgtacccccttgcattaatcatgcatctgccggtgtggcttgctgagtactgtggttgtactctatctttctccccccttcagtaagagaagctttggagaagaagtcttaggtggagtcctggcttataccccagctgagcgcctgtgaagatggagccgtangcccgctagtccgctgctgtttatttttgattgccaggcctgaagcgcctttgtaataatgtaaatattatcgatataataaagatgtgtcttttatatcatgtttgtgtggtgtaccccgccttttcctgggacggngattaatacactagcgttcgggaaaaggcaattttccccgtcgcgacagcaccatggtgcccgggcaccacggtatgaaatacacaaatttgctcaaatttttcaaaaaattcaa

SEQ ID NO: 63078 - DNA, 444 bp, Oryza sativa
  unsure (1)..(444): unsure at all n locations
ctaccaaccaaggtgcgcgaggcggagtgggctccgcattcgccttcatggatatcggcaagaagcacaacgccttgttcccgaggaatgcacttcaggaggattccattatccgcgcgccgatagagggtcccttctaccagcacgtagcgtttggagatgcgatggacgcgttcactcccttcgcggtcctcgggtagagtcttatctgtgaggtatgcttggatctcggcgatccaagcaatcaatctaagggaactgggagcactcccctcgggtcccgaggcctggactccgacaggcctcggtggccggttaggcgtatccgtctcccctaaggggtcgggtcgcgccgacggctgggcaagcctttcttcagaggcgcctcgtggngtctgggctcgctaggatgcgagccgtgagagttcgtcggcaatcatgtta

SEQ ID NO: 63079 - DNA, 376 bp, Oryza sativa
  unsure (1)..(376): unsure at all n locations
agcttctggccgggctgatgatcacatacattcttgcgatcagaaatntgccgtgctctcgcttggcttgtttgtgcggctgcgtatttgcccgaacgttggagcagtggcgttggtttggagatgatgaggcgtgattagcgcgtatggctgttaggaagataagagatagatagaatttctattttatcagctagnttccttttcgggtggaccatggtatctgtatatatacaggtctacggtcgattgaaagaggcccganacaaattcaatctactattcatctcttttactttactttttagttcttttctattttgggttcatggctgagttctagcaacctacaatttggttaatctttacccgttta

SEQ ID NO: 63080 - DNA, 425 bp, Oryza sativa
tcacggtgcgaggggtgatctaaatcttccgttcaccattaatggaaagacacattgtgtcggggttggtcaccgtataagatctggcttcttgagactttcaagtgtcatgcaagccacggcgtctagcccgatttcccccaatttctcgtggtgtgtattggacagcacacgacaagcctctgacgctaacgcggcgctgcaatgtgttaggttgggcccctttgattcgggtggctgcaaacaaaaatatagacatattgaaattaagcatgaataatgggccaagacgctaaccgtccaatggaagatttagctcaacataagtttattatatgatccccacaaaaaaaagtttattatatgataaaaaaaattagtccttcagtgccctttgccttgactctagccatctcacgatgcat

SEQ ID NO: 63081 - DNA, 440 bp, Oryza sativa
  unsure (1)..(440): unsure at all n locations
agctntatttcagctntaattaacttatttatcattgntctgctgctaataacaacaaaggtgagtggtttatgattattcactttaatacaccaggtgaattccttctgccatgcaggcagggttggacagaaaacacgcgaaggaattaaaatgcctggaacgggaaaaatgaaacatgtcagtttgactctgcaggttgagaacgacctgaaacatcagcttagtattggcgcattaaaacctggcgcacgcctgattactaaaaatctggcggagcaattaggtatgagtattacacctgtgcgtgaagcattattacgtctggtttcggtgaatgcgctttctgtcgcacctgcacaagcatttacagttccggaagtggggaaacgtcaattagacgaaatcaatcggatccgctacgaactggaattaatggg

SEQ ID NO: 63082 - DNA, 436 bp, Oryza sativa
  unsure (1)..(436): unsure at all n locations
agcttgagctgaattataagaggctctattgtactttatgtatactagaattagggagagagtaaagtagaagaagtcgaaggaattctgaatttgtcagtaatcctcttctatttcttatactttattaattattctgctttaatagaaatatcattatgagtaattaagatttacttcgtgagaattattcttggttagttcctaattagcgcgtgggatcattgttcactatagtccattaatttatattgattgctttagtgtttagctagcgctaaagtagttattaattgcgtagacgcggtgtctgagtaattaacttccggtgattgcttcgtatcccacaatangcttgaggtgggtgtagaggtggtgacagccctcaattacaagtcctccctgtccgggtacgcagtagagtgacatctgggag

SEQ ID NO: 63083 - DNA, 406 bp, Oryza sativa
  unsure (1)..(406): unsure at all n locations
tgggcgcggagggtgaggacgagggggtagagaaccgcttgatccacccgccggaaaagcctccaccgaatccgtctgccagaaacaacaccgccgccgcctccgccggattcgccagcgggagccgccgatgccacagccaccgtcggatccagcccacgggagcagttaacgccatcgctgccgcctcctctgctaccgacaagggagagacgagaagggtgggggcggngatgagagggagtgatcgagagggagagagagggacgggtgagaggaggaggcgagtggataatgatgcgtttatccactcgcggtgctctctctcggctgatgcgtggtgggtgggagaagaaatgggaagggcggcgctcactctcgttgttgagaagagacatgatggggg

SEQ ID NO: 63084 - DNA, 432 bp, Oryza sativa
  unsure (1)..(432): unsure at all n locations
agcttgtttattcagtactgaaatttggttttatcacatatacttcaacaatactttcataaaactacatatattttttccgaagcataaaactgcatatttgaggggagcaaaactatagaaacatgaaatttatcacgaagttacaaatctagcatcgattttacccaaaaaaaatatttttaaaaaactccagtagaatattggtgctaggaatctaacctctaaaatatgtattcttttaactttattactaaatctagttttataatactctacattaagtctataatttagtaataaatatgatgcaaaatctgtactcttatgatacaatactnttaaagcagtagttttgcgataatgtgatcaatttttttttaaattattcttccctattaaggaagaatctaaaatctggaatgtagaaat

SEQ ID NO: 63085 - DNA, 454 bp, Oryza sativa
ggagattatgtatatatataacatacttatgtaaagttatatatatgtttttatagtttaatgtttccgtatttgttaccgatttccgatctgtaccgacatgtttccgtccgtattgttccgtttccggttttccgatatttccgatatcgttttcgtttccgactttaccgtttccgatttcgtttccgagaaaaatatggttacggaaatggttgaggctgttttccgatcgtttccgaccgttttcatccctacatatggtatagaatttatttgagaatcttctccatatttttgggtggggcacatgtattgtacggttgagtctaacaatgatgttatggcacacatttatacacagacttgcttgtcctcacaaatcaagccattagtatgaatcaccaggtcagagctcagagcataaatttctaagtctaagagcacctgtcag

SEQ ID NO: 63086 - DNA, 440 bp, Oryza sativa
  unsure (1)..(440): unsure at all n locations
agctttctcaagaatcacccagcaacctgttgttgcgtctacgtgtacgtatgaagagatttcgtaactatgctaccatgccaattgtaacatgtatttttaaaattctccctataaaccaatttattgcataagcccacccgcctaaattctaacatctaggttctgttagtggtggcatcattagtggtggcatcaaaaatgctataaaacaatatgcctaatcaaacagactcatcacaaacatctcaacaatcatttctcattacaaacgcatatactttatcaacttccatctatagtaattatgaattattttgtaacgatcgagaagcaaagttagtttgttagtttggatacacggactagatcaagattgnntgattttatntacaatgttggtagactaaagattttctatataaatctaatcaaacatc

SEQ ID NO: 63087 - DNA, 466 bp, Oryza sativa
  unsure (1)..(466): unsure at all n locations
tgcattanacacctaagttcccgtgacttgttgagtacgaaagtactcacccttgctctatataaatatatatatatagttcctccgccctgaagagaagataaagtaaagtgaagattagggtttcgtcctggttcccagccgtcgcctgtggtgttgggtgttagaccgttggttccgctgctgctgctgctgttggtgtttcctcgtccgcgtcgtcggttgtattctcgggctgtctgagcttgtcacgcccggaatttctatccaaaattccaaacgcttacatgtgtgtgaaccctcgtccaggagtcagccgaggcacacaacaacaaattgataatagagtacaattattactctaattaataagcgaataaaatgtcattacagaggtagatagttcctctcaatcaaaaaagatctaagcagcgganaataaaataaacggcgcagacgactccac

SEQ ID NO: 63088 - DNA, 382 bp, Oryza sativa
  unsure (1)..(382): unsure at all n locations
agctggccagccatgcttcacccaattactatcttttntttttaagcaatagtcaccactgacgagtttagtgtgtccctctaaaaattacccgcaaaaaagagttagctcttaaagcattcaaaacttaattattcctacgaaattgaaccgacgaacataaaactaccacccataaaagattgccatcttaatttaggatgtaaaccacttaaccaactactaccaaattaagcctaggcactaccagtgatttggtcacaatccaaactctcagtggtactgttctgataaccaaaatattggtatggcccagatttggtagcaaaccaaaacggcccgaaaagtagcgctgattgaaggcacgctattcttttggtca

SEQ ID NO: 63089 - DNA, 460 bp, Oryza sativa
  unsure (1)..(460): unsure at all n locations
tatcggaatattgattctggtgttccaaataattcattgtcgtaattataagatgatttcgctagaagagctaaacgcaagtaataatgattcctactcgcccatgaccatgattatatcacctgatactgatagaactatataacggaacacatgcatgttgtacaaatgtcgttgatcagattcagaagacttaggctctgtttctttcagcttaaaattattataatctggattattgagtcagattgctagattgttataatctgtagtagaataagcggctagttgtttcttttttaattattagagtctagattattaggtttgcaagtctaaagaggaagtgtggtggcatggtgggtaaattttcacctaataatctagaanaagctcacataaatgagcttatcagattataataagctggactccagattataataagctactctaataa

SEQ ID NO: 63090 - DNA, 400 bp, Oryza sativa
  unsure (1)..(400): unsure at all n locations
gcacatgaatacttttcaattttcgtgatagatttccttacagtgtttttttaataaaaatcgataggtttatgcactccttttgaaaaatgggattaatctagaaaggactatattgatttttaaactaagggagtgaggcttgaacccgtaccagctagctcgtagtttgtgttgctagccgtaaagaccccaggcccttctcttatgcactccttgtagtgtcaaagtacgtaccagaaggtactgtatcttagcacaagtaacatttgagtacgtctcagtaactcttaaatgagtgttgaatgactattntgccttccactgttcagagactggtttttaatacttcctccattttataatataagtcattctaacaattaccatattgatattg

SEQ ID NO: 63091 - DNA, 423 bp, Oryza sativa
  unsure (1)..(423): unsure at all n locations
tctcanatgcgatcactacaatgcagacacaaaatatgttatttcaccaggcaggtaagtgtataaacattttctgcaacctaatgtaattcacagaataccatcaacgagacaacgataaccaggcaacatggataagatgaaattcaaacatcatgctgaaaattcaccctgctttgagtagtgaacatgcttggttcacacaagatgattgcaaacccattccaaatcacaactcacaacacttgattaccaaacttattcacggttcacacatcaagtagccaaccccggatctagatcatgaccagcgtacattgctatgaaggggacatgctgaaagaaacacagaaaaaaaaaacccaganattttaggaccgctaaactaggaaagggaagatcacacaacaatcaaaatgcacg

SEQ ID NO: 63092 - DNA, 439 bp, Oryza sativa
  unsure (1)..(439): unsure at all n locations
agcttattttcagctttaattaactaaccacatcattgttctgctgctaataacaacaaaggtgagtggtttatgattattcactntaatacaccaggtgaattccttctgccatgcaggcagggttggacagaaaacacgcgaaggaattaaaatgcctggaacgggaaaaatgaaacatgtcagtttgactctgcaggttgagaacgacctgaaacatcagcttagtattggcgcattaaaacctggcgcacgcctgattactaaaaatctggcggagcaattaggtatgagtattacacctgtgcgtgaagcattattacgtctggtttcggtgaatgcgctttctgtcgcacctgcacaagcatttacagttccggaagtggggaaacgtcaattagacgaaatcaatcggatccgctacgaactggaattaatg

SEQ ID NO: 63093 - DNA, 444 bp, Oryza sativa
  unsure (1)..(444): unsure at all n locations
agcttgcagcttgcagcgccatcatgcctgtctgtctctcgacgagaggcaggcaggggccgcatggcaggcatccgatgccaagcgagcatagtagaacaacagcacaaacaccttttgatcatagtagcagcagaagctggattatcagttctgaatatatttgtgatgttgtgctcctgatctgtagtagaagagatcataatgatgcgtgtgctcggttcagtgctgcgcgcgcgcagcaggccagcagcattgctgctgaaatcggcccctttcatttgcagtactcccggtaaaaacatacgaaatttcagggatttcaaaggcaaaatgctaaggaagcttttgaaataaatgattgaatcacatctcttattcgaaattcatatgaaatgaacaattncatagagattttaaaagagggttagcaagagctctaat

SEQ ID NO: 63094 - DNA, 470 bp, Oryza sativa
  unsure (1)..(470): unsure at all n locations
tcacagttcacatgacananatcacagtttctactggagacatttcaagtaattggacttggaccatcctagcttctagttgagacccaattcacaaagttacactcaattatctgcatcaaacattttcggtgccatttggaaattggaacaacggtaatttcaggttaaacttataaaaatacatatacctctgtaaaattaccatgaaattcctgcgttccaaacaaaccatattttgtgaccactgttgtacagtgtgcggacttatgacaaggtttccagcatggaactttccatgtctctctctctctccctgcagatctacctgagctagtagatgagacattgtggccacacacatgtggcagccaagttgcatgaaaataaaagagaacaaataagaaagaaagaatgagcacgagctatgtatgctggaggcaagaacatgatcttcaaggagcataatc

SEQ ID NO: 63095 - DNA, 355 bp, Oryza sativa
  unsure (1)..(355): unsure at all n locations
agctnttgagcacagtagcatatccaaaattattaatcatactctccgccttcttgaaaattcccagagaaaaatcctctcacctcatcccttctcccgttatctctctgaccagtgggcctaaggaccattggccccacctgccagccaccatctccttatccctgctctctgtctttctcccttctctccatctattcctttcaggcaattcatcgagcacctagcgtgcgagatcgaggtcatcgtttccaagccgaccaagcaacctctgcccgcgattcccgctggcaaagctgaagcaaggctggtgcgccccttgcccaggccctgccgctgccttcgccgcgtccct

SEQ ID NO: 63096 - DNA, 449 bp, Oryza sativa
  unsure (1)..(449): unsure at all n locations
tcttacctatttatgtataagtntactttagtattaaattaagaggatgcttataaaggtaattaaggtggaatattttctatataagttaatttgtttactcacttccatattcatgacatgctttcagatgagtagccaaattagtttagtgaggcatgacattagccatgttgatatattttaaggtgtatggttcatattttaacttcctctagctagcactaggccctaatggtttcgttgtttatctagatcttagttattattcatgagacctattatgaaatgcaaatcgaaaatccaaatgatgcatatgaaggactcaagtcaaaacatgtcctatgagagtatgcatgcttacacataagtntacattnttgtcctaggttataaatgaaaaagttttaatttgccctcannatttattcatgcaagagttaaatcaa

SEQ ID NO: 63097 - DNA, 441 bp, Oryza sativa
agcttgagctcgatctccccttgagctggtatgctcttcgagctttcaagcccaccttctcccaatcaccatcagccaacccatgtcactagagttgctatctaaatgaagatggaattgaggagctcatgaagtagcagagagagatggaactgttatcgagatgaagatgggattgaggagttcatgaagcagcagagagagactttctcgctgacatgtagactactggtccaaggtaaaagatttagtaatagtatatgatttaaagtaataaaagatgtgttaacactaatctctttattaggtgactagtttctttcttctccttcaagatgaggcggaagtctttgatggtgggtgttgaaattataagcacatagtgatttaatttattccataaataaatcatgacattgcagatgttaactagattaaacg

SEQ ID NO: 63098 - DNA, 427 bp, Oryza sativa
  unsure (1)..(427): unsure at all n locations
ttttggattccgatatcttttcaactatttagatgggatgtctaaaaatagttgttgatttgccttgacataagttgtgggtagaccttgaatcatgccaccattgtacaaattaagattacatgtcctttatgctttttttttggtgaactgtttagtttataatatggcaagttttaagttttctacaacaaaatgctatagatttaggtatgcaatggaaaactgttgactaactgggaattgggaacccaactaccaatgttttgagggagtacgtgggtttttccgttgcatatattgcgggtttatcagtttgagcaaatattatgtgcaggcgtgatcgtgtgaaacgcangagagcggaagcaaaataggaggcaaatagcgagactatttctgcaccagtgagtgtcaccgatctgca

SEQ ID NO: 63099 - DNA, 431 bp, Oryza sativa
tggaacaacacatgctctgagagtgaaattctttactcatttatcttattggtactttttcaaggtgcgtacatttggaagcatggatgcagcggagcacccaaagctggaatcaatagccgcggatatggccatggaattgaatgggtgcttcatgggttcaaatgtttacagtgtacttcttagagaaaatttcaatgataagttttggagcatggccctggcaagaatcagagaattcaggaagctgaatctcttactctgcggtacaagtaattatgacgatccttggcagggtgttggacctgcatacgttaggagggtaaacaaaatatgctccggaaatcatgtgattcatgaggactataaagtatgttctattcagaacatgatatattgtcacacaaactctgctcacagtgaagatgatg

SEQ ID NO: 63100 - DNA, 411 bp, Oryza sativa
  unsure (1)..(411): unsure at all n locations
agcttaagaagatgttcttaagaaatctttctnatttggagagatgggcaggcaatatttcaggagatcctagtagcttcatcacgcttccccagctcgagatactaagaatcagtgactgccctaaacttgcaggcattccagattgcccggttctaagagacctgaatatagatagatgttcaaatattgctgtcagctcgctcgcacacgtaacaagtttgtcctatctcagttacgacgcagaaggctttgattctatgaccatgccgctgggctcatggtcatcactcatgagattaaaagtaaggtctctcgcaaacatggtgatttctctggaggaccacacaaaccaaggagaaagtaatctcgtaaatcttcggcgtttgaatctacatggccccaaatgct

SEQ ID NO: 63101 - DNA, 452 bp, Oryza sativa
ttagctgatttcattgccgagtggaccgagtgccaataatacatgccagaggaaaagatggaatattggactatgcattttgatgggtcaaagaggctcacaggcactggagctggggtcgtcttgatttccccgactggagaaagattgagctacgtattgtggatacacttttctgcgtcccataacgtggcggaatacgaggcgctactccatggattaaggattgcaatctctttaggcattcgccgattaatcgtccgtggagactctcagttggttgttaatcaagtcatgaaagagtggtcatgtctagatgataatatgaccgcttaccgacaagaggtacgcaagttggaagataaattctatggattcgagctcacccatgtccttcgacataacaataaggcagccgatagattggccaattttagttcaaaacgggaagc

SEQ ID NO: 63102 - DNA, 430 bp, Oryza sativa
  unsure (1)..(430): unsure at all n locations
agctttatacaatatataaacatggttggtaatatcangattttcaaaacccggtgggtgtttgacataaactntctcctgtataaaaccacttagaaaaacacttttcacatccatttgatacaaattaaaaccttttgaagcagcaaaagccaacaaaagtctaattgcctcaattctagcaacaagagcaaaagtttcatgaaaacccaaaccctcaacttgagtaaaaccttgagcaataagtctagctttatttctcacaatcaaaccatcctcattttgtttatttttgaaaacccacttggttccaataacattatgtccagaaggtggtgcaactaaagtccaaactttgtttctcttaaaattatcaagttcttcatgcatggcgttaatccacgaatcatcacgtaatgcatgtgacaca

SEQ ID NO: 63103 - DNA, 450 bp, Oryza sativa
  unsure (1)..(450): unsure at all n locations
tatctccggccgtgcgttgaaagagagacaaagctagactgtcatctgtcaggactccaaatccttggcagttacgagtaatttggatgaagcctatatattgctggtcatgcctgtgcatcgattatgcaatatggcgcctcaggtgtttaactccatcgcaggtatatatccattgtcgattctttagccaccggaattaggatgcttcttgatcatcctgtactttttcatcaggcaaccatcttgagagggccagggaagacagagtatccaaggttgcatgcgagcgtggcgccagcgaccggtgcggcggagagcgtgtctcacgagacgggcggagaacggcggacaggcgagtaacatgagacaggcgctcggcangagatagacacactgtctaagataagcgcccgggaggatccggcggcaagcaacagaatgagacca

SEQ ID NO: 63104 - DNA, 275 bp, Oryza sativa
  unsure (1)..(275): unsure at all n locations
agcncacaatcaaagatgccacattcatctttcattaacaagataccacatcatcatcgagcaagtaacaagatgccctatcatcatccactaacaatcatcacatttaaacatcgggcaaacatgctatatcctcatagttttcataacctaagagctttccaaatacaaacatgtgaaattatcatccaacataattcacacaatgtctcaacgaacaactttattacagcctatgagatcctatatactcatatataggtcatcctcactta

SEQ ID NO: 63105 - DNA, 427 bp, Oryza sativa
  unsure (1)..(427): unsure at all n locations
tgcatcanacacctaaattctcgtgacttgctgagtacgttagtactcatccttgctctatataaatatatatatagttcctacaccttgaaatgaagatgaagtgaaatgaagaatagggtttcgtcctagttcccagccgtcgcctgtggtgttgggtgttagtccgttggttccgctgctgctgctgctgttggtgtttcctcgttcgtgtcgtcggttgcattctcgggctgttctaaaatgcaacctaagttaaggtaaataagtcctctatttattataaggattgcaatgattcatatatgtcaccgtgggtaccagcgctatgtcctgggactggtactgagatcgccgtttcttaggaagcggttcactgccgtttttctacgacacgctcctgtcatgtgctgttgtacggcggtgc

SEQ ID NO: 63106 - DNA, 385 bp, Oryza sativa
tggctaagcaatcatatctaatatctagctgaaccaataatatatatcccaactagtcaagttgtaataacccaaggtatcaaggaataaagtaatcaagaacaaaaaggcctataacaaacaataggttaattccacccaataacattcgaaaataaatgcaatagttgaatagaaacagtagctttaaacgggatcaacatgctcaaagggttgtttgggatctatgtgacttgccttgctggccttggaactcttcaaaatcttcccctgcgaaaacggactctccggaaacgtctgaatctaaacagaaaggagcaaaatcaccaaacagcacataaacaagcatgaacagtacatgtggatatatttaacatgtagatct

SEQ ID NO: 63107 - DNA, 433 bp, Oryza sativa
  unsure (1)..(433): unsure at all n locations
agcttaacatgcanagatgccacatcattatccactaattaacaagatgccacatcatcatccactaacaatcatcacatttaaacatcatgcaaacatgctatatctttatagtttttataatttaagaacttttcaaatacaaacatgttaaattatcatccaacataattcacataatgttttaatgtatatctttattatgtgttatgatatcctatatacttatatagttcatcctcacttagttagtgcttaaatgattaatctctggtacaaattatctttcttcttttttcctctaattaagtcatatcacatcaattgtttttagcatttagatgattaatctacgggccgaactatctccctactttnttttcttccataaagtcataccaccttactttttacatttgaatcaccattctac

SEQ ID NO: 63108 - DNA, 454 bp, Oryza sativa
  unsure (1)..(454): unsure at all n locations
tgagctcacctgtgccgagataccaaaggaatggctcgttaatgtgccgctcaaccttgacctcgcctgcgccaagctgccggagagtgaggcgtagttcgttctgctccagtagagagaaggaagaaaggaaaaatgacaggtggtcctaggttgactggattgcctcctaagaaaaaaccagagcggtttggatgaggggtataaattgcatggttttaagagatgaggggcgtctaatacccgattntaaagttaagggtgtattttagataaatataatagttgaggggtgtaaaatggacttatccctgattgaacggactattataccatggattgtctagcaaattaattattttataaatagaattttcagaaatagcttataacaaatgctctaaatagtgcagtagaataatgatttcgaggaaatgttattttctgtgagttt

SEQ ID NO: 63109 - DNA, 122 bp, Oryza sativa
gagcgttaattcatcgcaatcattctgccactatcatctcgcctgtcattatcacattttattcagggccgtagctaacccacggtcgtttataggggccaccatatatactggccttatat

SEQ ID NO: 63110 - DNA, 434 bp, Oryza sativa
  unsure (1)..(434): unsure at all n locations
caagcaccgcgagcactttgaaacagtctgcctcgnttgttttttttggcatgtttgcgtcactgaatgcagctgccgatgattccgtttttactgtcatggatgatcctgccagcgctaaaaaacctttcgaaggtaatctgaacgcaggatatcttgcacaatcaggcaatacgaaaagctcctcacttacggctgacaccaccatgacctggtatggacacaccactgcctggtcgctgtgggggaacgccagtaatacttcttctaatgatgagcgttcttcagaaaaatatgcggcgggcgggcgtacccgctttaatttaactgattatgactatttatttggtcaggcaagctggctgacagaccgttataacggctatcgagagcgcgatgtgttgaccgcgggttatggtcgtcaagttttgaat

SEQ ID NO: 63111 - DNA, 349 bp, Oryza sativa
catggcgagcagcacgcgtttcttcttcagatggtcgatccccacggctgccggaatcactgtcgaggtgcgtgaccgcgaacgtctccgctgcacacaatttcgaggcgacacggtactcgctgctcgcctgggtgggcgccggcgagttcgtcaccttgggcaccttctccatcgacggccacaactggaacatccatgtctaccccgacaggtggaagcatgagatgaacgccggctacgtgtcggtcttactgtgcctctgcggcggagcaaccggcgtcaaggctaagtacacgctgaaccttttggagaacgggggcgagtccgtactacggagcttgactca

SEQ ID NO: 63112 - DNA, 467 bp, Oryza sativa
ttgtgtgcagatgataatgattcgttggaagaatgggattattatcttcatgaacaagcaagtcgtcagctatcttcggagcttgatgattaccttgaagatggtttagttcctagaaaggatgattttgatattttaaactggtggatgactcatagtactaagtacccaacacttgcaactattgcacgggacatcttagccatgccagcatctgctgttcaatctgaagcagcattcagtagcagtggaccagtaattccaaagcaccagagtacattaaacatcagaacaatcgaggcacttgtttgtactcgagattggatgagataaaactggtaagattctataaattgctactcagctccatcctatctatgtgaatttggtagtgtgaacacactgtgatttagtccatgttttcttattaccagaatcttggtttcttgtcttcctgtattggaagt

SEQ ID NO: 63113 - DNA, 402 bp, Oryza sativa
  unsure (1)..(402): unsure at all n locations
agcttcccanatagtgtagctnttagtacatattctgagaaaatgtagctgcagaatccaaaaaatgacctagaagccaaaagctagaaaacccaacttttccagattctcagaagctagctaccaccaactgcttcccaaacaagccctataagtcaactataaacatattttaaggagataaaagaaaagagataagagcaacggactataaatttgtagccagctgtagcatagattccaagatgtatgtgtgtatgacaggtgggaccaaacattaattatgtagaatatgtttataggtaactattgtataaattgactataaatgatttgaagctaatacttggctatactattaaacttgctataattagtcaatggcttggcacgtacgcctat

SEQ ID NO: 63114 - DNA, 206 bp, Oryza sativa
  unsure (1)..(206): unsure at all n locations
tcaggaaggcacaaattcctgaggggattatggcacanatgataagagagttccgcgcactgcatcaaggaaccaggacagttacagagtacttgcacgagttcaaccgcctcgcgcgctacgctcctgaggacatgcgcactgatgccaagaagctagagaagttttttgttggtcttgatgatgagttgaccaaccagcttatc

SEQ ID NO: 63115 - DNA, 368 bp, Oryza sativa
agcttggaattggtgctcaagctcgccggtatctttccggaaaaggagttatggctcacgttgagattgaagaccctgatatttcccaacacaggtggaatccctcctgtcagattattttcagcccaattgagatccttcaagcttgtcatgctcccaaatgccgccggaatgccgccggatatgcgattgccgtcgagatgcacgagtgtgaggttgatgcactgtccccaggcagacgacagctcgccggtgagcttgttcccggagacgtccaggtacaccagcttggggtgcacgccgaaggcctccgagatgtcgccggtgaagtggttctcctccagccggacacggaccagcgccgtgca

SEQ ID NO: 63116 - DNA, 388 bp, Oryza sativa
  unsure (1)..(388): unsure at all n locations
ntcgcctaattgcctcccaggggaggcaaccaacgctgtttgttcattctcccctccgcgattctgatgacgaactgactagcgacaatgatcgccctctgctacaggctacagcagcttaagcacggtgatcatcgaggacaccctagtaatcaatcagtcagccatacacggctaatcaatcagccaaagacataagacttgttctgttgcctccatgcgcaaatatttataatgccacaccatatgtaaattgatagtgccaaaattttacaacttatgtgcttattggatatttgatagaaactagacctagcccactactcttctaatacaactatttaacggaatatcactattcccattaaatagcggcgtaacattttac

SEQ ID NO: 63117 - DNA, 449 bp, Oryza sativa
  unsure (1)..(449): unsure at all n locations
agctntctaattggcattntcgagctgaaaaaatctgcatattatgtaggtgacataactccgagggaaggcttttgaaaggacaagctccggagatttccaggtaccgtagatgcttcaatttcccaatactcttcggtagctcctttgtgtgggcacacaaaaccacgcgcatatgctgaagtttactacaccaatggtccataacagaagctagactttgcttctgtaaagacctgtagcacagtagagtgcgcaactttgtgtgcttacataggctcagcaactgagtacaatcaaaggctatgctagggagtacgaacagatgacgaacactcggaggaaccttctcaaaatcatccttgtcttttaaaatgaagcagtcatcctttgaaactagttgtgccatgtcatgcaacagatcattacatgtttattaccaccaacac

SEQ ID NO: 63118 - DNA, 429 bp, Oryza sativa
  unsure (1)..(429): unsure at all n locations
tctgtctttcaatcaactgctgtagcatgtagggtgctatttgtatctttagatgcagaggatagaacctgttcttccattctcttgcagtagtggtagcatccactttgcagagatgaaagaaagatcatctgcttcttgtgtcctgaatactcccttttgttttcttctctatagcatcttgtcagtagcagcattggtttataatgacatcgatttaggatttcaaggaaatggttgatcgaggctttgtcacgtcacctgcattttttctgtccatgggactgctctacctctcacgataaagntgctctcaactttnttttttcacactgtggaactgactggtccaactaaacactcatgctgagcaaatgcatgcacctttattcatttggaggcctgtaggcttaattggagtaagaaaat

SEQ ID NO: 63119 - DNA, 412 bp, Oryza sativa
agcttgtctggaatgcccccttcgaatcgatttgtatcaagatagatttctaccaaggtggtgatgttgccaagggcctgcgggatggttccagttagcttgttcgcagaaagataaagataagctagattggacagagagcctaaatttggaggaagtgcaccagttagggcatttcctgagaggtctatgtacgttaagctggaacaatttgtaagttcatcaggaattatccctgtcaaattgtttttatacagatagagtgcctgaagttgcttaagattgccaaggcgaggtaaggagccaagtaagttattatcgccgaggtcaagtatattaaggaaggataggtttccgagagaggaccttatttggcctgtcaaactttggctggagagattgagcgccatga

SEQ ID NO: 63120 - DNA, 453 bp, Oryza sativa
tcggcaggaagcgcgggaaccgagcgcccggaccggtctctggcgcccaatattctactcgcgcgccgcgaatactctactggtgccgtcgtactacgcactacgccgaggaggatcccatgcacagtagcgccaccaccgcacacgcacgcacgcacgcacgcatatgtgtgtgcaccgcatggggaaccggcctgcccggctccccccccctcctcctcctcacgtgcaccgtggaaaacaccaacaccaagcatcccttattgcagaggaccatgccttgcatgtgtcaaccgctgcatctgcatgaggcaagacagtgagttcagcagccagccagcgtgagacaatctgcatgctgtgcccagcaaccgacattttcctctctctgcagggcagaatcacggaagctagccctgtgtatttacattgatcaatgctagattcgcaagt

SEQ ID NO: 63121 - DNA, 430 bp, Oryza sativa
  unsure (1)..(430): unsure at all n locations
agcttacgcccaactgcaccaaacatcatattgagaaggacgttaatctcagagaagcataatagttttaggtttggcatttaacattcagattatgcgtatatgcgtgaacttttttcataacttcctacaacaagcaagctgccaagacgcaatactatcaaatacttgacaaacatgcaacattaaaacatgacaaattgtttcaaagaggataaacaacaaagaaaataaaagaaaaaaaatcattgctcctatataccgctcagagggccatctttggtcgttagctggcattgctaattttggggttttattgggagagtaatgggctctgcccccttcgagctggttggagtcgtactttccgggcttntttcctttggtctttatatccctcctctcttgacataagtcggtctggcttaat

SEQ ID NO: 63122 - DNA, 462 bp, Oryza sativa
  unsure (1)..(462): unsure at all n locations
ctcagctgagaaaacncaccggaaacacagcccnaagggtattcatgaacgtgcctttcatcatgatgcgcaaagatctgaggtggataacgcaaaaaagaagggtagcttgggcttcagattattccacagcttttgggcgatcggtgacgcggcgtgctcagttccagctagcttagttccagctagcttagctagcacacactactactactacactagtaaatataagatattttaattttttttttacaacgtttaaccactcgtcttattcaaaaaaatttaaaattattatttattttatttgtgacttactttattatccacagtactttaagcacaacttttcgatttctatattgcaaaaaaaaataaataatacgagtggttaaacgttggaagcaaaaattcaaaactattacacggcgtgcaatggttcatgcangccagtgatatgat

SEQ ID NO: 63123 - DNA, 460 bp, Oryza sativa
tctttgtacccctacaggcaggacattttggttcacttataatgctctacgatgatggatgaagcatttcaaaggacaaaaggctacctgcttaagctcggtcttcagctcatgccgtacacgctcaaccaaggatctttcaccctcggtcagcattaagggaccaaagcccatgcctgctgacccatcattttcatcaaacatgttggcttcactgtccacttggttatcttcatcatcagacatagtcgctccagtcccttcaccaagagatgcccctgcagaaccaatcatacaagcataactcagttgtacgaacatcatctaggccccttcagtaagaagtatcatacttttagatacacaatcgagcacacataagggcatgttctccatataaagaggtgaacagctagcttatcaaactcaactcctattgtagttcccagcgttatctaca

SEQ ID NO: 63124 - DNA, 429 bp, Oryza sativa
  unsure (1)..(429): unsure at all n locations
gctttatatagctggcccgctgactnttttatataagtcaaggtgctgtttgggtttttaagcaattgattggatacaatatcattgcttttcgccacgtaagtgtgcatttttattgaccaatattatggcttaggctgattatatattgtggtcattttctaggtggttggtaaatcctttatgagtttatttactcggattttacaccacatatgccatatatttccaggtgtggtgaaaccatgtgtcttttagggactaaagcacgtctgttaaagcagtgtgcgcatggcgtatgcccaatactttggaaatttatttattcacaacatacaagcttctttatagctgttttgctatgtgaattntcaataatgtagccaactttagggtacactcatcatattttacaaagcagtcggtata

SEQ ID NO: 63125 - DNA, 460 bp, Oryza sativa
  unsure (1)..(460): unsure at all n locations
tgttgatcatgccattgttcttgtcttcacgctcttgagcagctagggcctcctccgtgcgatgtccatccatgggcccaaagtagctcgaccacatggcacaaggtagcatcgtcttcaagtccctcaggatccacgtagctggcttgggtacgatcatgggtttggcaaggatggtagcgatactccgtgttgaccagctgatcgttgtagaggttgcggagttctccaatggcgacccttgccacctcctgacaagcatgtgataccttcttccaccagcttcaaacatcaccgatgggatatcttcatgatcacttgttatggtgaccttgacacggcatttctcctcatcacgatcatggnggatctggtcataaagaggggcagtcttgaatcctatggcaaaggccatcgtacatagcttccgggataaaccttcaactccgagcaagtactg

SEQ ID NO: 63126 - DNA, 436 bp, Oryza sativa
gcttatttcgtttccttgctacagctttcatcaggggcaaatgtgcaagtagaaccaattgtggtgaacattgataagcttgacctcgttcttgttgagaaggacaattctgaagatctttcaagcactagcaggcaaattcattcttctggctctggtctcatatggttgaatgagcacagtcatttactgatttcagtcttctctgtcattttgttttggtttgcagtgctttatcgccatcaccagctaaaaacagcggatatggatatgctgataaggtttatttctttgaccttgatgttcaacgtaaacacattccaaacttttactctgtaaaaaattcaatatgctgtctaaaaataaaaattgtcacttccagttatccatgatgggtgcatccaatgcacctattttgctatctgatttgataatt

SEQ ID NO: 63127 - DNA, 459 bp, Oryza sativa
tcacttcatttcctttctcatctactatacatatacattggtggaatgggccctattgggctgaaatacacacgcctacactcaacactccccctcaagatgggcgataaatatctatcatgcccatcttgctacacgaagaagtgcactctctagcacctaatgccttcgttaaactatcagctacttgttcaccagagtttacaaagcctaagtttaaggttccctcatccattctctctttaataaagaagcgatctatttccacatgcttcgttcgatcatgctggactggattgttagcaatatttatggctgatttgttgtcacaccacaacttcatggaagtgcttgtcgacagcttcaattcagccaaaagaattttcaaccataacaattcactcaagctcatcgacattgacctgtattccgcctcagcagtcgagcgagacacaactg

SEQ ID NO: 63128 - DNA, 394 bp, Oryza sativa
  unsure (1)..(394): unsure at all n locations
agctntaaatattgcacgaggttacactattattttttatcttggccgtggttacatgcagcgtattaaattatgtctatttattcttcatacaaataaacagagagacacgactagttagggagaataattattttttagaagatcctaaaaataatcttaggggatgatcaagcttaaacttgccggccacgtgatccgtggtctcgctggctggaaaattgccggcgcgcccacggaatttgggtcaattccggcggtggatatatcgatccatcggccaccgcttggttgctcatcatcgacgcgtgttgtgtgggtctatcgctcgatatatccatgggcgctatccaaagttaattacaatcctcgcgtggaaaacgaaccaactgag

SEQ ID NO: 63129 - DNA, 436 bp, Oryza sativa
  unsure (1)..(436): unsure at all n locations
tgttcactnttgctngggcgtccttgggaacatgataatgatgctacacaccatggtaggagtaataaatacactnttgtgcataatgggaagaaaattactttgctacctttgacccctcctgaaattatagaagctgataaagaacgagctgctagtttgaaacttgatgaatctgaaaatcagcaagtggctaaatctgtttttccacctaaaaaggataagctttcacctagttctaaggttgaggggattaagttgaagggtggtgttatgcttgcaacgaaatgtgacattgctgatatttcaaatgatgatatgtgctactttttgatatgcaaacaagcctggtttctttagatgatattgctagttcgatacctcctgttgttactaacctcttgcaggagtatgaggatgtctnttcagctgagat

SEQ ID NO: 63130 - DNA, 419 bp, Oryza sativa
  unsure (1)..(419): unsure at all n locations
agatggcagtgatggtcacttggttattatcttataggaatgttgactactattttcaaaaataaaattataccagtgtccactttgtctaacgttcacaaaggtgagaggcaggcacatttctcgtaacacaccaaaatttcaacaagaaaaaaaattacagttattttctcaatctaaagcaacacgtgtataatagtcatcagaagtttcttccttgtgtcctctagtaccacaacctccacatatgtcagtgaagcaatacatgtaacactaagcgcatcctcaattcttcgttntagctaatttctatagcattaaatatattaccatataagcaaagattaaaatgattagagagttaatgaggagagagagaataagaggaagaaaccattattatgtataaactagttcta

SEQ ID NO: 63131 - DNA, 437 bp, Oryza sativa
  unsure (1)..(437): unsure at all n locations
ntagctgatntccttgccgagtggaccgagtgccaagaatactttctcatatgaaaagatggaatattggactatgcattttgatgggtcaaagaggcttataggcactggagctggggttgttttaatttccccgactggagaaagattgagctacgtattgtggatacatttttctgcgtcccataacgtggcagaatacgaggcgctactccatggattaaggattgctatctctctaggcattcgccgattaatcgtccgtggagactctcagttggttgttaatcaagtcatgaaagagtggtcctgtttagatgataatatgaccgcttatcgacaagaggtacgcaagttggaagataaattctatggactcgagctcacccatgtcctctgacataacaatgaggcagccgacagactggccaattttg

SEQ ID NO: 63132 - DNA, 441 bp, Oryza sativa
  unsure (1)..(441): unsure at all n locations
gcttgacacagttgcggcaggcgtcgtctcgtgccggcttgtggttgccagtggcaacgccctgtgcgcctctgcgggcgccaccctcggcacgtcttcgcgcccaccgtagctggacacctccccgcgccttgcgcggcttacggccgcctgtcggggaagatgactcccccttcctcccgtcaccctgagaggcctcccactgctcccgagtgagatggagcttcccgccgatggtgatgggccccgagagaggctgtggctcatcaccatcgacgaccttgaggcgacctaacgcctcctcgatcgacatcgtggagaggtccagcagagattcaatcgagcgagcgatctgcctgtacttctcanggacgcagcggaagagcttctcgacagctctcttctcgtcataagtgtcggtcgcgtactgcaccattttct

SEQ ID NO: 63133 - DNA, 386 bp, Oryza sativa
tatctcttacgctccaggaatggatcagtcagaacatcaccaccagcttgccgtcatcgtcgccgactggtgtcttcgcctatacggttgtttggtcacaccaccgttgttgggcgtctacgtcttcaccgactggccgccacgttcgccgccgactggtgtttccgcctgcatggttgacctattatgtcgccgttgttgggcgtctacgtcttcaccgaccggccgcctcgtccgccgccgactggtgtttccgcgtgcacggctggcctgttataccaccgttgttgggcgtctacgtcttcaccgaccggccgcctcgtctgccgccgactggtgtttccacctgcacgctggcctattatgccgccgctgttgggcgtcta

SEQ ID NO: 63134 - DNA, 381 bp, Oryza sativa
  unsure (1)..(381): unsure at all n locations
gctntgtctccggctgctgccgctccttcttgtcttggttgccgcttcccatggcgcttccaatgacacctacgacacctccatgtgcctgcaggaaacaaccacctgcggggatgtcagtatcagatacccgttctacttttctgataagacgggatatatcaacgggtccagcaactcatactgcggataccccggcctggcgatcgattgtgacgacggcaagcccatcctgcaactcaacggcgccgagaagtacaaggttaactacatcaacgttgggagcatcaccaacgtgtccctggtcgataaggaggtcgtcgacgacagcagcggctggccaagagtcgatcacaacgtgaccttcgcacagggctcatg

SEQ ID NO: 63135 - DNA, 437 bp, Oryza sativa
  unsure (1)..(437): unsure at all n locations
tagcgcannaaaaagttatggcaatcttntttttaacgtatgttatggcaatctctttgacatggaaaagtgaaggttcaccgccacaacacctgcagttttcggctgtggcctccgacacgggttatgcaggacgcaagaattgaccttctaagagcagttaaaataacactcatagcgccggcgatactgactccacgtaggtttgaggagtaagctggagggtgaatggaaaagagagagaagctcggtgactaatttacagcccggttgtacactgctcccaatattgctgctgctctcagccaattgcaacattcaagtgaagattntaaaaaaaaaaatcaaacctagccatgggaagtgcgtagagatgtatatataggttctgtttggggagagtttctagttgctacagcttctcccagaactagaag

SEQ ID NO: 63136 - DNA, 449 bp, Oryza sativa
  unsure (1)..(449): unsure at all n locations
taagtcaccgccgctgcagcttggtttactaaaaatttaacttggtgtgtttagtttgacatctttctaaatcttggtagtgctttttatcaggggtgaagctagcatcaaaataagggggtgtactaccattaaaaatctagaaattttcagtacaaaactgtgtattttagtgtttttaagtgaaaattgaggaattctggggttaatgtgcaccccatacacaatatagcttcgccactgctttttataataagaaagttccaaaaccaccaaataatgttaaggttaaaatcagaataaagtgaacaagttctcatcagctgtgtttgttatgtttgagtgggaactcattcccttcgcacgaaaaacggagcgatatttnttttatgattaattaagtatttattattattnttaaatagattaatatgatttttaaagcaact

SEQ ID NO: 63137 - DNA, 349 bp, Oryza sativa
  unsure (1)..(349): unsure at all n locations
tgtaccatttggcaagatgataagccagtataattatgctntatatcccatcaatgtttttttttgaactgtagatcatccaattgatgtttagccagttactatcacacagttgcctttcctcccattcatgatagttacttgcgttgaccacataaaggtagctttcctgaggattcttgaatccccctttttctttctttgtaccacgaagaaaattgggatattactacaatgagcctgagattctgccaccacttccaggttatttctgaccttacatttcatttcccttcaacgtgtagtttttatgtcattactcatgtgctatgcttataaatctgtagtt

SEQ ID NO: 63138 - DNA, 430 bp, Oryza sativa
agctgaacatgcaaatatcgatgtgcattatgagtgggtgggaaaatattgatccagaaggcccaaaatagtgcatgtctacgtgggtgagctattacaaataatttatttatagataaaattcttacatctttattacttcctccgtcctaaaatataaacactcttgatcttcgacacggtattcgagatactactttaaccaatgacatttataaaagtaagatgttttaaataaaaagagtcgcatattgtgatagtttgtttaatgataaatctagtaacatcaatttgatatgattgatttttttattcttttgcaattaatagttaaatatataaatatttgacttgacactatactaaaaattgtttatattttataacggatggtggagtattaacagtctagaagccagatatatatatg

SEQ ID NO: 63139 - DNA, 461 bp, Oryza sativa
  unsure (1)..(461): unsure at all n locations
tggattangttggttgtgcgatgtgtatctaaagaagctattgatatgcttctgttaatcatatattcatattggcgctattcgctatagtggttttgctgtatcaaataagaggtttccatgtttggcatcatccattgtgggattgtattttatagttaaagtgttgataaactgttgtcaactctgataaatactactagtatctgaattgtgatttgtgtttctataggtgattgttagcattttcccaattacaccaatattatattctgaatcatttccttccattgttggcaggtgtgttgtctgtcttgcagactatgaagagaaagacgtacttcgtattcttccttactgtggccacaattttcatgcgttgtgcatagatatctggttgatgcagcactcaacatgcccggtttgtagaaattcattgtgtgactaccctgatagcaagc

SEQ ID NO: 63140 - DNA, 346 bp, Oryza sativa
  unsure (1)..(346): unsure at all n locations
agcttataaaagagaagagganagctgctttagttatacccgaactcttctgaaggcttccggactcctgacttctattctatttctattccatcagctagatactactaaactaaacttgagagaaatgagagagctattgtttgaggtgtgtgttgaagtgaaaagagtgaactccttaaataagaaggtaatgcccgttatggcggttggaaaggtcggtaataaccctccaccgccataggaagtgaatctctaccattcccttagaaccctgcattcatagctataagcaagttcggcccaaccaagggcaacccaaccagccacattttgcctggggccc

SEQ ID NO: 63141 - DNA, 462 bp, Oryza sativa
  unsure (1)..(462): unsure at all n locations
ngataatactcctctacagatttgtttccctgtctaattttatgcaatntgtgcagcaaatcacgtgcatgatatgaaggaacaaatctagctcgcatgactcttttcattgcatcccaggtttggggggtgttatttggattggaacgaacaaattcactccaccaaatggatgcaaaatcagtgaactcactactagcagccctaacacgtttattctcaggaaaatcatggcaagcaaatttctgatcaatggctaactcccaagtaagatatgcatcagggtcatattttccatcaaagcaaggaatggtaaacttgatcttgcctaaagtatcatcattatcacgtacctcccgacgaggtggagcgcccatgccatggcgctgtcggcgcctgtgtctatgtggacgaccaagtatttcctcatcatgctcagtgtcagcagcgtactccagttct

SEQ ID NO: 63142 - DNA, 433 bp, Oryza sativa
tgcagcttatgcattttaatccaatctttgttttatgcctgtcatacctgtactctgttttctattagcctttgtttggcaagctgctgtaagttttcgatgaaatctttactactctgtctgccaaattgaatcatgtattcattctaaaaaaattcgaaaaatggataagagccgagaagtcttatattatgaaccttcgattctaaaattcaaattcttctacattgaatgtatagctgcagcaataaatttggatcagcctttctactccctgcatctacgttgagcaagtatctttatgtaaccgcacaatacctaacctaatttattgataagagtgcttattataaaataattctttgcattttttcaaaaattgatttttgcatttttaggtgtaaaataaacaaaacccatcctagtggatttg

SEQ ID NO: 63143 - DNA, 417 bp, Oryza sativa
  unsure (1)..(417): unsure at all n locations
tcgggccaattggcgaagaaaaaactagtcggataaatattataattaaaacaaatacaggttaaactaagtatattaggcataacaagcgtttcgttcttgtagagtagataattggattttgattgagttatttttctaagggaaaaaggaaaaggaggattcaaaatccttttttcttcggactntcccaaacacaaaatacctccttgtattcgcactctcaaatgagagtggaagaaattcgactttcatataatatcttaatagaattccatgtaatgatcaatgcatcttttggattctatattattcgcatgtctagaatcctaccaagagaataccccccatttttatgtaattgaagtaggattgacgaataagaaataaacataatactgtttattagtgtcgcat

SEQ ID NO: 63144 - DNA, 399 bp, Oryza sativa
  unsure (1)..(399): unsure at all n locations
tcttagagtcacctgcggcagcaagcttttattttgcacatacaaaattttttatggcccttgttagaacttttagagtcaatgtgtagaccaaattcagaaatagcatcattagctttttgcagatcaaaaacagggagccaaatttacctataaggagtgtcaccgccaaatttcttctgattcacatagccagacataagcttgatataagcaccaccacattcaatatcctgctcaatctttatcgaatactgaaccaccaatgtccggttcttgttactgaattctgggaacttggccgatatagcanaatgcttagcatcccgaggttgtttgtatacctaacatggtttcaacacagattaccaacatgattcatgacataattcatagcac

SEQ ID NO: 63145 - DNA, 448 bp, Oryza sativa
  unsure (1)..(448): unsure at all n locations
ttacggacctatgaaactaagctgcccgagtcaccaacacacactatgggtttattttatgcgggcggagcggaggttctcaaaagtttccactagatctgaaagtaaagtttcttggttgcgcgtttttacaaccaagtcatcgacataagcctcaacattacgtcctatttggctacccaaagaaattcgagtagtacgttgaaaagtaggacctgcattctttaacccgaagggcattgatgtataacaataggttcctacgggggtaatgaacgcagttntctcctcatcctccctagccatgcgaatctgatggtaaccagagtatgcatctagaaaacacanaaggtcgcaccccgcagtggagtcgacgatctgatctatgcgaggcanggggtaaggatccttatgacatgccttgtaaggtcggtgagtcgatgcacat

SEQ ID NO: 63146 - DNA, 445 bp, Oryza sativa
tgccagcttaggtgtgacaaactttattagttttaactttaatagctaaaactttaggtatgtaaacatacttaaaaatgaaaagcacgagatggaaaaaaaacagtgccaaaaatgcaaaaggaaccaatcgtgcaacttgtcggaaccaatcgtgtaacctgtcagacacgcgagcaccgcacggactagcatttttcggaaacgaccgcgtcgactttatccaagcgagcgatcgtccattaggaattttgggatatatatagcccattataaacccataacaaccatttggttatggtatacagaggcagagagccccatacggcagggtgacccacctgtcgtacccccgggccccgccgcccgttccttcggcagcgaacaaatgagttgttgctgaccccgtgaacaaaccatgagcggtatagcctgtatgcagccg

SEQ ID NO: 63147 - DNA, 456 bp, Oryza sativa
  unsure (1)..(456): unsure at all n locations
tggcgcacacgaaagaggacgagggcttataaagacacgtgcgccccctacctggcgcgccagatgatggagcgtggggctcctcaccgggagaccgcgcaggcccccctttgccggttcggccgggggcgctaagtgaggttcttcgccctcgatctgaggaacgtcagcgagagaggaaatgcacaagacacgggcgacgtaaacaggttcgggccgctgagaagcgtaacaccctactcctgtgttctggtggatctgtgcgtgaaggaatacagagagccggagagcgagagagagtttttgctctagaacccctttcccagagtcctcaaccccttctctccccctcctttctcctaggcctgggcctcctttttatctggtcaggggtcaccacatgggcctctagctgnctaagaaggaaacatgctntttacaatgagggctagtcta

SEQ ID NO: 63148 - DNA, 351 bp, Oryza sativa
aacatggatatttgtttcttcttcttagaaaatacaaatgttgtctcaaacataaatggttcaagaaaatttcaaatcctaacaccatttctcacacaaatagtaacatttcgcaggtttagctattatcagatgtactaaagaatgtaaagtctaagatgcaatcttagctgactgaaatttcagtagtttatggcgattttatggtaaagttaaatctgtttacaattagcctataaaaatcaaagcactacatgataatgctatcctgcttattttaagaataagataatcaatttccttgaagatctatacacacccctggcatatgagcattgtaccatgtgtgga

SEQ ID NO: 63149 - DNA, 453 bp, Oryza sativa
  unsure (1)..(453): unsure at all n locations
taaggtatgcagtatattgcattcttttagtataacaggtgggtgctggtgcagaacaacgcaatcctttggaatttgtcatacattccaatcaaaactcaagatatatttatgtggccaagtagccacccccacatcatcttcgtttgttttttgatcggagttcggttgagccaaggcttgcgctggagacaaaaacgaaatgtcttcatccgtctgattcccatttgccaatgagtgaaggaatgaattgaaacgaggcgtgcaaagagacgaggcacgcgcaatatatggacaaggcatgtggngggtggtgtgcgacaatctgggacgggatacaaaagtttacaatcaatttttggagcttccaagttccaagccaattggacatggaagtagagaccatcttgttcgctaagaatagaagtactcctcaggttttaatggatgaca

SEQ ID NO: 63150 - DNA, 401 bp, Oryza sativa
  unsure (1)..(401): unsure at all n locations
tgcaagcttntggacagaaagttcttgaccttctcaatcacattgagtctggtcccaaagatcaatatgtcatcgacatataaacacaagatcactccctctcccccaccatagcgatagtacacacatttgtcagcttcattcacaacaaagccagcagatgtaagtgtattgtcaaacttctcatgccattgcttacgcgcttgtttgagaccatacaaggacttcaacagcttgcacaccattccctcttgaccttctagtacatacccatctggttgatccatatagatctcctcctccaaccctccattgaggaaagctgtcttaacatccatctgatggacgagtagaccatgagaggctgccagagtgagtagtactcgaatcgtagtcaagcg

SEQ ID NO: 63151 - DNA, 451 bp, Oryza sativa
  unsure (1)..(451): unsure at all n locations
tctcctaatccccaaatcgagatcccccgaagtatacaataatcactctattcggggcacaccgacgaggattgcgacctcaaatccaaccccagcgggccattcgacgcaacaatggcatcaccacccacccaactaaccccacaaaccatgtaatctcggggaaaaatggctgcaagaaatcacctggcgagcgggaacggacgggacggggccaagtgcgcgcagcgcatgcgagcgagcgagcgagcagggcaggaggaggatcggatttttgcctccctcgggcgacggcgtcgcctcctcctggccttctctcccccctcacacgcgcgcgcccgcaccaaacccccgcttncgcaagctctctggttgggttactgttgttggtgagagggagagggatgggcgtggcgtgctgaatttatgccgcgcgagcgggttggggggg

SEQ ID NO: 63152 - DNA, 412 bp, Oryza sativa
  unsure (1)..(412): unsure at all n locations
tcagagtcacctgccgcatgcaagcttttgcaccaggaggaagctgcattgtgctctgttgtctcagccacaagacctgcctctgtgtggcctgaaacatcctgtgttgctagtgaactanatgacttgtctgaagaagactgggtgaaattctctgaagaagcagacaccccttttagtgagctttctgatttgatccgcgtcacatcctgcaagaccatggaagactatgtagataaattggactagcactttctctattcataattatttgatgttcacgataagatttggtcaaactttcgaaactttgtcaatccattttgtattaaaataaattcataaaatctaatgaatttgtgatactatgatagtactcaagtctaaaatgtgcatattattttttttaaaa

SEQ ID NO: 63153 - DNA, 443 bp, Oryza sativa
ctatacaaactcaagcttgttgatattgttaaagaatgcatgacgaaatactatgactaatatgaaatctcgttaggaaagatgattcacaacaatggcctatgctactgaagcgtctcgtatcttggattcacctgttcttggaaaaaggaagcttgaagaagaatttaatgaatatttgtcattaagaagaaatggttcatggcatggcgcaaagtctactattgaacgatactatgaggatgagctggataatagtatcgatggtgttctactatggtggaagcaaaatgcacaaaagtaccaaatattatcactcatgacaagagatattctctctcgaccactttacacgatagtgttctactatatggtggaagctaaatgcagaatagtactcaatattattactcatggtcttagagtttctccttgtaccactt

SEQ ID NO: 63154 - DNA, 414 bp, Oryza sativa
agcttacttactgttcattccaaaaattcatgcttttctgttgttgtaatgagaactccttggcaccattgattggctatcttgggctgaaattatatcgcactagtggcgacaactctgttctgtatgatcatgatttagaaaggtaatcttttagctctcgatcttacgcttttctttaccgatccgcacaatccttgttgattcttacatcaactctgtcaattgattttgttacagttatgcactctttgataaggctggccatcacgtctcaaaggaaacagttgctaaatgtgaagaaacatttgaaagaattcttgatgaggtacataatgaactcatttatacttggtacttctggtgccgtttgaagagcatgttcaattcactatctaatctctgttgcattaa

SEQ ID NO: 63155 - DNA, 439 bp, Oryza sativa
  unsure (1)..(439): unsure at all n locations
ntgaaagagggtttctganaccattcccctttgctcctatgccattgaatcttggtgacctaatcacatcattgtactctcctaacatgtccagtgagaattggaaatccatgtcctccccttgttcgatgacaggtgagtatggttcccactcagctaattttctcctagcttccatgcagacaacctccagcttgctcggttcctcctccaaccctctgaactccctggtcatcatctcacctatctctgccaagcaaagaccagaagcagcagcctccttaaggaagattgtgcacagcaccaggacacgaaggcaggcctcgcggattataggaagctccctacgcagcattgccacatccctcattggatcaagattcttaatgtactcgagctcctcttcagagaatgggattgatgactgagcccagtggat

SEQ ID NO: 63156 - DNA, 388 bp, Oryza sativa
  unsure (1)..(388): unsure at all n locations
agcttattaaatctctggcgattntagttatcctgtgactgctaggagcaacggaataccgtggggtagcaaccctcaaacaaaatcatatattttttagtataattttacttaaatttattaaatagctatctcattgtcttaagactttgaaataccaaaccttatcatcctcgtgtttctaattatacagtttttaaaagtcacaccagttgctacctcttatgtcatctcctttatttgcttgctcgatctaccactatttctatttattctctttgaaacctttaaaaattggattttataggttttagagtttattgtcacgttgggtttcatttttataatttctagatgtcccgtcaaacgttgccattatactcctcta

SEQ ID NO: 63157 - DNA, 446 bp, Oryza sativa
  unsure (1)..(446): unsure at all n locations
ctttaattctgcagggcttcagaagtccgatctgcaatatatctcgtctctcgaccatcaggcatctcatggagaacaaacaccaagacacctgtgacgcggatgtccttcgttcgggaataattggatggcgtatgaaaaattcttccttgttcgaatttgcttgtttgttagcaagatttttagagagaatttttaattctaataattactttgtcccatctgtctcttgtctctcgctaagcagttgttggtgttatgatgttagcctctcccatgtgtgttctcttctcgggtaatcctgcatatgaccactactccatgaagctcgctagcatcgatggctttgatggcaagatggcggcgttcaacttgactctgttggtagggagcangcgctggtttgtgaagaactgcttcagccacggccaggtgaccgtgtcata

SEQ ID NO: 63158 - DNA, 310 bp, Oryza sativa
ttcttctgcataatcgattaataatgatgccagaataattataccgagtacatattaatctgtgcagactggcatggttacaacagatcttcttatgtctggtgccacaacaaagcaagtgagtgatccacatggtctccttttaacaattgttgacaagatagttcatcgttattaaattctggatttatactgatggcaggccaaatttttcatcaatatattagctgaacctgctaatgtggtaagagctccatcttgatttcttttttccccagcatatcgcgtgttcttggtctagtcttcatat

SEQ ID NO: 63159 - DNA, 458 bp, Oryza sativa
ggatcattaagcacctgcggcatgaagctttctgggcattacgcctcattttttctctgttccgccgcattttctttctcacacccgagccaaataaaagcaaaccatgtgttgttggaggagctggttttcaacttaagggaactctgagccagaagtatttctccatgcccttcaagacctcaaacaaaggctggcacgccaactggttttatgttcaaaaccccgagcctgcactccccgagtactcctgtcttcccccggtctatcaggatacctggaattcattgcccatgggagatgaagccgctcacgctgtagaactgatggagcgcatgctgaagctcaaggagcaaggtctgtaaggggagcagatcactcggcttttatcaagagtcgggtagctccgattaaagagagatcccgcacggctttttgagtttgatggaaaacatgat

SEQ ID NO: 63160 - DNA, 309 bp, Oryza sativa
ccgccccgggctggctgtaatcaatagctataaaaaaaagacgacgagctcggctgggcccacttgggctgcacagcacgcgcgcgagggagagagattttgggctgaaatcacccccaccgcttacgagaggatttaaaaacttctttcaattaaaataatcactgaaatgatctcttgaatgctaaaaatacttctaatgctcaaataatttcaagaaaagttctgaaaatactggaacacccaaagtacttaaaaaaattattatcacaccatttaatgattaacttaatatgttgataattactg

SEQ ID NO: 63161 - DNA, 407 bp, Oryza sativa
gacctctgaaactcagctggacaaagccactgcgtgcggtcactgtttgtttttaccaatcgcgatgcgtatctgtggaaaaataattgaagcggaaaatcccactaatcctcctctatcctttcccccaagagtcggactttatcccgaagaaaacaacgcggaatcgaaatcggatgccagattatctctccaactaaccctcggatcttgcggctcaatttctctcggttcgagaccggtctcttcaatccgaggctataaatagcatccgctaatcgtgctctttcggatgttccaactacgcgagctaatccatcagccgaaaggtcggcgccggcttgctctagcctgcgtcggtgtccgcgatgaccgcactgatgacgtcattaatcccttttcttatt

SEQ ID NO: 63162 - DNA, 408 bp, Oryza sativa
agcttgtgcttcttgtaatgccactcatattgtggaaacccaaacttccatggaacattggaaccaatgccccttgttcgtccccggtgttctccgtttcccaacgcttttgtgaggatgtcatcctcgcgtttttgcgagcagacctcttgggaggcctgtctctcagcattcagttcgacctagggtatagttaggacgcgttagacgaagaatatgatataacataatgaaacatattctatgtgttcaacttacgattttctggtacaccgcttgatcttcgggatttgggaacgaaagattctgtcactattcttctttacccttgcccttgcccaatttcttgcccgttgaacgggatatcagcaagcacttgcggggtgttagaattcgctgcagcttcat

SEQ ID NO: 63163 - DNA, 387 bp, Oryza sativa
  unsure (1)..(387): unsure at all n locations
tatacaagcccagataacatccaatagcatatatccaatatacaatatggcacaagcccaacatcccatataactcaagctcaatgatatacgcacaaattcatagtctagaccttagtaaccacaacaggcttacttacatcagttaaacaaacaagtgtagtacatcttgaccaaattcagccacaaatcgaagagcaaacaaccacaagtctatttgaaaagataggtttagtcaatgagcaaacaaccacaacagcaccaccatattctagatagcaaactaaagacatcactgaccatatctacaaagtcgagccacaagtaactgaccaaaacaaactcagatgccaaaagttcacattcgctgaccatatcaaagntaca

SEQ ID NO: 63164 - DNA, 323 bp, Oryza sativa
  unsure (1)..(323): unsure at all n locations
gcgcggtcatcatagatattggcgactgaattgcacaattagctccagtgtgggcttctcttgaacagtctgctttagtaatattcatcagctattttaggatgcgtcacttcataatgttctgtttcaagataaaatttgtattttaacagagctttttatttatgtccacacttgcctatctgtggctttttccttgaacctctattgtttgtcaccatggctcttacataacttaattctaatgatcntctttcccaattcctgaacaggaatctctggacaacattaccctcttctaatcattacagtgatgtcattcc

SEQ ID NO: 63165 - DNA, 368 bp, Oryza sativa
  unsure (1)..(368): unsure at all n locations
taaatagacgtcgctgcgtcccactaatatgccgaaagtttagctgcatcctttctgtacagccaaatgaagcgccgtgtttccatccttgtcctttgtattcagaatcatttttgacaagtttgggttcaaacaaatatagcgcacaacattacgtcttcccattcggacagcaacatgtaggatagtctggccggacgtattgcatgataattcacagccaggactcatttgtatcaacttatggatgacaccaacttttccattcaacgcagcaatgtgaatgggcaatgatccctctaaatctgcacaatagcctgacgatggatctttcgcaaggagagttntagtggcagtaatactgaaaa

SEQ ID NO: 63166 - DNA, 423 bp, Oryza sativa
caagcatgtggttagagctgagacacaatgagccatgcacaagagggggggtgtatatatagaggaaaaaaggaattttcttataacatgcaaaacctttattctacattgataatgccctcctgtgaataaagcataacaaaaggacagagtacttttctttcatgaaactgttgaacaataactcgagtaccaatgctacaagttgctgagctctgtatttcatttggtttctgtggtttatatcctagacagcaagagatatttaagaatatttgtgacactgcacagcagaggtttgtagaacagtagcacctagaacaaggtttgttcccgaagaagcaactgtatagatgtaataaataaatattttaacagtattatattgctaatatatattttatgaaattacattatttatac

SEQ ID NO: 63167 - DNA, 408 bp, Oryza sativa
  unsure (1)..(408): unsure at all n locations
tagctatgaatgaaagcagaagggcgccactgggttgggcttaccctngggcctacctgtggtaaaatgggctgttgccaagatgggccggtgaggcccatattggggaatcaaccggcacgttttctttgggcctggtttggtatgggccagggattgtgggctgcaaattcaagcctgtttacctttttgccattcgactcttcaatggaataagttcatctgaggtcccttaccttctcaacaaatctgattttcgtccttcaaccggaaaaccagataaaacgggttcctcaactatcaaaaccaatgcaaaataaatctccagaccgtttcaactatcatttcaactgaagtggcacttacgtggctaatttgactcggtctatttctacagacacatgaagc

SEQ ID NO: 63168 - DNA, 414 bp, Oryza sativa
  unsure (1)..(414): unsure at all n locations
agctcgacttcattcttgccaacatgattatgttcttggcttggagaccactaacccatggtgtcattcattagtctcatcgtagtgggacctattccttttttaacttccacgagaacatcctctcaacaaatnggttgtgatacttaacttgatgaccaaccggttgcatattatagatatggatatgtttgttgagtatcataaacatcacaagggtcatatactctgatgcaagctcaagtgcaaatattcgatattaataataggtgaacaaatggatctagaacatgcacaaaaatgatatgatgtggtcccctatatattgctacaaatattatatctatacaaataataacatgagatgcaggtgtgtgataattatagaataccaatggggggtatccttacata

SEQ ID NO: 63169 - DNA, 418 bp, Oryza sativa
tcttacaagatcttaccaatgcaagcgttttttgacatacaccgactcatccatagcaccccaatggacgttggatgtatcgatgccttggcaaacacttgctgtacggctgcaatcacatctgtggagctctgggtaagcttatatatgtatcaaaggaatatcaaatgctcaatatcattagaatgcaaatgtgaatgatcattcatagtttagtaccgtgctggtcctatgctataatgtactaaagacgcagccttgacacaaacgatccacaaaatatccttaaatactcaagccactccgattatcaataattaatatacaacgattttttcttcttctctctttcttcagtttttcttttcttgggcggtcttttttttgtttttatgaccttctgccatttctacttttt

SEQ ID NO: 63170 - DNA, 301 bp, Oryza sativa
cgtgcaagcttctcgggtacttggtctctggccgttgtttctttgtcaaccgcaaaaagatacgagctatatagcggatgcgcccacccagcaagcttatggatgtgcaatgtgtgcgcggctgcatgccgccctaattatgttatatcgatgctgggagagaaggcactgcccctatttaagctgctcatacgctccgggccgcttacctggacggaggaagctgatcgggccctcactcagttgaatgcgtaccttggttcttccccagtgctggttgccctggagccagatgagccat

SEQ ID NO: 63171 - DNA, 410 bp, Oryza sativa
  unsure (1)..(410): unsure at all n locations
nttacacctatgtcgattaaaacgcaactcggataatctttattctttatgaacgaacggcgtaaactctagatatctctctgaatatcgtgaaaacctctagacctgcatggcaaacgtgatgactcatattaaaatgatctgaataatagactcttcaatgatactcatataaaaacgtacggaggatgtcttcagaaatttaaagtgacgcgtccaccttaaatcctattctgttgaatacctaaaagagcgcggaagatctaagccataaactggaagcaaaaagaactctataaccataattgttaaaatacatgtgcaatcattaaagcctgttgaactaacgaggaaattatcagcatcgatgacactaattatatgttgaagaaaccaaaacggtccggtga

SEQ ID NO: 63172 - DNA, 459 bp, Oryza sativa
  unsure (1)..(459): unsure at all n locations
agctnttcaccagtccctcacgctaaacttgttttctcgtctatgcatcggttgggagaagtggagaggggaggcatcggttggggaatgagatggatagtaatttggtcacgacgcctgttacattcgtggtactatgaaatgtctaatcaaatattaggcttctatattttgggacgagagagtacatgataaatcttaactatttggtggattagttgtttaagcatagtcattctctcttttttttttgttntagaaacagaagacaaacacatgcgctcactacacgcacactcacccctataaacgcacacacgcacaccctatctctatgagcacctctataagactagactgacatatgttgagattcacgaagtcaccactaaagtctcgctatcgatgaatatgtcgcctaccattgaataaataattagctctaaatgtgaatacccg

SEQ ID NO: 63173 - DNA, 453 bp, Oryza sativa
tcttggttacaaggaatactccatttctgttctaagatagttatacactctacccttgtacatgtacaataatatataaaggtgtatctaaattatgtttccttagtgtgtttatttggttagatttgcctgtgtgcatccttattagtgtagaagtcgggttttaatccattatctaaaaaagatatttggttagatgagctgaatttgattattcctacgcaagcagatgattcaatcagaacagttgacatcagcacaaattcttttatgagtcgtagttttgctcttctttttttttttaatttcccagtgcatatctaccttatggtgtgttcggaaccgggagtttccaactctaccatctcgttttccacgcgcacgtttttcatactgctaaacggtgtgttgtttgcataaatgttctatacgaaagttgcttataaaatcata

SEQ ID NO: 63174 - DNA, 452 bp, Oryza sativa
  unsure (1)..(452): unsure at all n locations
agcttgttgagagaagaatgtgtcttgtttttgcttaccaataagatgtatgagagctcctgacgtcttccaagcctaccatacaatagcaagccaaccattggctggctgaactcatgaaatattcttgtttcatctctcttaacatcaagctaaaaaaacatgttgctgctacttcattntatctactcttttatggaattcagcatgtcaactatctagttagtcatgtcaactatcttgagaaatgctgagcaaaaaacttagtagcaggaggctagtttgtaacaagaaagctcccgatgcctcttatgcctaactattatatatggagcaacaagccactggagtggtctatcttccatcaactcttcaatatttgtttttcagtctggtgtcctttctcttgttatatgtggaacaaaatgatacggtcatgtagacagtgtata

SEQ ID NO: 63175 - DNA, 450 bp, Oryza sativa
gacatcactggatatatccactgtatcttgtttatttacatgattgcaaagattgatgtgattatttctcatttcaaataatatatattccattgattatcaacatggaaaatgaattattggtacgaacagatcttccaagagctatacgaatattcccatatccacaaatattaaagagacttaaggtgttattccgactatttgtaggaggaatataatataccccttaataagtaacgtgaaattagagagtgtgagagctggtgagagcaacgttaccaataaaaattgagaaatacgtgattggatcggtgagacaaatagtactcctaaaacactttgtatttttggacaaaagaatatatgataaataaccctttgtattttacaagggagtgtgtactatttgtggcactattacgggtacttggaacaactttccatgtt

SEQ ID NO: 63176 - DNA, 448 bp, Oryza sativa
  unsure (1)..(448): unsure at all n locations
cgctntgatcacgcgtatattatctatatttcttactgataacccgtgcatatgtgctcaaaattctatgtaattnggatatataatttgctatatcaaataataccttttaaatgcagggtgagttcacattctactgggggcacaatacgtgaaaggcagcaacgccggagatccataataaaagcaaagaaaggtgggtaggcgactcatatacaataaaataatatattattctattatctattgcattaataacacctgtgttacctctcaaattaggaaattgttcatctgagttaaaaaaacgcagtctctaaacagcaagttccaggtaatatcctttgatgcattgtagttttggatttctatatataatatgcgttcttacatgcctctaagaaagaaaacttattatgagttatctattacaanggtattntatatg

SEQ ID NO: 63177 - DNA, 326 bp, Oryza sativa
tactaagcttcttcgctgcacactcgttgtccgcgtgccctcacctgtcttttttatgttagactaccactatccatctactactggttcccctccacatccctttccacgtgcccctgctggttcccctccgaatccatctccacgttccctttctagttcaagtacttggttggatactacttaacctatacttgattccagaactggcggcatccatccgcgattgaatcgtacaatatatgttcatcatcacgggaaaccgtctgtcgatacaacaaacatttgctatataccatacatgtatgttttaacaatctaaatca

SEQ ID NO: 63178 - DNA, 351 bp, Oryza sativa
  unsure (1)..(351): unsure at all n locations
gcaagcttggacttttgttcatgcactttcttttgattganttggatagtagcctcaatatccttgcgctcccgacgatcggctaatctttgcttggctttctctatccgattggtgtctcgagataaacggatggagtaacgacatcggctatctcattcggaatttgagattggatctcatgtagccaagtcctgattgacccgcagtcaaccactagattgtctagtgatgatgcctctaaccgatgaaagatgtcttgaagtgttctattcacatcatcagaaagaggggcccaagcccttgctggggtatcttcttctgttcatcaaagtaatccttgatatcaaa

SEQ ID NO: 63179 - DNA, 436 bp, Oryza sativa
  unsure (1)..(436): unsure at all n locations
tgagctgaatggtaagaggctctatngtactatattgtattctataataggaagagagtagagtagaagaggtcagaagaattctggagttttcggtaatcttctctcatttcttttattctatttattactctgatttcaatataatattcttcctaagtaatttagatttatcctatgagaattatctcttggttagttcctaaatagcacacgagattattgttcactataatcaactaaaatatagtgattgctctggtgagttataaacactaaagtagatattaattgcttagacgtagtgtttaggtaattgttatccagtaattgctgcgtatcctacagtacgtttgaggtatgtgtagaggtggtgacagccctcgagatcactcaagtcctccctgttcgggtacgtagtatagcgacatctatg

SEQ ID NO: 63180 - DNA, 55 bp, Oryza sativa
cacaatttaatggcagcggagcatcagtgggacaggggcagttacttattaattg

SEQ ID NO: 63181 - DNA, 450 bp, Oryza sativa
agcttcaccgcttggagtaatccacgatgtcgcatctagagggaaccgaagggatggatgacaagggagacgcttctagcaccaaggataaagggagctactatcactttgattacagcaaacttaatgttcctcctcataactttgtctccgtgccttccgagcgtgctcctcaatttgatgggacacattacgccgcttggaagcacaagatgaagttgcatctaatctctttgcatccaagtatttggaaagttgtttgtacaggtattgatgtacccaatgatgacatggagctcacctcggagcaagagcaactcatccaccgcaatgctcaagcttccaatgcaattctctccaccttgagtccggaggagttcaacaaggttgatggacctgaggaggccaaggagatatgagatactttgcaactggctcatgagggatcac

SEQ ID NO: 63182 - DNA, 481 bp, Oryza sativa
  unsure (1)..(481): unsure at all n locations
tgtactaccttatattgatctttctttcagctctgtatcttaattatattcgtttcgagctagttgtttgtagctttggccgttaaaaagactgccacattgttcccttgatcgacagatcgatcaactaacaattgatgaggagtgagagagaaacaaaggaaggaaggggggagacaggataaaatgatgagagaaggggaacatatggaaagatgcgtgtacttttacccgggcctgcagagagcaaatatctcttacttccaagccttggaagtgaaggtttgatcggtacgagaagtgcctgtgccctgactgacaccatcaccactgtcaccatccagccaccaccatcatcatcgcatgctccaattcctgccatttcttcttcccacactcccatggacactgactccgagaataactgatacactggccaattgccaccattatgttctacangccaagtcgtatcatcatt

SEQ ID NO: 63183 - DNA, 339 bp, Oryza sativa
  unsure (1)..(339): unsure at all n locations
gaggcgaatagagaaaaaaaaaaaaaaaaagaagtgtatctgactncaacnnnnnnaaaagaaaaaaaagaaggaaatttttttttaaagaaaaaaaagatagagaaatgaaaagaaaaaaaaatttaagaagaaaaaaacaggtantaatataaaaaagaagaaagaaaaggaaaagaaagaggaagaggaagaagaaaaagagaaagaggtagaaaaagaagaagaggaataaaagaaaaaaaaaaaaaaagaagaaaaagaaaaagagagagaagaagaaaaagaaaaagaagaagaaggaaagaaagaaaaaaaaaagagaaaaaaaaaaaaaaa

SEQ ID NO: 63184 - DNA, 452 bp, Oryza sativa
  unsure (1)..(452): unsure at all n locations
agcttggtccaactgatatgctatggtttaagcactaacctgtccgtacagtccccatccaaatgtaagtagtgctcctgaatctgcaaaagaactatctgtcaaagtgcagggcaaaatttttactagaatttagggttccatgtgttgtaaaagcaggttggaattcactagaagatatgaacagagctgaacagntgctaatattttggtttgaattgaaattcctcctagatgtaactcgtctagatctgcagttttgattattagacttttgtgcacatccttggatttaaagtaacttctttggaacatgttctctggtgattttacacagaanatctcatatacataatatcgtagttacttaaaagttaactacaatatatggtccaatcaagcaatgcaccttggtgcctctaatcaccaactattttctatgtgaaaacaaa

SEQ ID NO: 63185 - DNA, 455 bp, Oryza sativa
tagagatgacctcattccagcattaaacgagctcttgttttttaatgtagcccttctgttgcttccagctatcctgtgtactatctgtataaactatagtaattgtacatgtgcatgatcttaacactgatagttaattgttttagattctataaattgagttgctctgaattcagattttagaggtgaatatatgagaatttatggtaattgatcgttcgttatgctttttatttacagtttatatatacaccctttggtattttcatcactaacattactactgtggtaaaatatccgcactcttataaactcctaaactgctctataaaatgtgcttgttattcgtttatcattcaatttgatgcgaatctatggtgttagcttcactaaacatcctcatggttgatatttatcataacttctggttattatatagttttgctgatgattaa

SEQ ID NO: 63186 - DNA, 446 bp, Oryza sativa
  unsure (1)..(446): unsure at all n locations
agcttgtctcattntgtgcaagaaagcgtggntccactttngggccaggcatgggctaacccactgcttgttgggctgatcactgcgtgggccttttctcaggtggccccgagactagtgtaattcaaagacaaaaaggccatggagtgtcagctagcgctcgtcgtcgattttactcgttgccagtgacgtggcagcgtcgaggaagtttgctcgtaatctagcgtttttatcctcttcgctaatgtgtattataatgtacagaaagaaagcccacatcactctctgtttattggaaaaatacacggagagtaagaagtgagaggacacacactagtacagacccttccatctgtgacggcctctaacatgcctggaattagcgggccgtcacaaggaagtcatttcaatcggactgaaaaagcgcccgatagagatatgatcgc

SEQ ID NO: 63187 - DNA, 377 bp, Oryza sativa
gggcggtgctcactatataccaaaacttattctgtatctttcctctcatatatagaaggagttctgcgtaatgaaggacaaatatagttcaagttataaactactaggactagtcggattggatccatatttatctcccataaactactaggacaatgggacatctatgtgtataaatattataccccctatgtggagaggtgttacacaatcctgaacaaacccatatgccgtcagacatcgacatcggttatgaacctatacagacccaatctggtgcttgcgtgtctctaccggtatgaacccgaacggcgttccttacgtgcatgtatgattcctcattccaagatggcttgttcaccaatagtttttcatct

SEQ ID NO: 63188 - DNA, 428 bp, Oryza sativa
  unsure (1)..(428): unsure at all n locations
agcttgcccgtaagcacgccgaacacgcttttgtcggagtttatctntatgcgggcggggcggagactttcgaaagtttccgctatatccgagagtaaagtctnntgttgcgtgtcttacacctagtcattaacataggccttaaaatttacgtctatttggctaccctaatgaaattcgagtatgtacgttgaaaagtaggacctgcattctttatacccgaaagggcattgtcgtataacaataagttcctatgggggtaatgaatgcagttntttcctcatcctgcctagccatgcgaatctgatgataaccagaagatgcatctagaanacacaaaaggtcgcaccccgtggtggaccttaagacatgcctngttaaagtcggtgtagtcgatgcacatccgaagcttgccgttcgccttggga

SEQ ID NO: 63189 - DNA, 468 bp, Oryza sativa
tgagcaaagctcaaacttagtagtgggaactggctttgtcatcttatcatctgggttatcatgagtacttatctcgcatactttgacatcaccttcatcaattacacctcgaataaagtgatatctcacatcaatgtgctttgttctctcatggaacatttgatcctttgtaaggcatattacactttgactatcacaaaatatattaatgcaagacataactccacaaagatcagtgttcaaacctctaagccaaatagcttctttacaagcttcagaaatagccatataccctgcttcaatagtagataatgcaacagtttcttgcaaacttgccttccaactaacagcacatcctccaatagtgaatacataacctgtgagcgatcttctcctattcaaatctctagcaaaatctgaattcacataatcaacaagtccatctctagatctcccatactgcaaaca

SEQ ID NO: 63190 - DNA, 416 bp, Oryza sativa
  unsure (1)..(416): unsure at all n locations
atgcttgngcgatgtgacagttttaggctattgttggtggccgatcctaaattaaatataacatatactagctaataattaaataaataattaaataattactatgtccattggacacacccaatttttattattngtcacatggcgctcttggcacagcaaccaggtgaactaattagccgttcgattaatccattggaagcttgtttgtttgtaacattccatcgatggaaagctaacacggtcgaagagattgtgtgaccagctcctgtgtgtttggccatctcgaccagcccattagaaaaaatgatgaagaaaaaaaagcatattgactcagtctgttcagctcgccgccactcccctgtttgctccagntatttggaccaactattaactgggcctaatacatgcaaccc

SEQ ID NO: 63191 - DNA, 265 bp, Oryza sativa
tgcagaatgttaaccaatggatacaacccatttcttctttttaaataacctatcgatcggcggctgtccctccaccgtgtgcctcgacatcgtgctattgctggtgtacgacagcccaagttttttttcggccgcttcgtttcctattttggcccacgtattttcggcccattaagaaaaactgttttatttttgtaaattttacagcaaaccgaaaacgattttgctatatatttgtcgacaaattttctcccaaatatttgac

SEQ ID NO: 63192 - DNA, 436 bp, Oryza sativa
agcttgttgacagatcggcaatgttctattatcgcctaccgctgtgttgaatcctatcattaaactatggccgttccgaggttgggctttggatttcattggtttatttatccttcgcatcaaaagagcattggttcgtgctagttgcaatggattacttcactaagtgggccgaagccgtgccgctcgagaatattacttgtacagaggtaattgactttatttttgaagcatatttttcatagattcggtatttgtcacaccctgaaaattcaaaatatataaattggtgtttaaatggaatttctagaatttattttaaaagtcttgaaaagaaaatctaattctaattaataaattccaatataaaattgggccagataaaatgtcattaaatactttgcttaattctataattactagatttttctgggat

SEQ ID NO: 63193 - DNA, 481 bp, Oryza sativa
  unsure (1)..(481): unsure at all n locations
ggcacagaatgattgtgacgttagctntcaatctttccatcacatctaagttcaaagtttttgcacatagttgctgaaaaaaattacctaattcagcaagtgcttcgtttatgtccttgggcatgattcctcgtacagcagcaggtataatcctttgaagaagaatatgacaatcatgagttttcaatccttggaggttgcatccatctgcagtaacacatgttgctaagttggaagcatatccatttggaaattntacactcttcaaaaaatcacaaaaatcagccttctgtgttttagtcattgtgtaaggggcatgaggagcactatatgaatctccatcacggatcaagtgtaaatgcttgctaatacccatatcttccaaatcaagcctagaatttgactgtcctttgacttccagctatgcctataaatgtaccaaggatgtactcacatatattgttctcaatgtgcatcacat

SEQ ID NO: 63194 - DNA, 313 bp, Oryza sativa
  unsure (1)..(313): unsure at all n locations
agcttgccggcgaacgacggcgctttggttctaactgagagcacccacgggttgcggactgcgcggcgaactcaccggtgaccaaagaaacggcggaggagcatctacggtgacagcacgatgttgaagcggnggagaccttctgcttgacgacagcgacggtgctccggcggtctttatcgactgcgaatgggcggacgaggacggcaacgcgacggcgaccacgaaggcgacctccccgagcgacggcggctactggagcgacggcggcgcacggctggagatgcggcaacgacggcggcgcgaggtccca

SEQ ID NO: 63195 - DNA, 472 bp, Oryza sativa
tgccaaccgctactggattcgccttcttccttaagacattatgaccaggcatcagctctgtgggtcgaactactttgccgaagtgcttgtggcgtacttgtgcatgtgctcgagtgcttctacccttaccccttccaagagttcgagcggtacttctcgcccctcttcgctgtcacgcccggaatttctatccaaaattccaaatgcttacatgtgtgtgaaccctcgtccaggaatcatccgaggcactcaataacaaattgataatagagtacaattattactctaattaataagcgaataatatgtcattacagaggtagatagttcctctcaatcaataaatatctaagcagcggacaaataagataaacggcgcagacgactcctctccacaggcagcttgaccagtgctacacctaatccttcacaccatcagcatcactgtagaactactcctctgatgaatgat

SEQ ID NO: 63196 - DNA, 439 bp, Oryza sativa
  unsure (1)..(439): unsure at all n locations
agcttcttgccctgaagttntctgaagtctgaaccgcagcccatgtcctaagtcctaactcctaaataggattataggaatagttaaaggacaaggcaaaacactgtttcttatttgcaatctcaatttacacgattgcaatgatcaaactcaaaattacttttgaagatctcattcaatattgactcaatctgaattcacatcaacttatcatcccaattcttcagaaatgctctcttgctgtgaacaaggatgctctcaaaaaataatcttacaacaatggactgtttgctctggtcaatttgcttctttcctgttgcatcttgtatgacagcacctangttgaattctttcatgacaaattgatctcgatgcangagtcgtgaaagtcattttggttggggacaaggaagaaggcggcgactgaagggcttcgtcg

SEQ ID NO: 63197 - DNA, 389 bp, Oryza sativa
  unsure (1)..(389): unsure at all n locations
tccnctgataaactattaactngcactgattttattagtctgtggacgcttcacgtacctggtttcctggtttattgactggagccgcatgatgacctaaagtaaactttcttcaatcccgttccgaacaatgccacttcacatgcttgcagatctacacatgggccgatatcctattgggcctcgatgtttccggcccaacctttggcccgcggagcaccggaatatgggcctttctgcccatttcgccgctccgacgccgatcccgaattacccttcgtcctcgtgtgatctccgccgcttctcttctcccccattccgcacgcctcgcaaggcgaatggaggggagagagagagaggaggggacgagaccgcggcgatggtgatgc

SEQ ID NO: 63198 - DNA, 453 bp, Oryza sativa
  unsure (1)..(453): unsure at all n locations
agctntatgttcggcgcagtactaatacttgaacttatgagcaagaattgctctatcaatcaccatctactttagacatatcttctgaaacttttttcaaaatcaaagtccagtatttcctacaaattagtgaattaggaggagctctttgtgccgaanaagaaagagcagggcaatatttcaaacttgcattcgaactgcgaaatatttatacaaaggaggagagatcaagataatgcagcagggttggttatctaattggctagtcaaacatgaggtggttcatagatctttgggcttcgatcatcgaggaatagagactntgcaaataaaagcagaggattgggattccattgctgtcattttatatgtatatggttacaattatttacgttcccaatgtgcttatgacgttgcacccggtggatctttagctagcgtgtatcatcttac

SEQ ID NO: 63199 - DNA, 481 bp, Oryza sativa
tctggcccagtatgtccatataactcactcggataagctgtattattgaaccagacaaaacaacaagcgattaaaccaaagacagataaagcgcctaaactataagacaagtaagcttctccagaccatacaaatgcacggcgagcccatgcgaagggtttggttaagatatgccaaattccgccaaatacacaaatgaaacccaaccatacatgtcccccaattatatcttctaaatcatccacactaacaatccaaccctctcccccaaaaggggattgtagtaaataaccaaatataacaccggggctaagggtcaaattggtaatttttcttacatctcctcccccaggagcccatgtatcatatataccgccaaaataaagagctttgagtactagaagaaaagcacctatacctaacaaaattaggtgaatacccaaaattgtagtcattgtatttctatctgtccacacataac

SEQ ID NO: 63200 - DNA, 342 bp, Oryza sativa
  unsure (1)..(342): unsure at all n locations
ggagcggaagctgagcagaaactcgacacccacttctagagtgtactggtttggaatgatcccactcccgatcccgcgaaacaaagagtaaanggaaaataacagctggagagtcgggaaccacagaaagaagaaaaggccatcatagcatgaacgagacgaacagacaaacaaagttacaaccgcagaatacctcaccatatcacagcccaaagagacaagacaactcactagggcatgaaanaaagaaaaagacagggaagcgcccagaacatccccctgcagaagggaactgggaacagaataaatggtacaaggaacgatcaaatcccaacaccaagc

SEQ ID NO: 63201 - DNA, 116 bp, Oryza sativa
aaaaccgcacccgaagcgacaaggaagcaggattatttaaaagacacaacaccaggcgagaaaaacgaagaaaaagacgaacgcaaaaagacggacccacaaccgacaacagggac

SEQ ID NO: 63202 - DNA, 498 bp, Oryza sativa
  unsure (1)..(498): unsure at all n locations
attacgtgaactattaaactaagtcttctacaaggccgtgggcatcctctgagtttgatattatctaaatacaagacaaagatgtgggaagtttctgcgaggcttccttctcatgttaagccattgacttgaagtcctgcatgttcacacaaggtcaaactatttaatgacgtgcttttcacagaagaaaaattacatctaaatggattcagcactgctttccctcaaagaaatgataggatatgaatcattattacgtatgtcacttgccgctgcactgtgagtggaggagtgaactgccattggttatcttcccaacattcaagtggtagtccatagcccacatgctcagataccaaccaattattcttccaatttatctaagtgtactggtcaagatgaaaactatgagacaatcactagtcctacagattattagtgctatggagtaatgaatatgacccatgcacgttgaacatcttgtntaagtggtttcat

SEQ ID NO: 63203 - DNA, 445 bp, Oryza sativa
  unsure (1)..(445): unsure at all n locations
agctngattggnctcgccggatcgaattgttgatggcgatgattccaatctcgttgggagacgtactttggccaggttggatctccctgatccgaaccctcgagtagctattgttggagaatccatctcttaaacccatctcgtctaaatcctgaagcaccaaaaaatccccctacctggcgcgccactgtcgacgtttgatgtcgcgattccggtatttgcatagtatggggatcgtcggtactaggacatacgcgagactgaggtaaaagagacagaggcgacgaattttatacaggttcgggcccctgaattgtcaggtaataaccctatatcctgttggccgaagccggtattgctcttattcaccataatcacacgagtacaatatttggggtagcctatctaactgttgtcgacatggcggtctgtatgtctgactcgt

SEQ ID NO: 63204 - DNA, 448 bp, Oryza sativa
  unsure (1)..(448): unsure at all n locations
cgcgcggaatacgatggagatggggtgtgaaccctgtttttcanacacagcccaagtctatccaaaatgtgtatacaagataatacgtaacaagttggtttacagaaatacgaattatatcaatcctgcactacaagtagagtaaagtggtgatttctcttaaatctctcgaatggtgatttaagaattcagtgcaaaccaaatccttgctataatcaaatgttcggtaccgcatcaacggaacaataaaaagcgcctggcgtaccataaatttgtcattcttgttgaaatttgtaatttaagatgcatgaggccacacgaccttaatgttcaacgtgtcatgcattattgaaataatagctcacaatacgcaacaaatatagcttgataacgggtgcaatccttaccatactaacgtataaagtgagcgatgagtcatatcattatc

SEQ ID NO: 63205 - DNA, 459 bp, Oryza sativa
  unsure (1)..(459): unsure at all n locations
agcttggagatagttatggtaagtttaagttgtttatcggtggagtcacttatttaccataatcttctactgctaatcaagtcactatatttttcccagcgtgtgcatgtcttaatatccatccactccatcacagtnccttcntaatgaacttcatactgtagaggtatgttctcccattctaataattttagccattatgtacaattttttgtgcatattccctcttatgctcatgctcttttctctggggcctattccttccttgttctatgtcgttttactatttccccccctgccctttttaccctgctgatcatatgtacaatacatgaactcgctaaaaacaaaagtttggctagtaaacactggtctgtggcatgaaggaactcatatcaactctgtagtccacttcattaattngngggacatcttattataaagnggattgctgatcat

SEQ ID NO: 63206 - DNA, 479 bp, Oryza sativa
  unsure (1)..(479): unsure at all n locations
tatgtatgacatgggcctggatgcgtacagattctccattgcttgttctcgtcttattccacgtagacataatcacataaataaggtagtattgaatatcttcagaacatttctgacagggagcttcaattggattagatggaagaggagagatcaaccccaatggcttgtaatactacaacaatctgatagacgaattgataatgcacggtaaacattacatgatccatgcagctctattcttaattaccaaaatcttgatcaatcaagacccatcttctgccatgttttggcaggaatacaacctcatgtcaccatctaccactttgatctccctcatgcccttcatgatgagtactgtggaatactcatccccagattcatgttatcaccctgataaatccacataatcctgtgtgacaaactgacatgctgaacattttctgcttttcgcaatgcanagtgatcgaaatggtgaa

SEQ ID NO: 63207 - DNA, 463 bp, Oryza sativa
  unsure (1)..(463): unsure at all n locations
agcttccaccacttttctgcattcctcaatctctatcgaaagcaactactggtactagcgtttttttctacatctcanaagttacactntggcatgacatctccttaattcgagagacttgacagaccacgccaccatttaaattaaagtgcgttgatcgccggtcaactaaacagtgtatgagtatgacatcagacatcgactgttaattgattagcaaacaaaatacatcaaatcgagcaagcattcaggtatacttactactctaaatctattataagttacatccacctaaaatcccttacaatttaaaataaagggagtacctgacgttcatgttcctagttttcatcatcgaatgatggcatgattaaatcctatccacagccccacccaccctgatagaaagatatgttcttttaagagcaggtacaatatctagctatatagcagctgcaaacat

SEQ ID NO: 63208 - DNA, 426 bp, Oryza sativa
tgggccttttggaccaatgggccataccatgcccatgttctgtactattcacttgctttctttcatttagtaccataccatctatcaaaccagaatgtgaccaattaattaatttacacaagcctctgtattgtattgaacatttcaatatgaacaaattaaatagtgcaactacatttatcattatagatatatcaaatattagctcattcattagactgtatttttcctcctagcttgatacaactgttgcaaggttactataattaattcgtgcaaaatgaacacctttataggtacgaaagaagacaaagacatttatcattatacattgtataatatatcacaattatcaaatatacggtcactggtgatattgtgagatatgacagctaacattcatgccagtgaattgatattatatct

SEQ ID NO: 63209 - DNA, 457 bp, Oryza sativa
  unsure (1)..(457): unsure at all n locations
agctngtcagattcatcgtctaacaaagatgtttcagaacattttatatccttgctattacagttattcatgacgtccaaatctttcataacctcaatctactcgtccctaagcaacaaccatgaagatgaaaatactttctgttaataattacattgtatgatgttggtgctgtanggttttgtagttgtggagacaaatttccggatgtatgcgtactcaacttccagattacattgtgaaattctgcgccttttttcaaggtacgtgtggtgctagatgattggcataacttatctcaactatgtactggttttttaactactgaattactgatccatagcttcttgtgcatccttgaacgactttcctctatttattattaacattttgccatatgtctggcatgcaaaagagcgacggcagggagctaagggctctatacccttcatcacat

SEQ ID NO: 63210 - DNA, 478 bp, Oryza sativa
  unsure (1)..(478): unsure at all n locations
ngcagtgtactcgccttcctttccacctaactggcaggttattatctcaagagaaatataaatgcagctcctttgaatttaagttatatctggtgacactttgcatgtgattcatagttaatccggtattaatgaaggttatccacatggcgtcctaaatttcatagctatttctgatttgtatcggttgccttaatattgatctagaagaaagaaaatactcaactgttgtttcggcaatcctttacctattgatttgcaatatctgtattatttgttactcatttcttatttcaggcacacatattagaatgttactgagtttatgtgtgtcatattgtggcatacgtgattatgtgcacaaagttgtnatctgaagcttcaatggtcagctcattgtcttgtttacctcttaatcacacggctagttttctttatgtatgccctctgtttttatgtgccattcatgtacatgtgt

SEQ ID NO: 63211 - DNA, 442 bp, Oryza sativa
  unsure (1)..(442): unsure at all n locations
agcttgcttaaacacctaagttcccgttgttttcttattacgaaagtactcacccttgctctatataaatatatatatatagttcctccgccctgaagagaataaatccggcacgaagatatggcttcgtcctggttccagccgtagactgtggtggtgggtgttagacccgtggttccgctgcttgtgttggtgttcgcctcgttcgagtcgtcgggtgtattctcgggctgtctgagctacaacctaaagtaatgtaaataagtcctctatttattttaaggattgctatgattcatatttgtcaccgtgggtaccagcactatgttctgngactggtaccgagatcgcggtttcgtatgaagcggttcacgcacgtnttcctacgacacgctcctgtcatgtagccgtgtacggcggtatcagattgtggtgtgacaca

SEQ ID NO: 63212 - DNA, 466 bp, Oryza sativa
acgtccttgtgttatataaatgagtgtacatatgtctcatttcttctcttttccaaataaaaaaatgtttgaatgctacacacatttcacaactcataatcagctgcttatttgacatcttccatgctcttgctctttagctattcggattcttccagaacatgctgcactgatcggtgcatgcatcttcaaacacatgtgcagtacgaagtaccaaagcaaaatctttatattcgttcatcgcaactcatgcatgaatcatgagcgcatagatcagattggcaatgtatcgaataccactgctgcctttttacaaaatatacaacggataaattgcaccgcggcatctcatgttgacatcgctcgcaagtcaggtagacatattgtggcatacatctccctcacgcacgcgcgggctagcatgaggtcaatgcatcatgcagacatgcaaggcccgtgtggtaca

SEQ ID NO: 63213 - DNA, 351 bp, Oryza sativa
  unsure (1)..(351): unsure at all n locations
agcttcatttccatcctatcagcagctttgtactgttatattgactgnaccncattntgcttggattgatccaagacgttagatgagatatttttgttcttgcaaggtccgtcccacttcgcacacatgagggatgattgatgattgttaagggatagtactctcctgattatatatgggatagatagagtgctgttctttttatactatttgtgacagggaggttctcaccctggtttgtgttgatttatgatgaatgcttgattggggtttgctgccacattaaatttgatattgcttgatgattttgaagatcatacgacgagtgtgattcttgtatactccactttg

SEQ ID NO: 63214 - DNA, 438 bp, Oryza sativa
gataaggcattgtcaaagccgacacaggtttaccatatgccgacgagaggggtcccagaccaacaacaggttatgtcccagaccatactgtgccatgaagcccatgggtgctccccgacaccaccccggcgaatccacatgtctctcggcatcaaggctcccctgataagctagttactcaaccaggggtgtcccattccacccatgtggtcgtacttgtcttatgtttggatgaaattccaagtaatcggtccttaagtgcgagagcgggaaaccgtacacccggtacgttccccggtccgcggttttggaaattcatttatttcgcaagcaccgacccacgtgtcggtgtttcccaagtcttttgcaaatcccaagtttacccaagttgatttcagaatttaagttgaaagcgccgtcatactcgacaggtgcaca

SEQ ID NO: 63215 - DNA, 438 bp, Oryza sativa
  unsure (1)..(438): unsure at all n locations
agcttgttcagcaaccaagcccatctagataagaagatagntggttatacgaacttgtactttatacgaacggaaattagttaggttaagtagtgaactcaccagtcctgatagacgacgcatcacttttgttctcaaatgtgacagagccgtccgggttgaccttaccccttgcccgcgcccagttgcgagctctttgttcagggatgtctgaaaacggagcaggtacattcgctgctgcagcggctgcatcttcttgggcccatattgcctccttgccgatgtaccctgcggtgcccagccgatgcgggtgctcattccgctgttgcagtacgcgatgtgcctcgctggattccctaaactcttgggtggtcttgagagagcagaattcctcccacaccgcttcggttatttgagggtattcatcgaacggcgtat

SEQ ID NO: 63216 - DNA, 431 bp, Oryza sativa
  unsure (1)..(431): unsure at all n locations
tagactgtcagtttagtattntattaatctaattttaatattcgaaattaataattagctagttgtaactgacgtggactctcttttaacataagcaactacactttcaaaggaaaccaacacgttaaatataatattagagctttaatatttatagtgtcaatattcattaagaaggggtgaaacgatgatatgttcgcacgttatccgtaggacctctcaaagaaagaaattgaaggatatatgaaacgtttgaccattcgtcctagttaaatttttcgtgcaaatataagaatatttatatcatgcttaaaaatatttgatgataaatcaagtcatattaattatataaattttgttaataagataaatggtcaaacgtctagtaaaaaagttaacggtgttatacattataatacggagggagtatt

SEQ ID NO: 63217 - DNA, 446 bp, Oryza sativa
agcttgtaatgcatgcaggggcatatctttctatgatggcattgtatcgacttgcgtagcttgaatgtacagactgtaacaaaagccatagtctagatctaatgcgccaaacgtcactaaatatctgattcctgttctgctttgcctgttgtccatcaatagaaactataatggccttgttcctttgatctttacttataatgatgagacaatacatgtactttctcgaacgagtctgctcgcagttataattatcactgctctacagactacagagtacagatgctgtgagtaaacttttttcagtctgtgtgggttgggactttgagcttatcaaaccagctgcgtattacaggggttatacatgaaggccctagaagtattaatagcccctgccattaactctgagggtaaaacaataatctcttatgatatggctcgtttta

SEQ ID NO: 63218 - DNA, 466 bp, Oryza sativa
  unsure (1)..(466): unsure at all n locations
tcggcgcatcatcatatggacacccaccaccaaccggtttttctactagtaggagtagctaggtaaagctggaggaggttgcatccatgatccatatatcatcaaacgatgccacgatgggggatggggtggcccccgttccccatcattcctgccagttgctggctggctcgctcgaatgctcgatgcctcgatccatcgattgcttcccaaccaaacaccttccgatcgaccttgcccaaaccccggggggtgatcgttccttcttaatgagcactaatcacgatcagtcactgcaacattatcgaactcatcttttcgttcatgtgtatgcttattaattaaaatttgaatattcaaccttaacgattntacggtctcttttattgtggctcatttatcagtatttgcttttatttcgttaataacctatatataaaagcgttattcacaaactaatttttcg

SEQ ID NO: 63219 - DNA, 455 bp, Oryza sativa
  unsure (1)..(455): unsure at all n locations
atgcttntcttctgttcaaatcttgctttttatttctctttcgaacttcattnttactcgtaccattactcggtgatggtgactggcttgtacaagctggctttgctggaagtccaaagcaaatatgaaattaatccatgtaacagaaggtgaatatgtctatctaacagaagttgtcagtctgtgtgatgcttgtttatggctgtgtgtgacttcaggggcctaaacaagtccatatcttaacctactgaataaaacgaaactactcatccctcattacctcaacatgggtgatgtattaaatgctcaagcatgttacatgtacctttatggccttcaataacatatgcatgacatgataaacaagaagtcatccaatgcttttgtgctgtctattcgcatgctatccatacgatattntacagaaatacagaacaagatgctcactgaatatt

SEQ ID NO: 63220 - DNA, 452 bp, Oryza sativa
  unsure (1)..(452): unsure at all n locations
tacggaccttaaaactcagctaatttcatacttaatttgatgttatttgttataatttattctagcattgactnttaagtccatatcgacacatataaaatttttatctataattattatttttcctccaataaacgttaagtgtcttataatcagttgtaggatgtctttttggagagaacgttcacatacctaaccgcaaaatattgattatagtctcgattctatttttttcctattctgaatttcagttacaaatacgctctcattgagcgtctttagcatgacccctaaacacatgtctcaaacaaaacaaaaattgagggttaaggtttaaaaactagatccatccctactgaagcccctaaatcatctcgaaattatttcatgccaagcccctcagtcttaatgggctggcgactgtggatggatcttgcgcaactccggatcct

SEQ ID NO: 63221 - DNA, 438 bp, Oryza sativa
  unsure (1)..(438): unsure at all n locations
agcttaagtttgtttgtcatagccattatcttatgcaatcacattaatttattgcttaagcttttctttacatgcacattggagatgccttaaggatctncctcatgtccacaaataacatggtccgacttaaaataaaaattaaaaacggatgcgacatgaagtatagctcactgaaagaatagactaatagacaaaaccgcaggtagtaaagtaaaacaatctacggcagcaatgcacctgtaaatatctattttctagagctttggtgggaagagtagtaatcttacagcttggaaccaattgattttctaagttgagattgttcagctaacacaaaaatgatattgctttagataaaatttgcttcaaaatagacaaatctttgtccactagatgtatgatagctttggacaatataaccctgttataatctat

SEQ ID NO: 63222 - DNA, 400 bp, Oryza sativa
tgagctgaattataagaggctctatgatactatattgtattctataattaggaagagtaatgtagaagaactcggaggaattccggagttgtcagtaatcctcttttatttcttgtactttattaattactctactttaatagaaatatcattctgagtaattaatatttacttcgtgagaattattctttgattagatcctaatcagcgtgcagatcattgttcactatattccattaatctatagcgattgctttagtgtttagttagcgctaaaataggtattaattgcgtagacgcggcgtctgggtaattaatttcttgtgattgactcgtatcccacgttatgtttgaggtgggtggagaggtgtgacagccctcaaatatactatatgtcctc

SEQ ID NO: 63223 - DNA, 447 bp, Oryza sativa
  unsure (1)..(447): unsure at all n locations
agcttcggatgtgcatctactacaccgattctttcaaggcatgtcctaaggacccttaccccctgcctcgcatagatcagattgtcgactccacagngcgggcgaccttttggttttctagatgcatactctggttaccatcagattcgcatggctagggaggatgaggaaaaaactgcattcattacccccataggaacttattgttatacgacaatgcccttcgggttaaagaatgcaggtcctacttttcaacgtactactcgaatttctttgggtagccaaataggacgtaatgttgaggcttatgtcgatgacttggttgtaaagacgcgcaaccaagagaccttactctcggatctagcggaaactttngagagtctccgctccgcccgcataatactgaaccccgataagtgcgtgttcggtgtacctgcgggcaagctt

SEQ ID NO: 63224 - DNA, 409 bp, Oryza sativa
tctcgggttcttggtctctgcccgaggcattgatgccttccccgagaagattcgagctatcgagcggatgcgcccccctatcaaacttatggatgtgcaatgcgtcactggttgcatggccgccctaagtcgtttcatatcaaggctgggagagaaggcgctacccttgtttaagctcctcatgcgctcggtgccgttcacttggacggaggaagctgaaaatgccctcgcccagttgaaggcgtatctcatctctcctccggttctagtcgccccggagccaaatgagtccctgctactttacttatcggcgaccccccaagtggttagtgcggcgttagttgtggagcgcgatgatgacaatcctcatcctgcgcacccctactccgtgccgactcggtccgggagc

SEQ ID NO: 63225 - DNA, 450 bp, Oryza sativa
  unsure (1)..(450): unsure at all n locations
agcttcaggttntaccttttctttccaattctagggaatgatcaggaattgggaaataatgtattgcgtggacctttctcttttattttcaggaatctaaaaggaaatcctttgcttgtggaaacattgagatctaagctggtatgcttttttgctgttgtttatttgaacactcattccttttccattctacaattatttaccttcacattcaggaagatactcgagagaaccttgtcacatctgagaaaaaagcaagagagctggaagctcaacttcaggatgaacagcttgtatccgccaacaatcagaaggttacagtcgtaaacatgtttagagctattaagcccaagttgtttcatttgtagttcattgaatgtatgtaacatcttttcttcacttccttcccccttgcaatcgcagaaatcagataaactggaaatggatctg

SEQ ID NO: 63226 - DNA, 428 bp, Oryza sativa
  unsure (1)..(428): unsure at all n locations
tcatagattgtatggaggaactcatctatcagtgactgttgtgtcatcgataaggtaaggggactccgctaatgaatcttattgttgctctacttactttaaacaatgctgagttaagggttgtacttctggttggtttcatccaataacccttcagttgttatttggcatataggtcagatctccggacagattaatcttgttagcatcatcactggtagttttgcaatgacatgatggcaatcaaaattgttgaggaatatttattcgagctctatgcctctattgctttcctcctgatatgtgtctcattagttctaaaacaggattcaatgtttggtaagccttctcaaaatagctaacatcactattangctgtttaactgggtattctatttggggtcactaagtgaacaatattttgtcgc

SEQ ID NO: 63227 - DNA, 465 bp, Oryza sativa
  unsure (1)..(465): unsure at all n locations
tgcagctgcagcttcttcgccatgaaaagagacattgcctatgactctgaaaaaagaccgctctgggatggcttccatctgatttcgtcttcatcatgattgagagtgatctgtccacagtatccccaactgaaaatattgccccatagcttcagtaaatatcgagccctgcaagttccttacccatctattgttggtcatggcttgtgccaccgtcagtctcgaccgtcccacatatgagaaaaggattggccattgccaagagatgcttccttcgttcagccagttatcagtccagaactttgtgttcttaccatctccaatatcagtaaaacacactacctccgtcccaaaatgtaaacatttttagctatgaatctggacacataggacacatgtgtgtccattgtccagattccatgtgtttccagattcatagctaanaatgcttacattttgggacgg

SEQ ID NO: 63228 - DNA, 415 bp, Oryza sativa
actttctattggcagataagcaatccatgttgatacccgtttatttattttgatatgaacaaatgcatatcttattggtaccatcaaaatccgtaaaaaaaatgataaacaaccacaaaaagtggtgaaaagaaagaagagttgatctccggcgcacgatcccagtataaatggaaaggaaaccgatcacgacgccaaaattccaacgaccgatggctcattatcaatttcacctcccctccctccctcttctcgtcccatatctagcaatgcataacgagtatgagtagttgcgtacgggtagtgtactatcgtacaatatagatgcaatggagtacagataggactcaactactactatgttataattggctgcagctcttttgagtaaaggccgacatattatattctatta

SEQ ID NO: 63229 - DNA, 384 bp, Oryza sativa
  unsure (1)..(384): unsure at all n locations
ggatcttaagtcactgagctgcagcttcggcntgggtcaggtgggattattttctgtgccttgtnaaatcatcctcctcctagattctcctaaatggataaccgggccatatcattcagcattctggggagtgagaccgcaggtccccttttaccgatgctattcatattgtgaatggagccactcaattatatttttaataaaggcgatgaaaataattgtcctcttacacctgccagcttaccctgttggtttcagggttttttttattttccgaagaacgtggtctttttatcaaaaccaccaaccaggatactgcgaaccttaaatcacttcttgactttttttgggatgatctcaagcctatacaacaattgttataaa

SEQ ID NO: 63230 - DNA, 462 bp, Oryza sativa
ggatagccatgctggtgacttgcagagatgtggtgaatgtctttgctacgttaccttcaatccatacatatactatctctggtgtttaccacttccgcagctgtgcattctctctgtgttgtacacgtgttctccatctacaccttgctccatagtctctgaagctcctcacagttcagttctaacccaccaattgccatgccctttttgatgtttcacttatgcacatccattccattccaatggtaacaccaccaccacatgttatcatgcgacacacatcctttctatatgtggtgcgttaagaatcacataaaatttcatggttaattggatccatgctactgcaattgtgccacattaaaaaaatatcactgctattcatcatatcagctacgagccacttggaatttctataattggaaccatgctatctcattcacttttttatctcatctctac

SEQ ID NO: 63231 - DNA, 436 bp, Oryza sativa
  unsure (1)..(436): unsure at all n locations
ccgtgatccttatagtcacctgaggcattgcaagctttaaaatcatttctaataattccttttttacaacaatttataatttaaggatttttaaacaagaaaagctcttaacaattatacttagatcattaatgatcactcattactgaaccttctttgtattatttaagaatttaactctgaaaaatccgagaaaatttcagagagttgatttaaacatggagaatctaataaaaattaaatccatccatgccttatatttaggaaattttatttcccacattttacttcacttgtaaattaaagaacatttaatataaattctattaataatttattaaataatntataaatcctgaaacaaaaatcatgatgtgacagcgacgtcttgacgatcacgacaatggctttcccgagcgacgacgacgaccggagc

SEQ ID NO: 63232 - DNA, 405 bp, Oryza sativa
  unsure (1)..(405): unsure at all n locations
ctgcangcatgcgagcnngctactaacgggactaaaganaattttaattgtatgaataaactaattaaacgtacgtgacacagttaattaattcaatgatatcagtccgaacggtttaatcgcgcgccagatggcgcacaatacatttggtacgtatccacatatatattttataatacttttgaaaaaactggagcctctcatatcgaaggatcacattggagctgactcaaggagaaagctacgttagaacagcttttgaaatcactaccatgttttctggatcctgcatggatgcatccaacagtatctcctaaatatcaaaaaaatagtgaaagaactgctttgctgacgaccaagatatattgcataggacaaaatgttcatgaactatgcaagacaaaa

SEQ ID NO: 63233 - DNA, 460 bp, Oryza sativa
tctgcctgtccagatctgccactcctgatgaccgccatctcctttcatgtgaagaggatgaacagtggaatcaccagcgtatttatcaccagaaggtagcattggcaactactgaccttgtcaatctgccatggctagagatcggagcagattaatcgaccgcctccggaacttgccaccatcagatccattattagcaagtccagattccatatgaacgactccggcgacctcagtcataacaggacattgctcgaagatacgggaaaaagcccaagaatgggtggaacccaacactatactggctaaactactactattatgaaagagcttgacccctctttcatccatcactggcagtgagctgacggaaccgattaacacggatcgagagacagtgatgtttctgtttgtcgactctcttattgtttcagagagctccccacctccctatattggg

SEQ ID NO: 63234 - DNA, 401 bp, Oryza sativa
agcttattctctggtctcctcttacatgtgttacgcccaagacagctttgtacgacctaacatcacctggtcagctctaaattccatctctctctcgtcacgggccgcaccaccatcagcaccaccaccatcatgaaagattcacgatgccggaattatgtattaactggcactatgaggggggttatatgatatacaccctccgtcccaaaataaacacagctataagctttcgtacccaactttaatcgttcgtcttatttaattattttttgaaaaagctaaaaaacataaatcacgcataaagtactatttatgtgttataatctaataacactaaaaatactaatcattaaaaaatttaaataagaccgatgatcaaaggttggtacgaaaactca

SEQ ID NO: 63235 - DNA, 442 bp, Oryza sativa
tgatccatgaacgatgagagcgagcgccgcgtcgactctcgtatcctacgacgccacacctccaacgctgcgtctgagacggaggggcttgtttctcctgcggtgccctccacggcagctgatgaggagggtatacacacctcgcggtgggactcgctgatggagagcgaatccagcggcgccacgccgccaccgcgtctgcgacgatgttgagcgccgcggtcggcgtctccgactttggagaagaatcgggcacgagcttggtggtggcggacgccgtcttctgcagcagaccgcgccacccctccgccgcgccggccgtgagcgccttccatgtcttcccctccgccgcgccggccgcgatcttctttcacatttcgtcctccgcgcgcggcctctctatcggcgatgacgaccgcgccggtggtgcgtgttttttttt

SEQ ID NO: 63236 - DNA, 456 bp, Oryza sativa
  unsure (1)..(456): unsure at all n locations
agcttcattgttntcctatctcttgtattaaccatcaagagtcgngcctagcataccgagagcacagccgcatgtgtcaggtgggaaaataaagaaatcgacaataacatttgtcaactagcgatgagtgctttaatgcatcangaagcatgtatggtttggattcttctatgcatgagcagtcaagaagcctgagaagtcgtgattatgttgcttactctggaaggaatgatacgtctacaggagttgctcatcaaccacaagttgttctcttatgatccgaccgtaggtataataattattggctcttccttggaccttgtagagcagatgatccangacatcgtanggtgtacttcgagtcatcagaagatggtcactgggaggttattgattcaccacaggttgtcgacctgctaaatctgcttagataattatgccttttatttattcact

SEQ ID NO: 63237 - DNA, 473 bp, Oryza sativa
ttacggacactataaaactaagctgtgttgcataatcattgtcaacaacctctacctggcgtgtccttatgagatattccagctgacattatggatagtcgtcgcattggcgtagataaggtggcttagaaaaatggtgaccgtactaagcattttattctctatcttttgcctgccaagttttgggtgaactaatcatctaattagcctttacctaatcgtagtcaggtctctatagtaatttaatttatgagtacgtccttcctgaccaggaaagacagtataatttttttccgaggcgtaaaagttttgcaggtcaatatattataaaagcattaaacataacgatgacttgtcgtagcgatcacagaggattttacagtgatgcgaataactaagccccgaacaacgaatagacaatccatcaacgggtgattgacgattccggctcctgcgcgaaagctgaataaaat

SEQ ID NO: 63238 - DNA, 428 bp, Oryza sativa
  unsure (1)..(428): unsure at all n locations
agctntctctctctgtcgccatgtatgtgtcctggattatgtgatatggctcanaatgtggctgggaatggatgggagattgatgcggtggttgcgtgggagattccgcggagcttcgcggatggattggagcgaaactgtgaaccgtaacttcgccggtgtggtctgacactgtagcaaagaatggcgaaagtggcgagagtttcggcggggaagacgaaccgacgctttgctttcggtgttatttcattaggttatcgggagtactaatgggcctatgcctatatttggctatcgacgtggccaagttgtgatccttatggacttaggcattgtgattcagcaacacttgctcacgactgtatagcccaatgctgttaaaatccttttttgacgcagtagataattcttttggattactacgatgc

SEQ ID NO: 63239 - DNA, 442 bp, Oryza sativa
tccaccaaggagtgaatattcagagatttgagtggtctcttattataatccacaaaagtaattccaaaaagtaattatctgtgagatttggcctgtttctttttactaatgccattacttatctaaatttgtcgatataagcatcaactgagccatattgcttcaaattcctgaattgatcagtaatttcaattgtggacttggccccaaacctctggcacatcttacaaaactccggccaggataaatgttctgttgggatatcgtaactagatatccattggtcagcttatcctgtaatgtatgcctctgccattaagaccttctcatcttcaagagtttgtgtgagaaagaaagtattttctactttgcgaatcgaagccttaggataatcaccatcgaaaataggaaaatcgacatgtttcctattggaggtggagtg

SEQ ID NO: 63240 - DNA, 454 bp, Oryza sativa
agcttccaccgggatatcaatgcctgaagtcaacataaagctcttgtttcccaccataacagccctgccacttatttttgccttgacaccgtgccctgtcactcaatgaaatccctgcttcagtccagacatggctctcttccgaatggaacttcttggcatgctccacgactgccttacccagtgggtgctcactgttgacctgaagaccagaaccgataaaatttgagcaatgtttctttttacaaatcacaacaaaagaaccttaaccaacctatgaggaactaggtgacatttttaattaattaagaagaaataggcatccgaattcgcctcgatgaggacttgaacttgggtgggtctaggcatacatctatgccctcaaccaaccttttcatatatcacaaaggaatgattatttgctacaagtaataaaggcattgaatcaaaaaga

SEQ ID NO: 63241 - DNA, 471 bp, Oryza sativa
  unsure (1)..(471): unsure at all n locations
tattactntggtgttngcaacgtcaccactcaccctcctatatggaaaggcaaatgcatatccagtggtagtacatagttttctttttccaatcagcattttgcaaagaacacctgaatctcatgatagtggacgtgtggaactgatgatatcaattacaagaaagccaagaatgtgttggctcttttagaggagcagtaaatgaagtaacaaaaaaattactctataatgttcctctgcagttccacttccacaaccaacaccccccacacacaaacatcaaactatgttctctccctttgccctgtatgtcacctacgcaattacgaagaatatcacgggctccaaaggtttcatgtggtgttaaaggtgcaactgtagtttcatctgcggttntacttgtacaactgaattggccatcagaatagccaatgcgaatcggaattatctgatgaaatgcaatgacatgta

SEQ ID NO: 63242 - DNA, 452 bp, Oryza sativa
agcttcctcaatatattttcaagacaaatatcaagatactacctaccttggcaggagtgattaaagccccagcacccttcttccggtccttttcatacactttatcttgggctttccttagtagaacctgcagacctgccaagttctttaccctcaagaacccgaagccgtgtctcaagctgcccaaatggatctcatgtcaatccaaggagtcagacaatattatggataaagaaaaggtatttcagaaagtacataccttgactcgactctcaagaccaatggagttatcttcaccatcaccaagggcatcataccgaatggcaagagcagtttttgcagcaagagaacgagaaatcttccccttgtgctttggagctgcttgaccaattaaggatgcatggtagatgagaccatactttggcgtagcatggcttgtctttagagctctg

SEQ ID NO: 63243 - DNA, 202 bp, Oryza sativa
tggatcatattctttgacgtggtgggtctaagcatctgctatgtctgatgtatactataaacattgaccttgttggatgcgctttgtatgagaaagagggatgatgggaagcgggcggatgcaattgagtatcaccgctagggggtgacattatgtgaatatacaactcaacttccatatttgttatatgagcgactacttt

SEQ ID NO: 63244 - DNA, 413 bp, Oryza sativa
  unsure (1)..(413): unsure at all n locations
agcttgggatntggattatgcagaacggtttgtggtacttagatagaagcggaacatataaagcactatgtagtgcattggcagttggtacaagtgaatcgaagctagattattctccagcattgtcgattgggccatatgtgttttgaaactatgaggaagatatatcctgatgagatgagtaaggtggacagaagcaaactagtatgtgatgcatgtgaatatggaaagcatacaagagctacatatataagcagaggacttcggagcatatcaccctttatgttaatccactctgatgtgtggacttcccctanttgtctcgtgagtggaatgaagtactttgtgacttttattgattggtactcccgaatgacctggatatatcttatgaaacataaaaataaagtact

SEQ ID NO: 63245 - DNA, 458 bp, Oryza sativa
  unsure (1)..(458): unsure at all n locations
tgaatcctctatacctattgccatgctagacacatgtatttattgtctggtcttattgtnttggaatgggactatatgattgtgcagattgttattttttttgttgcatagcatgacttcattttcttataagtttgtaaaatttgcgaaagtacttcctggatttggtggataccaccaatgtggcggcacatctcttacatgccaccaatgatgaccatgctagatgcccatgaatctgcctcattggaatggatgcangcattatgcacacaacccatattcactatccattgctggtaatgatgcctacctttggtagagggtgagtgctctgtcatgtgttcangaagaacgaagccgctgggttggatgagtttactgttctgttgctggcattttttntataattaccatggataatgaagagaaggagaaacgaggaattatgaagaatg

SEQ ID NO: 63246 - DNA, 445 bp, Oryza sativa
  unsure (1)..(445): unsure at all n locations
agcttggcaaaactcagtaagaattnttctgtgttgcatagtttagcttgctcaacgacatgtctttgggggacaattttaatttgatgaaaggcatgcatggaaagttactttttttttttttacctccatggatatcgattttcttttttcttttttattacagagaagatgcacaagcatacacactcaaaaaaatgtttcaaaagaatactataatagaatattgatgtggcatgttctttcatcagcaaatagtaatgcgttactctattattattatataatgaaaaaaatattggccctgctcggctacacttgttcggttgtggcgcagccagcatgcatagtactttgtgtcagcggctgcatcttgcagctgaacaaggccattgtatttgcaaactctacgtagtgagaacagctntgttagcctaagataatg

SEQ ID NO: 63247 - DNA, 461 bp, Oryza sativa
  unsure (1)..(461): unsure at all n locations
tcgatatgatctgaatgtagtagctacgtgtgtctattgttgagttggccgacggagcaaccccaaatgacttacgcaaaaccatcaccatatatatccggtctgtgttttccgaagttaagtcgtgccttgtttacagcaacaagcaagttgatgcagcttctaccagcgggatgcctatatacctactgtctctaaactttaaagagaataaaatattttctttgtctcaatataagtaaaatctagtacaaatataacatatattaaaactatgaatctaaacaattttatagttctataatatattacatctgtattggattacacttatattatgacggagggagtagctacgttagataccatgcatgtacaatggatccactaattaattagttctttgctccagcacattacccatgttcaatggctccacanagaaaaattataggaatttt

SEQ ID NO: 63248 - DNA, 377 bp, Oryza sativa
  unsure (1)..(377): unsure at all n locations
gatgcagcttggaagaggaggagaatggatctgtgctcgtctttgactggagatagagcttcagacggnctgcttgttggatggatggatggattggacgaaggtacggcggattatccgctggcttggttgtggattgagttcattttcttcttattctttttcttaatctttttcttcttcatcaacttgcctgcaattctgccctgtttcttgcgggttctttgatgtcgtgggtgcgtatatatttcaagatgggcttgaccgctgttttgactgtctatcttatttcagccggcttttgattctgcggtttgtttatgttattgctacatgcatagtcatcatcgtatgtttgtttaactttcgtggcataa

SEQ ID NO: 63249 - DNA, 459 bp, Oryza sativa
ataactatatacagtgaaactttcctgatgattgtatattatttaccaaaaatatacctgaagacgtgagtttgtaacatcaacatagtcatccatatcatcctgcaaaaaccacaatagatcagttgttatcatagtgctaggaacataaattcatatggttttgtgagaataaactaacaatcaatcttgtatgcacggtaagttcttcattgactgctagagcaatatgttttgtgctcagtactgtctcttacagcttctcaagaccctcatcttgttctgcggattgttgcaacaggcaagataaatgaattatctacaatgcaataattgtttcccgtactataagctactgtttgtaaccatctatatatatacaagtaaatacataatgcaactctgctaacagatacggccacttagaatatatcatgggtgctttacttcacacattcc

SEQ ID NO: 63250 - DNA, 458 bp, Oryza sativa
  unsure (1)..(458): unsure at all n locations
agctntaagggactgtggtggggtcatgttgcacataatgctctacatgcaaatcatcagcaaagcatgctctggctgctaactatcaacatgcaaaaaagggaagccccctcttcctttgatcttatatcagcatccctacttnacctgccatgcaatntcagtaaacactgtgctaatcaagggcatgcttaacaatcntttggatgaaggcacaacaaagctcctaatgcggtaagctataatagttaattatctgacgggtgctatctctccaccatcttgagaataccaactcataagctaaaagaatataatcttgttgagggcagctgggttcatctccaaagctacttaaaattaagttaaacaaagccctctttttgataaagtttgccaaagctggcgggaaataactatcatagatgacacctcattgaacaaaaacaagttatttc

SEQ ID NO: 63251 - DNA, 420 bp, Oryza sativa
  unsure (1)..(420): unsure at all n locations
tgtgctgaagtcctataggttntcctagtagagcaactcactcttgtgatgttntctagaaggatgttgagttggatcttggtggtcactcaaattatataaaatgacctacaggtgttggggttgaaggctgtggatttcgttcaagatttttgtacaagtgatgcaaggggttaatcgagacccggctctttggagcacctcaacggagagtatgatcgcgagatccgaacttcgggaaaaaaatccaccttgtcccttcagtgatgtttctgtgcatgtgtctatgatattgctacctctctgtntgcctatgattcaactcgtgaaatatggctgagttcctggtagtgttatctgaatttctctgttgcccggaagttctagtccaagaacactataacttcctgtgttctaact

SEQ ID NO: 63252 - DNA, 456 bp, Oryza sativa
  unsure (1)..(456): unsure at all n locations
acgctttttatagctggtgtgctatgagtatttttattattgcagccaactctaagttacactcatcatgttttacaaagcagtcggtatatcactcggatcatgttttcacggatttacgcgcatatgctacatatttatatnaagtcggttggttaactataattatcgaagccactcggttggttggattatttattccttgactatatgcgtggtgtgttcacttaaccgcatagtcgagggctacacctattaggtgcatctagtcgatgcacctgactttatttttcagccctccacagtcttcagatttggtaaaaggactcgggagaccatggcaaagatgattgaagtactctgctttggaataatctaactcgggagaagattatcttttcgactgcgaaggtctcacgggctactgtggagattatgggtaccccatacccacac

SEQ ID NO: 63253 - DNA, 445 bp, Oryza sativa
atggtaccttcgtatgtggagtgagtatgaagtctttttctctctgaaatcagtaaattggaacatatacaaaattgtcatgtttccaccacaactccacaaatacaagcatgctgtgattaaaaacttaatggggggataatcaatttcaatatcatagagctgaaagacagttacagtggtgaccttttttttttctaatgaatgctttcgagcacatattcttaacatgttggaagactcttaacagctcaaacctcacacactacatatatgatatatcataatgggaagaaaatggaatccatttcaagatacatttatgaggtgcactttctcagtatcaagctccaagtgcaacaagacatgtgaaatgcaattcaacaattagaactaacaatgtcaatatgccatgcaacccatcatagactccacatattcacca

SEQ ID NO: 63254 - DNA, 443 bp, Oryza sativa
  unsure (1)..(443): unsure at all n locations
agcttacttcatcctgcattagctctccttccctttgttttcagaaggaaaggcaatggaattgccaaatacattanctctctttgtcccattaaaacttgtcttttctcaatttctactccaaacaaaacccctaaaatctgtgctctaattgcatcaacaaaaaaaaaaacaaaaccccaccaacgtttcttcaaacacaggccataacccgttcacacacattgtcagggaccagctcattacttccgtggacccaacccccccgcgcggtggggcgcacggaaacgctcgagacggacggcgacgacgacccttgcgtggcctcccacgtgtcacccccaccgtcgcgcgtcgcgtcgccccgtgcagcgcagccgaaccgagagtcgatagacccaccctcaccgtcgccgcagtntaattggcagctcacacacgca

SEQ ID NO: 63255 - DNA, 406 bp, Oryza sativa
actaacttatcttggagcagagctctgagacttccttttttgttgttagatatgacacattatatctttaacctatgtcaaaaatgataatcatgcataaacagacatgtttacaggtcttatagaccaatattatacatttaactaatcaaaagcttcatacaacaatagtcacagcataattttggataatggaataaatagcctctgcatcataagatgagcacaaccatttcttattacaaagtagtagccctagtgtaccacaccgtatagcagtaaatggtccaatggaaacatacttaattatttgaaaacagcaagcacatatactattcgttaacttcataccatgcttattccatacaccatattctctgcatataaacacatgtgcaacaacatg

SEQ ID NO: 63256 - DNA, 403 bp, Oryza sativa
  unsure (1)..(403): unsure at all n locations
tattattantgctccaaagtgatacaaggtatgatggcattgaatatataaaatactattatctatatattatagtaattcccaaactgtacccatgtcacgtgatattttgttttataggtgctctctttggccatgaaggttatagctatctgagtttatactttcataccccataaatttctttatgaagtgttgctctgatggaaataccgattattttttgtgttttaattaagatacatggaaaatgttatctttatctaacatatatatatatataggaatatgtgcagctcaactactctatcttctgctgtaaaatatattactgtaaccatggacagattcaatatgagccaatcttgatcttccccaaccaatacttgtgataatattgctt

SEQ ID NO: 63257 - DNA, 406 bp, Oryza sativa
cttcgttttactgatccgagcttactgttgcttatctacttttacatagatagtctcatcatacaccaattgctctcttctacccctgtgccctgctaattgtaatctcactacacgccacttctgttctcttctacattctcttggaattcaacggttcttctatactccctgtgtttttttgggccatgtttttttctccaacgaatgctagataaaatttctgatactcgtggcacgctattttaaactgctaaactatgtgtttagtgcgaaaactctctatatgaaagttgctctaaaatatcaaattaatctattttgtaagtttgtaagaaaaaaacttaattaatcatacgttaataccgtctcgttttgcgtaatacacttcatatttatcttcatc

SEQ ID NO: 63258 - DNA, 441 bp, Oryza sativa
ctttggaactgaaactgacccgggttagaaagcgtatcttttttgtttgctccggctgagcccccgctgcgcatcacacaatgattgtactccgctgcatgcaaaagcatgcatggggaatgggaacgaactgcctccccgtgcctttctctctcacactcgcacacagacacgcacctttcctttcctttcttctctctcacacctccctcttttgtgtctgaccgggaaaaaagagacatccatctcgctctcccctctgtgtgaaaatgatctgttcggagcacacttgatgagtcatgaatgggaccctcctttgtatcggtaccagtacgaactcttcttgatcttatctcgcagaaaatggccggtctcacttcaccgagaaacctcgttatgtctctgacgcttatttaccaccctatggaagaaacctacatg

SEQ ID NO: 63259 - DNA, 463 bp, Oryza sativa
  unsure (1)..(463): unsure at all n locations
ntactccggcagcgctgactgctccgtccgcgtctgtttctgcntctctggcaaggtagctgggctctccgctctctgcactcccttcatgctctntacgcacgattcaagttgagtaaattcaagttgggggttgcatctgcgtcgattcctccgttgattgtggcggtctttgaagtgcttccatgagatcaattggggagtactatctgattgcttcctgtggtcagacatattggtaccaaatcagttntttctttgcaagattgtggttatcggcatgccggaccgaattgttacgggaatcttttcgcctgcttgtgtactgttgatcagtatatcatggtcagtttgcgagcaaagcaatgatgctggtntggctgataagcaaagggctctctggaattacattaacagtctctctggctgatggtccatacatgggtttgtcaaataaaaagta

SEQ ID NO: 63260 - DNA, 447 bp, Oryza sativa
agcttctcatagtcctcatagactccagttattttctggttggtcaactcatcatcaagaccaaacaaaaacttttcctgcttctcggcatcggtgcgcacgtttcacgagcgtacgcgcaaggcggttgaactcgtgcaagtactctgtaactgtcctggttccttgttacaatgcacggaactctcttttcctttgtgccataatcccctcaagaatctgtgccttcctgaagctttgacaaaactctgcccaagtgtcacgcccggaaattcactattaatttccgaacttatttgtgcataaaatcctcgtccaggaatcagccgaggtacacaaactgacaatttaatatacagattcatcaaattaactaagatgatgaatacttacttaagaggcacttaattctcaccaagaagaaaactgcagcggaaaataatatct

SEQ ID NO: 63261 - DNA, 257 bp, Oryza sativa
  unsure (1)..(257): unsure at all n locations
ntcttccggcgtaagcttccttctatagtaagctcttctctcttatcttaattcgtccacagtaaaataggcttcataacaatatgaattgaagtgacctctagttattaattgggaaaagtccgaatttcacccttgttctattcgtgtgattactatttacaccactctacttgcataccacattttatctaacctcaactttctataccggacgacttatcccgctatctctaaccggagtggatttggtgctt

SEQ ID NO: 63262 - DNA, 438 bp, Oryza sativa
  unsure (1)..(438): unsure at all n locations
agcttcanaaatacaggaggatacatattttctatttacaccattaattgaagtaagtgactaaatattactactaataaaatctaggaaaattaagaagaatgtctcataaactgacaaactaattatcttactaaattccagggtttagttattctttccttagctaaaaaagcaacgaataaatctttgatttgctttcaatagttgcaggcaataatctatcttcagggcttattgtcacaatagtaacagtaacagctgctgctcagtgttgatcccatacacttgtgaaccttgaccttggctttccagatatttgcaccaattcaacacgtgcccttgcacagaaagcctacgcagatcggactaatcgaagtagttcccaacattcagctgcaagatatttacacgcacatatcaaccggttaattacca

SEQ ID NO: 63263 - DNA, 420 bp, Oryza sativa
  unsure (1)..(420): unsure at all n locations
tcatcatcttatactcttatgcttgataagagattatattttatgaccaaagaatgacagtgactcagcatgattacaatgcanggaatcctttcagctcttacacaatactattatgttttataggcaaaagtttctagtttgcacttaatcacatctactgcttaccttccatcaattgtttttatcccagcaaaaatattacatgaagcttttaagtggttgctcataatattatacacaatgcaacaaactataattaactcttatgaaaatagatacttataatgatgacaataccaaacacctttaatgctttatacttagtgacttggttacctacttcatactttattggccaaatttggagtttgctttatgcaatgctggttaaacaacagctataatctgctttttatg

SEQ ID NO: 63264 - DNA, 375 bp, Oryza sativa
agatgcaacttgagatattaatgaatatatttggggggggggggaaacaatactataaattaaaaataaatatatataatatcattttaacgacagtaaaaaaataaatattatatatattttaatattattaaaaataatgaaagaatataatataaatataatagaataaagatataattgaagaaagttataatataaatataatagaaatatgaataaatgtaagatgataaaaaggtaagtaaaaatattatatttataggataagaaatataaagtaagtagttagtaaaatttaaaaagaaaaataatttagatgtagtatatatgtatattgtagtataattaatatataatagaagaataaatgaa

SEQ ID NO: 63265 - DNA, 426 bp, Oryza sativa
ggggaacagatgtggtcggtggtgagctcgacatggattcctcccccttggccaaggccagacagggctgatggtaaggggatgaggagctccggatggagcaagtctgtggtgatggaagatggacattgcgtggatcggtcctccacaacatctatatctcgcggcgaaggttgatatctatgagtcttttcgccctgacgatgcggcgacttgattctctccgaggactctgtcatcccctcctacccaagctccgctattgttgtgagccctaatctccgccatcgtcaccactctcctcatatagcttatggagctccccgtaccgacggtctcctacccaagctataccgtcgtctcctattcaagatccattgtcggcatgatccccaaactccgcttgcactcttatcttcacatcac

SEQ ID NO: 63266 - DNA, 448 bp, Oryza sativa
  unsure (1)..(448): unsure at all n locations
agctttccagcccgtagttagtcttgattttgccgacaccggcatcgacaaacagacccgcagccgcagaaagcacaaaatacccatgcaccacccctcaccgaaaataattcggcagcagcaatcttatccatatgtgcatagaaatgatcgccgctgaggcaagcaaagttaacaatatcggcctctgtcattgtgcggcggggagtcaacaggctgtcgcctggttgtagctcctcaaaatatttgcggaacggatgaatacgatcttcttcgactttcgcaccgcgcacccactgtttactgatagcggcaagcatcgtcggactaccctgaacagcggttcgctgcatgtaatgtntcaccgctcgtaaaccgcctaattcttcaccgactcctgcgcgaccaggcccaccatgtaccagttgtggcagtggggagccatgcc

SEQ ID NO: 63267 - DNA, 386 bp, Oryza sativa
cgcttgtattggttatcattgtagggtactcgctgttgatttgtctcaacacgctccataatcatggcgatgccctgaccgacaccgatgcacatggtgcacaatgcgtaacgaccgttacgccgatgcagctcatggctggcagccagtgccatgcgggcaccactcattcccaacggatggcctaaagcgatagcgcctccgttggggttaacatgtggggcatcatcatgcagccccaattcgcgtagtacacccaacgcctgtgccgcgaacgcttcgttcagttcaatcacgtccatatcgtgaatactcatccctgcgcgttccatcacccggcgagttgcatgcaccggaccaatccccatcaggcgcggtttcacccc

SEQ ID NO: 63268 - DNA, 422 bp, Oryza sativa
  unsure (1)..(422): unsure at all n locations
agctntatgttcggcgcagtactaatacttgatcttatgatctagaattgctctatcaatcaccatctactttagacatatcttctgaaacttttttcaaatccaaaatccagtatcttccacaaattagtgaattaagaggagctctttgtgccgaaaaagaaagagcaaggcaatatttcaaacttgcattcgaactgcgaaatatttatacaaaggaggagagatcaagataatgcagcagggttggttatctaattggctagtcaaacatgaggtggttcatagatctttgggcttcgatcatcgaggaatagagactttgcaaataaaagcagaggattgggattccattgctgtcattttatatgtatatggttacaantatttaccttcccaatgtgcttatgacgatgcacccg

SEQ ID NO: 63269 - DNA, 424 bp, Oryza sativa
tctcgactccggccatatccctgtggcaagtgcaccacctgaccatctgcgttataatgggattgcggcagaaatggcgccaccaaaaacatttgatcgtgcgctctatactaaccggtgtctacaaccccgatgattatgtcttctccgtagttgctccttcggagtaattcactggggttgtggtagttcagccacatgaaatcccagctccgtgtggtcgttgtcttgtacctcctgcttcgctgcacactgattacttctggtaactctggagatatcagatgcattaagcaaaccacacatgctgagtttatcgggataatcatactgctcgattagaatcagaatgtgagaagtatatatgatcggtattctagccaagtgaatcgatgtatcatcctctcttctggatgggtatatc

SEQ ID NO: 63270 - DNA, 424 bp, Oryza sativa
agcttatagttgaacttaagagattaaataatgttatataatggaacctatcagcatatggttgtgaattggtggtatgcttcttctttgatggaacccagtgggaactgcttgtttgtctccaaggccattaccattgtagagataaatatatcttaagctatctacacatgggcccacccctatcgctcattcagcaaccaacattgaggtgcccttatagtgctaagttaattaaccgttatactcaatgagcggacccatgtgatatgtgctgaataatggaggggatggcatcacatcaactgccggactgtgcgcatgatggaaaggtagaacctgctagatatatagagaatatctaacatgatatctatgtgtcaaggagtactcctcgtcttaaaattgatgacttgcttttata

SEQ ID NO: 63271 - DNA, 458 bp, Oryza sativa
  unsure (1)..(458): unsure at all n locations
agcttttatctcatcgtttattgccattactgtcggtgcgggaattaccctggcggtgctgattctctcanggtcgattgaatttatcccgatgcaggtgatcccttcgccgggatgatgccggtaacgccatggtagcggtggggttgtgttacaacaatttatggcaacgggtcattatcgaacagcaacagattcaggagaaactgagtcttggtgcgacgccgaagcaggcttcatcgatattgattcgcgacagtattcgcgcggctttaattccgacggtcgattcagcaaaaacggttggcttagtgagtttaccaggaatgatgtccgggctgatatttgccgggattgatccggtgaaggcgattaaatatcagattatggtgacctttatgctgctctcaaccgccagcttgtcgaccattattgcctgctatttaacctatcgtaag

SEQ ID NO: 63272 - DNA, 452 bp, Oryza sativa
  unsure (1)..(452): unsure at all n locations
agcttcatttattnttcccgcacgaatcatattctattatcttctgttgatgcagatgaaagtacagttggggatttgtgtccaaaatctgcacatgggaagttaattgccgatgaagaatccacgctcaagaacttttnctgttaatttacaaaattcatcgcagcagaacatacagcattaagagaatgacttttgatttaaagtgttgtttcacaaggcttctatgtgctcttttaatgtacataaactgtcaaacttggagaagatttgattgcacatcacatgatggccaatactgtcgatatgaacaggtcgtcaatcaaccacgtatgtaatttctggattcccgtagatattttctgagttgtttaaagaaaggagtaaaatacttataaaagtatttatgaccaatctgttgagtctttttttcccaaataacatgatcagag

SEQ ID NO: 63273 - DNA, 73 bp, Oryza sativa
tgaataacagctcctcatattgtgaagcggactgctgtgattcatatagatatgggggaagatctgagggaat

SEQ ID NO: 63274 - DNA, 449 bp, Oryza sativa
  unsure (1)..(449): unsure at all n locations
agctntattcgggggccacttaatttgatcccgttattctattnggggcaaggcagtcctctaagagtacccacaatggttatctataggctctctacaagagattttgtcagcatatctcctacttataaggtattaaatgaaaatagagagcgaagctatctattaacttagagatagtctatagagaaaaatgaggcaatgtatgagagagctatagataccaatgtggacatactattaaggtgtgttactattaatcgagtctattgctgagatgtacatgttttatagagagcaccttactttaccattgcgggtgctctaagttcaccttttgatttaaaatgatcgttagacgcgtttttttcccacatagcacgaatctcagagctcatcagatccttgtaaagtgtacatatttctaccaaaaaatatgtcataagtta

SEQ ID NO: 63275 - DNA, 467 bp, Oryza sativa
  unsure (1)..(467): unsure at all n locations
tgacattactgaccactgtgtctagtaccagggggtatcttctttgttggaccactctgtcgggatgatccgagcggtcaaacttgattgctgtctctgaccatcgaatatattggggtatgttgggctgaacagcgttaatctcccgttcagtcaacttttgctttcttttagattcataagccaaggggccgccgaagatgtggttaagctccttgcggtggtcttaaaaacctgccggggggtcgccatcgtccttcttcttcgacgtgcttttgttttcgtcggagttcttccgtgtagtcttggtgtattgttccgcgaactgcttgtagacgaaacaatctttggccgcgtggttggacttatgatgatgcgggcattgngaagtcatgatcttgtcgaacgtgttgacgcgcgaacgccttgttgatcttcaccccctcccgtagccggtgatcactttt

SEQ ID NO: 63276 - DNA, 453 bp, Oryza sativa
  unsure (1)..(453): unsure at all n locations
agcttaatatggctattggaaattttggttgatatgtggtagcagggcttttaatttcgtcattttgtaatttcatgtatgtatctgattgacatgcttntnttgagttacatgcgagagttccttgagtgctcgtggcctgagaactctgcatcttcttctcaatgcaacaaaactggttccagttcctcagatattgctgatcaaggtcctaccattatttacgtacccaccaggaaacaaactgtggagttagcaaactatttgtgcaaaactggtctcaaagctgcagcatataatgcgaaggtaaatcttctttgattgatttgtgtggcaaatgatacttgatcagtagggcccatttcctgatatatgctaattctctagaaagcaatcagctttttgtaacttacagtacatttgattatatttatttcttaattgctattcaca

SEQ ID NO: 63277 - DNA, 411 bp, Oryza sativa
tgatggtacatgatttcccttttagctgacaagctcttatgtttcttggtatgatttaactatccatctaaagctattatttactgaaagctcgtgcaatgaatgacactaaataaattgaccacattgtgtatgaaatggcagcgcggcttacccattttgcgagagtatgatttttcaatatgtttagataattgaaccatccatgtgctttactttttgttcctttctacctctatgtactttagcctgttacctctgtatgcatattcagatattaaaggaacaggctcagtcagacttgaagaaagcatcatatcatcattggagcgatggtgctttggaggtctgtgctagttctctgtccttcacttcattttgctggaactagttgaaaatactgagcgatat

SEQ ID NO: 63278 - DNA, 452 bp, Oryza sativa
  unsure (1)..(452): unsure at all n locations
agcttgtatagagctcagccgccgagctctactccctctaccctacaccgctgctcccctcttctcggtccttaaccgcgtgcggtgcaccatcgntgtntacttcagccgtgtcccgttgttgtccaccattaaccggccattgttggtctcaccaccagcgctgaaagaagatttggggaaagaagctattgcatcggatgcgagggagctaaaatgcaaatatgctgccactctggatggccgcgtaagccagtcaacctggtcagaggtccaagtcctttggatctcaatgagtcacttaaacaagatcgtgaatcctaatgtcgatttttcaagatcatgtacctaagtgacaccttgctccaactttaatgaccggccgcgtactttactcaaaaagaacaacagatcttgatgccctgccaattcctcttggaagattatgcttt

SEQ ID NO: 63279 - DNA, 408 bp, Oryza sativa
acgtgaccttaaatactaagcttctcgtggggaatagattatgacactaccggtctctgctctgtaacagtgcacatatccaaaagatcagttcatgggccatctatccgtactatttgtagctatattttatgactatatatcatggtgacttgggatagtttcacgttctacatcccattgataacatcgattgaacagaaaataacaagaagaaagtgcggctcaaagtggggtcgctagtttaatctcggagcccccttgacctcgccttcctgtgcaagtgtggcggccgtctattgcggtgcgcttgactcatctttatataaactattaatttgccgattaactgatcattcatgtatatgtgagaatgattgattaatggattcacttgaattgaaaaat

SEQ ID NO: 63280 - DNA, 448 bp, Oryza sativa
  unsure (1)..(448): unsure at all n locations
agcttatatatagaaacgtgagatttggtttcgattgctaacaaatcctgattactactggcccaaaaaaacaggtctcataatccttgcaattatccgntacgttatttgttctgctagccacgcaccattctttctgacattctttgattcgtagatcaagcttatcgaatgatctatcaagtttgtcaagcgagatgatacaagttctggcccccataatagccttggtcattggaattggaacactatctttcatggccattattcctcatgttcgccatgctgctgcaggaggaagtgctactgtggcgagaagcatcttcgtcagcaaaaaaggtagtggtgctgatttcacaatgatacaagacgccatcaactccgtcccattcgccaaccagcggtggatccggattacattcgccccggcgtctacagttacacatgc

SEQ ID NO: 63281 - DNA, 385 bp, Oryza sativa
  unsure (1)..(385): unsure at all n locations
cgctttaataaccgtgatatgaaagattagggatgtgggttctaagttnttttaacgaaccatacaatagaatgagaggtgttatgttgatatagcagtaaaaaaattacaagacaatagccctggaaggctataatcaagaaaacagaaaaaaaaaacagccatgccaagcgcttatgacacaaacacccactacatctggttgggaacggacaggagcactgtatccaaacgtacttgactccatccacatctttgggttggagggggagagggcgagagagaatagtggatctgctatcgcccacaatgcccgccaacatgggatgactatgatgccaccacaagaggacaatgtctgcaaaagagttttgtcggaaatgga

SEQ ID NO: 63282 - DNA, 435 bp, Oryza sativa
  unsure (1)..(435): unsure at all n locations
agcttccataaaagctagactaatctatttagtaccgcgtattttaccttctgctgctggctgtctcgcaataccttctacagcttgtcctgcagcagtacctgaccaactccagcccaatagaagcaagacctacggtcaatccagcagcaataacggaagcagcagcaattagtggattcatgatgagttcctcgtgtcaaaaaaaagaaatggttaaggatacaatcaaccaagaaattcatatttctaagctctattggacagaagtaactaaaaagtacaaattgaaacgataatctgaattctccgaactgcttcgagatctcctttntagtttctaatcattagaggtttgtgtactcattaatctatttctctttcttntcaaccaactgatctttcattccattcctttttctttcctctacgata

SEQ ID NO: 63283 - DNA, 443 bp, Oryza sativa
  unsure (1)..(443): unsure at all n locations
gtaacaatntatggactaattgtggcactggcgcttttatttctaacccttttgttgaatcctaataaagataacgagtcctttagattagatactctcttctttttttagtaaattggtatttgcttctgcaattccaattatatcaatactttactcctaatttattactcctagagtgttctatttatggggacagacaataccccaccccacgaatagctgatttgaggatgatcaatttaaaggatatgttcgccgtcttgcttcccgccctttgtttatggcagtggaaaaaatttttccttttattttatgaatgttgggaacatttcaacaaaagaggtctttcacaggtcaaacgagatctaagacttaatctaaaagaaattactacaatgaatctatttctattaaaaaaatggatttaaaaaccgatcaaa

SEQ ID NO: 63284 - DNA, 427 bp, Oryza sativa
agcttcaccagcggtattactcttttctttgtcacacgctctcaggatctgcctcttgttgaagcaatggttctgagaattccctgttatcgatgattccacacggattgtcgccaaatgagcgctaattaagttataacctaaactggtgcgttttagctgattaaagggctaaaatcctactagtggcaaaacatgctatttgaagttatcctctaaattcagttcaacaggttatacatacaacaataatcgattccattcagacgactgactagcatcaaatgtaataggtggtagaaaagaatctaacctagaccattcgcatctgatgtcctcatgatccgtaacctacttacagagctgacaaacattctgcgcacaataacaaggcaacaccgtaataataagtcacctgaatagctat

SEQ ID NO: 63285 - DNA, 433 bp, Oryza sativa
tctcaacccgtgcaacaatatgtttcccatatgtgtatctctttagtgcattcaaatgtactttgatacgtgaaaggatcaattcacggttctggtcatcacaagtctccaaaaccttctgcaccacgttgttagcaaactggtctttcatcattgcctggagaagaaacatttgctttaatcattttagaggaatgtgagccatgatatccaccacagcaacggtatcattttagaatagcaatatcttattccaagcagtatgtttcaagaaacactaaccatattaatatattatcacagcatagcctataactcatgataattctacgaacggaaacgatacacttacgttactggatcaaaacatacctgtaatggctcattctcgtcagttgtgccaagcatttcattaattataatctggcgctcc

SEQ ID NO: 63286 - DNA, 445 bp, Oryza sativa
  unsure (1)..(445): unsure at all n locations
agctngcattgtgggcgagcattaacatttatatcccaaggttctcctcaatcctcaagcctctactatcctttaacaacttttcctctctaagattgcccgctattgtncgaacacatgaagctccatgcggaatgcaactttacaatccattacatgtccttcaaggatttcttgaagccgctctctaccggatagtcttgagatatgtctacgtattttctcactatttgtcgtaccgcacagcatatacatcgcaggaaaaacaaaaagcatcatatcatcgtcctcttctctcctccttataatttcatccgccattctcgaactgatgttatcactaaaagagatatagaattactatactttatactatgtgtgagaacataataatatgcatatgtattacaatattattatacatgaaattagatgcattcaaagt

SEQ ID NO: 63287 - DNA, 442 bp, Oryza sativa
tgccggataaacagctgtctaatgggggtgtttccattttaattagtcaaccccgtacctggaatatatcatgagttaggtcatcctcaaacaactgaaatcttcccagccacacttggttttttactgatccaagacacactgcttgaacaagaagggatcgatcaatagctcaatttgatgttagccatgttatgtcaatagcaccaaactgttcatttagcaacaatggaagaggatagcactttaaatataccttatgagacgagataacagctgtgcatcatttacaggaatcttcttgtgaaatggagattaagacctcacgagactgcataataatgtattatatgccaaccccaaaaatatttgtgagatgtcttctggtcctccaacaacagcaacggcatcataatagtctcggatttggaacatatacccc

SEQ ID NO: 63288 - DNA, 270 bp, Oryza sativa
  unsure (1)..(270): unsure at all n locations
atccttatagtcacctgacgcatgcaagcttgattatatntatagaatagcatatttatcatacatattattgaaatatattataggttaactttaatggaactaatttggtgttgtagatatataccattttttccaacactaagacaatctataatgacttgtaatatgaaatggaacggaaggtgtgcaccaatcttcaaacgaattcaaaagaaaaatatattttttgaaaaattttgtttggttatcttttggggggggggaagg

SEQ ID NO: 63289 - DNA, 276 bp, Oryza sativa
gaatgatcgcggtcctaagcttgggtcaataacagactcacgtctcaaatagactgaagagacgcttgtcaacagctcatattggaatgtgccgacaccccgggtcagatcattacttctccgctcccagagccatagcacttggagaaacggatgccacagccgctttcattttctcggactccaagagaccatctgcccagcagacaactttacgattccactcgggaagcctattctatgatcgcccgcagacatcccgaatcacacagattc

SEQ ID NO: 63290 - DNA, 409 bp, Oryza sativa
  unsure (1)..(409): unsure at all n locations
cttatagtcacctgatgcatgcaactgatggcaacccaagctacaccatatttattaagaaaggcaagggaaaggcataggatgactgctttgtgtgtggcaagtctgggcattgggccaaggacttcctgagcgcataaacaggaagtctgncaacatggttattatagatggcggagaaacattcgggtaagggaaaatattacctacagttctctctgtttttcactcacctgattggtgggttgatactggtgctaatattcatgtatgtgatgacgggagaagttcctccttgttgatgggaaacgggtcgcttgcggctgttcatggtgttggtacagtcgatctgaatattacttctggataaaccgtgctactgaagaacgtgcagcatgtctcttcaaca

SEQ ID NO: 63291 - DNA, 371 bp, Oryza sativa
atactgtaattgtttccctaatgctctacattctgtcattctgaacatcagcttcccatgttactatcaatgaaatctcacaagagataggtttaactggtttgttgtgagaaataaacatagtgaacaggtctaacagaatatgcaggccatatatgtgaagcaacatttatgagcagaatatgtgctcgtaaagaatgtgtgttaactatgcaactacatctatacaatgtgcattacagaatttaaattgcactggattcgcacttgatctaactgtggttaacacgatgacatatcgattatcattaccagaatgaagcaaatgtagtacaacatcttcttgtgtactgtgtgatttgtcagactta

SEQ ID NO: 63292 - DNA, 455 bp, Oryza sativa
  unsure (1)..(455): unsure at all n locations
agcttcaacatttacatagtaatgcaatgctgccattgcgaagagtattaacaaagaaacatctaatagaatcgggagaatgaaagtataccccgagaacacgtcccttgctgtgatttacgcagcattgcctncgttgatgtcgttcatcttcttgtttccaatctccattgacatcttggtgaaggcgccgatgcaacaacagtagccacgataaacaagagcagtcgcgcttgaagcgctatccaaaaacttgattgcccgcctatccgtgcaagttctcaagtggacagagttccggaggcacctgctcgtcccttacacctgcgcgcgcatgtgaacagaaccggggaaggattctgcagcttatgatcagaggaggaggaactcgaagtgcaagagtcgntaaagaacttcttcagtcctttctggtcgctgcggagtatatatatgcg

SEQ ID NO: 63293 - DNA, 459 bp, Oryza sativa
ctaagcttacaatgctgcctggtgtactatatccatgaacatcttcttaaatgacgaataaagactgcatagtagttaataaacatgtaaggatgaaccacctaccatttagtggaaaacgcttcagctagggttatatgtgcagattgattgcaaaccacaaggagttgatcaaatgcagtcatagcttcagcactcaatgatggaatgctgctatcatcaagatcttccttaatcttaagctcactaaaggatgtaaaaatgctggttttgtcactgatccatgaagggattggtcttctcataggatttgttctatacccactatccttttcatgggttctacaactgtcgtgaagactgattctcttcggactgatggtacaacatgtgtctccatgatatcaaacaaagtgcctgatgctgcataatttccatgcttggaaatatccatctctc

SEQ ID NO: 63294 - DNA, 367 bp, Oryza sativa
agcttggcgcacacgatagatgacgaggtcttttatatatcacgcgcgcccctacctggcgcgccaaatgacggagcgtggggctcctcaccgggagatccgtcagtcccccctttgccgttcggccgggggcgctaaatgaggttcttcgccctcgatctgaggaacgtcagcgagagaggatacgcacaagacacgggcgacgtaaacaggttcgggccgctgagaagcagaacaccctactcctgtgttctggtggatctgtgtgtcaaggaattacagagagctcgagagccagatcgagttcatgctctatcacccctcttcttccttttttttcctctatctctctctttttgtcatttct

SEQ ID NO: 63295 - DNA, 459 bp, Oryza sativa
actatataaactcaagcttcgcctcaccgcatgatagataacctgtccgccacctcttcttctttatcttcgaagactcgcagtaggggtgaagttgtgcccgatcgtgctgaacctgacatcgacatcataagtgttgaggaagaagaggaacatcctgaataaagagagccatctactccataggaagaagatccatactttcattccgacgcagtgcggaattagacgcctacctatatcggtgccggagcttgctgtgttagatagcttgcttaaacttgcctgagagtgtgcgggtcttagatgaagcttacatcattgacgggatgtaacagcatgagtctaattcttttgcttgtcaaaatgtaagataaatggtgagattacgtgaatgcaacatctggcgtatcattaccagttagagcacatcaaatcatattaataataactcgtcaa

SEQ ID NO: 63296 - DNA, 354 bp, Oryza sativa
  unsure (1)..(354): unsure at all n locations
agctcgtacagattgagaagagggtttttgtgattttataanaatctacttcaaccgagatggccttatgcacgggcattcataacatagaaatcacacgtggaatggcgggcaattactacaacagcaggtgctgaatagaaattgattgcaaataaaggtgaattggccactttaaaataaacaactggggaggtcccgttggtatcccaaaactgcttatcaacagacggacaattgggttatgttggggtgaaccaaaaaatcttgggtagagacgggtctaaatgttggctaagtaaacgccccgtagtaagaggggtaattatgaagcctgtggaccaccacatgggg

SEQ ID NO: 63297 - DNA, 437 bp, Oryza sativa
  unsure (1)..(437): unsure at all n locations
agcttgtatgttgtgaataaagaaatttccaaagtattgggcacacaccatgcgcacactgctttaacagatgtgcttaagtccctataagacnacatggtttatacacatggaaaatatggcatatgtagtgtaacatccgagtaaataaactcataaaggatttaccaaccgcctggaaaatgaccaaaatatataatcagcctaagccataatattggtaaataaaaatgcacacttacgtgacaaaaagcaatgatattgtatccaatcaattgcttgataaacccaaacaacaccttgactatataaaaaagtcagcgggacagctatataaagctttactgttcgacaccttttaagatgcattgtaccaactcctaaaaagttgagtaactgtggtataaaaggaatttaaggtattgngcacttgatca

SEQ ID NO: 63298 - DNA, 444 bp, Oryza sativa
agctttggtatttcgtcgctgtctcacattctgcgtgcaggtattacatgtttcctccatctaaaaatctaaaacctattccattgtttgatatgttaaaaaactaaattctatttgcatttctatatgctaaattaaattattgatcggaatttaagaagtcattttagtatttattggttacacgttcgtagatattgtcatatagtgcatgagttaattacttcttaatcttggtaataaaatgaatagatcttagattttggaacgagggagtactgttactactatgtgcaaaaataacaaataagtaagggtcttagttaggatgtaaatttttatgctacgatggggggtatttggtagctcacacgcatgcacgtgggaaccagacccgtaccttccaagctatgacgccagtaacgcttaaatcgagcttcgctc

SEQ ID NO: 63299 - DNA, 429 bp, Oryza sativa
cattacggaccttagatactcagcttcataattcttcaaaaaagaggggaggtcatgccaaaatttctagtgaatttattttggtgattacatacaaatcggatgtgcctaaaaggtttgcaacttcatcctccaatgtttattttggtcatattacatttgcagctatgttttgcacacttttttgtctccaaaatttagttgtaagttgatgagggagaaaatttgtgtggggaagaaagaatatatagaaacttatttgatttgctaaagaaagtttattaaatagttgataaggaaaactatagtgaaagttagtcttgaatactacaaaacaaactaaactgaaaattaatagaagtaaaacacattaaaattagttaaaactttaaaatagtaataagactatttggtgaatatttatgattt

SEQ ID NO: 63300 - DNA, 453 bp, Oryza sativa
agcttgttgtagctgcatatcatttgattccgtacttcatattcgatgctcaagaaggtgatgtacaggacctttcagacgttgctatctatcaattgacaatctccaccttctgcatgcacaatatcttgttactgatctaatgcaggttcaagaagtacactgttcgcagcttctgatccccaagttccagattactgcgagatgctcaagtctgaagactggcctgtttgtgcttgcatctcatatgactgtaatccaatgaatgcatctgaagaatcacataacctcgagacgtcgcagctagtatgggagaagacattagagatgattggcctcccaccagatgccgtggacaagttcatcgaaggggaatcggttcagtgtctgtatggacaacagaaggcagaatatgctatttcgtagacagcaaatatgtgataatttcgaatg

SEQ ID NO: 63301 - DNA, 449 bp, Oryza sativa
tgaggaatagaagtatttacaatgtctagatatccatatgttgacctggcgtagataacaatgaattccagataacgaagatgatatggcgttaacaaattaagtgtagagctgatgtctgaaggtgtcacataaataaatccttagcaatcgtaacctttttgactccttgcataaagtatgtaagaaccttaatagcattgtgttattttggccgaagaacatcaaggtccttaatttttgcaaagatctgatattctgtataattttttcaaacttttcgctaggaaaattgcaatgttcttctttatcataagaagtagttatgatagacaaatgccgaacacctggtgaatatttcttggattccaacccatcaacagtagcatactcattggatgataacttttctgccaagtcatgcattatgtcatgcataacatagtggg

SEQ ID NO: 63302 - DNA, 443 bp, Oryza sativa
  unsure (1)..(443): unsure at all n locations
agctntcatgagtcgagccaatccaggctctgctcggctaggttccacccctatctcctgccggcttcgacttcgtaagctgtggtggttgtgttggtatgagattcgactcttaggtcctccccgggggtcccttttatatccggggttagtcgatcttcaagtagaactcgcagatatcggaccccacacaatatagtaacgacctagttctgtccgagtaggactcctttcatccgtggactccgtttctattacgtgatggatttccttaatgtatacaggaaacatccgtatacgcgcaggtataccgtatcaacatacaacatatatccaagggtagagggtataccttatccgttaccctgacacaaaatataaaaacagaattgatcgtcacataacacgaggagcaagcgaaattcctattntctcatgtgcat

SEQ ID NO: 63303 - DNA, 426 bp, Oryza sativa
  unsure (1)..(426): unsure at all n locations
acttgtacttgacaaatnatgccagtttggctaattcaccctcatataactatatttccatccattntattgggtaatgtagtctcaagagaaatcaagtcataatgcaacgtccccccactctgcattttccttttctcttgaagctacaggagagactagagaagttaaaatattccatttaatacgggtagcaaggtccaatcctatttattaacttatttgcaaacattagttggagtatgcaacaaaactaatggatcggcagtaagttgccaataaaatcctttcttccccaccccaataccattcatattacttggtccaacaacaattgtctgttcgtactttccaatatttgaaaagattcattatcttgttactatgcagtggacaagctgtaacggtgggcataaaaaccgatga

SEQ ID NO: 63304 - DNA, 445 bp, Oryza sativa
  unsure (1)..(445): unsure at all n locations
agctnttgtggaacttaatcatcgttcatgataggtttgattatctttctcacatcagatagcatgtttctctctttttccttgtctaaccaaactcccttcttctttgcgcagtggcagtgcccaatttgcctgataaactactctttggacaacataatcattgatccttacttcaaccgcataactgctttggtgagtttatagtggaaatgaatttcatgttcgtatctacaccattccatcatgccatctgctgatttgttggtatttgtcatctaggtccaaagttgtggagatgatgtatctgaaattgatgtcaagcctgacggttcctggagagtcaagggtggagcaaaactgaagggtctcgcacagtggcatttacctgatggcactctctgtatgcctacagatacaaggtccaagcccaacataagaattg

SEQ ID NO: 63305 - DNA, 460 bp, Oryza sativa
  unsure (1)..(460): unsure at all n locations
agctttatctacacatgtagtgatatnttttgtgtnttatatacagaaaagcttcaattaaagatggcttatatgtaacaacatgagcagtttgccagcatcagatngctctgcatcctttcttcttgagttccggcgtnacatcgtgtttgcattcttaaacatttcatctcgattatatgttnttcttcacccattatcattgctcatagtttatcgctttcctttcatttctttttcaccgaccagaacagatcgggcctctnttcactaaattggggaaaaatcaacagagtgttgttcttggcttcttgaaaatgctatcggctccacctagagtgcacacccgcttcttgaanaatcaacagagtgttgcttacttactccatatatatagaccattgcgcatatnntgcctttcctgcaatcttttcctgctctttctctctctctctacttt

SEQ ID NO: 63306 - DNA, 421 bp, Oryza sativa
  unsure (1)..(421): unsure at all n locations
gcaagganaatcttataataagctgttagtccctattttgatgattggtgacaccggttaattatggatgcaagtgaaatggacaagtggagtttctttttcgcttatcgaaattttagtttctctctttctttattccttaaagaaaagttttttctttcaagttttatactatgtaggaaattaactataaagaggatatttacgtgggtagcgggattggcgcttaccggtgcgcaccaagtacatcaagaagaggagagatgacactgaaatgctgtaatagtgttaaacttgcatctactaactataattagaatttatgaaaataacaacaattattagatggatgacctgaaggagaggaacaaccaatacctcgaagattaaatcagatattcactcacctatggcagctatc

SEQ ID NO: 63307 - DNA, 427 bp, Oryza sativa
  unsure (1)..(427): unsure at all n locations
aagcttcgaagcggtgcagaagctgtggtctgttagtaaagtgcatgtgtaaagatgtcaagccgtcaaggacttgtgctttttttttcctttctcctagtaatanttgagcagcagaccccgcgccttgggctaacagtattgaaacgtgagcattgtccacatgacagatatgcagcatgcagtcaagccaagctccccaatgatgacctacctttatgcgtacatttgctcttcatcaacgctatactttgaaaaggaaaacagggaagcagaatggaaaaagaagaaagactcgtgtcaatttcagtaaagaatacctcgggtcttgtcgatagagtacgataaacaataccattgcgatggttatggtcattcggtatactaagtgtacatttgtgaaagatcattggtgggtgacgaaatt

SEQ ID NO: 63308 - DNA, 395 bp, Oryza sativa
  unsure (1)..(395): unsure at all n locations
ntacctgaccgcgcatccgtttccgcgaaggtcccgtttcgtcatcggtcttgtggggattcgcacagggaggcagttcgccattgtaaacccggttcgcctgaccagctgcctgctgtgtcagcaactggctgtactcgacgacagacacatcgccgatcatcttgcgggcttcggcttcagcttggtcaaggtttaacactgtaaaggcaaggagggggaatcaccgttttcgagttcacggttgcgaagaatatggcgctgaaaagctcggcgttaggcccaaacccggaagtccggcatgcccagttgaatatagcgatccgaacaagcgccgatgggctcagctgtggtagttccacctggaagaagcgaatgatctcctgcaacaacac

SEQ ID NO: 63309 - DNA, 443 bp, Oryza sativa
  unsure (1)..(443): unsure at all n locations
agcttaaagccatgaatccctcttatgcatatctggatctggatcctgcagaacaaacatataggatgagtagtatctgatataaatataatactcgagaaaaaatcggtattttaaaaatctataaatatgtatttctcctcttgtcaattntgatttccccgagcagatgactcattacgtttaaacactctgcccgactaatcatagccaccaagcactgggagtcggcctaagcacttcccaatcatgcatatgagtgtcatgagttcgtcattaatggaacaaagtttcacggatcggagtttactactcgggtacttttgcaattattaagagcagaaaataaattatcttatctctatgcttttgatttattccgaataatacttagcaccttgcgttattcggtccatccaacgagcccccgggtgctaggaatc

SEQ ID NO: 63310 - DNA, 478 bp, Oryza sativa
cgtgacactacataatactatagcttgtctcgaagctggcgagctctaccgagctgagctcgatctattcttcagaagcttgaaatattcactcccgctgcccatcccaatttctcccgcactccaattccaaaatcctaccaccaacagcagtgcatcacctaaccatttatttcccttatatacccatcccgtatccaaaccactactcatttgctctcttcctcgaaacatttctcttctagatctacaatcctatgctgctctattgctgcactgaccactgctgttgatctagcaagcactgtgcatacttacgctctacttccatgaagaaccccatggatgacatgtgcaacacaactgcctcgtcatgagtgaagaactgacgactcagatctgatatagttacgcttatttctttgcggacatatcgataccttttcacccacatgttactagggcctacatgttaact

SEQ ID NO: 63311 - DNA, 474 bp, Oryza sativa
  unsure (1)..(474): unsure at all n locations
tcttaattcacctgangcatgcaagctttgtctcctctgaatgccataatttgttttatatatacacatgtcaccagctaacatctttntagtcaaaataactgttcttgtggaccatgtaatgatgtttccgtcgaaaatcacaccaagagaccggatccatttttacacatcattaaaaaacaatgattctggatgctgatgccggcaaccataaaaggaaaatagttgcttttgtcggaagccttgatttatgcggtggacgatatgatacacctactcatcctctttttcggtctctccagacattgcacaaggacgactattataacccaaactttgcggtgagattactttgttctattgttcatgtgcctgtatcactgtatgtggtttatacacatgataatagttcctgtaattgacgcatcttgtatttgcatgtacttgatgcccaaaggccaagagaaccat

SEQ ID NO: 63312 - DNA, 373 bp, Oryza sativa
  unsure (1)..(373): unsure at all n locations
tgtgctgcactgtgaggcacggtgcagtcactgcagtggatctccttgtngggtcttgggaggatttggcctcggattgaatctagtacacgtatcccccgcgcgcgactggatcatcgtcatctgggtggattggataccggataaacccaaccaacatacgaccgatcggtggctgtgctaacgcatctgcccacctcgtcttcttcccgcgcggacgcatcatccgccactgtggcttcacgtacgcgtccatcttcacgcgcgaccgattgctagtgcgatcgatctatcgagcgtgtgaccaaaccacccgcgcgcgctgactccaccacgatctaatctgagtccgcgccgaccaaacgcgttgtcg

SEQ ID NO: 63313 - DNA, 439 bp, Oryza sativa
  unsure (1)..(439): unsure at all n locations
agcttaacatcaaagttctttggagattgtcttccggaaaaagtagtggaacttattggtatgagtattctattaatcctattaagccctatgcctcacatcaaattgggctattaaatgatttcaaatggaaaagtcaccaaaaccaatgttgtaaaactcatcgaggtgcaaaatttttattgtggtcatttctccatctgactctatttaaacaatttgaaatttgaaattcatagtttgaaaagttcaaatagaattttagatcagtgaacgacttcaactgaataagccatcaacaacaaaggtgtataactcatcaaaatctataactnttattgtggtcatttttctatataaccattttcgaaccatttgaatttgaatttgaaaatatgacaacttcaaacagcattttctaatactatangatatcaac

SEQ ID NO: 63314 - DNA, 392 bp, Oryza sativa
aagaaagaacctcaagtgaaatgttataatttcctcctactaccttctcgaagaaggtgagattactccaagcttagtatcccaatattcagaaagataatgaatcggaacgcttcagccctttcaaattgttggcagaaaaagctacatttgactgctaatataaagaggacaaaatatttttatgatttagaaatctagtagaagtacttatgatctcatttgtcttgggtgttgctcaaggtaaatgtaaatgcttttgtaactcttttgttaattaatggttacatacatgcttgcatcaattatgggcatctaactttaccaatgaatgccatacttgatcgatcaagtatcatacccaattctctctctagctatatgccattatc

SEQ ID NO: 63315 - DNA, 142 bp, Oryza sativa
ttatataaatatgctccgcctgctctcattgatactgtagtattattaatcttctggcgactggaaccatacaaacggttgataaacttaatgcagtggttttgaactttcgcttgtttaaatttgccatgtgaaacggggc

SEQ ID NO: 63316 - DNA, 445 bp, Oryza sativa
  unsure (1)..(445): unsure at all n locations
agcttggattgaaataaaaggcatttatcttcagcctgacaatgatgacaatgtagtgtgttgtggttgtggatgtccgaatattccacacagtcagtctacttgtggaattccacgtagcctcataactctatttcgaagacccaaactgtaaacaaatgcagattcttcactgggattgcaaatcagaacaagatcttaacagccgataataatttggctacgcgagcaacggagcaaggccacaccatccgatcatctgcaacaaacatgcaagactgccatgcatcttcttcaccctaatgatcaggaagtttgggaccctgttttgaggtgagtaaattgcaaaaacatggataaaatccgaccaaaacttgttgatagttttacaagctggtggcagcatgtcctagcataccaaanagagatgaagaggaagttaata

SEQ ID NO: 63317 - DNA, 436 bp, Oryza sativa
tgaactcgacgatccgaggccctgtttagttcatgggtgaaaagtttggcatgtcacattgaaaatacggacacacatttaaagtattaaacgtagtttaataacaaaacaatattatgaatcccgcctgtatacagcgagacaaatttattaagcctaattaatccatcattagcaaatatttactatagcaccacattgtcaaatcatggcgcaattaggcttaaaagattcatctcgcaatttacacgcaaactgtgtaattggttgttttattttgttcatattttatactttatgtacgtatacaaacattcgatgtgatgggtgaaaagttttgttttgaaaactaaacatggcctgaatagcagaatgggcaagcttcagtcaagaatcaaaggagcatggtgatcattgattgaccggacatgatcgt

SEQ ID NO: 63318 - DNA, 440 bp, Oryza sativa
  unsure (1)..(440): unsure at all n locations
agctntgcagctatctgtaagcagtggttcaaaagatctgcttccccttgccaagaggcaagcagcagaagtcattgctaaggttcagggtgagggttcaatctagttcacaaagatatagggatctcttaaatcaaatggaaagttatgttgtgtgtatagaaagacttgcaagggaacgttccgaactgatgaattctattggattcgagaatgaagtgcgatctaaagagtggattctttctgcattcatgaactccattcaattgccatcaccaaagagggatatgggtaacattccatttttacaatcaggtaatgttggagtcaaaactccagcccatgatgatatacaggatgaaacaggtattgttctttctattcttggaattgcttgtggncagctatatagtgacgttagagccaaggtttctgagctt

SEQ ID NO: 63319 - DNA, 364 bp, Oryza sativa
tggactgcgcgcgttacagtatgcatgcagcgtgcgtttcgcagttcatcatctctgcatgctaggccgaaaaggacccctgatctaacgtgtatatattcatgtagcagtagaagtctaacaacaaaccagcatggtaaaaataaacctgctgttagctaattaagcatccggattgcatctggtgctgtgaaaaatgcagaggtataaagtgcacgggacctgtgagctatggagggggagtccaggatcagtataaacggccagggtggtggtggtggcaaggaaaccggttgcatgaatgcgtacttgaggttgatatgctgctccactgccggtgaattgtgttcaggtctcaagcagc

SEQ ID NO: 63320 - DNA, 432 bp, Oryza sativa
  unsure (1)..(432): unsure at all n locations
agctttatctgccggtttattcttccaatttatgggaacttcgcgaacaccacgcgccagacggctttatgaagcattggccggctgtatacaaanttaccatgaccagtgctggcaacagtggtactatcttcgggggaacttcgtgaaatggcttctacaaccccacatgaaacacgttaagtaatcgagtgcccgggggaaaatgaaggcgatacgccacagcgccaatgccaatgcatcccaacttgtcgcgtcccttgacagcgattgacgcaatcggacggtgaagcatacgaagccaaacccagtcgcccacactgaacttcaatgcacgatgcttgccgtcatacgcatgcttgtaagtctgttgagcttgntctaaacgatcgcgaaactgtaagtctgttgagcttgttctatacgatcgcg

SEQ ID NO: 63321 - DNA, 452 bp, Oryza sativa
  unsure (1)..(452): unsure at all n locations
taacattattacttccgatgaatcccggataacgctactatctaactgttaacccttgcaaaattatatgcttcatgccaccacctgttcctcagttgttagctttcatcaaaggtgtgtttaataaattagcaacccaaaatctggtggctctttggaccttgcaagcctgctttcgtttccttttgtgaatttataaatctgaacacacagcaggctaaacatggcgaacaagtgcgaatggcagtgccttatgcttgctggagtcttatatcatgaacatctgttgctacagctatggttntatcctctgattgtttatttggttttttatttggccagacaggagttgcacttggtgaaaactacacgagaagtgccttaaatgagtatatgaatatttggccagatacagtctttacgtgcagcagtacatggaaacagaatacaac

SEQ ID NO: 63322 - DNA, 380 bp, Oryza sativa
  unsure (1)..(380): unsure at all n locations
attcttaattcacctgcggcatgaagctttataaaccgattattcccggttcttnttcacccctatctggaaacttgaccaaaggacatggtagaaaaaataaatgctcggaactacatggttccatctaatccgaaaaaatatatgttagaaattagagaattgttttatccgctaatatatactatattatcaatcatatgtaaaaatattgcgaatatatctacccacaaacatggtagaaaaatggtttttaatttcaatatatccgcgtaggggagggtggccacgtgaccggatccacgccggggaggcccaccgtcatcagatcgaggtggtgcggcaccactgcagatgcccgaggttggtcccatcacctg

SEQ ID NO: 63323 - DNA, 444 bp, Oryza sativa
tagcatgtgtgttatgtgaaatgcacaaataaatattattttatctgtgttctcacaatgaaacctcggaacctatttgccatgcctgaatgggaagacggtgataataatgttgaccatgctgatgttgactcacttgtcgtatgagtggatcagatgaatgtacaataccgacctgacgatttcacaaactggagaagatctgacattaaatgcattagtggtgatgctactgtaattgatgaggcgcgtgctgtatccatgcctgaacctgatgacgatgacatacctgactaataatacgaatccgatgacacctacattgctgatggagttgttgctccagtctgatcccatggatgagacgacgacgatgatttttctgtgtaatgttgggttggattcttgctctgcacgatataataataataatttaatggatat

SEQ ID NO: 63324 - DNA, 429 bp, Oryza sativa
ttaagagcgtgtctcggcgtctgtatgtaaatctgttgctcaagtctgaaagtgatgtgcaaacatgattgtgttcgtctgcatgttaatctgccatttttctgaatgggttgtctgaaccaaacatgcatggggagtaaatcgcaacactgtaataaaagagtaaattacaactacccgttcataaacttgtaacgaagttttacttaagtccacgaacttggaaacacacattcgagaatctaaactgcgttaatgtatcatcccgggccaaagccatgcttgaacccggcttttgttacatctgaactccaagatgatgacattgaattttctatatgactcccctctcctttttatcctcacttttcttgctgctgacgcaagagatccaggtcgtcgctccctctctcccgttgactaaactac

SEQ ID NO: 63325 - DNA, 520 bp, Oryza sativa
  unsure (1)..(520): unsure at all n locations
agctagatgttgcaccgacgtaattccctttccaggtatggccgncaagacgtggtgggtgcggtggtgctgccgtattactactacctgctgcggccggagctccgccgccgtcttccattggagtttctgagacgggaacggcactgttggtttggtcggaagcgccgccgccgccatgtcggagatccggcggaggcagagtatctcgggacgacatcatcgtgtctcgtacctgccaaaattttgaatcgtcaggattccatgtgtagagagggagacgatgagacagagacagagtagaaaaggcgagacagagatagagaaggcgaattaggtaaatcctggtaaagtggattaaagcgatgccctttgcctcgggtcgccctgcgtgttatataagacaggaacagcccctaccgtggctttgtacaacagaatccaaagattacaaggataggattagatcagaacaaataaactacatcgcaacaaccttatcaggtcacatgcgataaca

SEQ ID NO: 63326 - DNA, 384 bp, Oryza sativa
taaagaacaatggcagtattgcgcctccgccagcactttctggtggttatgctaaatagcctggtatgagggggcgtggaccttgacctacttcaaagccaatgtatatgagccttcaatctggtcaggctgcatccagaaggtccaacttgaagcccctacactgggttaaagtaacaagagcaatgcagggaagtctctgggaggagtcacagaaaactgacgaagcttcaaaggattgtaccgacacaaccacactcatagatggttatgtacattatgagttctatgttaatgcatcttttcgatgacttgtgcagacctccagtgtttgacatgtcagaactagaacatcttttctcagctgtcctgcccagttcagat

SEQ ID NO: 63327 - DNA, 408 bp, Oryza sativa
gcacgtgatatctgctaaaggaggtgctgtggaccccgaaacaatgaccgccgtcactgattggaagcaacccaagacagtcacttaagttcgcagctttttgggtttggcaagatactaccggaaggtcatcgaaaacttcttcaaaattgctccacccatgacacagttgttgaagaaaaaaaaaaaatttgtgtggagcccgcaatgcgagaaggcgttccaaacttctcaaagaaaagctggtttcctcgccagttttaatcttaccggatactcgcaaggacttcatggtgtgctgtgatgcttcccgccaaagattggggtgcgtgctcatgcaagaacgtcatgtggtatcctattgctcacgccagctacgacatcatgaagggcactaccctacccatg

SEQ ID NO: 63328 - DNA, 420 bp, Oryza sativa
accaggaacccggtttgtccgaccccgccccggcgtttctaactattggcatgcgaggtttccctgaaccgactagttacttaactagggtgtcccattccaccttgtggttgcactttgatcatgttcgatgagtttcccacaggaatcggtccttatatgcgaatacgggacagtgccacataggcacaacccccgcatcgcgagttttcacaattcattttattttcaatcacaccgacaccacatgtcgggttttcaaggcttctcaaacccattgcccaaattttcgacaaacaacggtgtatgtgggataattggcatacaggcttagagagcacggatactgaagtaccacaatggtggagcgacataggatcagggtatgtcagcctacacgaagtagtgcgactactggat

SEQ ID NO: 63329 - DNA, 451 bp, Oryza sativa
  unsure (1)..(451): unsure at all n locations
agcttatcaactcaaacccgatgtcgtacactagtcgtattgtcggaatcggctgtatcacttaacccagtcagactcggacttagccgatcccagtcgtagccgatccggactccagccgattcttactctggttccgcgacaatccttatcttcggttccgcttcgatttaatcttcatatccgatattgatattaccaaatttggtcgttaacacatgccccccaagtccgggatatttggtaatgtttcggatttgccgcgtatcgacttcgagtaagtttcgcactctgccattntctgaccgttatcctcagtgctttaaatactaaccgccgccctgganaatctttaccccattacttccgttttcaccaccgaagccaattntgttctcttcctctccggcgatttctctgacgcacaaagcgatccccangcggcttcatc

SEQ ID NO: 63330 - DNA, 118 bp, Oryza sativa
aagaataatacacggaaacactaaggtgtcaacaaaagccgtgttaaaaccgcaaaaatttagcaccaaaggacagcttttacctccaccggacacaaaaaccgcgccgccaccccca

SEQ ID NO: 63331 - DNA, 485 bp, Oryza sativa
  unsure (1)..(485): unsure at all n locations
gctcgatggcttgagccttatatttgtctgctcgacctgctctgctcggatatatcgttccaaagattctggcggctattgctggaaagctcgatgtgacattgcatcactaatcaccattgccgatttacttgctcatacatacatctgtttcccgtccgacgacgacgccgagccgtctccccgacgccccgccgtggcttcgacgcctgacgccgccaccgcttcccggctcctactactgcagcgcgcctcatcagatgccaagttcctcccgcgacggcgcggcgacctccttcccaccgncggccggtctgcccggagagaagaaagtgagagagaggagcgaggatcgttctttcctcccctcctctcttcctctcttttgcccctcgtccgcccttctggttctctttcctcctttgtatccttctcgttttctcaagttcacttctctgtatctcctcacgctgccatattgtttt

SEQ ID NO: 63332 - DNA, 409 bp, Oryza sativa
  unsure (1)..(409): unsure at all n locations
ctaccttatccctgctgaactcaccattctggatctatcacccatggaactcagaattttatatacaccacatgaacatttgtgatagtccaaacctacattaaagtccagcaanttcggtttatttatttttcttaatttgcattaattatgttctaaacatctctcacgtacgaaaaacagaacgatccatcaacacatgattaattaagtattagctatttttttaaaatggagtggagggcgactggtcttgcgtctgcaacggcagtgcgcctcccagctgtgaggggccgatgacgtcctttgtcgagacctggaagtcgaagtcaccgatgccaaagagcaaggcggaagccaccccgtactccaacgaggtcttggcatggtccagtggtggaccccgact

SEQ ID NO: 63333 - DNA, 283 bp, Oryza sativa
  unsure (1)..(283): unsure at all n locations
aagattctggcggctatggcgtgaaagctcgatgtgacattgcatcactaatcaccattgccgatntacttgctcatacatacatctggttcccgtccgacgacgacgccgagccgccttcccgacgccccgccgcgggtccgacgccgcacgccgncaccgnttnccggcttctactacggcagcgcgcctcatcagatgccaggttcctcccgcgacggcgcggcgaccttctttccaccgcctgccggcctgcccggagagaagaaagtgagagagagga

SEQ ID NO: 63334 - DNA, 424 bp, Oryza sativa
  unsure (1)..(424): unsure at all n locations
tatccctgctgaactcaccattctggatctatcacccatggaactcagaattntatatacaccacatgaacatttgtgatagtccaaacctacattaaagtccagcaatttcgggttatttatttttcttaatttgcattaattatgttctaaacatctctcacgtacgaaaaacagaacgatccatcaacacatgattaattaagtattagctatttttttaaaatggagtggagggcgactggtcttgcgtctgcaacggcagtgcgcctcccagctgtgaggggccgatgacgtcctttgtcgagacctggaagtcgaagtcaccgatgccaaagagcaaggcggaagccaccccgtactccaacgaggtcttggcatggtccagtggtggaccccgactcgacgtgccggctgcctgtga

SEQ ID NO: 63335 - DNA, 113 bp, Oryza sativa
gggtgctatgaatctttaatattcgaagatgaatatctgcaacgcctgaaacgggaaaactgatatagatagcgaaaccactggacgcacgagtcccgtgacatgtatgatcc

SEQ ID NO: 63336 - DNA, 432 bp, Oryza sativa
  unsure (1)..(432): unsure at all n locations
agcttgtataaagagaaacatgctaatggttgtggaggcggaaataacttgacatcaggaaaagagagtgatgtgcatcggggagagaatgcatgtgggcataactctgcagcacgtcaaaagacagagatctcgaagagagaaaacagaatgacggatagtacacatgaagagaacatgagatcaggaaaagagaagattcccagggatggcagcaacaaggggacagtgaagccagatcttgttgatggactacctccagataagcatgtagatgttgcatttgtgcacaagacaactaccaacagagtagatactcagcaagaatgtggatacaatgtggctgtagatgttgatgacaattatgctcttcaacatgagccanagagtcctcacggcaatgataatctcagaggaactgaaatggatact

SEQ ID NO: 63337 - DNA, 443 bp, Oryza sativa
tccttgatctggtggtgttagaacactgtttgcatgtatttaaatatccgtaagtagacttgtcttatgattaattgatttttttgcagcagtatcaattatttatatgtaagttttctatcgtacaaaccacaattttcatattctatccaaaattcaaatcaatgcatgatgcatcgtttgaaatgattggatgcaaccatacactgcatattttagttgaacctactatgataaacactatgcatgtgtgctctgcagctaaacaagattttatttagcaacgtgcaaaataaaaatgaaatgaaaaaattctgccaaatttctcataagaatgcatactatcagcagatatgatgattagaatccaaatgttttaatcagagaagcagacagatggaacataacagaacagtcagacaattgaagaagtccataccctt

SEQ ID NO: 63338 - DNA, 403 bp, Oryza sativa
  unsure (1)..(403): unsure at all n locations
ctggtgatatacaagctttttaaatttgtgagattgcctattgaagatggcattgaactgtatgtattgcagtttgacatatccaagctttgcaagtccacgagatcaccaattgcagacattattggcctagtgaggttacagccaaacaaccacaagcttctcaaattcttgaagttactaatggatgaaggctntgtgctagagaagtcaaactcagatagtatcaagcatgtcaagttcttgtgggcccctatccatgacaacaaattggatcctgaatctcctaacaattccgaattaaggagttctagatggcataaagaccagatcanaccaaacgacgtgagaaaatccttagaaattaatttcccttcaagaaccaactncttcagcatattga

SEQ ID NO: 63339 - DNA, 436 bp, Oryza sativa
ttgtccaattttcagttcttgactttttccctaaactccttaatgaacaaatctgaccgtagttagtctccttaatttcgttcttagagcctggtcatattatagcccaaataaatcctaacaaatttagtaatattgctaaacatttgacaggatttttttatgtattactaaagtttggccagaaactaaatagatgcacatatatatttgataactctaaaaagatagtataacttaaaatgacatacatatgaacgagcccttaatttccgtggatgcatttcgtagcttactagtagccactaatcaatggcatcgttcatatatatatggaccgttgcgatgatccgatcaaaccccgggaagcacacgggaggctacacgtggctctccatccgccggcgcccgctgcagttatttgacccaccccccc

SEQ ID NO: 63340 - DNA, 441 bp, Oryza sativa
  unsure (1)..(441): unsure at all n locations
tgatctatggcgacgcctcttggaggcttgcctgagtttatgtcgctggccattgctcttggatgagcgttgaccaaccgtagcatggaagagaagggcaagaatgtcattgcactttgttcagttgtactataaattagaacccttccaaaatgtgatattttatgtttgttgaacaaatcttcgtggtatggatgaaaatttcatatcgtatatattacatacggatatcaacagacttaaagtgagtactctttgattgctatttttccatttaatttgagcacgttttccatacagctaagcactacgttcncttaaagagcctcttatgtagaagcttttaaaaaataatataatctttcaagtttataatagttaatgcttatgtataatatgcttataacctctcttattctgcacacccttaataagctcagc

SEQ ID NO: 63341 - DNA, 498 bp, Oryza sativa
agcttagctgcatatgatctgtatggtgtatatcttctggtcctgcttagtcgggaaaaaattttagcctcgcatgtcacatcgaatatacggatacacatttgaagtattaaacgtaatttaataacataacagattacagattctgccatgaaacatcgagaccgaattattaagcctaattaatctgtcattagcaaatgtttactatagcaccacatgtcaaattatggcacaattagacttaaaagattcgtctcgtaatttcctggcgaactgtgtaattgggttttttctatatttaatactttatatatttgctcaaatatttgatgtgataacatgaacaattatattatacgaaggtatcgaataaatgggagggtttatagattagattaaaatattatcggatagtcttcgtcttcgcatgactgcatgtggacattcagggccatgcatgcatgtagcttggaagcgtacatgcacgccattatc

SEQ ID NO: 63342 - DNA, 428 bp, Oryza sativa
  unsure (1)..(428): unsure at all n locations
tctcgctcttgtctaanacgacaagtattattagtctggagggagtagtataaagaaatagttaagattgaattagtacgatgttttaaagccattattttatatacatttttttttaaaaaaaacatactttaacaatttaataagtatatatgcgtaaaaaagattgagtagaaattgagaagatatagtataaaacacaatcttaacaacaatttaagtactcagtccgtttaaaaacaaaggacaaacagatccattttgtcaatggactattaccgatgaaatgacaacagaaaaatattttttggctcgctcgcaggcgggccaatctgtcttaaaatagaattatttagaggctaaaaattcttatgcgactcaacaaanaanaagcatacgtgtatgttacttagagctggataccactc

SEQ ID NO: 63343 - DNA, 376 bp, Oryza sativa
catgcaatctcctattattaattgtgctacacaatatctcatccatttcttagatggcgcactttttctttcacagagcggattactaactaccaggatgtatgccctgccccatgtctggtgattatcacattcaggtcacccaagcaactgtgcgtacaatattttatatctaaagttaatccaccttacttaacattccatccattctaaatcgattctatggataacatggagtacagcaggattcaacatcactctgataaatgttcattgtttgataaaaaaaacaacacacagatgtcgttatccatgtactgtctccataccaaatatctcctctgtcaaagaaaataacaaacctactattgtatgt

SEQ ID NO: 63344 - DNA, 449 bp, Oryza sativa
  unsure (1)..(449): unsure at all n locations
taatataaacctatgagctgtatatgtagcatctgtgctctgtaatttgatttgctctntatcacttacgatacaattgctctgcacatcgaactattgtttcggaaaacattgctcatgcagtacttgcaaggacctcttaaactaactaaataaatagattgatcctcagacttgagtgggttgagtcataaagagattatccatattaacccgatttcttgcacatgtgatatttgttaaatgaaggtgactaacattgattttagattaattaaacactttggaagcaaacaactggggtagaatgttaatatatacaaagtgtaagatcaacgtgtcgtttgattcttattctgtgatgaacaataggcatctgtgattattgcgtttgatattttgagaatatcattgaaagggttctggagataatcaatcttggagataat

SEQ ID NO: 63345 - DNA, 460 bp, Oryza sativa
  unsure (1)..(460): unsure at all n locations
cagcacgatacgtgttcctccatcctagtcatactggaaatatgacctaaaaccgttaagtggcaggcccacgccttaaacttaatgccggggtggcggacacaacgggaacccacctcgtggcacaataccgttgtattggacacgcttagtcacctaaactaccacttcggggtaaataggaagctcctctgaattatacgaactcatacacaccggcgtaccagaatgtaaggataaaccataaataatttactaagcttgggctatcccatactagcacatgtagttgtactatatacaaaataaactgacattgagtgaagtccttaggtcggtttgggcacactctccccctatcggtacacaactaatcaccatatgtgcaccacttgaagcccannacctaaatccatggtttcaccattttatttatcanaatcacaagtattaaagttct

SEQ ID NO: 63346 - DNA, 368 bp, Oryza sativa
atctcttacgctccaggaatggatcagtcagaacatctccaccggcttgtcgtcatcgccgccgactggtgtcttcgcctatacggttgattggtcacaccaccgatgttgggcgtctacgtcttcaccgaccggcttgccttcgtcgccgccgactggtgtctccgcctgcacggctggcctattatgccgccgttgttgggcgtctacgtcttcaccgaccggccgcctcgtcagccgccgactggtgtttccgcctgcacggctggcctattatgccgccgttgttgggcgtctacgtcttcaccgaccggcttgccttcgctgccgccgactggtgtttccgcctgcacggctggcctattatg

SEQ ID NO: 63347 - DNA, 493 bp, Oryza sativa
  unsure (1)..(493): unsure at all n locations
agcttcaagatgttagtttcagaanatcataataaaactgatttagaatcaatcagatatatttgttttcttactaacattgtggataatttgaacatatcaaaggcaatggtcacaatgtcatctggcagatgtggtattatcaattccattataagacgcaatgagaaggtaaaaagatagtaaattgttctcttcctgaagtatcattgttgtttgctttaacactgatatatttttgaaatttttgtttgcagtgcaaaaaaacatgcgcatgtgctgagttatgtgcatttggaattgaagattccagttatctcgacaaatacaacgaagagcagcaatgtgcaatgacatgcattatgtcgaaagcaggttgtcaccacaaccattcagttgatcttgtatggnggcctccaggtacgggaaagaacccgatagctgctggtttagctatttgtatgctgaatttgagataagaatattagtatgt

SEQ ID NO: 63348 - DNA, 450 bp, Oryza sativa
gcatcgaacacttaattcccttgacttgctgagtactttcgtactcacccttgctctatataaataactcccccagttctcgaagacgaggaggtggacccttgttaacgacgaaatttggtaaatcatgcattggattcagagttaaagccgaagccgattggaggagataagcgattacagaaacagagtattaatcggctgcaagccaaatcggctacggtgtgcatcggctgaaacagaatcggacaaggatagccgatgtagccgattccgatgaggagatggtaggatcattgtcgggttcggttggtgtgcttcatgaggattgccacgtgcggattgagtccgaagaaagcaattgtatctattaattagaatatttgttaagttccttttatctttatgaaagtgtgtttagtgtcccttaaagactttatgtttttcttt

SEQ ID NO: 63349 - DNA, 527 bp, Oryza sativa
  unsure (1)..(527): unsure at all n locations
agctntcactactatagattgggtaaatgtgccggttcgaaaccctagctaataggtgccggttttccgaaccggcataaaggaggcgttttgacctcaaaaccggtacctatatggtttaaataggtgccagttctaagccagattgcgacgtggctgttaaaataggtgccggtttttagtttgaaatcggcaccaatatggtcctaataggcgtcggttcaagcctaaaaactggcacctatttgttgggtcaaaaaaaattgcagtaaattcatccacacaaccccaattccatataaactcaaattcatcctcacaaccccacatccatacatcacattcattcacattcacattcatcaacacaaataagaacctacaagccattcatcacaacatataaaaacctacaagcctaagtcaaaattcgcgtaagtccaaaatttcctatctttaaatcctaaacattcgcatatataacctaactcacaatatgcctagtttaaaatttctaagtcaaaaga

SEQ ID NO: 63350 - DNA, 455 bp, Oryza sativa
agcaagtgtgagttctggttgtccttattcaaattctttgggcacgtgatatctgctaaaggagttgctgtggaccccgaaacagagaccgccgtcactgaatggaagcaacccaagacagtcacccaaatccgcagtttcttgggtgtggcaggatattaccggagattcatcgagaacttctccaaaatcgctcgacccatgacacagttgttgaagaaagaagagaaatttgtgtggagcccgcaatgcgagaaggcgttccaaactctcaaggagaagctgggttcctcgccagtgttaatcttgccggatactcgcaaggatttcatggtgtactgtgatgcttcgcgccaaggattggggtgcgtgctcatgcaggacggtcatgtggtagcctatgcctcacgccactacgacctcatgaaggcaactaccctacgcatgacttggag

SEQ ID NO: 63351 - DNA, 456 bp, Oryza sativa
  unsure (1)..(456): unsure at all n locations
agctttatattcaaaatgtagccctcgacactacctacaactntgttgttgaaaattttttgaattaaaactgtttagggtcccaaaatattgttgcatgtttatagattttgaaattttaattttaaaatcacattttgggacaaaaatgacttaaaataaaaaaaaatcaactacaaagttgtagatcgcgttgagggctacaagtttgatataaagtttatcttcattagagttcacatgaaaaagttatgaattatttttaaatataaagtctttagaccgtcctatttgacccagataatattcaaatccaagtttagggactggggtgacacaactgaacaagttggaggacctaaacaagtgatctgcaagtttacggaccgggatgacactgtcgaacaagtttgacgacctgaacgggcgatttgcgagttagagaccgggatgaca

SEQ ID NO: 63352 - DNA, 434 bp, Oryza sativa
tgggtttcaagatatagcttaagcctgatggtacaattgaaaagtacaaggcaatgcttgtggccaagggttatacccaaaaagaaggtgaggattctttcgacacttattcaccggttgctcgcttgaccacgattcgagtactactcgctctggcagcctctcatggtctactcgtccatcaaatggatgttaagacagctttcctcaatggagagttggaggaggagatctatatggatcaatcagatgggtatgtactagaaggtcaggagggaatgatgtgcaagctgttaaagtccttgtatggtctcaaacaagcgcctaagcaatggcatgagaagtttgacaatacacttacatctgctggctttgttgtgaacgaagctgacaaatgtgtgtactatcgctatggtgggggagagggagtaatc

SEQ ID NO: 63353 - DNA, 452 bp, Oryza sativa
  unsure (1)..(452): unsure at all n locations
agcttcgaaaacacttgtttctctcgatatagccattattaattaaagctaggtatatagacctcaccgagaacaagcaattctgatggaaattccatctaaaactatcagacgaatcattcaactgaatatgtactatagaggcacacaactcatgccaacaaacaagattctgaccaactaaagctctcctgaaagaaacattaagcggaacagatcccataacagtggcaatagaagatgttttcgtccgaacaattgcgtacaaagatggatatttatccttaaaagccaagttaccaatccatctatcttcccaaaatctaatttgttccccattattgacaatccaagaacccatatttaagaaagtacttntgacattcataagaccagactaaaaatgggaatcaccttggttcctgtcaacttgggttatagaattaatataa

SEQ ID NO: 63354 - DNA, 413 bp, Oryza sativa
  unsure (1)..(413): unsure at all n locations
taaagccatgaatcccttntatgcatatctggatctggatcctgcagtacaaacatataggatgagtagtatctaatataaatataatactcgagaaaaaatcaagtattttaaaatatgtatttcttctcttgttaattttgatttccccgagcagatgactcattacgtttaaacactctgcccgactagtcatagccaccaagcactgggagtcggcctaagcacttcccaaacatgcatatgagtgacatgagttcgtcattaatggaacaaagtttcacggatcggagtttactactcgggtacttttgcaattattaagagcagaaaataaatntatctcatctctatgcttttgagttattccgaataatacttggcaccttgcgttactcggtccatccaacgag

SEQ ID NO: 63355 - DNA, 465 bp, Oryza sativa
  unsure (1)..(465): unsure at all n locations
agcttctgattgcaaagagttgcgtggactgtcgtgctggcagctatgtttctcggtctggggcacttgtcggctaaatgacccattccttgacaattgaagcaacagatatcttcccggactcggcattttcttttctatcatcaggttggttattaactcgaggttagaacatagttcctctgaaatgagaccctaggtttccttcgacagtaaacaattatacacctgatcccatatcggcatcttctgaaagagtcctcatagaacttgtttntattacatatttctcccagattacatgaatacgaggcactgccttaaacaaaaagggaaggtgcttaacatcggtacattgtatcctcaacatgaatcatccataaacataacnaaactcattgttataatcatgaaatatattatttattacatgaatgctgcanactccccgatacagtgataagt

SEQ ID NO: 63356 - DNA, 438 bp, Oryza sativa
  unsure (1)..(438): unsure at all n locations
ntaccacgacaataacggtgacttcttaccatgtgttgttatgatcactgagtttgatttgttaatgcagcggatatacattattttcacgttcacctaaaagatggaattttttgcttgactgtgttccaaatttatctgtgaagcctttgtgtggtactttctcagagagccgaatcaaaagcatcaaagctatcagatttcaagctcctcatataacgttagctttgttggagttacgtatagtaattcttctgatgactgtacgtaccccaaggcaaagagtgatgcaaaaattctctatttgatgtgcttggaagatttgagttcttacttgatattgtcattgngcatgacactttatattctgtcaacttcgtaagtaaaaagttggaatcttcatatccatgtgcatntgactctaccttgcaacaaatg

SEQ ID NO: 63357 - DNA, 446 bp, Oryza sativa
tatcttatcatttgtccaaatttttcactttatttgatatgacaatgatcatttcacaaatggaggcaaaacctaacaatccaacctctcattttctgccgtatctaccaatccaaatcacaattctcctccaaaggaacacgactcattcttatgggcagcaccacatgaaagcaacacgcccaaaatcaaatcaaaacacacccacattaccaattttgtttgtatgttcaaacctagctatcataagttttgtccttggatgcaatcttgggtgagatgccccgtggaattctactcattctccgactcccaagtggaaggatactctgtgcgttgcgaaacacgttgtctggatcgatatcagttctggcacgtaccattcatacatattttccaagagtacctttaccccataccgtggctctcgatttttgattaggatt

SEQ ID NO: 63358 - DNA, 436 bp, Oryza sativa
  unsure (1)..(436): unsure at all n locations
tcgccggcgcccgccgtcgtcgtcgacatggggtctagcgacgaggccggctcctccaagcaccaccgccgcgacaaggagaaggaccgcgagcggtcctcctcccgccaccaccgcgaccgcgaccgcgagagatcctcctctcgccaccaccaccgcgaggaccgggatgacgaccgggatcgggaccgggaccgggagcgccgccacagggagaaggagcgggatcgcgaggagcggaaggcgcgggagcgggaggagcgggagaaggagaaggagagggagcgtgcgcggcggcgcgaggagagggaccgccaggagaggtctaggaggcgggaggcggcggcggatgatgatgangatgatgtggaccgcgaccgcaagcgccgccgtcggtcgtcgcaccaccaccaccaccaccgcgacgcggagccgg

SEQ ID NO: 63359 - DNA, 411 bp, Oryza sativa
  unsure (1)..(411): unsure at all n locations
agcttgtcgtgggcatccccatggctgcttctagctttgctagtgattgcacaattgatttgtttgttcctttggttgagtttgtgatttaattcctctctgaatttgtggtggatttgaaagaattgcactattgcagtgtttgattcaactcaattatctgatgattgtggaaaaggaatttctcctcttttattttctctccctcattctctctctctttgctatttcttcaagcaagcctgaggaagaaggagagcgccggctctggcacggcaaggcacgggccgatgcgacgcctcggctgcgacgatgctgcacggtcgtgagcaggggccaaggcatgcacgacgagtcaccgctctgctgcccccatctgganagagagaangagagaggngcttacatgtg

SEQ ID NO: 63360 - DNA, 445 bp, Oryza sativa
tgtaagcatccaaaatttggccaaaaacttaaaatctgtcattttcagaattttgtcccaggggtattttggtcattttgacaaatttgtacagcactaacaaagactatccggacagcgatggtaaatcgtagaagttaagcaaaagtcgatggcatattgtagaacgtgataaagttagtggcaaatcgtagacgtgtgataaagtcagtggcatataatagattatctctaaagataatgacaccattcaaatgtaatgaagtcgcatatccatagaggcgaagaaaccagtcggcgacagacaagtcagccagcagtgaagacgaaggcacccagtaacggcgacagagttgtgcagccatgacagtgaaataatcagtcgataacagatgaggcacccggtgaagaaaacgaagatgcccatcagtagaggcataataag

SEQ ID NO: 63361 - DNA, 389 bp, Oryza sativa
agcttcttcgctgcacctcgttgcccgcttgtcctcttttgttcaacggaaggttttctatcactagcctcctccttctgagtgccctccacatacctttccacgtgcccctgctgagttccctccggcatcctctccacgttcccttcctcgttcaagcactggtttggatcctcggtcccctcttcttcattccaagactggctgcttccctccgcgattgtattcgacaatatctggtcctcatcgcggtcagccatctgttgatacaagaaacatctgcttagtcacgacacatttatgttctaacaatctaagtcttggatgctaagtggaatgtcctacattagaaccctaccaaccttacgtgcgtaggctaatacacatcg

SEQ ID NO: 63362 - DNA, 445 bp, Oryza sativa
  unsure (1)..(445): unsure at all n locations
ttggaatgacaggctgntgtgtccaatactgaaatngatgantttccattattaaaaaataatgcttaattaggcagcattgcatcatctccatgctgcccctcttcttcgagggcacaatcgcctaaattgtgggtttcctgcaaaacaggaaattgtttccggtgaaatgatcccttcattatatctccttttcaactgccttactatagcccatgcaattcataaatatatttcattatatgcttactgtcaaaacatatattgtcatatcaattatataatttgaattacaacacaaaataacaacgtagctttagcacatgcaaattactagttagccaagcccctatgtgctctgagtangaggtcgctacgtnaacaatttctatatatttattgacanattttctcacaacaaattatcanatgtaaatataattat

SEQ ID NO: 63363 - DNA, 490 bp, Oryza sativa
tgagctgcagctgctaaaacagctgatgcttttgacgttttagaggtcctacaagtagttcaagaatcttgtgaaacacacttaagacacatattgaaacatatcactattatgtatgaaacattttgtttcaacggtttcaaacatatgtttttcttctgacataatataatcatgtgatatcttgttgtaaagatttaattgcaacgaatacaacggtgtgatcggttcgtagatcggataagtaatttacgagaaaaaatatttaaagagaggaggaaagaatgaaaagaaacaactatacatgtgcatgtatgttacactacgacaatggttcgtccaattcaccagacagctgagttgcagtattttcctgacgccaacagagagaaatgataaatagcaagtatggactgagctgaccttaggcgtcgatatttctatctgtcggatggtcaagagaacattttgaaattaaccccgaaagcta

SEQ ID NO: 63364 - DNA, 402 bp, Oryza sativa
  unsure (1)..(402): unsure at all n locations
atctgagacaaataagaactcgatgaccattcttgtgtatgattttaagcatagagtgcaacagagttaactgtgctgaggcctttattcgcatttcatgcaagaactctggtgatcctgattcaggttcagttccaggaataagatacggatgattgcagactttccgaagttgcattactatgttcaacaatgactggtgagcaccacctttcccaatattgcgcaatacttggtagttctttgtaagcatagcacggtagtattcagcctggattgatgtcaattcaacaggcaccattcgttcagtctttggagggatattttgcattgcatcctttntcagtcttcgaagcatatgtggagctacaagggtcttcagctcctccactttctctgttg

SEQ ID NO: 63365 - DNA, 503 bp, Oryza sativa
  unsure (1)..(503): unsure at all n locations
agcttggtaagcggacattatattttgggctctnntggtacataggattcttaacacacataaatagaaataggaaaaaaatagtattagtgcgtcctaacacatcaagtttttggattaaaaaggtattaaaaaaactaccacaatgattgtttagatggagcgttgaaaaaaaaaggaataggaaaagatagacacaaatgatatctgtatataggaggttggatctcatggaaaatttcctccaaaattcctactccaaaggagtatgtttcgagccgatccgaaagaatttcatactagtatttttggctagctaatcctctgatcaaaggaccaagtaggaaaatttttcatagaactaaattcctgatctaaaaatccttaacccttcgttccaattgttctaaaggagccctctgactagcatgtgactcatcaatgagagacagcagactcctcatcttgttaactaaggctggtttagtccacgttaaaatgga

SEQ ID NO: 63366 - DNA, 425 bp, Oryza sativa
  unsure (1)..(425): unsure at all n locations
cgccttgctctatcatgtcacgagttatttatttatnttttaccgggcttggccggtagaaggcccagcagaaattttgtgcttctgcattgttttctccatcttaaaataaacgatcggaatgggatatgatacaacaaattagaatatagggttaattggatctatggctatatccgctaatctgaatttagacataatccggatttattgtattacgcgtcccaatctagattggtttatttggaatagacgtaatgcacactcctgctgtgtaaagaataatttangtgtgtctatattctatagcactagtacccaataaaaggaaacctgaatagcaagggctagaaattttgaataacggttagcatgtggatntttcctcttctgtctactagctcattttcaagcagcgaagctat

SEQ ID NO: 63367 - DNA, 452 bp, Oryza sativa
  unsure (1)..(452): unsure at all n locations
agctttcaggtccagcatggatgggtccatattggatctctgctgtccaatttgggctgcctcttcaagcccgttaggggaaggaacagcccgacttccctgggcgatgtgtcgacggcccaacttggatctgcaagccaatccacggccctgacttgatccaattctccattgtttttatgggggaataagatcacttccggtccctctatttgttgcccagactggtttttcgtcctgatcgcaaaaccggatacaataagtcccccaacttacgaaaccgtttaaataatattcctcagccgtatttgaccgccgctctggctgaagggcgccgacgtggcaaatcttactcggccttattctacatggcactgacatggctcttaccgtgcaatttgatccganaataaaaaacctatggaccacatgtcgcttccatacccatattc

SEQ ID NO: 63368 - DNA, 459 bp, Oryza sativa
  unsure (1)..(459): unsure at all n locations
cgcttcctcacttctaatgtcctcagactgttccacccgaatcacattactaatgtcctcagattgttccatctgaatcacattagttgaaggcggacttgcagatggagcttcctgcggagaaacagtgtccaaggatatttggtgatttgcgcagggagcttcctgcggagaaacagtgttcaaggatatctggtgatctgcacatggggcttcctgcagataagcaatgtgaaaggatttcagattatgaagtgtcataggttagtttgtaagaggccccgaaccacatcataaaatttatttgtcaaaacgagccaataaaattagaattagattaaccttgtgaagcaatgcagtttcgcacgggctcgaggcagactcaaatgggagttntctctgagacccagagcaggaacctagcgaaacattatatgttgaacttggacatcttccctt

SEQ ID NO: 63369 - DNA, 346 bp, Oryza sativa
tataagaatctacataagatgttcgagcaataccgataacgctaggttacctatgggctattggataaaacctatattaatctttccttttgaatacttttaaacatacgcgaattgtactgtcttggcggctgtccgatctatcctacccactcgtttaaatatatttgaagtatagattatatgttgttaatatctacagccgataaagtaattaggtctttattactatatgattcattgccgatccgaaccataccgcatcggcttgtcttaaaaatacgtcatcgcaattcggccatcgctatcgttatggattaactttgttctttgtgttttgtgggtg

SEQ ID NO: 63370 - DNA, 470 bp, Oryza sativa
  unsure (1)..(470): unsure at all n locations
aagatgacggtggagcgggtgttgcatanggtctatgcttcctacgagggttgtaatacgatcattataagggatactaggtgaaaccctgcgtgttgctacatgagtttactatgataacaacacgtaaaaataatgtgtaaaatagcttaaacaatataaacttacataaacataagtttgcataagttgatgtgatttaaatttaaatagtatgtagaatgatgattcaaatgtaaaagtaagatgatgtggctttatgagagaataaaataaggaagataagagcttaagaaattaagatgatatgtcttaatgagagaaaaaaagaagagagatagtttataccatagagattaatcatcgaaggccaaataattggtgtgatatgacttaataagagaaaagaanattaacatgaactaagtgagaataactatatagatatataggatattataaaaaatgat

SEQ ID NO: 63371 - DNA, 488 bp, Oryza sativa
agctttcatcttggagcctttggtgaatttctatcgtcctccatctatggccgattgaacctgtcgccgaaacacactgcactcattagtagagtgagaaagagaatcatgccacttacaatatgctcgacgttttaactcttcttgtgatggtatgacatggtctttaagtaatctaatttgtctctcttgccaaagataatcaaaaatcttatcacacttggccacatcataactatatttaacctcactgtgtcgatctttacgaggagtcggcattatgttagaacaaacaaaaggtttatttttgttagttcatgaccattcggcaacataaatatcatgatcaccctcctcctcactatcactagcatcagagtaatcaactacattaacattatgcttcttgtccgaaggtctagaaaattgttattattcctaaacacgcttttttgagccagatccctcttgatgagttgactaacatc

SEQ ID NO: 63372 - DNA, 433 bp, Oryza sativa
ttatttagattttccataattaaatagattgggtccacaggtcagtctcaagccaatatgcgaaaaggcccctattgtttcatgaaatcaacccgcagtcctgtgactgttctgtgtgtgaggtagttttttacaaactagtacctagagttttgattcttctcaacagaggtccttggattgagctgacacaaaactagccatggccgagctcgttctcgagctcgccggtggcaaacggcagtagatctcggcgtgaaacctatggagaaaatgtaaaggggtttaaggcgaggctatatgtggtattcttgcaagcattgttcatcggaattaatggcgacagctgtgcgagcggcggtggttctctggtgacggtgcatgtggagctagagcattgatctagatgtttagctacatgcctgtgcctcta

SEQ ID NO: 63373 - DNA, 516 bp, Oryza sativa
agcttaagatgatcttgttgttactgtggctacaaccacacagccccattctactatccatgatgtgtcttcaaagcttcagctaagaaaatatgtgttttaaagtcgaagcaaacctaacatagatccaccaattgacgaccttggacagttgtcataacttgttggcgaacatgcaatataatttgagcgttacttatagtattgtaaataaatttcttttagtaaacacttgatataactatacttgcctatggtctaaaacttttgtagatccaccgcaccatttggtccgattggctcttctgaataagatgatcagatcgcccatcataagcagaagttgccatctacttcctccgtatctcatattataagtcattttgatttttttttctaattaaacttctttaggtttaactaaatctatagaacaatttagcaacatacacaacacactgaattatgttcatttaatgtaaaataaatatattgtataatatttctaaaaatata

SEQ ID NO: 63374 - DNA, 454 bp, Oryza sativa
  unsure (1)..(454): unsure at all n locations
actcagcttttcagtgagccttatctcgttatacttaaattcttaatagaattttgggtggaatagcctttntctcgctcacgaattcttcactggcatccaacaaaaccgacgcgtcgcatccctgaaatttcatcgagacgatcaaaaccacttctcatttatatcaatgagtgaacactgaaaattgtgtttccttctagaaattttgtgttcttttagaacaaggaggacacttgaaaatgtgctaacctgaacaaagcagtcatggaacaggagcctgagaagagaagcagcaatcctctgctccttggcaatagccttctttatgacagagaccacaatctcatcagcttgtgggcatgtagccttatagtaatctggagaaagaactggctttggtgggctctgcacaactgggtgaagatcctcatggtgagcacggaaagcaaga

SEQ ID NO: 63375 - DNA, 376 bp, Oryza sativa
tctagaggtcacctgcacgcgtgctagcttagtatgaaagatgtttacagctcttatttattaggaacccactattgtatcagagactattcgtcgctcctttctactcctctccgtttcacaatgcgaggtattctagaattttctatatttatattgatgttagattccttaacatccatataaatgtaacaaatactataataacttacactgggaaacggaagtagtatcttcgaccaagacacaaccgtccgggaccttaactgttgtgaacttcacgcttcaagcaggtgttataaagataattgtctatgagagtaaccttcatcgggaacactatcagtgggcataaggtatttgagctaatcacgag

SEQ ID NO: 63376 - DNA, 430 bp, Oryza sativa
cgcttgtggcggcagtagcagagaggttatgatagcacttgtatccaaaaactcgaagatgatcatatgaggggtgcgtaccatatagtgcaaagaagggtgtgtgatgtttaagagttttagtggggtggcggtttataaggtgagtggctgtgtacaaagcctcaacccaaaaagaggcggggagactggcttgaaagagtagagagcgaacaatgttgttcagagaacggagcgtgcgctcggctttgccgttttgaggagaagtgtgagggcatgacatccgtatggagacgccattgcggaggaagaaatcacgtgcggcagagttgtcgaattcacgaccgttgtcacattggatagaacggatggtggtggaaaagtgtgtttttatataagcacaaaaacgtaacataatgggaaatgtgtc

SEQ ID NO: 63377 - DNA, 454 bp, Oryza sativa
  unsure (1)..(454): unsure at all n locations
agcttccagtccccaagaagttagtctctttaaaattatccgtggctcggacaatgtcatggtaagagatcaacctgttgttgagcacatctttcatatcaggagaaatgattctatcttcttgcttggctttcttcctcatcatcatgtacatgcatgtggatataactcatctcgtacctcccaactcatcatgtacatgcatgtggatataactcatatctgaaccggttgtttggtaggatccctgactcctttggacagtttctaatgacaacatatctgaacctatcacgcaactcatctcgttggtatgtgtggagatgaattgctacgtcgcgcaaaattgtggggctggatttcatgccaagcatctcagcaccggcggagaagttgtcacccatgtcaagatgctcttgtttatcatangctttcctttgcatcgacatactat

SEQ ID NO: 63378 - DNA, 453 bp, Oryza sativa
  unsure (1)..(453): unsure at all n locations
tgatgctngacttgacttctcaacagacacatagctgtttgtttatcctccacggtttaacaactatgagaattggagggacagggaggagaattttgaaaaactgtttcgcaaagaaaagccgaagggcgaggggagacatttttcaaatagggttttcagaaagcttgtccttatggtttgaccgtttggctcaacctatagtcgagttggctctgataccactttgtcacgtccagaaatttaacccaaatttccagactattttgcgtattaaatccctgtccaggaccagccagggtacacaaaacgacaagtaatatacagttcccaacgtaaataaaacgtaaatacttacagaagaggcacttagtcctcacaccgaatgagaacggcagcatcggataaaggcgatcctagcggtgctntagctccactccacatgcataactc

SEQ ID NO: 63379 - DNA, 450 bp, Oryza sativa
  unsure (1)..(450): unsure at all n locations
agcttctgcttcatagcacttccgattcttcatttacgcattcagcaagcagatgctaattaaccaccatgaagtcaaagcttacactaatacgtgttctctctaaagaatggaaccattccattcaaagtcacatttcctgagtttttgagcgatgcgatgtttacaaaatctttctacaaatgaacttcttataaacatgttttaaatttcttttctactttataataatagtaaattcatttgtttgtaccctcaaatagttattgcaaaatcatcatttagatattccttggaaaaaaaaagttatttggagccataccattgcaaatttaccgatttgaaaaaaatactactattagtgatatcagtgtgtgccatataaattntgcaaaatcagaaccatacaactccatcacaatttctatcaataccctcgtcagcttcaac

SEQ ID NO: 63380 - DNA, 427 bp, Oryza sativa
  unsure (1)..(427): unsure at all n locations
gatggaggagtgctgactttcctttcctcgtcggctcgtcaccaaactagctatagctatagcagtagcttggcttaaatgcaactggagaatgttggaagctttgcaagaatgaaaaaaatggagtagctcaacgtatgcatgtgtactactgtagtgtataggtatagcaccatctangagtacacactgtagctagtagcagcatcattagatcgtcagcagctgagtgttcttttctttgtttttttttaagaatggccgacttgtcacctttgaagtcctcctagctatagttccaactttccaagtcaatagtactttttgtcattacatacggtgtagtctaaagaccaaaggatatacgagtataataaccagacttaattagtggcaagctatcaataggccaaatagtggacagttc

SEQ ID NO: 63381 - DNA, 365 bp, Oryza sativa
  unsure (1)..(365): unsure at all n locations
ttttttaaaaaatagatccctgtcttgcggtatgcttgtgcatggaaggtttatacctagtgttcctttttgcacatataaatccctatgttgaggtatgttcctgcagggaaaggtttatgtcttgtgttcctttttgcggatatgaatcccgatgttgatttgtaacagtaaggcttgctctctccgtttatttttccaaagaatattatgaaatgcaatcatatttacatggaatcactggccaactaatcattnntatttctcctttctggggcaatgagctttgctaactgttataatgccatgctcctctacttgtcttgtgttaggtccaatggctagtcaagttcaagcatacaata

SEQ ID NO: 63382 - DNA, 440 bp, Oryza sativa
atggtacatcgattcccttttagctgacaagctcttagtttctttggtatgatttaactatccatctaaagctattatttactgaaagctcgtgcaaggaaggacactaaaaaaattgaccacagtgtgaaggaaagggcagcgcggcttacccattttgcgagagtatgatttttcaatatgtttagataattgaaccatccatgtgctttactttttgttcctttctacctctatgtactttagcctgttacctctgtatgcatattcagatattaaaggaacaggctcagtcagacttgaagaaagcagcatatcagcattggagcgatggtgctttggaggtctgtgctagttctctgtccctcacttcattttgcttgaactagttgcaaatactgagcgatatatagcttgccaatagttctggagtaccgaag

SEQ ID NO: 63383 - DNA, 528 bp, Oryza sativa
  unsure (1)..(528): unsure at all n locations
agcttgcatgcacagaggccacaccaccatgctacaatatagttggcgttgacctcatgccacatcgacaaatagatcagcttcggatccacgtggccacgggttcagcgccaacggatgtggcgttgaccctctggacctcagcgccattgacattggtgttgagctcatgatctatttttggttgaagttttttgcgagggttagtttcaaaataagtttttcaaaaggactatttgtcaaaaaaaaacggaagtttatatacacgtatgtaaagtttgtatatgcgtatgcaaagtttatatacgtgtantatttttatacgtcaatttgttgatacataaaaaaattatatatatgtatgtatatantttacatacatacataganaatttatattgatacataaaaatacaaagtttctatgtgtatatataaaatatatacatacgtatatatacatgtagtagtactgttatagtaatagactaatagtagtagtgctagtagactagtagtagtactaat

SEQ ID NO: 63384 - DNA, 469 bp, Oryza sativa
  unsure (1)..(469): unsure at all n locations
cgcattatgagagtatcagaaggtaccttaanaataggttctgctttgtcatggaaaactttgcatgatctaccatgcccagaccgagggttcagtataacaagtatcctcggtggagttctacatttgatgggtgggtggtcaaataaagcaccactgaggggaccatcaaggtcttgctcggtactggatgttggagggagaggtagcatgttaacatatatgttttgttcggcaaagcatgttacccatgaaatggcctcctctacagtatgggctataaaccggaggtccttccgtactctgtgtgtctttccaaacaaatacttcttataaaggtatgcatgcacaatgaaatgttggacaccagaactgtaagatacctgccaacatataaacaaatcatccaagatagatggtcagcccaagtggaccaaatagcaatagaattatagtagtgtcttggtct

SEQ ID NO: 63385 - DNA, 432 bp, Oryza sativa
  unsure (1)..(432): unsure at all n locations
cagcttgacgaccaactggcccgaacactcttatctgtatatgttttgctcgnagaaccagactaacttagaatgtgtgctctctctttggttgccagtgaagacgcaaggcagctgctgagtgattgggtggcggcacacctgcgccacaaagatgtcgctctggaatatggttctcggctgcagtcctctggtgggaggatattgctccagagcttgtcaggtgctgtgtgcaaatgagggttgaattttcgttaatatgtgtgtcttattaatcggatggtggaatgctgttaattttgtttctataatgcaagaactgagctctaccgggagagaatggtaaaagcacttgctcatgagctacgcgtgccactgttggttttggacagcagtgttctagctccatatgtaagaattcctctcattatg

SEQ ID NO: 63386 - DNA, 435 bp, Oryza sativa
agtcactgagaatctctatctgcttctgacaatgctctttcgctgcgcttacaagaagagcacatccaccaactttaactttaagcatgttggacccaatgactcgccgtgcaactgatgatatgcagcctgggatttctgaaaccaaaccacccacaatatcatgttgatcagaacagagcctcgataaaacttctatggccttgtcttgcaatgaaggtgctgcatccgctacacatgacacaagaggaagtatggtgtggggattttctgcaagaactgtccatggagctttggtatgcccacttgacacctttggttttgataatagcaccagcgcatcaacaacttctgatgttgcagcagcttcaccattagcagcttccaaaagcccagctagagcaaggacagcacctgatcggttaatagtatctg

SEQ ID NO: 63387 - DNA, 468 bp, Oryza sativa
  unsure (1)..(468): unsure at all n locations
attgaagcttttatgtgggcttaacaaaaaaattcacgacatgcttgaatgtcaaaaatatacatctctttctcatttggtacaacttgcttgccatgctgaaagtaaatagaggaggatatgaaaaaaaaacacgctatgtctttgtctccaattactaactatttgcaggaagtgccgtatcacgaaaaggaggagagagatatgaaagagccaccaattccactgttcacacttcaagtcgagacacctccatcatctaaagaggacatccaaggtanagtaaatggtactgaaattaatcaaagtgagtgcattgttaacgaagtaaattngtccactcttcatgcaaaagtagagcaaccgttagtggaccatatgctggaattctctgtcacaattgattactcgctgtcctggtgataagaagagttgtggataatgctcacttattcatgcacaactatg

SEQ ID NO: 63388 - DNA, 474 bp, Oryza sativa
tgtaacctatggcctatgctagttataaagcagatgtgatccttcagaagagaaaagaagccagtggaaggccgcctttcctatgaagaatgtggcctcctctctggcgcccattagcctagctagagagaccttaaaacattaagaagtagaggaaaagtaaagcttggcctatctatccagcacttatgctcaattctagctattagcttttcagttgcacgtaaaacgatataagtcattagcacattattaattgagtatgaattattacaaacttgaaaaatatgtttatttgattttaaaaaagcttaatataagttttttttaaaaaaaacactcaccattcaatagtttagaaattatgctaacgaaaaagagaaaactacaactgctaaacaaggaaacgaagaaacgatcagggccatagccatatcagctaatcagcccatgaagctatcccatcgagcccat

SEQ ID NO: 63389 - DNA, 231 bp, Oryza sativa
ctgagctgagctaacctctcgctgcaggttaacctgaatcttagccaagagggttaatcttctgcttgctgcttcagctgtaactgcaaggagaacaaaacaaaaatgctcaaagtgttttcttgcttctgctactacttctgcttttattctcctcgatcactgctactgccttgctcgatggtgcaatggttttatacttttttataggcttttttttgggggaggaag

SEQ ID NO: 63390 - DNA, 446 bp, Oryza sativa
tgcatgttaacttgagatgaaagtccaactcctaattgctgttcatgattttctaaaaaaaaatatgcaaaagaattctcgcgttaaatttcatcctagctaaacagtataataataataagattaaaatagtattcacccattgcaacgcacggatattttttctatttttttaaaaaactgaaactggataccgggtaatatattatctatatgtatcctaatccatgttatttcctttgaatcggacttaggaatgcatatttatttgtgtctctaattcatagatataaaatataaggatgcaattaaagtgctaaaagagatacaacaagggggaaaaatatagaatattacatgtgagcttgtaaatagtgttaatcaatatttctactttgagggggactataatagatttcatatatatttcgtatatataggacata

SEQ ID NO: 63391 - DNA, 472 bp, Oryza sativa
cggatcctctgagtcacctgctgcatgccagcttgtcttactggaagttagggggatgtattattcataatgagtacaacctccattctcatcgagtcacaccgtccaatgcatgattgatgcaacggggtacacagggtaataatatatgggttaaagttctgccgaaaacgggatttaaaagtcacttagttgtccaaagccatcttataaagacgatcctatagctacacaatattattaatcaaagccgtaaaccctcactaacctgccttaacccaacgtctacgatgattaacaccgaactggcaaccctaccctgagtcccagtttgtcccaagccaacctcatccaaccattacacattttagttgttaagcaaattttaagaattaacacactaacttgtgtacattgctaagcttgctcataaccgagggcgcggctatttcgagtaggtcatacctctgaa

SEQ ID NO: 63392 - DNA, 442 bp, Oryza sativa
  unsure (1)..(442): unsure at all n locations
tgagatgaattataagaggctctattgtactatatggtatactagaataggaagagagtagagtagaaggagtcggaagaagtccggagttgtcggtaatattctcctatttcttttattttatttattactctgaagtcaatataatattcttcttgagtaatttggatttatcttgtgagaattatctcttggttagttcctaagtagcatacgggattattgttcactataatcaactagaatatattgattgctttggtgagttataaacactaaggtagatattaattgcttagacatggtgtttaggtagttgttatccagtaattgctgcgtatctcacagtacgttngaggtgggtgtagaggtggtgacagccctcgagatcacttaagtcctccctgtccgggtacgtagtatagcgacattngngaacagc

SEQ ID NO: 63393 - DNA, 449 bp, Oryza sativa
  unsure (1)..(449): unsure at all n locations
agctntgataacaatgacatgtattcgctgtgaaagtcggaactgccatgtcacttttgcggaacaacaacaacggtgacccatgtttgggctccgtcaatggcctttantgaaagggttggtgtagtgttgggttttgttgcacatgctatgggtttgtcttgccgactacagtggtgttcgttgttgaggaacttggtgatactttcttgttgattttttttattcttgtaagttgtaacccatctgttttctttaaagtaaagagagaccttatattaatgattaaacatagggctatattctttaaagtcaagaattatctcaagagcacataacctccactctgcaccttaacacattgccagcttaagaagaacataagctaccctanttgcatctcttcttatcttgtgcacttgcacactctgcatacattggcctttgtt

SEQ ID NO: 63394 - DNA, 460 bp, Oryza sativa
  unsure (1)..(460): unsure at all n locations
tcagccacatcacggacatctactatgtgcaacaacatgttcctcattacgtttggacctcctgaaatgaaatttgtcgcagtttgaacagaggcaaggaaaatgtttcagtctgaagtctgaacttgctgtcaaaaggatgaattgtataaaataaagtggtgcacaaaaacagaaaacttcccaattaagggcatgaaacaattttcatctggtaagtggtaatcctcagagtaaacagtaacaaatggagagataatgtggaaaccttttgttatatagatgaggagttcattgctggtattgacagttggttgcaactgtggaccaaaaactaaacaagggcagactgtaacaacgtttagaccttttttctctgcatattccanagccatcttttcagcgataaccttggaagcactataccactcctgaaacacagaaattgtaaaatgaaaat

SEQ ID NO: 63395 - DNA, 429 bp, Oryza sativa
agcttcagtcaaacctacatctaattttattggcagaactttttttttttaacaaaagaagagggtgtgggtttgtgcataaatagcattgaaaggtccgcctgattctttaagaacaagaagcaattgcatcacaaaatacttcctctgtcccagaatgctggacgttcaaagatggttgagccaaattagttgtgactgaaaatggccattttgcccctaatttatgagattagagctaatcatgtggatgcttgagtagtactagtacactgccacatctgctatttcatggcttgagtagttctagtacactgccacatatgctactttatggattaaactaatgcaaccagtccaatcaattcaaaacttttcactttctttatggatagctttctaagagtctgtaactgtgtgctgttgggg

SEQ ID NO: 63396 - DNA, 438 bp, Oryza sativa
  unsure (1)..(438): unsure at all n locations
ngatctgatcagcatattcattttccagatctaggtgtctttggtgagaagcatactgtgttaagatgaaaggagtatgtgtgggggatgcgacttgcatatatgtcatggagaagaacataaaagagatctggatgtcatatagctgtaaggtttgtaagattcttacctgcagaagacaagtttgctctaggatttgtgctctcttccatctgaatggattttgcgatctgcttttctgatgagaaatccttggttgttgagattgtaggatttcccatggtgtttttttcttgagcagattccaattccttttgtctagatttctcagcgatctccatggttggggggagagaacgagctatatgagcacttgtcacgtggtttgctctgatctttttctgaagtgcttaattgctgttgcttttacttgacatg

SEQ ID NO: 63397 - DNA, 398 bp, Oryza sativa
  unsure (1)..(398): unsure at all n locations
taccgganagcagctgtgccagatgggtgttgagcgcttcgacattttcggaaatcgacatttcattgtccgtgagaatcaccagcatatcaagacggatatcgcccgcgtgattcatcgcttcaaacgccatgcctgcggtaatcgcgccatcgccaatgacacagacggtgcggcgatttttgccttctttttcggcagcaaccgcaataccaattccggcactgatggaggttgatgaatgcccgacgcttaatacgtcatattcgctttcgccgcgccacgggaacgggtgcagaccgcctttctgacggatggtgccgattttgtcgcggcgtccggtcaaaaatttatgcggataagcctgatgccccacatcccatatcaattggtcaaac

SEQ ID NO: 63398 - DNA, 518 bp, Oryza sativa
  unsure (1)..(518): unsure at all n locations
gcttttcgataacctcgcattggcagtttccgctccatgaacttaaatccttatgcactctaggcgtccatgtttctagcagtgagaggagttctgacgctcccgggaaagagaagtctcacacatattaaattatggttcaagttaagttctctctcacacactcatggcagtcctaccaatggcgacaccgatatagggcacgcctctcggccctacctcaacggttgtcccatcgtagcgcacctgcctcactcaggggtgaaccatctatgcagggatactgcctccgctcggctatctaatccgctaggtctatacccattcgagaagtacggttgtacggaggtcgcttcatgcttaacttcatggctcggtccttaattgaccggagacggtactagccttttccaaataccacccaaatcctgcgtccgccccagtcgannaacaatggtgtaatttatttcttctctcacataatatatcatcaacgtcatagcaatggggcactcatg

SEQ ID NO: 63399 - DNA, 437 bp, Oryza sativa
  unsure (1)..(437): unsure at all n locations
taagcttnccgtatacatagagtacattcatatgcacagaactggtattcaaactagtttttttagataatggattcaaactagtatacatagagtacatgtacatacagcataactgctgttggtacacacaacaggagtgcccgaatggattggctgtgcacttgtttagcagcacttctgattttctttttgattgcaacacttctaacaggatgactaagatcctgaaaaaaaaaacacatacaaaagggcatgtggataaataattggagtgaactcttttgttttgacaccaccaaggtgtaaccacaagacaattcaataagctcgtagacaactgctagtgaaacaacaaactgcacacaattctttagacgacactgaactgcagattttgtaccacgcaaggatagggatgaagattgaagaaactg

SEQ ID NO: 63400 - DNA, 512 bp, Oryza sativa
agcttgctatgtggaaaaacacaacagtgttccaagaactataaaaccacaagtggttacggccactccgaaagatgaactcgacgaccgaagttcgagaatttatcctgctctagcacttgatacaacaggtacaactggatgaagacagggaggacgatctaatgtggaaatggaatgcgaatggaatctactcagccaactcggcctacaaaattcaattcactggaagcattcaagacaatcgtgctaacttcatttggtgagcaaaaacagaaaataaatgcaagttctttggatggctcatggtccaaaagaaaattctgacgtctgacaaactccaaatccgaggttgggacaacagtccaacttgctccctctgtgggacagaaccagaaacagcgacacatctcttcatggatagccccttcgcgaaacaggtatagacaaacattttggtgaaactaggactcaacatgcctaggtcttctttcttaatggaacatgatgga

SEQ ID NO: 63401 - DNA, 466 bp, Oryza sativa
  unsure (1)..(466): unsure at all n locations
ctaacttacactacatcgatttaattggtggctctgcagtggaacgtaattatgctcgctgtcacttcatgaatatagatgtacatgtgagtgtgccacatgataattcactatattaaaagaagaactctggaagaagccttttctggagaagtagatcagaatcatgttcatcttgactctgaatttggttgcttacccctaaagcatgccatacatctttcatagctgcaaccaggcccatgctctacattttcgacgaaaaccgcaaaatttttaaggtttcgatatgggacgaaagtagattccgattacaaaattccaattgatnttcaaaagaattaaatttaaaagggtacaatttcaccgaaatatgtcaaatttgactaatagggttataacgcggggtttagaatctgaaccctgaccgtgccaattgatactacttcaatggacagttggacac

SEQ ID NO: 63402 - DNA, 190 bp, Oryza sativa
actggttttgataagagcgcttactatgctgcatagctaaacacttcgtgcaggttatggttgtggaccctccgtttttaacaggaatcatcgtgaaacagtacatttccctggacaaatatttggaccctcaattataactgagtacctagggacatacaccaagttagtgcgattatacgtatagccc

SEQ ID NO: 63403 - DNA, 435 bp, Oryza sativa
  unsure (1)..(435): unsure at all n locations
acaaattttgtaattttgaataactggtttctaaagaaatgaaagaaaattataaaatcaacatgctaaatttattttattgcagcaagattaaataaaacagtattataaaacttttgctggtaaatgagccattagtacaagaatagatgtatagtactaataacactggaataaatttttaatgagaaccattaaaagagattatgaagtgcatgtgccattagtttggtttaattaaaagagaaagggaggagaacagttctacttttccaatatttttagagggcttctatggataaccatttggcataacctatggtcaaagaggctctgataccaacttgtcacgcccggaatttctatccaaaattccaaacgcttacatgtgtgtgaaccctcgtccaggaatcagccgangcacacaataacaaa

SEQ ID NO: 63404 - DNA, 471 bp, Oryza sativa
agctttcttccggagcgtcaagccgcgagtcgctgctccacagaaaaaactctaccaatagagaaaccagccgtaccagtgccaccgaccttcaagactatggctaagaagactctccgcgagttcgctactccctctgctaacaatgtggccattgggccgtagttcaacatgggagacgtggatttcaacttgaagtccagcctcatcacgatggcgcaggctagcccgttctgtggcaagcctaatgaggatgccaatgctcatctgcaacagttcctggagatttatagcacgtacactatcaagggcatcagtcccgacgccgtcaagctgcggctgtttccgttctccctcctcgggagagcaaagaagtggttctacgccaaccgtgctgctgtcaatacctaagacaaatgctctacagcattcctctcgaaattttcccgatgggcaaacaaatgccttcgt

SEQ ID NO: 63405 - DNA, 462 bp, Oryza sativa
  unsure (1)..(462): unsure at all n locations
tatctcgattgagtcggcttcaaccactcggacgagatcccatctactcttacaccaccagatcaagatgatggggcctacccgccaatcctgatgaaactccccgacgatttggctgccgtcttcactacaagggcgtcttctccccgtaggcctatgcggaagtcggcttcaacaccgatcctgcctagctccaaagaagtcggcgtcatactccagccactcggcacaatttcgacggatcaactggaaggctatttcagctcccccggcgtcgactcacgaccaacagagatcgtggagtacggcgaattcngctaccgctacgacaacagcaacctcgacgacttcgacgagagctttgaagacaattacacccctctctacttcggcatcttcatgggcgacaacgagacgaaagaaaacgccaagcccgagaagcagaagcacgacacgtacagc

SEQ ID NO: 63406 - DNA, 486 bp, Oryza sativa
  unsure (1)..(486): unsure at all n locations
agctnttccaaaattcatgatttagccttacaccagcacgatacgtgttactccatcctaagccatacccattatatgacctagaaccgttaagtggcgggcccatgccttaaacttaacgccgtggtggcggacacaacgggaacccacccacgtggcacaataccattgtattggacagacttagtcacctaaactaccacaccggggtaaataggaagttcctctgagttatccgaactcacacacaccggcctaccagaatgtaaggctaaaccataaatagtttactaagcttgggctatccaatactagcacatgtggttgtactgtatacgaaatgaactgacattgagtgaagtccttaagtcgngttgggcgcactctccccctatcggtacacaagtaatcaccatatgtgcaccacttgaggcccaaacctaanatccatggtttccattattntatttattaaaattacaagta

SEQ ID NO: 63407 - DNA, 444 bp, Oryza sativa
gtgcgtgagtgtactgaaacgttaagtccttatatatgggtaggtatgacagttacagaactcgaatagtcacttttgccctccaaccatcattcaggagctcatctagaccgtccacgaccaaccctcagatcaaacggctgctagagtggttccgccaaaccatgggttcggccgaacccattgctggcccaataggcccaagccttggcctattgctgcctctctacctcctttgtccaattcttcgagtggaaggcctgattgagtatgtttcagcatagtttctgggctactccttgtatggacaggatatctccttcacttacatctatttttggtccaactctggcggtatattacctgcatccaaatatatgcgaacacttgtggaacatgtcagattaaaccctatactatgtggatggttatttcctaattatg

SEQ ID NO: 63408 - DNA, 434 bp, Oryza sativa
gcttgatagaaagcattgtgcccctgattgaagtgatcttacttgtgtgatttgttcatccggagctagggaaactctgcaacatttgttcttccattgcactttcagttcgcaatgctaagcgcaatttggtttagtttgggacttatatttattctttgaagatatgttacaacatgcaagaggttcttattgatcatctcattttgtggagaagattttatatgcggcttggaatatttggaagcagcgaagtaattggctatatttttgataatgtgccatcctcagtctcctcttggatgacattctttaagaatgatctgtcgcttcttgttttttttttaaatgcagatgagagatcaacatttattttctggttaaaccagttgtaaactctttattttattttcttaatatataattttactttg

SEQ ID NO: 63409 - DNA, 436 bp, Oryza sativa
  unsure (1)..(436): unsure at all n locations
ccggcggcaccctcggctttgtctcttgttgccggaagagccctagcgccgtgcaaccttgggccgccgtcgccgccgtcgcttcagtcgtgcgccggcatcgctccagccgtcgccgtcgctcgggaagaccgtcgtcgtggtcgccaagtcgtcgccgtcctcgtccggcccttcgccgtcgccgaagaccgccggagcaccgtcgccgtcgtcaacccgaagtttgccgccgcttccttctcgtcgccgtcgccgtccgttggtcttccgccgtcgctatggtcgccggtgagttcgccgtgccgtccgctacccgttggtgttctccgtttgtgccggagcgccgccgttcgccggcgagcgtgcgccgtncgagccgttcgagccgccgagccgtcgccgnctgtggtgacgtcatcgccgacgtcatcgt

SEQ ID NO: 63410 - DNA, 288 bp, Oryza sativa
tatggttttcctacgctctatccgaacgcctgtttatataggattcctatggtcttcaattctctgttttacacgtgcatttctatcatattcctaagaattttctattcctgtggtttttcaatcctccattccgaataagcccttaaaataagttgttggattgaaatatgcctatcaaaagtaaaattttcacatttggaaatataactattaaaagtagatggagggagtattaactaaggaacaaattatcttttttccccttatttatgaacgtgtggcatg

SEQ ID NO: 63411 - DNA, 452 bp, Oryza sativa
tcgacaggcgggcgaagttgggtctcgtcgagactcttttcactaaagacgcgaccgacatcgacgagcctcttcccggaggtctttttaattgaaccccccttcgccaccttggccgcagcgatcgcgaccagcgccttcgcccccttcacattcttttggcggagaggggagcagttcgactccaccccagtctcgacaggctcggggctcggtgttggagtgtagccgggcgtctcggtgcgattatcggcggcttcgccagcggccttttcgcccacagctttcgtcttccccacaatccccctcctcctcttcgtcgtcatcttcgatggtctcctcgacatcgggggcagagtcgggggccctacgcttatgaggggtgctttttacctgccagcgcatccgcttgcgcgaaggccctgcatcgtcatccgtcctgtgagggatcg

SEQ ID NO: 63412 - DNA, 357 bp, Oryza sativa
  unsure (1)..(357): unsure at all n locations
agcttatgcttctctgagaagttctcanttgtctctttcagagtagccaaatcaaagagcgcgcattttcctcttgccattttcttcaatactggtgttgtgttttttttttaatgcaatacatatcaataaatgtaaaataagaaaacagttcctgaacaaacatcaagctactcatcagctacttacagttgtctttctttgcagccttctttctcttgaaacgaatgaaagcataagctgacagtatcaacatcaagacaacgaagcaagcgacgcctgcagagatccctgcaactctccttctcctcgctgcatacaacaaacagacattcatagaagttgaattgatatgtg

SEQ ID NO: 63413 - DNA, 421 bp, Oryza sativa
  unsure (1)..(421): unsure at all n locations
tgaacagcataacatgatcacacaagctacttaagcatatgaaagctatacaaaagatcaaactagcataagagtgatacatgcatagcatagtgatgaccaagagataacaagcaaagctcaattgaagagtgtataatacaatgcataaagtaaacatgatgcaatatgttacaaatgcatgtaaaagaaaaacaactccccctcaaatcaagccataggggtggatcacccctaactcactccgcaagaactcataatgagagcgatcaagtggttttgtaaaaatgtctgccaattgattttcagattcaacaaactctagcacaatggtacctttctcaacattgtctcggagaaagtggtactgtatctcaatgtgcttggtcctagagtggtgaactggaattnttgcatattg

SEQ ID NO: 63414 - DNA, 239 bp, Oryza sativa
gcttccttcagaggaacaagtaggcatctttcgtccatacgttactaaaagacagctcaagtagaaatacttaccttacggaatattgacactgctgccctgcaaacttgggatactcgggatagtgaaatattgctccccaaaagattcttactcatggaaaaatgatatacacagatagtaatacaattacgacataagcaatacaataagtacatgtggcgtaagatattcaacat

SEQ ID NO: 63415 - DNA, 363 bp, Oryza sativa
  unsure (1)..(363): unsure at all n locations
ccgttgatccctctctcgaacacgtggctttggctcatctcttagatcttcattacccaggatgaaacgttntctccctcctttgcatcttcagttaaccgaaactctgaactttctgaaatttccttcattcttcttacgagtctgacaagtggttccttgttgaagaagaaaaagtgcaggaggaggaagcagctgcagcagccaaggaagggggagaggatggaactgctgcttcgaagcaaaagggggaggaagccccgtctccaactccaaggtcggcatggctgctggcttgtttgacgaggttgcaacttgtgggctgccccaagctgaaggctctcccaccacagcttggacagc

SEQ ID NO: 63416 - DNA, 463 bp, Oryza sativa
  unsure (1)..(463): unsure at all n locations
atgttcggcgcacgactaatactggaacttatgagcaataattgctctatctatcactatctactgtagacatatcttctggaacttttttcaaatccaaaagtccagtatcttcctacaaattagtgaattaagaggagctctttgtgccgaaaaagaaagagcagggcaatatttcaaacttgcattcgaactgcgaaatatttatacaaaggaggagagatcaagataatgcagcanggttggttatctaattggctagtcaaacatgaggtggttcatagatctttgggcttcgatcatcgaggaatagagactttgcatataaaagcagaggattgggattccattgctgtcattctatatgtatatggctacaattatttacgttcccaatgtgcttatgacgttgcacccggtggatctttagctagcgtgtatcatcttacgagaatacagtatg

SEQ ID NO: 63417 - DNA, 461 bp, Oryza sativa
  unsure (1)..(461): unsure at all n locations
acatgtttagttgtgcatacaacatctgcgtaagaaggaggctcagttggatgctaagtgtaccaattcgctccctttttgtaaaatagacgccgacccattggagaaagacgctgcccgtatattcacagcagtcgtgttcaagaatgttcgtgcacagatacggctaattgctggacttgaagtcataagtgggactaatcaagatggttcgtcactgtatgttgttggtttgaaggacgataatgaggtgtgagatgaagtgagagttacttttaaaggctatgcgttggaaggtgtggaatgtcactgccggaagatggagtgcgaagacatcccttgctcagacattntttgtgtactcaaggtccttggttttgacaccatccctcgttgttgtgttgtggatagggtggacatgggagcaaaggctggcatttatgtcagacaagaataccgat

SEQ ID NO: 63418 - DNA, 356 bp, Oryza sativa
gcaaaactttcatatatgatgagcagtatctgatatctgtataatacgtcgagacattatctcgtattttagagcatttattaacatgtagatcttctcttgtccattttgatctccccgagctgaagactctgtacggcataacactgctcgtcgctagacatatcccccatgcatcgggagtcggcctatgcattttccatacagtgcatatgagtgacatgagttcatcactaacggaactaagattgacggactagaaactactactactggacttctgcaccgattcagagcacaacatcactttgtctcatctctatgctgttgatctattccgaatgatacttagcacc

SEQ ID NO: 63419 - DNA, 449 bp, Oryza sativa
  unsure (1)..(449): unsure at all n locations
cttcatattagctgtcaggttntttgtgggatctttggaggctttatttgncgctgctgacgccgggctttctggcttgataaccccaaccaacaatgttcttaattgcactttgccagaatctacccacaggcgcgcctgctgccagaactgtttacaatatgggcagaacggatcggcgaagacgtataccatgaccggcgcatcttttttaccgtcgaggagccagtgggattgttccatccgttgccacatttcgcgtccggctggtgcgtaaatctctttctcgataagtgtgttactcaggttttcacctttctcgctgacatgtaaccagagatagcgtgcttaccatctggagtcaagtagatggtgacgcccatattctgatactttccgagataacctttcattcctccgagggcatcgaatgttttgatgattgtaat

SEQ ID NO: 63420 - DNA, 476 bp, Oryza sativa
  unsure (1)..(476): unsure at all n locations
ctaacctcgcgacgtcattaatcgatgagtacgccctgctgggcttgttgcgccatgctgactgaagtcaatctgtcaccgaaaccaggcctcgtggatcgcattaactgcggtgcgcacaaagatatggcgctggaagatatccaccgcagcgcgctggcgattcanggctggctaccccgtttcattgaatttggtgcctgtagtgcggaaatggcaccagaagcggtactccacggattacgcccaattggtatggcttgcgaaagtgatatgttccgcgccactgcgggcgtaaacacgcataaaggcagcattttttctttatggctgctatgtgcggcaattggcctgttgcttcaactcaaccaaccggtaacgccaacaaccgtttgttctactgcggcaagtttctgccgtggcctgaccgatcgcgaactgcgtaccaataattcacaactgacggcaggtcaacg

SEQ ID NO: 63421 - DNA, 430 bp, Oryza sativa
agcttaaacctctacctgaaggcctacgatatgctttctttcacactaacaaagaagcccctgtcatcataagtgacaaggtttctaaagacgagactcaacgtcttctgtctgtgttagaaaagcatcgggttgttcttggctattcccttcaagatctcatagggattaaccccgtgctttgcactcatcgtatccctattgaccccgagagtacccccttcaagacggctcaataatgcgatgcgtgaagttgtaatgaaagaggtcctgaaactcctatatgccgaggatatttatcctgtaccatacactgagtgggctagcccaatccacgttgtgccatagaagagaagaatgaccgtcgctcgcaatgctcaaaatgaacttattccacaacgaatctgttccggatggaggatgtgcatat

SEQ ID NO: 63422 - DNA, 434 bp, Oryza sativa
ttaatccagtgctaatatccatgttttaaatccttttcatcaccattgtggatatattatttatttgtagcttcacgaaaaaagtgtggactccaggattaaattaaatcttaaaaagatatacgctattccaatttcagattatgccttttccatgatttgatatgtttccctttttccagtctaatagtggaaccctttccttgtgggaattccatgaaagatattggtctccagattttaagattggtagatcctttcgtggctgccacttcaactgcaggtgtgtgcatagtttagcaatatgaccactttagattaatattgtggtcaaggaaaatatagaggcgttttgacaaatgttagtggttctggaatgttcacacttgctatctacttttttactttcaataaggcaactatagaccatattc

SEQ ID NO: 63423 - DNA, 427 bp, Oryza sativa
agctttccagcccgtagttagcaatgatttgaccgacaccggcatcgacaaacagacccgcagccgcagaaagcacaaaatacccatgcaccacccgctcaccgaaaatagattcggcagcagcaatcttatccatatgtgcatagaaatgatcgccgctgaggcaagcaaagttaacaatatcggcctctgtcattgtgcggcggggagtcaacaggctgtcgcctggttgtagctcctcaaaatatttgcggaacggatgaatacgatcttcttcgactttcgcaccgcgcacccactgtttactgatagcggcaagcatcgtcggactaccctgaacagcggttcgctgcatgtaatgtttcaccgctcgtaaaccgcctaattcttcaccgcctcctgcgcgaccaggcccaccatgtaccag

SEQ ID NO: 63424 - DNA, 458 bp, Oryza sativa
  unsure (1)..(458): unsure at all n locations
ntgtattggttatcattgtanggtactcgcaggttgatatgctcaaacacgctccagaatcatggcgatgccctgaccgacaccgatgcacatggtgcacaatgcgtaacgaccgttacgccgatgcagctcatggctggcagccagtgccaggcgggcaccactcattcccaacggatggcctaaggcgatagcgcctccgttggggttaacatgtggggcatcatcaggcagccccaattcgcgtagtacacccaacgcctgngccgcgaacgcttcgttcagttcaatcacgtccatatcgtgaatactcagccctgcgcgttccagcacccggcgagttgcaggcaccggaccaagccccatcaagcgcggttccaccccggcggttgccatggctacgatacgcgcccgcggtgtcagtccttgcgctgctgccatctgttcactggcaataa

SEQ ID NO: 63425 - DNA, 481 bp, Oryza sativa
  unsure (1)..(481): unsure at all n locations
agctagcagntagtgaagtaagccgccatttcttgttggcgggtgacatcatctctcagctccttcctcttaagttccatcctcaggccaagaacatactccctcacaatctcgatcaactctttcacttcatccacttccctcctcgagtctaccacgataagagggatggtatgcaagatgctaaggaactgcctcagggcttctgggaacttaccatctgtggtggccttataggcagccttgagtctgtcttccatttgtgggaaggtgaaaacaagtgcaggagggcctctcacgttaggacttgcagactcgctccaacctttctcaacagcgaatggtattatggnggcagttgcaagtgcacgaagatatgagtggctgcccatgtgcagatcaacaaacaggggcttgaggggagcaaagttttttatgcccaactggcggctaagcaacctcattgcagtgtcaaagttcc

SEQ ID NO: 63426 - DNA, 458 bp, Oryza sativa
  unsure (1)..(458): unsure at all n locations
tggcatgcgccaccgtgagcacatcgccgcctacggcgtctgttacgtgcgccgcctcaccggccgncacgagaccgccgacatcaacaacttcgtctgggtaggacaagatcgctcgtcacactcatctctagtgaaaaattttagtcttaataggtaccaaaaaaaaaaaattgagccccactacgttactctctacagttagtagaaaataatctgaactattaatctcatttgatcgaagggtttagatctatttgtactacaaccctaattagcgggagtaaaaatatggagggacattattataaaaaaaagacgcggagaggtatataatcgtcatttagcagtgattaaatctttttcctttatatttttggttttttgatggaatatgaataatactagcgtaatggatggccacatatcgatcttgccgggagaaaataaataataaa

SEQ ID NO: 63427 - DNA, 497 bp, Oryza sativa
agcttatctcttacgctccatgaatggatttgtcagaacatcaccgaccggcttgccttcgccgccgccgactggtgtttccgcctgcacggctggcctttatgccgccgttgttgggcgtctacgtcttcaccgaccggcttgccttcgccgctgccgactggtgtttccgcctgcacggctggcctttatgccgccgttgttgggcgtctacgtcttcaccgaccggcttgccttcgccgccgccgactggtgtttccgcctgcacggctggcctattatgccgccgttgttgggcgtctacgtcttcaccgaccggcttgccttcgccgccgccgactggtgtttccgcctgcacggctggcctttatgccgccgttgttgggctgttacgtcttcaccgaccggcttgccttcgccgtcgacgactggtagtttcgcctgcacggctggcctttatgccgccgttgtaaggcgtctacgtcttcaccgaccgg

SEQ ID NO: 63428 - DNA, 428 bp, Oryza sativa
  unsure (1)..(428): unsure at all n locations
gcacagnatgtgcattttatggaactaatgagattaaataattagtccagaaaattatgacataaattttgaaaataaaacaaatgtaataaattaaaatatttatttaaaaatttaataggtgatcgagagcattcataaaaaattattgtgagcattggtttctatctttgtatgaatactcctcattttaatgatttttttaaaaaaataaatgcatattttttatttcattaactaaagataaattntgtgataaataatgcatcacacaacaaactcataattataatagtcttatgtgacaaacctttacatttttaataatatagttcataaatttctatgttcatccaaagagtaaagtggtcaattttatataaattaaacggtcaactgacgggagggatatggaagagatcaaaatc

SEQ ID NO: 63429 - DNA, 490 bp, Oryza sativa
  unsure (1)..(490): unsure at all n locations
agcttcgaaaggcgacgaggtactgtcctttgtggcgacgactntccggcgatgagtggcaacaacggaagggtggctgggcttcacttcgcagctgcgaacccaatggagtcaacggcgaccgaaagcggcggctaatgcgggtgcttgctgcggctggaggcacaacgacgacggcggcgctccggttcacgatgacgggctaccttcggtgggatttggcgcaaaagaaccaatggccggggtagagctcgactttgcggagccgaaggaggcgacggcgcatgtcggggacgaccgatgagacggcgcgacgtggctggagcggcggccggcatatgagagagaaagcgagctcggtgaggggcggctagggcacttcgaaagacnggactngaggggataggtagaggacgacganggggtcctttatataagcacgcgagctctggtccggccccaatcgacgggaaaaaactcgggaaagtct

SEQ ID NO: 63430 - DNA, 430 bp, Oryza sativa
tccatcaagatgagaagtttatcttgtctctaacatattgcgtagtacatctgaggactatcttgtgtgaaactttagagtgcgcgtaggacttgttaatcagcgttttcaacctctgtttataacaggtcctctgttttatatacatgctatctgaattgttgagagcatgctaccccatatccagatgtgatattttcatgtgtttctgttgtttttgccgctgtgcgtgtgggttgtcctagattgtacacacaatatgcgatggattgcggatcttgtgcgtattcctctgttcttcctcgccgtcagatcttgcatcatagcctgatgctgatgcatcggttagcatagctgcattgtgactgcttggtcaccatgcctctcgtcaagatttttcagctaattgcaacttgttgtcaagcttttc

SEQ ID NO: 63431 - DNA, 488 bp, Oryza sativa
  unsure (1)..(488): unsure at all n locations
tagcttaagatttggaggattctaaattcttttatatagttcttgctagagtttgcgtcgaatatgtttacaaagtcggttacgggttagaacttagagttatattacgtgttcagaaaagaataagagccacactctatcttagaatctctcttaaatacgcatgacgacttagcatattgagagggagcagctaccggcagcgtccggccgtgagacattgtaattctgatactctataatatgtctgatcggggaggagcgcccgtaatcagtgtcctagggatgtaggcttcggctgaacctcgctaacaaatatcgtgtctcggtgtcatcatcgtgttgggatctcccatgacgttgtnttaatggttggttctcgatgtgctatcggagccggttttataacagttctctggatgatagatacagcatactctagaatctggtaaatggccaaacaatgtagtgtctagaaacccgttgtt

SEQ ID NO: 63432 - DNA, 444 bp, Oryza sativa
  unsure (1)..(444): unsure at all n locations
ntagaatatagngggtcttaactntatagaaagataggtttagtaagtagngatgtatatctcgtaataactaacttaattcgaaaaaagaaagagaaaatgagaggaggataggcgtacttacatacgtaagtttgatgttgtttgttgtgtggggccaggagagaagggttattttgatctcatggtcaaaattagtaggtccaccattttaaatgaaaatcgatggtcagatatttttattttttattataatttctataatttattagagtgtcacatcgtggctttagagtgtttgtatgagtgtcatgtgaggtgacttatgagtgtttgaagaaagtttaacgtacttttacttataatagtacaagattagcgatctttcctccacgtaaacaacggttaatcagtcaaaagaaaaagaaaataaatcttcactct

SEQ ID NO: 63433 - DNA, 404 bp, Oryza sativa
  unsure (1)..(404): unsure at all n locations
tagcttgcctgaagcttattgaaacggatcttatccaattgctaggaactganaagaggtggaggaaacaactgttacctgtgtaaagtcttgcaatatctccatatgacgagtcaatgtatgagaaaggacttctgagcctcctgatgatacccatgtctgcatttgagaatttacttgctgaagttgcttcagcgatctttctatatcggactcgatatcattctcagaaccatcagatttcatggaaatcaatttacggtaagcactcatttggtcatctaactgagcttctagcctccttgccttcaatgaaacaaaaggcacaattacttaaagtaaacaagtaatgcaaaaaaacgtcaacgaatctttttaacacattaaaccaaaatccaatattt

SEQ ID NO: 63434 - DNA, 469 bp, Oryza sativa
  unsure (1)..(469): unsure at all n locations
gacctataaaactcaacttctcctgaaaggacatataaaccaaaagcatagctatatgtatgaagtccagcaagttggaacaaaaaaaaagttttgcaccaaaactggaactaatatccaattccaaacatgcaagtaatgacaaaacttgtgtgataaacaatctaaaatagccttcaacatgataaaagataaatctgaaatagtcttcatcatgacaccagaaataaaataggcttcccaataattaagaaccgagattcctactgtactaattagtaaagatatttgaccactcagcttanatcagtagcttagcgatacaaaaatgtcttaaatatgtagttctatgaaataggttcgtaaatctgtagttcattggaagctatacgctttatgtgcagcttaacgcaatttacaattcatataccatatatacgttcatgtaaaacttgtccttcatatgagt

SEQ ID NO: 63435 - DNA, 492 bp, Oryza sativa
  unsure (1)..(492): unsure at all n locations
acgagctagctcgtgagccgagcttagctagnnattatatctcgtcaacaataacgagccgagccaagcttgctcgttaagacaactccccaatccttaacgagccgagctggctcgttatccacccctagtgctcaagacaagcatgcctttgaaacttcaaatgcttgtgtacctgtacgggtagacgggtgatccagtttttggggagcatcctcctacgcgactgctttgcatcggctatatcttctgctgttctgcattggctacatcctctggtacgtctacttcctctgcatgagctattngcaacgtctacttcctctacatcgcaatgtcttttcactggcaccggtgctattggagcagaagataacagttgtgcaccaggaggaggagggaacaacaacgtacgagagaacatcaacatcaatagaggcaatactaatgcctcatcatccatccagtggagcgctctctggtatatctcta

SEQ ID NO: 63436 - DNA, 447 bp, Oryza sativa
  unsure (1)..(447): unsure at all n locations
gacagagcccgagccagccagcctttacctgtgtgcattcgccgctttctccaccaaatccgccgcatcccgtgatccggttgcaaaattagttgaggggaaatattcctcttatcctcctctatctcttctcccaagaatcggactttatcccgaagaaatcaacgcggaatcgagctcgattcgtgtttatctctccaactaaccctcggattttccggcttcgattcctctcgggtggagtccgacctcttcaatccaagcctataaatagcatcccctagtcgtcctctttcgtttgcctcatctcccgagctctctcgtgccccgtagtgccgccgccgcgccacccaaaccgccgccgtcgtcggccggcgaacagccgcctcgcgccgtcgttttagccgccgctgccgcctcctcacgtcgccgtcnggtgcgcgtgga

SEQ ID NO: 63437 - DNA, 493 bp, Oryza sativa
gcttgtgacactagctggactactatttcactccatatacgtataggacgtattattgtatattccagtacacgtattagtacgtattattgtacgcgcagcgtctcccgagtactaatacccagctaaaagcaagtttaatagtatagctgactactggctccaaatgaactatagtctatcttatagccaattcacggcctcattggttgccgtatggcttataagccaaagccaaaatttgaattttaaaacttgatttttaatttgattttgatgctttttcgcacatattttcttagctgtggctgttcaatcactacgaacatatatacaaaaagtttactggcatatcattctataatcgcttataataagtcattgtctaccgatggagacctcatacaatagttatctatatacatatactacacaattcgtatctgggcccacatgtcatacacacatgtatcttagagtccgtgctgtagct

SEQ ID NO: 63438 - DNA, 468 bp, Oryza sativa
aaaacagcataacgcctttctgtctgggcaccttttaatttgcattgttataattctctaagaatatatgaccgcataaaaaggatttcatcagcattgggcaacactgttgtgcgcataatattgccaaagcaaaatatgcctaagtccctaaggaacacaatgggccacgctgttaaaagtattgggctgaagtactgttcaagcctaggcccattatcacctccgatacccttaactgaaaaatcctatatccaagcgacgcttcgtcttccccgccattttccccattccctgctacagtgcaaagctgcgccggcgaactatggttcacgactcccgccaaatccaccttcgaaaagtgcattataataccttccgtgatccaccgcctcaatccctcacctctcccaagccatccctcgaatcaaatcagcacatttgagtgtaccgatggcggaagagaga

SEQ ID NO: 63439 - DNA, 461 bp, Oryza sativa
agcttttaactgcatcaaaccaaaggcattcgatttacttatcgcgttcggattaccacccgattcgatagcgataatcgccgtgatcaattgtggatcgacgccccaggctgcaccggctttctggcttattggcatccactgcatcgcacgttgcaccggaactttcgcgttccacggcgggttcgtatagtcatgctttgatgaacaacccgctaataacacaatcaaaaaggcaaaccatctcaatttcacttcttctatccttatagcctggaatcgccgttgaggtgacaacggcacacctaagcggcatgatatacatttcgtttctgttgtcagcaaagaattgccatgtctctgtttcacttaattgccccatcgggttactgcattaaacagcacgccgcgctgcgtggtatccagcgccttaccgacgcggggcatcaagtcaataacgt

SEQ ID NO: 63440 - DNA, 451 bp, Oryza sativa
  unsure (1)..(451): unsure at all n locations
tattcanacctaaagaatttaacgtgtataataagtcatagcgacttgtaataggaaacggaggaaatgattaagaaatgacgtattatccttacacacgttcgtgaaaaataatactccctccgtttcaaaatatttgacaccgttaaccttttagcacatgtttgaccgttcgtcttattcaaatttttttttgaaatatgtaaaactatatgtgtacatgaaagtatatttaacaatgaatcaaatgatatgaaaagaataaataaataattaaatattttaaataagacgaatgatcaaacatgtacttaaaaaattaacggtgtcaaacatattgaaacggagcgagtatctactattaatcacattgaattgaatgactctggtagtctggttgaagaggacatcatctgcgataggaacagtgttgtgaggtcgcaatcccgtc

SEQ ID NO: 63441 - DNA, 478 bp, Oryza sativa
  unsure (1)..(478): unsure at all n locations
tgggancgcttgatcgatttccttgatcgctacttatgggcgtgcgctcaaacgatacaaacagggattcgcaaacaaaaaggggaattcgtagtcactttttcctgtcgcgtaaaaaaaaggctttacgcgagagcaatagaggttgggatacatctatctcttctgagcaacctcttttggattcttaagaccacccttgcagtaagataccgtctgctttgggttctttattatattatctccttcgaaggatttttaagatcgttcaggctatatttagtctattttggctnttactgtctccttttctcacggaagtggttaaggacctcagaagatagaggagagcgccaggcgcagatttccggaatacttctacagggaatgctcattgaatgcgcattctccgtattatgccttgaagaagaactcgaacctcacgctctttacacgagattntagtctcgcgtgctac

SEQ ID NO: 63442 - DNA, 465 bp, Oryza sativa
ggacctataaaactcagcttatcataagggcttcgacaggggttttattcgttctttgagcaaaaagataaagatcggatagattcgaaccgcaattgcaaaggtaatcactactatgccagcccaaatcatgatcttcaccaacttggatttggttctctcgcgaaaatcgcgagttgcagagatgagaaccatgaaaagcaagatcccgaataagaaaacagaaaccgaggaaaccacaagagtgaagactagtagagtctcgtcttttgtcattctttgctcctttttcactcaatgattcattcgaatttcccgaccaaaaattctatatgtctattcatagggcctcgctgctaagtgctacaagatctagtgcactggaactcgtggttatggacccgaatcctttagtatggaacattgtcttttccaagtaaaaacccccagtatatgaaagaatga

SEQ ID NO: 63443 - DNA, 481 bp, Oryza sativa
  unsure (1)..(481): unsure at all n locations
agcttggtcatcgacaatggctcgtanaatgtctcggtggcggcgcttcacctcagatgaatggcgatggctcgatttcttcaaaggactgccatgcatgcatgtctttcgtgttagagaggtccatgcaattggattgggactcactagagagggagaaatcaaagatggagctcggcggccggttgtagaagatgatgctgatctccaagatcattgcgccattggatggggtacttgggggtatatggagagaggtcaacatgaagctgatggcgtggtggtttggcttgcaacagtccactgcagccaaaacgacaacgatgtcaaggcggcgacgcgcagagtgcgctccaaggccggcgatgacacgtggcgttcccgtcgatccgctacacgagaggatggaatcaaaaggaacatcttctgcctgataatgtgagtatggaacggtggtgaagcacagatggagatagttcta

SEQ ID NO: 63444 - DNA, 453 bp, Oryza sativa
  unsure (1)..(453): unsure at all n locations
gacactttagaaaactcacgctataatacccgactatgaaacggcgtgatcacgagnntttatgccgatgactatgggtnggaaggatgtctcctaagagacaatgattggccatttttgggtgccataaattgctatgatgctaatcactaatcagcatcaggtgaaaacaatacaacataataacagttgacagcaagcactaaaaaaaaatccggttaagggcaaaagcagatgattacatatggaggaaagagaccgatccatataatcctgatcaagcctacttgctaatcactaatcagcatcaagtgaaaacaatacaacacaataacagttcacagcaagcactaaaaaacaatcacggtaagggcgatagctgatgattacatattgaggaaagagaacgatccatataatcctgaaaaagcctacttggtaaactttgcacac

SEQ ID NO: 63445 - DNA, 422 bp, Oryza sativa
  unsure (1)..(422): unsure at all n locations
agctntgctgttatttaaaaacgatgtgtgttagttgtgtgagtagaaatggacaatcagcaaagacacttctagctaagaaggaaatagctcctcacatgctccccaggtgagaccctccatctgcacactgcggacagcctcctccaacttcttcatatcagtctcgtcgtcccatggtttgacatccaacaggacagatgattttccgcctataaagctttgttgttagacaaaagatatataaactagcaatgggtaaaaacaattgaacacaacatggccatataacaagtaattcttgttcactatgtagggtaacaattttaatgctgaacttattcttactttctttcttctttgaagaagccttggagctgcacgctcatctgctgcttcttggcttttctcgtctcatcacc

SEQ ID NO: 63446 - DNA, 293 bp, Oryza sativa
  unsure (1)..(293): unsure at all n locations
caagattgcgatngagctcaccatcggtgacagtcgatgtatatgaaacacacatatatctcgatggcttctgccctcactgacggatcggaaaaccactagagttagcagcaccacacctgttcagctgggacgttcaatcgtagccataatgctcggcctatctacacccttatctcactgaactggctcgcgatggtacccgtgctcccatatctcgtctgacaacgagacacccaagactcgcgagtcatgaccgatcactctcaattaacatctgaactctgcggata

SEQ ID NO: 63447 - DNA, 453 bp, Oryza sativa
  unsure (1)..(453): unsure at all n locations
cagctntgctatttattaaccgcgacgactaccagagtttcgacatctctgcatacgtcaccaaatccgatgccgtgttattttactacaacaagtggtgttccaatcttcaatatttctactctgacatcttcaatacgtatcttcactcaagcaatgactactcgatgacaagaagctacagtttttgactctatgtttagttgtttctcaactaaccaaagagtcgggggctacacaaatacaagactctcaaaatccgacaagctttatgtcaaaatgaagcaatcaatcaatcaacgagtcaattcggggagttattatcttcgtcttcacttcagagccgacatttaatttcagcgactccaattattacaccggcaantttggctttttcacgccgccacaatctactcntaaattttcaagtatcaagtttgagaattaatctac

SEQ ID NO: 63448 - DNA, 429 bp, Oryza sativa
ggaccttagaaactcagcttgacagtagattgagcgtgttgcatatttcgttctagtacaggaaactatgcattacatttccatgatactataatatggagtaatctggaattagatggttcacgaagaatgtggtgatattttatattaatctttaatctttctcgtggattagcaactgaaaaaaaaactttctatatgcgtgtctttaccgattaaaaagggcatactgtaaaatgaactacgacaaaatacaacaaattcaacttcaatgccacaaccagccaacagccagcgattgtgactcaatgttgaattaattgataaaggatacaaactatgggccttatgggcctaatcgacccatatgacctgactgttagagtccaatgccactggcacaaccaaccaacagccaacgatttgttt

SEQ ID NO: 63449 - DNA, 452 bp, Oryza sativa
  unsure (1)..(452): unsure at all n locations
gtcttcttttccttgtgtgtttgaacctggctcaccaattttctagaagcatgtaatatctctttccccacaaggttggattcagcaatttgagaactttttctcaattctgatgttgaatctttatgagatgactgtgtattctcaagtgttacaaatattttatcctttgctatttcttctaagtttctgttcaggcttctaattttattaccaatctcatggtgaacccgaatgttggaaaagcaagagagaagtgaaagcccattacatgcaattgtttttctcggtgaacaaaaatggccatttaatagcttgcttccttcaagctaaccaaatcgataatgtcatcagcatcatacatagcatcttttagacgaagaaatccaatgtgtattgatgagntcttcatgccccttcgctccacatcacttataaagcatcgattttgt

SEQ ID NO: 63450 - DNA, 447 bp, Oryza sativa
cttgatagctacagcggcttctcatgacgttaacaccgttggatccctctctcgaacacgtgggcttgtctcatctcttagatcttcattacccaggatgaaacgttttctccctcctttgcatcttcagttaaccgaaactctgaactttctgaaatttcctccattcttcttacgagtctgacaagtggtcctttgttgaagaagaagaagtgcaggaggaggaagcagctgcagcagccaaggaagggggagaggatggaactgctgcttcgaagcataagggggaggaagccccgtctccaactccaaggtcgtcatggctgctgccttgtttgacgaggatgcaacttgtgggctgccccaagctgagggctctcccaccacagctgggacagcaggccaccaacttgaaggagttctttataagatgcacaagttgcttga

SEQ ID NO: 63451 - DNA, 531 bp, Oryza sativa
  unsure (1)..(531): unsure at all n locations
caagcttgagttgaaaggaaatccagattatatatttgatattagttaattcagggtctcaaaaaatatcatcaactccaatttgatgaccaaaaatcctctgcaaaactgataattttacaaccttgatgctacagatcaaataacaggactgaatgtgccctagctccaaatatcacaatataggtggtatgtgttcctatcgggctaacctcacctacttcagggaagaaattggtcagcagccatacttggacaatggcagcatgaccgtcgccgtggcctcgcaccgccagtggccggcgcacgcgcaacacaccaggtccttccgctttggtcaccacttgccactctttgcctccattaatgacaccacctcagcgactagccaccatatgtttggccccaacaatcacttgaaatgaaagtngagattacaaatacggcaagcaggaaagccggtgaaatcaaactgcagcatcatgccattctcctctcanatatggccgtaaagcaacacaagaagggatg

SEQ ID NO: 63452 - DNA, 464 bp, Oryza sativa
  unsure (1)..(464): unsure at all n locations
gtggcatggtattaccaaatcacccacgccagtgcacacactgatatccaagtcctcaagaagagaacatcgtgacagcaagtctggaagatcccccactatttttacatactgcagcgcgagccttttgagcatggtaaaaccagaaatatttggatgtacctctattaatacaacagctaggaacaaagactcaagagcagggtcatgcttagcatccaaagcatcaagtgagaagtggtaaacatcttctagcagatgtttccgtgttggccatctgtttctgtgccgagattgtaggttaacatctataacctttgccatcgatatgtttgaattcatccttgttgaggtcacagttgatgctgaacttatntaaccctattcccttgtggcgtcngacaacatgatttactgtcttagagaagtaccatcggtcaattttgagagtaccctcatcagta

SEQ ID NO: 63453 - DNA, 451 bp, Oryza sativa
agcttcctttagtagatcaatttccttaactcgaatatatcaagaatccgacaactgacgacttgacaactctcatcggctaatctcaagacttcgaagccgatgctgactctaagccgatgactactccgggcttgccaaatttcactgttaacacatctttgccgaagcatatgccaagatggggttgactacccaagcccttaccccagcaccgacatcgctccgaggattcggcggagaagcagttcaagttcttggccaagcacagttgatagtagccttcggcacaggggaaaacagacgcgaagagcaagtattgttttacgttgtcgacatcccatacaactacaacgccatcttcgaccgtgcaaccttgaacaagttcgaagtcatttcccatcacaattatctcaagctcaagatgcccggcccagcaagagtgatcgtg

SEQ ID NO: 63454 - DNA, 439 bp, Oryza sativa
  unsure (1)..(439): unsure at all n locations
atggaggaaacaatttcttttgaccaaatcaccatgggagagcttccccacctgtatatcattccaaaacacaaacctaggggttagagtatcaccaacaatactccaatattatcctcaaaactgattttgagggccataaggaccgcatgatctatttcacacggatggaggaaaactgagaattttgttggtagtttgatagaaatgctcactcttatttttttaagataaaatttagtgtttctcttggagagttaagcttttttgtactttctatttttagtttagaaagcataaaacaaaattttagagagattatatataatctcttggtgatgctcttaaaaaaaatttcatcgtgataacgagcggagggaggggggaagaaaatnattttccaaacatctagtattacatctagtattacaantgacac

SEQ ID NO: 63455 - DNA, 472 bp, Oryza sativa
tactgcacctcgttgcccgcgtgctctcttctgttcaacggagggttgtctaccactagcctcctcctcctcctgggtcccctccacattcctctccacgtgcccctgctgggtcccctccggattcctctccacgttcccttgctcgttcaagtactggctaggatcctcgctcccctcttcttcattccagtactggctgctttcctccgcgattgtatcgtacaatatctgtttctcatcgcgaggcagcatctgttgatacaagaaacatctgctgagtcacgagacatttatgttctaacaatctaagccatgtatgctaagtgtaaaagtcgtacattagaaccctacacaaccttacgtgctaaatctaactaccaattgggatataagctaagctatgtgaccgatataaacaccctagcagtaataatacatactcagctaagtcaaaaaaatactcttattt

SEQ ID NO: 63456 - DNA, 450 bp, Oryza sativa
gcaaatccttgggttgattatcattttgaaatcactaagtgatttatttctttttaagtttgggtcgaaaaggagacttgcgtctcgattcgacttaagagatgcttttcaacaactcaaatggtaatgtaccgaccccccgggtcagatcattacttatcggcttccagagccatttcacttgattaagtagctcccagagcttttttcatttgattaggcagctcccagagcctttttcatttttgcggactcccatagtccagctgcccagcagcaaagcaatctgcttccactcgagaagcctagtctatgatgcccgcagacatcccgaatcacacaggttcgtttctgaccactcaggtcatccatctgccacataggctgattctggttacgattcccaatccacaataacctttcacaaagcacaggcaaacatatctacac

SEQ ID NO: 63457 - DNA, 513 bp, Oryza sativa
  unsure (1)..(513): unsure at all n locations
agcttcatctatggcagggagggggagagagataanaatatatagaaaggggaaagggaaaagtatgatatgtggggcccacctatcttttataaaaaaaatgctgactgcaatgccacatagggccaaaattattccggatattgaatatggacaaggatgggttatttgtccgttttaaatagttgagggtgaaaaatgtctggtattcgtgttcagggggctgaccatgatagtttaggggtaatctagattttttttcatctagaaaaaatgcatggcaaagtgcttgacaatggtaaattttctcttttttctttcttaacccgttgcaatgcacgggtattttgctagtagaaataaaagttaatatttttatatgaaatctaagcatgtagacatagaatccaagaagtgtatatgaaatccataccttatagaaatagaagctaagagtatatatgaaatcaaatatcttctacatgtataatactaataaaaataaatttatat

SEQ ID NO: 63458 - DNA, 451 bp, Oryza sativa
  unsure (1)..(451): unsure at all n locations
aaaatcaagccatcttagaattttgtgctgtatagtagcatatagacaggagtctggagccagcacaattacatgcagtgctccccaaggcgctaggctagtcaagccgcagaataaaaactagcacctaacagccacccagacaggataaatcagctgggaaggatatataagagggtggcacctacgtgccaccaagatgagctatgtcgccacctaagggatcactgattgcatgagaatcggcaaggactagcatgttgaggcaacgaaccaagtgctacggtatcaaaatatatgaagttgcaggatgcaaatcagattgcataaagtatacatgcataaagtagtcccatgcgagacatggctgactatcanggttaaatacatgaatggaattcaaacaatacaaagatcaaagcatgattatggtgtggcatgtacatataat

SEQ ID NO: 63459 - DNA, 502 bp, Oryza sativa
  unsure (1)..(502): unsure at all n locations
gcttgagctnttcaattattacttattttcgagcaatcaatgctgtacaaaccaggaaggcagctgccagatctgaattgtcctgtttgagctctgcacttgttgtgtagtatatctccccggtccacattatacccgcaaattgttttcttatcgaccagtagtctgtagcttcacaattggtagttttgtttttgcgctgtttcttatataatccttgtttctttcttccacccgatgtattaaaatgaactcctgctaagtcccttgaatgccctctgcaaaaaaaagggttttttttcaaggaaaaaaaaagtggtcttgtgaacaccgtggcttctaaaggtttgggatgctttcactttacatgacctcactntcattgttctgctgcaggacttgttggcaaagtggacttcactgtcaagcatctttcttcagcagttgagacanttccaaattcattcactagtttctcaactgtcaaccttgcatcagtaca

SEQ ID NO: 63460 - DNA, 448 bp, Oryza sativa
  unsure (1)..(448): unsure at all n locations
ctattgccgctgcttgttcttgagtgtcctctgcaatttatagataattttcttcagttnttctatgcacaaagagttcttggattagttgtacagaagacgttaaatcaaggaaggttgcatcttgttcttgactgattaattggtgtgccatgatctgcaggtaaacgggttcttgcctgacatttgtcttgtcctggtggccattcatggccaccgtggggcagcctgatgccatgagaaggatcaccgttcactacgtgaatccgccgccgatcgccggcgccggagaagcacacgtcgatggcctcgacgacgaggttcttgattatgtgattggtgatgttcttcangatcaagtatgcatttgatccaacctttccatcattattagcatactgctcttacaggcttgcagaatgatgagctntaacatcaaacatatgtt

SEQ ID NO: 63461 - DNA, 284 bp, Oryza sativa
tagcccaaaaaacttgagggatggaatcgtgagagccattctcttcattttatattttgacctcattcccaatcgagccaccaatcgtcgccgacgaggtcgccaaagccatggccaagctcctagttcatcgggctgctggaggttgaagatgaagactttgtcctgtaaatgataaaaaacatagggttcaaactataaaacttcagtcgttacatgtggaccacggacctaaatgcagttatataagcccaggaccttttgttattgtttcaccccgatat

SEQ ID NO: 63462 - DNA, 450 bp, Oryza sativa
  unsure (1)..(450): unsure at all n locations
tagtcttatggacgagcgagtgatttccaagatacgagcctctgcccccggccgaactcacgagaaggggggtctcacgactcctcgctattgaagatctttcctcgatagtatcgatggtgttgatgtcctcatcactttaaattcgatgcatcgagtttggatggcttggataacgtatcaattatcccacattctctctttcttttttctcatagtacaatctatttgtatttgtaactcataggtactaaatctaggaagacaactagagtgttagaaaagatatatcaagccaaataaactgtaatattacttgtgagctgataaaatagtgattaaccaatttttcattatatttgtaggtagatttaaaatagaattcatatatctctactatataaaaatcgaanatggttttgccggtatattgatacgtcatccgtattt

SEQ ID NO: 63463 - DNA, 514 bp, Oryza sativa
  unsure (1)..(514): unsure at all n locations
agctagctgagtacaaggtgcaccaaaatctgggttaagtttctggagatcatctcctatttcccgggggtggcactcagttcaagaatggtgcacttcactacattgatactattcagcaggtttatgatcattatccgagtagcccttattacattcatactttcatgcatcactcattggttttgcacaagctgtaggaaaatctaaatgtattgtacttgttaacatctgactcccttaataacattctataaagttggattggacttagggaatatcacacagctactagttttgttcttttgtaagcgttntccttgcattggtacataaataaaaaatgcactctctctggacataactacttgtgcttttggactcaagcactcaagctttcgaaactntgactaaatttnngttaaatacctaatccgaaaacataaanatcgtatgtatagatttgtcttgaatgcagttccataatctcatanacttattagatttataaagt

SEQ ID NO: 63464 - DNA, 420 bp, Oryza sativa
atcattttgaaatcactaagtggtcgacttctttctaagtttgtgccgaaaagagacttgtgtctcgattcgacttttaagagatgtttttcaatagctcatttggtaatgtaccgacctcctgggtcagatcattacttctcggctcccagagccatttcacttgattaagcggctcccagagccttttcattttctcggactcccagagtccaactgcccagcagcacaacaatccgcttccactcgggaagcctagtctatgatgcccgtagacatcccgaatcacacagattcgtttcttgaccactcaggtcattcatctgccacatatgctgattctggtaacgattcccacaccacaacaatcttttacatagcacaggcaaacacatctacgctataggagacaccttacat

SEQ ID NO: 63465 - DNA, 486 bp, Oryza sativa
  unsure (1)..(486): unsure at all n locations
agcttgtgctgaattataagaagctctattgtactatattgtatactagaataggaagagattagagtagaagaagtcggatgaattctggagttgtcggtaatcttctctcatttctcttattctgtttattactctgaattcaatataatattcttcttgagtaatttagatttatctcgtgagaattatctcttggttagttcctaaatagcatacgagacaattgttcactatagttcatttatttatagtgattgctttagtgtttgattggcactagagtagttattaattgcgtagacgcggtgtctgggtaattaatcttcagtggttgctgcgtatcccatagtacatttgaagtaggtgtagaggtggtgacagccctanacactatttctctagacactggtaaacttaagtattgcgttaagattaaatttaagctttncctagacacttgttctcactagtaaatctactcta

SEQ ID NO: 63466 - DNA, 446 bp, Oryza sativa
tttgtcccaagctccaccaaaatcaagagcgcaagctctctacatatcttccaagatttgattgacccgctcggtctggccatcagtttgcgggtgataggccgtgctgaaatttaaacgggtccccaattcttcctgcagcttctgccagaattttgaggtgaactgactccctcggtcagatacaatctttttgagtactccatgtaggcacatgattctcgaaaggtaaagctccgccaaccttttgcccgtatatgtggtatgtactggtatgaagtgagcaaccttagtgagtcgatccacgactactcagatcgaatcgtgacccgacgatgtccggggcagtcccgttataaagtccattccaatttcttcccatttccattccgggatttgaagagggtggagtaaacctgtgggtctttggtgctctgccttcactc

SEQ ID NO: 63467 - DNA, 279 bp, Oryza sativa
ggcccataatattgaatgggtttaatctgcaacccgcgctggggaccagggctgatattatggggctggcgacacgattattgccatgagctcacttcgcggatgtgtttttcgagccgggccgactatgctatgcggtttgatggcaagcttaaagcattgatcggtgtttacccgatgactggccacattagatgacatacatattcttggtcacgcgatgaatgcaactcctcttaaaaaaggcgtggcatgatgataagcctttgaggctttccc

SEQ ID NO: 63468 - DNA, 309 bp, Oryza sativa
  unsure (1)..(309): unsure at all n locations
cagcttatcttatcctattctatactcacttatcacagtattgccttaatgagccaagatcaaacctcataccctattcaagcctacaatatactatattgcataaaaaaatattatataattgcattgatgaagttattcaaagttcaactgaagtcagctacttagctcgaaccaccgactcattgctcaggtcaactttgtgacgtccttttctaaaccctgtcctattggngtttttttgagtcctcttgaatctttccctcctaatataatgatgcgcagctcttttgcgtgttaaaaaaaaaa

SEQ ID NO: 63469 - DNA, 454 bp, Oryza sativa
  unsure (1)..(454): unsure at all n locations
tgcatctgagattcacttctcttattctntgaaaagtgctcaaattgtcataatgtctcactaaagtctgccaccacaagccaaggcagatttgatgtttgttntagcgatgcaagcaaggaccacattctatgccggttctcagaccttggttcaccataaacaaaagtgatgtgccacatcggatcattcacagacaaccgaacataagcatcaatatatctatcatttattcctttaatatcaacataaacagactcatcccaaaagagcgctagaccaccactcattccattacatatccagccagcaaatcctctaagtcccaatctattgcgaagacgtctcaccttttctattgtctgtcttgtttcacacaaaaacactaactaggaaccagcctcgcggaccaaggcacataaatcgcgaactgtcgtagcgttccctataccac

SEQ ID NO: 63470 - DNA, 452 bp, Oryza sativa
  unsure (1)..(452): unsure at all n locations
tagcttanggtttcatactttcattaacattgtaaccaactgtgagcacaccaccaaccaatcacagtaacacattgaacgaccttatctctgctcgtagcacgaatactcaatacatggaaaaaaagatcaatatacgcatgtgtaaaggaacagcttgggacagaaaggcaatacttactgctccatggccttgagccatgcaggggcaggtttggccatgcccttcaccagcttccgtgtcctagtgagcaggtcgcctcgcatgtacgacatcttgcctcagaagttggaataatcctcagagatctgcaagacagaaagcccatctgagagggaagttgagaaatctgtcttgaaacaacctagctagaaggtgaattggcattaagacctatcaaaatcagattcaagaaagaaatgcgaattgttaccactatacttacacctga

SEQ ID NO: 63471 - DNA, 441 bp, Oryza sativa
tcaggcttaccggtactaactcagcagtttatgcgtgctcatcttctacaccaagatcatcgcgagacgtatgttacggtggattccatgttgtgccaacataaggagagggatctgatagtccgatggttgatcaattccttagacgatgattcggaaactcaggttattagtaccaagcatgtctctgttatgtccatagttggtcatactgtgtcacagacagactttatggacctcaagacatgggctatcaagtgggctagcccaaccatggagaagctggttgacaccttggtgcagtataaaggaacacaagtgctatccggaagaggcatcgatgaacagaacttgtggctgctgccttcttcctcctcctcctccggatttcttctccacttctgttgttcctccaatctccaactctacttctctaatcct

SEQ ID NO: 63472 - DNA, 447 bp, Oryza sativa
  unsure (1)..(447): unsure at all n locations
aagttcaaagaatatggtctggctctgcaagggagagttgttaaaatatgtccacattaagttaaacatgtagatatacttgacctatagtgaaaatgattacttacacctagtccaagtggcaaaagaggtaaaattagcagttatctgacgtgcaatttactcagttgtttatcgcaggttacttttcagcattgactatcaaatagttaagaacatggatataaaagttgaacccataaattatttttgctttatttgtttttccaatacttatcagacataaaacaaatgatgagattcattttttagtaaattacactttggtccagctgttattacccaagatttactctggacccccccctaaatctatctgttcaatntggaccggataaatttaccattgttgctgtttggactaccaatgaacaactttctcatcat

SEQ ID NO: 63473 - DNA, 231 bp, Oryza sativa
agcggtcgagagacagaacatcaattagagagctaattacctaatctttattcaactcttattccggaggttttcaaatgatttttgcaaaagatagccaagttcctcaaatgatactctagatcactcaaaatgtttgaatatgaattgtgctcgacggaatatattgttggctacggtcattattgctttccttccgagagtccactttccccgtagggtcccttcata

SEQ ID NO: 63474 - DNA, 415 bp, Oryza sativa
tcaagataatggtggacatacgacttgacttcttctgtttttgcattagagaatagctaagtcgatccgagagctgacagctagaagctagttaatcatgcataaccataagcttcatgtttactaccttttgattatgggatcccaaaacttcatttcatttccttaattatatttctgaaacctcccagtcccatatatgtaaccacacatatgttaagcattggatctcttattgataaatactcatgggagagtattttcttgtcctcttttgaactctctgttctctagtaacttacatatgtagaagtgaaaaaactctcatgtggtctgtgggagagacactcaaacctcacttgccctgttatctcatttcgcactctccatctgttcttgtgagtactttggtcta

SEQ ID NO: 63475 - DNA, 463 bp, Oryza sativa
  unsure (1)..(463): unsure at all n locations
nggtggttggcttccttcccttttggtctangctccacaactgggagattatccanaatcctgagatataaaggttattaagagggaaaaaagttcagttgctgtattttgaatgtatctgctgaacatatagtacaatatatagctggctagatagctgataaaataacaaggtgaaaatttatagcatacatgttcactcgatactcatcgtcaatcttttctttgaaattctttgcagcttctggagaaagctttgatcgacaaacaaccttgcaggtctcatccctcctcatcttgaactacaagagttgaaaaagttaaactatagctaatgaacaaacagtgttgcatagtaagtggcaaagctccactgctccctagccctacaagcagcatcatcttgtgttgaaactagagcaattagaaaagtaatatccttacattatagaacagagtttca

SEQ ID NO: 63476 - DNA, 338 bp, Oryza sativa
  unsure (1)..(338): unsure at all n locations
tcaaagcatcaaatatccccgcccacatcgctgntcaaacaacaaggtgaaaatttatagcatacatgttcactcgatactcatcgtcaatcttttctttgaaattctttgcagcttctggagaaagctttgatcgacaaacaaccttgcaggtctcatccctcctcatcttgaactacaagagttgaaaaagttaaactatagctaatgaacaaacagttttgcatagtaagtggcaaagctccactgctccctagccctacaagcagcatcatcttgtgttgaaactagagcaattagaaaagtaatagccttacattatagacagagttttcaat

SEQ ID NO: 63477 - DNA, 235 bp, Oryza sativa
  unsure (1)..(235): unsure at all n locations
ggaatatccttacccaccacactaccaaagggctcatcagccatcgattgtagtaagcatagtcaggcatgttgcatcccttataattttctcacgatcattctgattaattgcaagcaaattaagttaacaactntgcatgttaactaggggctcaatgggatgatattggatgctcttatcaaaattgagggttacttttcaattaagcatgttagatgataaattaatcgga

SEQ ID NO: 63478 - DNA, 450 bp, Oryza sativa
  unsure (1)..(450): unsure at all n locations
ngaagacgacactgtagcagggaagcgaattagacttgactggngcttcttttctccagcccgattggagggacaagaaatggacttcagaggaggaataaagccagctgaaaggaagggagaatgggccgagaaggaggaggacatttcctgtttcggcgaaaaggaaaagaggattcaatttacttttccaattaaattaatcactgaaatgatctttgaattgttaaaaatacttccaattctcaaataatttcaagaacaatcctgaaaataattggacactcaaagtacttaacaaggttataatcagaccatntaatgattaatttattatttaaataattgctgaactgctctttgtattattaaaattaagaattgagctccgaaaaatccgagaaaatttcagagagtataattaaccatggataatttaatataataaat

SEQ ID NO: 63479 - DNA, 304 bp, Oryza sativa
ccccatcgatactgacagggcgccaaaaccgtgccgctcaagaatatgactcatacggaggtaattgactttattttgaagcatattatccatagtttcgatattccgcaaacattaactacagatcaaggcgcttcttttatgtctaaggaagtgaagagttttgccgaatcttatggtgttaaattgttgagttcttctccttattacgctcaggctaatggacatgccgagtcgagtaataagacgttgttgaagctagtaaagaagaagattgaggaacacccaaataagtggcatgaag

SEQ ID NO: 63480 - DNA, 470 bp, Oryza sativa
tgtgcctgaggctatatacgagccaagggaagaagcagaagcagttgtttcattctcagagttcgtagaagaaattcaatttcagtttagtgacagtgaaagctttgctgatcgaaagaccacagatgatgctgcatctactaaagagcaggtgcagtagaacatgtaatctgattgtgacacagaacaacagggagggaataatacaggtcttggaaataacctggaaaactgttctgattcatcaaggcctgagactatccctgttcctattccaggaagtgagtttcactcagatgacaataatctggaggctaaatctctaccaaatctccgctctcacatacatgatcttgaaaggtctgacagttttcagctaagccgctcactacagtcgaacggtgaatataatggggttgagccagtcaagagtacaacttctgacttgccaattcatgaaccagaagata

SEQ ID NO: 63481 - DNA, 410 bp, Oryza sativa
aggaggtctcccgacgtgagctgataccccacgcggctggtgtgacttcttgttagtaatgtcgtgtgggtaaagtgtaccccctctgcagaggttaacaaactgttctaacagccgtgcccacggtcatgggcggatgtgaggtgattcctgcgtagttttgtttgactcacttgtgaaattgctgttgtggaaaggggttcgatgtttgaaaaatctgcagctgatgggatcagctatgccctggtggccgtttgatagttgttggcccggatggccgtttgaaaagctgttggccgggtgccaaccttgtttcaattctaaagactgatacattgcacaaactccgaccggacgagacgcactgtcttaaccatgtctcttgagaaacactcacttagttgttttta

SEQ ID NO: 63482 - DNA, 272 bp, Oryza sativa
ccccgaccttccctccagccccctgcacctaacggagaaggcacgaacatgccttctcgagctgcgacggtgtactctacatcctaatccaacacttcatcagctgcgacatcaggcgcctcttgctctccatgcttgagccagcaagtatatctcttcatgaatccattcattatcaaatgagcatgcacttcatcgctatcttcgatcatctgtgcatacttacagtccctacatggacacaacatgtgcatgctcatcctactttgtct

SEQ ID NO: 63483 - DNA, 171 bp, Oryza sativa
cccaccggaccacatcgaacctccgccatgagaccaccaccaccccacctcctcctcctcctcccccgacgacgccgacacgctctctccttctacgccgccgccgcacgcgacggagagctacaatgcgccctctacaacatgcgctcccccgactcggcgcgacacctc

SEQ ID NO: 63484 - DNA, 274 bp, Oryza sativa
ccccctggatccgcacatcctctataggttagtaaattgtcaagaaaaaaaaacatttccatacatttaagccgttttacaaaactgaaagttatggattgtggtctattttatactgcaaattagcagccttcctattctctggataaacaaccgacattatatttttttaaagaaattaaaaaaataaccaatagctgcattaaattactgcaactgttcaatatttttgggggtgctctgcactatcatgatcatcaagagttaaatcaca

SEQ ID NO: 63485 - DNA, 429 bp, Oryza sativa
  unsure (1)..(429): unsure at all n locations
tattatgaggcctanagaanaacgggccaccttntatcgttagtgactcgagtgaaacagaagcgtagaggaaagaagagataagctatggtcaggcagaccagctgaccaggtggcaggtgcatatgttagtatggaatacgggttgaatataaaaacaaacacttggaggcagtcatgagtcaggacgcangagaaacgtgtttaacgtgtaaagtatggtaaaattgcatggcttaaagtcagcaacttaagtttctagatgaagtgatacagaatttggtattatggtaacatagcctgccattntctttttttaaaaaaagtagaaaatatgtagatccattngagtaccgactcttgggtgtggattctactccttctgttaaaaaaaactaatttaatagtggatggaactcttcctagtat

SEQ ID NO: 63486 - DNA, 306 bp, Oryza sativa
atatactccatagctccaggacacgggaaatctatctcatggagatcatctcttctcaagacgctgattacgagacggcataccatgctatactcggacgcccggcgttagccaagtttatggccgtcccgcactacacctacatgatgataaagaaacctgcgcctcgaagagtcttatccctacgaagcaacattaagcaagccgtcacatgtgacaacggaaagttgcgagatggcccaaacccgccagatcgcaaccgccatagaagacattcgactggctgcaaccacagcaagcaaacga

SEQ ID NO: 63487 - DNA, 320 bp, Oryza sativa
atactccccccaccacaaacatgtcgaaagctcccggacgtttgggcttaagacaaacaattagcatatgtgttaacatagccgatgcactggactatttacaccatgaatgcggaagaacaactatccattgtgatttgaaacccagcaatatacttttagctgatgacatgaatgctcttttgggagattttggcattgcaagaatttatatcgactcttggtcgacatcaacaggttcgaatagtacagtcggtgttaagggtaccatagggtatattcctccaggtaattaatatggctacttctgagttcagttt

SEQ ID NO: 63488 - DNA, 271 bp, Oryza sativa
cattgacatgaggcgttacatgtaagtgaccacgtccctctaacttcaccttataagatgttaatccatatatggcatatatgtattaaaaaatgcaaggctgtggtcatgaaaggtgattctcatggctattatcgacatatgttacacgtatataagtatccacacatttaaaatgcatttgatggaatctgctctatatatacatgccactaggcaaaccctctaactccaaattataccgctcatattcatcttattgtgaaatagc

SEQ ID NO: 63489 - DNA, 437 bp, Oryza sativa
ggtctgccctagactgcatcccaatgggacgatgtgatttttcatttactcttcctaaaacaattaaaccttccacatctcgatgctgcacagttccctcaattctagctagctgaacaaaaaaattagataacctcgttatagcctaccaccaaccatcaatttcaccagaaattccgctgttacctacatgattcgattccacccctaaaggatctatcactaatttcaagcacctaaacgggacacaaaaactagcaacagggtggtacataaatctacagcctagacagattgagattgagaggattagataagagagactcacacgcgagacgctcgcgaaccctagagcgggatggatcgatcccctccggacgcctcgctcagcgctcgctcggaccccccgcctacgcgacgccgctcgcgcgtggatg

SEQ ID NO: 63490 - DNA, 285 bp, Oryza sativa
gggaacgaccaccgcacatattgatggatgacaccgacataccgacaagcctcttgaccgacaccaacctcaaccttatcggtgatcaggaattacaagcctaccatatgctgaaggaccggaagttcagccacactcgggcgtacgatccggaacttctgaggaaaacaggtatggatagagattttcatgccatttggaatgctgaatttggcagagatttgcagtagcaaatgaaccagggtctcatttgcttaatatacaatatctgtgcactctgaaaga

SEQ ID NO: 63491 - DNA, 217 bp, Oryza sativa
agaaaagcctcccactagcacccagcgagatggagcttgccgccaatggagatgggccccgacagaggctgtggctcatcaccatcgacgaccttgaggcgacctaacgcctcctcgatcgacatcgtggagaggtccagcagagattcgatcgagcgagcgatctgcctgcactgctctgggacgcagcaaaagagcttctcgacagctctctcct

SEQ ID NO: 63492 - DNA, 291 bp, Oryza sativa
taaagacgatcctagagctacacaaaattattaatcaaggccgtgaaccctcacgaacctgccttaacccaaggcctacgatgattcagactgaactggcaacccgaccctgtgtcccagctcgtcccaagccaacccaggccaaccattccacattttagttattgagcaaattttaagaatcaaaacactgacttgtgtacattgctctgcttgcccataaccgatggcgcggctattcgaatagatatactctgatcagaggtgacaatcttacccacagacacatct

SEQ ID NO: 63493 - DNA, 445 bp, Oryza sativa
  unsure (1)..(445): unsure at all n locations
cgctaatgagttggatataccacccaacagttatggagtatttatatcataatatctgaatatctgatacagttttggatatagcatcttcaaagattgtaaccttatcttgaaatatgtaaaaacaaaaaaggaaattttttataaaaaaataagaaagggataaacagcccggagaggtcgttgttgtgccttcagcatatactattcgacagagatttgcatccaagttgcaccctgtgagcaattgcctgataaacaaccaccgaaagatcaatcacaatatctgattctatttggacagaatctttctcaagagctcggagagtttttttaaaaaaataaaaagattccttaaagaaattgtagaaatgaaactagagatgtcgatgaagttcttttaggagatattttccagcagaaagcangtatcgtactattccaa

SEQ ID NO: 63494 - DNA, 423 bp, Oryza sativa
  unsure (1)..(423): unsure at all n locations
ntcccttacactgtttctcactagtaaatcctctctatactggcctatcatttgcttggtgtccacacatgttcccttggattcgatacccttggaatactccataggggaagtgctacatcggtatatccgtacgttatggttttatctgtgaccgtatcataccaacaagcatccagactacatcattaatcagattcagttttctcatcgtcagaatctttagacccagtcggaccaagattggtctcttgaaatctatctaagacatcagcaacaatcttgtcggcagccttctaggcatcactgatgaggtcgagtgcatcctcctcgcttgttccgtctgcaaagccatcaatggtgtcaatgtcaatcttcagatacaacgatttggtcattaccagtaccatgctcggccccatg

SEQ ID NO: 63495 - DNA, 245 bp, Oryza sativa
ctacgcctcggccgccgagggaggggaaaaatcggtcgctcccccctccccccatgacgcgcgtgcgcacgtgcgccctgagccccacgatgtgtcactgactacctactacgtgtctccaccacatactccgttgcaacaaattacccatatattttggaaactctctattaagggaattcgttttatttctctccagaaaaacgttcacctagggactcacacgtgtactatgatatattaaa

SEQ ID NO: 63496 - DNA, 372 bp, Oryza sativa
  unsure (1)..(372): unsure at all n locations
tgcccgcaggtacaccanacacacacttatcatggttcatctntatgcgggcggagcggaggttctcaaaagtttccgctagatctgaaagtaaagtttcttggttgcgcgtttttacaaccaagtcatcaacataagcccaacattacgtcctatttgtacccaaagaaattcgagtagtacgttgaaaagtaggacctgcattctttaacccgaagggcattgatgtataacaataggttcctacggnggtaatgaacgcagttttttcctcatcctccctagccatgcgaatctgatggtaaccagagtatgcatctagaaaacacataaggtcgcaccccgcagtggagtcgacgatctgatctatgc

SEQ ID NO: 63497 - DNA, 238 bp, Oryza sativa
gacgcttccagagcttgatgccctcgagggagtacgcggtgatgctgtctgggccgccaaggtgcagcaggaggaatggtgcccagaacgcaaccaggttgtgctctcgtgcggtgctgctcatggaaagattaccgacggcggatattgcagtcgagtcggccaactggtacgccagccacaagatgaacctcccaccgcggagcttccgcccgcggaccccgggaaaagtggagaa

SEQ ID NO: 63498 - DNA, 352 bp, Oryza sativa
  unsure (1)..(352): unsure at all n locations
atcatggattcttttatggcagagcttacacagcagacatccatgatggagagaaaatatcattatacatattcctctataataagtatgagtattaaccgtggtctttctaatncaccagaaatgctgcctctgcaatgctactaccagtgttcctttgccagcatcctttccagtcacagcgtactcactcacaattgcctaaagagtcatagagctccccaagtcatttctgaacatggaaagtggaaatatctatgtataccacatgtagggataacaattgagcataccttcggtccactgcgcgtattattgcaaacatactatctccggaagacatatcactaga

SEQ ID NO: 63499 - DNA, 284 bp, Oryza sativa
ggatcgtaacagagtaccgatacctattccggcataaaaatgatcacgacacgataaaggtaccaccactccgagtgcggataccacatccctagtccggagcaggtacaacagcagactataagccagctataaatacatttcgagaagattaaagagaagagagaagagcaccagactacataatcggagccagatgcagcacagactacaagatacatgtgcgtatgacaagtgggaccaattattaattgtgcatttgtaacgacaaaatcgaacacact

SEQ ID NO: 63500 - DNA, 255 bp, Oryza sativa
  unsure (1)..(255): unsure at all n locations
gcgccgacgggagttaatccaggatccgctgctgctgctgctgttggtgtaacctcgtccgcatcgtcggttatattctcaggctgtcctgcgctgcaacctaagttaagggaaataagtcctctattaaatttaaggattgcaatgtttcatatttgtcactgtgggtaccagcgctatgtcctgagactnggactgtgatcgcggtttcgtaggaagcggttcgcgccgtttttcctacgacacgctcctatc

SEQ ID NO: 63501 - DNA, 281 bp, Oryza sativa
ccgccgcgcgccgccgacccggcgggaatcgagctataccaacccatgacttgagcggaagcacattcctgaaccagacatgcgaatggacaccgaaacaactgaagggtgctccatatagccaaaggagagcgctctataatggcaatagctggatgcataccatgactccggatggactgggctgaatatgtgctacaacaactgtgcacacaatgaccccccgctaacgacagcaagtgctaaaccccctgttaatactaccgcttattagctttaac

SEQ ID NO: 63502 - DNA, 311 bp, Oryza sativa
ctctcgaatatctgaacgatcgccaggcgatttttaccaactatacatggaggaaaggcgccaatatgattaccatctgcataatcccttcttatgtagttacatcatgtgttggcccatccacatctggacgcttaagcgtatttcccagatatagctcttgcgtgttactgtaccgtaacatcaattacatgagtttctactacaccaaccagacaatcgattatctgtcgaattttatgacgattgttagcaacatagatgaatattcctcggagaagatatcgaaccgagactgatgctgtattaca

SEQ ID NO: 63503 - DNA, 266 bp, Oryza sativa
cccggagtttcattttcagcctatgatctcgtcaaaactcagaaatttcgatgataacgtagtaataccgctttttaggttcacttttaagtaaacctaaatgtacggcacatcgtataagatctgcaatccttagctttgaaaacaagcgagaactgtattctgtagcccaatgcaatatcagatcagttaaatttgcagggagaatgagctgcgtagtggctatttatgcatcacaattcacagagctaccgatactctattta

SEQ ID NO: 63504 - DNA, 261 bp, Oryza sativa
  unsure (1)..(261): unsure at all n locations
aacaacatcgaacggatgcgccgaaaagaccacgcgagagggcatggctaccagcctgctgctcgatcggtcgcaaacatatagatggcgcatgcttggagcccttntcctcctcatgtcgtgcacttgagcatgccccccactatagccgctatcataggttgtcttcaaacagtggctgccattatatgtgccgacgaaatatatatttggatgttcgcatatgttccggagaaaagtcgtgttagagcatcctcaact

SEQ ID NO: 63505 - DNA, 449 bp, Oryza sativa
  unsure (1)..(449): unsure at all n locations
tggacaaagctcaatctcgtatgaaacaatatgctgatactaaacgttctgaaaggacatttcaagttggtgatatggcttacttaaagatgcaaccctatcgccacaatgctcttggattgcatagttctctcaagcttactcttgctattatggtcattcgagtgctgaacaaaattggctccgtggcttataaattattgctccctccaaattttcaaatacatcctatgtttcatgtcagtcaacttaaacaccatattggtcctaaggcagttccagaacctgtgcttcctctgattgattctgatggcaacatattaacagcccctcttgctgttttggagcggcgactgatccctcgacacaatgctccagttgtgcagtggaagatactttgggagaatctaccaatagaagctgctacctgggatgatgcatnctttata

SEQ ID NO: 63506 - DNA, 389 bp, Oryza sativa
atcataccctaactgagtcttgggcaataccggtgatgaaatccataccaatctcataccacttccattctgtaccttcaatggttgtaaatccggcaagttgttggtgctctgccttgactcgctggcaaacatcacaaagtaccacatattctgcgatctcacgcctcatactaggccaccatagtctgttcctgagatcctggtacatctttgtagttcccggatgaatagaataacgagattcatgtgcctctgacaatatgagcttcttgagttctggctgatctggtacaaccaacttctcatgtaaccatataacaccattctcatcctcagtgaatcctatgggctttcctttcttcatgttgagcgtgatttctttgaca

SEQ ID NO: 63507 - DNA, 281 bp, Oryza sativa
aaggtctcttcgggggagcgacgcatgcggcgacactgcggggctctgccctgattgctgccgactagaccgtgattatcggctcccgtcgcagaggaccttgtgatccctgtcctgaccggtctctagatagcatagacccgtaggatcgtactgttggacctgggcttcgatcacccccatgtggatcaattgttcctacggtattgaactgcttctgatcaatcaggttcaccttcacattacgtttgcgccttggttgcactctgtctttagctctt

SEQ ID NO: 63508 - DNA, 269 bp, Oryza sativa
ccacacactctgcggcacccccaatgtccgcggattttatggcataaatactcttctaacaaaaaaaaaagtatcgaataggcgtacttccctgccatctctcaggcagaagggcttcccttaaaagttcaggatgctactgggaaggaatgggtgttccagttccgcttttggcccaataataacagcaggatgtatgtattggagggtgtcacaccttgcattcaatcgatgcagttacaagcaggcgatacatgtatatatcttct

SEQ ID NO: 63509 - DNA, 325 bp, Oryza sativa
ctgatgaacaacgccagcacaatggttatgcaaactgtaataggaagtagtttaaaataattctgcacttacaaaggtaaagacactataatccactcaactgatgtatagtaatagataataatacgctgtattattcagttgtaagaaaataaggtgatttggtcttattttcttgaaatgacccccatccagtactcagagtttgctcaattaatccctagcccttccacttactgagatttgcccaattgcacaccttcaacagttcaactaatgtattcagtatttcagtacatgcaccaactgaatcaaaaatattgga

SEQ ID NO: 63510 - DNA, 336 bp, Oryza sativa
  unsure (1)..(336): unsure at all n locations
atgattcgatcggtcaaacttgattgcaatctctgaccatcgaagatactggggcgtgtctggctgaacagcattgatctcccgttcagtcaacttctctccgtttagactcataagccagggggccgccgaagatatggttgagctccttgcggtggtcttgaaatccagccggggtgtcgccgtcgtccttcttccttgacgtgctttgttcctcgtcggagttcttccgagtagacttggtgtactgctccgcgaactgcttgtagatgaagcactctntggccacgtggttggagtttggatgatgcgggcattgggagttcatgatcttgt

SEQ ID NO: 63511 - DNA, 318 bp, Oryza sativa
  unsure (1)..(318): unsure at all n locations
gtgctcgcctataagtcatgggaatcgcgaacataactgtgnagaagcagcttgctctctgatagtctgaatgaacaagaactgataggattatatggagcactttgtttggagaacagagccacggatgtcattgagataggggtggcaaatagttatttgccaaatctaaaagtggcaaatagttaaaaccccctctccttgtactacttaattggtatcaatttttttttaccatggaagcatgttaaggccatgattaaaaactgcatatttaagcttggagtcctgaaagcatggacagtactctcaccggta

SEQ ID NO: 63512 - DNA, 311 bp, Oryza sativa
  unsure (1)..(311): unsure at all n locations
gggggtgcctgtgcgacaacccggattttctttttcagcctttgatctcgtcaaaactcagaaatttcgatgataacgtagtaataccgctttttagcttcacttttaagtaaacctaaatgtacggcacatcgtataagatctgcaatccttagctttgaaaacaagcgagaactgtattctgtagcccaatgcaatatcagatcagttaatntgcagggagaatgagctgcgtagtggctatttatgcatcacaattcagagagctaccgaaactctatttaagcacatggagatgggccagatggagt

SEQ ID NO: 63513 - DNA, 168 bp, Oryza sativa
cgacgggatattagagcaggatttggtacgttagacgtggtgtttagattacgggatatcattatctggggttatatattgcggatgagaggtgggccgctgatggtgacagctcagtacgagtattcctccacgccggcatataatcctaagctaataccctgggag

SEQ ID NO: 63514 - DNA, 271 bp, Oryza sativa
ggggaaaaagaaacgggaaagaaggggaaaagaaataggggaatgagaaaggaaacccaagccccccggtggcaaacacggaaaaaaacgaggggaaacaaaagagaaaaaaaaaaagagcgaaacgaggcgagcgagagaggaagaaaccagaaacacaaacgcacagaggagggaaaaaacacacgaacacacagcaaagaaaccacgagaaggggcgcaacaaagaaccgagaaaaagccaaggagcacaagaaaaaaggggggaaaa

SEQ ID NO: 63515 - DNA, 259 bp, Oryza sativa
ttacgctcccatgtcacggtacttaatgacgcagatcggctaaccatgagatatctactgagtacatatcagtatccatgaaaccgaggttaaggtgttgtagatttgaaaggttaccaagctgaggaggcactctaccaaacaatatggatgtttcagacacatcaagatatcttatgttcttcattgaaccaaagtactctgggacatggctggcttcaactggatagccaaacttgttaatagagacatcaagctc

SEQ ID NO: 63516 - DNA, 346 bp, Oryza sativa
  unsure (1)..(346): unsure at all n locations
cccgacttcccgaagctgtcttggcactcgtttctttaccctgcttccctgagcatggtctctgccctgatgctgtatgcatgtattggaattgggaggtagctcctcctagatttaaaaaatcatccaatattatataagtcaagttgtctaaagaagattatatttcacaggttattaggtgctcacggatgatttgcttctntcagcaaattaggtactggtgccgtcttctccttcatctatctctcagttgtatcatttcccacgtacaaaacatgctntgagtcagtgctgccactgatagggaaattgatattggcattcatactaatactaactaaag

SEQ ID NO: 63517 - DNA, 322 bp, Oryza sativa
accggatatgagaatagagtatacatcatagcaacgattgtgtttctctcaggcgcccctctatcacataatgtgaagctcgcctgtgtaatgccataattacgtacgtgcatgcaaccagttagtgaagactttgtatactctaattacctgcttaatggagagatgtctattaataaagtaagtataagaagtaaggatggtaaaatcaacctaattaataaacactactagaaaaatcaggcgtcctaatgtggggggctttttttcgcaggcggacatgaccctcgaagccaaatgaccgcctacataaatataaatc

SEQ ID NO: 63518 - DNA, 316 bp, Oryza sativa
  unsure (1)..(316): unsure at all n locations
taaccgccgacggccctcatctcttacgtttacaaagttggttgtggatgcttctatttatcataaatattgcaaatcttgtatgtgtctgtggcactaatcttgcagcgagatgtctccatggtcgagcttgtgaccataaacaaagcaatgccgggagacatcccggattatcttgggaacttttctttccaataaaaagaagaatcagtttttatgatattatgcaccttccggtattcttagtcagtaaccagttcaggctgagaatagaatgatggacgtacgatgcctaagaacatangaactacatcaa

SEQ ID NO: 63519 - DNA, 297 bp, Oryza sativa
  unsure (1)..(297): unsure at all n locations
gagctgctgctttcactttccttttctgcttccatctgggcccttttcttctccagctccatctgtctgaggttctcggcatgggcacgctcgaacgttttcacgaagcttagcaaagtagagacaactgtccacataaaaaggtcaggaaatcatatagctgctgcagatatccaaaagctaactggtattaatctgaagatttggtggatgcaacaattctagtatctatcatggcaatacaagttcactaaggaacaaagcacacaaagaacagcagcaatntggatgattctg

SEQ ID NO: 63520 - DNA, 365 bp, Oryza sativa
  unsure (1)..(365): unsure at all n locations
aatagacgaggaaccaccaaacctataacactacaaacacagatgtcgattgccccccccactactcctacacacaccgagactcgtcaaaggtcataacatggtatttatgctatgagtagcagcaacacaaatacaacacatctgcaggttgatcatactacaacgacatattcaaagttgacaacagtcattggcacaacgaactacacagctcactagaggttatatatgagctatggacgctggccgctcaaaagngcataatctgttcgccatccatgactaaattcaaaccagcctgcattgcagttgaacaaatattagtcgagataaataacaataacataacatatatcacatgc

SEQ ID NO: 63521 - DNA, 287 bp, Oryza sativa
catctccgacggcgcaactaataataataattgtaattgtaagccagagactctagtagaggagtttttatttacgaacgagaggggaaacagaaaagataaacttacagcagcgacagatttattcttggtggtcttctccttgaactccttacggaactcctccctgagcgaaacaagatcaaacgaaaatcccctccacaaaaaaaaagaaggcagaagaaatcggggaagtggtctgacataaaaacgaagaaagcggagggagccctcttgggcttggtggg

SEQ ID NO: 63522 - DNA, 294 bp, Oryza sativa
aatgaattattacacataattaattaattgttataaaaatgaaaattgggttcattcgaattttttaaaaaacttttatataaaaagtttttgtaaaaaatacaccgtttagcagtttgggaaacgtgctagcgaaaatgaggaagttgaaatttaaagttggagtttagaagtgcaaataatttaatttcattccctccttttatcaacagggtatttgaggtccgctgcttgcatataccggtcaatgatcgacaccatatggaggtataatagacgtcttgtttagatatg

SEQ ID NO: 63523 - DNA, 232 bp, Oryza sativa
atatcatttgattcattgttaaatatactttcatgtacacatatagttttacatatttcacaaattttttttaaataagaagaacggtcaaacatgtgctaaaaagtcaacggtgtcaaacattttgaaatggagggagtacttcgcaagcatcccttccttcactgggagtaatatctttacagctctataaagaaagcgtgcggaccaccaacctatatacaataactgc

SEQ ID NO: 63524 - DNA, 286 bp, Oryza sativa
ggacacagcccaagacaaatacaactaaaagacacttcctgcgggaacttgtctaaataaggtacatcagaatagcaaagcaaacagcaacacaagcattattaaccatattacacactagtaatgaacacaagtatcccccaggccattattagtgttagaaggaatagcccatctccgagcccctacaagtagaatagccactcagtatagtcagtggggtagtgatctcttctaacagtgggactgtactaaaatgcccattctggtgatctgctaccatcat

SEQ ID NO: 63525 - DNA, 285 bp, Oryza sativa
cgctatgagttgcacaaaattactacccaaactgaataacattactatttttacagggcaatccaaggatgggtggatttactcgatggatcgacaatgtcactccatcatatcatggccagaagataacagagtcagaaacacaagtagagtatcaacgattgaaggaccacgagaatgcaatgcattctgaccgacctagaaagtgccgataggttaccgcatgcttgattcgtcgggatggacaaatttgtaccgtgtatccatggcacttcctatctatct

SEQ ID NO: 63526 - DNA, 340 bp, Oryza sativa
  unsure (1)..(340): unsure at all n locations
gatttaacgattacgaacacaacgcgcaatcggatcgtanatgaggagtagtcgaagagaaaattgcatttgaagtatacgtggatagtatctcttatagatgaagtggtagatgatttagacaaaccagctaccactagctgtgtagtcacgtccattaatatgggatagatcactctataaatatgtaaggctaaatttgatgaggcattgatgtgtaatgttccgtaaaaaggaaaaaatcaacttctaaggatcagaagctaatctttttacgatggagggtgtatatctaaagcttagagaatgctggaaacttcgaattatagggaaatacatg

SEQ ID NO: 63527 - DNA, 310 bp, Oryza sativa
gaaagacgtctcaaagtgacgaagctaatgctggacaagacagcgaccaatgaaccacggcagagctggatgacctcgacaaggttattcacccgccatacaagtgagcggtgccatcccagtaagaaagacataaatgccaagataaaagaaatatctgtcgatatcaaagcagctggctttgctccagactagagatgtgtgctgcacgatgatgatgatgaacaaaaagaacgcaagcttcttggtcacaatgagaagctcgcaataactcttgtattgatgaacactccgtcacgatagactatac

SEQ ID NO: 63528 - DNA, 296 bp, Oryza sativa
caatcctaatagataatcataacgaagtaaacaatttacagcatttatttggaaaacctgatcgctgcaaaagagcctaaaaactcccaaagaaagaaaatgaaagcgaagttacatatatacgtaccttctgagatcttctgggtgatgaatgggacgagcttcgcggcgtatgaacctcctccgaggtagaatgtgtttgaagggaatcctcatgcgcgctgaaccactatgtcaaacgaccgagagatcatgcatgaatcgagcagagacaacgataccaccaactgcaacac

SEQ ID NO: 63529 - DNA, 230 bp, Oryza sativa
  unsure (1)..(230): unsure at all n locations
cacccccgcgcatcctnncctcgccaaaaatctgcaagtacgcgcgttactgattcagttagaggcatatgaatgcccctcggatcttgacagattcctgaacaataccgaaaacgaaaggaactgcataattgctccaagttatcacccccccccccctcctgtgaaatcgtgatcacgacatgcatatatacaacctatagctatccgtatttgtgacataaattatg

SEQ ID NO: 63530 - DNA, 265 bp, Oryza sativa
aagcatgctctagaaaaataatacaatcatcagcatattgtaaaatagataaaccatcgcctactaaatgtgggaccaagccagagatcggaccatcatctactgctctctgaattaatatgaggaacatatcaataactatattaaaaagaactggagacaatggatccgcttgccttaaacccgcggaagtttgataacttgatcccacctgaccattcactgtaatgccaacatgaccacctgggataaaagaagcaatcca

SEQ ID NO: 63531 - DNA, 416 bp, Oryza sativa
  unsure (1)..(416): unsure at all n locations
agcttggacttctctacgtgcacaacctgtcgattgtgctggatcgtancttcaatatctttgcgctcccggcaatcggctaatctctgcctggccttctccagcttgaattggtgttgctcaaggtagacggctggagtaagggcatccgctagttcatctgggagtagagcttggatatctgtgaaccttgcccggatcgagccacagttggtcaccaagttgtccagtgatgcttctagccgatgagagatatcctcaagcgttctcttcacatcatcggacagaggagctatagctttactagtggtgtcttcttctgtttcatcgagataatccctgatgtcgaaggaaaacaaatcggctacattctgccagagataatgctatggatgattaacgattaaaacatgatt

SEQ ID NO: 63532 - DNA, 470 bp, Oryza sativa
  unsure (1)..(470): unsure at all n locations
tactataaaattatatggaatgattcattgcatgtagantttgaaggaaacttagtaagaactccaacctctggaaaatctacctttgagtctatctctcttattcaattttagcatttttcttatagcccaatcaaacggttgttcatgtgtatttactttgntttgcaattctctattttacacttctattcctgtcagaatcaggtgtgttttatattcctctctttttttcattcccacaattctaatggacccttaatcaatntgttccgtataagaataaggacaatagtgggctatcagctaactacggaattatatggagtagagagacaaaagaaaataaggagtattgactctacaaatactctaagattatcacattaaagcatacgtgagagaaagagataagagaaaaaactgaaaacaactctatagctaatctattatactctaaatataaatta

SEQ ID NO: 63533 - DNA, 405 bp, Oryza sativa
  unsure (1)..(405): unsure at all n locations
agcttaagtgtactacattactatggatcttttatagctcctgtaaacagctgtagttactgtcattagcctcgatttttgaaattaaaaaatcagcaagtacactttggttttgtgaaaactgttaaaatataaaacaagttcctgatagttactccctccgtttcatatatatgtctagattcattaacatcaatatgaatgtgaaaaatgctaaaatgatttacattgtgaaacggaggaaatagttacctgtgacttatttttagcaagccctaatatccattgcaagtttggaactaatattatagccaaagccaatgtnggttcacttgtatccgttaagaactatctgtacattgaagaatgtattattaactattttatttttcttgtgaatcactg

SEQ ID NO: 63534 - DNA, 416 bp, Oryza sativa
  unsure (1)..(416): unsure at all n locations
actaagcttagagggaagtactagtagaactataggtactcaaatagtggtgaaaggtaatccattaggaaaaatatataatcttttnttttcaaggagcccattgaaacgtacgcctgccctggtttctgaccattgggaattctatggaaatgaagtgactcacctaccatgaatctggcaaaatttcttggtcataaatatagtttgatgctattttttggagatgggtttatagttatatactttgatgatgcactgatcgtacaagagctgatataatattaacactatttgttgttaaaaaatagacattagcaaaatcttaatcatggtgcttaagtactattgtttgactaggtatctatgctattcaaggaccanaacatcacctncatttgattctttcttgatag

SEQ ID NO: 63535 - DNA, 424 bp, Oryza sativa
agcttgaacctttgctcgtcccgagtgaatgacgttatgaaacaatgacttggttgttgatcaggagttgctactatgctgcatatctcaaagatacaggtgcaaggtatatgtactctctcttagattaaataatttttggcacggtggcttacccttacccctgattcccacgagacactgcttctccttgccttgagcggttgaaagacagaacagcaattaaagcaccaatcacccgatctttattcaactcttgttccggaagttttcaaatgattttgaaaaacaaaaccaagttcctcaagtgattcactcagtctctctaagtgtatcaaaatgaattcctcaccaaatgttgccttgttgattcctactctaaggttttgatatgtggcgctcggtagggatcaatcatggtata

SEQ ID NO: 63536 - DNA, 452 bp, Oryza sativa
  unsure (1)..(452): unsure at all n locations
ggccaagntctatcctagtggatttgatgttgaagaaatgaaccaactcctctttcaactgaaccgctatatattaatgatgtgggtaaggatgagaatttcacaaatttgagaagtttagcagatctatctatgatgcttgtcaaaacaaacaaggtttctcgctagaccttgtttacagacttctcaaattggtgttagttctccctgttgcaactgctggtgttgagaggggtntctcttcaatgaactatatcaaaaacaagttaagaagcaagatgggacaaagaatattgaatgatggcttggttacattcattgaaagggatttcttcttgcaagtcaaggataaacacatcatcaatcatnttcaaaagggataagtccactttacacccttgaactcttcattttgtcttaaatacaccccaaactctaataccggatatttc

SEQ ID NO: 63537 - DNA, 337 bp, Oryza sativa
  unsure (1)..(337): unsure at all n locations
tagctttgtgccagtgcgccatggatggatgtgnttgttcgtgcctacccacagagctccatcttgtggaggtagaagaaggggcccaatttctgtgccctgtccctagcggaaggcggcgtggctgtggataaattacatgcctaattctactatatattcgagggccggcttgccgtttactaggacctgcgcctcggggaggtgccagccgcgcgggcttactataagcgtctcggggcggtcttctaacctgttcttccgccctcgcgccgactaactgttggtgatcttgccggcaacctcttcctgcatgtttacctgccctggcatatcg

SEQ ID NO: 63538 - DNA, 349 bp, Oryza sativa
  unsure (1)..(349): unsure at all n locations
ntcccagaacaatgcacactatcattcctgagaaaccaggctcttcataagagtaaaagaaattntgccctgctttcagcgtttattgagtccaggataatgagcagccagtccggtcctgaccgaatcagaaaacgctcgtcagggagctcccaaacctcccggatcagcgatcgcagtgccgcggctttagtacaggatatgacagcatgaaaaccatcctcaccgccaaggccacaaatacggcaagttgagtcaatttccagttttcgcttttttcggttctccatagtggcaaggcattctctagctaatctccaagcaaaaatttttaccttctgtggaacaa

SEQ ID NO: 63539 - DNA, 423 bp, Oryza sativa
  unsure (1)..(423): unsure at all n locations
agcttgccttgtaaactgctgtacttcaagcaattttatataatgggcagncaaatcttgggttaacattcgttatgatgatgcatggcttctaatgtttctttaacttttgtcaagaacttaactacatgatatattctgcttattgtttgacttgagtacttcaaatgacaagaagagaatgggctgatttatctcacttgtccatacgttcaatgatgatttttttttttctgtaggagagcttcaagaaggcatcaattatatgctctgagagtgatgtggaaactctgggaggtgtggctggatcctcaccagaacaactaagtgctacgataaataaattggaactgagatttcataaagaaagtagcacgtctggagctatattaccttgtcatttctgtactaataatttacgac

SEQ ID NO: 63540 - DNA, 473 bp, Oryza sativa
  unsure (1)..(473): unsure at all n locations
ctttggcgtttgttaacctgagacctgagagtttagtgtttaatgtgaactatgtgggaactatttcatggtttgtggaagtcgtcgtgccttctggacaccatcagttttttttccttacattgactactcgttggcttataagctgcggccagaatctaaatttgaaaacttcttaaagaaaatccaagaattacttttggagttgctattctgtactaggtatcctctcttactataaatttataacccaccaactcctaaaacttaacatacaaagatgccatcatcctctactaacaagatgccactgccacatcattatctagtaacaatcattatatttaaacatcaaacaaagatgctatattgtctantaatttataatttagtcaaaatttagagctctttaaatgcaagtatggtaaatcatcatcccacattatcacataatatttcaatatacatcttta

SEQ ID NO: 63541 - DNA, 409 bp, Oryza sativa
agcttaacatactttaggagtgcataactatgtctctatctatctatcttctattatatactaaaagtccattaaacatcctataaacgctctcaagccaccacataggattcctaaaaacgctcatatgccgccacgtggcgttctagtatattagaaacatctagcccttaattttcatttaaaccggtgggtccattattttagaccattagattagatcacactataataaatagatggacccagtatttttaactattaaatttatctttaaaaaaattaaaaaacatgtaatccatctcgctcttcttccccgttagcccatatatatggtacgtatatcctccacttctcatgccgatggcccaagagaaaaaggcagagaaagaaaaacatgtatgtacgt

SEQ ID NO: 63542 - DNA, 476 bp, Oryza sativa
  unsure (1)..(476): unsure at all n locations
ntaccactctttatcacttanacaagatcacattgtacattgaaatataatgagacaagatnttgacaattacaatgaaacaatgttgagttgccacttgccaccatgcttgacaatattaaaattccaagtatcaatgcattgtcaacagataacagtgctgttgcacaagatgaaaatgaaaccggttaacactttgttatcggggactaggacaaaaggaatgtcatttggcatgctaagatcccaacaaattagcaaacgatttttcattcatgttttcttggntcgctttacagtacatatcnaaaagaatttggtagtgcatctgttgtgcatgaatgagtgttaataatctgtatgtgcactgcaatatgttgtgcttgatactttaacaaagtgcagggcattaatgaaaaacatcatgtggattaatgcatactataaaattaccaatcacatggtgtcacacaagt

SEQ ID NO: 63543 - DNA, 420 bp, Oryza sativa
agctttgccgacatgtgagacccctgtaccgacgtcccccgccgaacagacttagtgcgccgaagaccgcgccacactcaccgacagcacctcctcacacctagatcggctccttcaccgacggccgcgcctatctgcaccaagccgggctactttaccggacgcgcctatcgcgccaatccggcctccctccatcggccgcgcctatcatgccaagccggcctccatatctaccgcccgcgcctctcgcgccgagccggactatgctggcatcagctgcgcttctctgcgccaagctggtcttcgacccctacaccaaacgatgccgcgccggccagatgcagctgactcccacgtcctctgatagataaccgaagccgtcatgccttcggtgaccgcaaacatggtcaccaccaccac

SEQ ID NO: 63544 - DNA, 427 bp, Oryza sativa
  unsure (1)..(427): unsure at all n locations
tctaacgatactccctccgttccataatataagacacaactcacttttcttagatgttacataataaaaagcatgcatgcaagcatgcaattaactatagcatcttctccattaaattattacttttttaaatcctccactctcatgttatctaattctattggatacatgcattatatttattatgatgatccaaactacaagacgataataattatttcttattctttggattaagagtggatgtgccttatattctggaatggacggagtaatatatattttttttaaataaatgaactttcttcatcaacatttcttatatacatgtatatgtatntacaggcatatgtatatacatgtatatgtatatatatacttgtcttaaaaagatcaacttatcaaacttctgatatttaaatattta

SEQ ID NO: 63545 - DNA, 258 bp, Oryza sativa
  unsure (1)..(258): unsure at all n locations
gaaaaaaaagnnaaaaaaaaaaaaaaaaaaaaaaaagggggaaaaaaaaaaaaaaaaataaagaaaaaagaagagaagagaagaaaaaaaagaaaaaaagaaaaaaaaaaaaaagagaaaaaagaaaaaaaaaaaaaagaaaaagaaaaaaaaaaaaagaaaaaagaagaaaaaagaaaaaaagagagaaaaaaaaagaaaaaaaagaagaaaaaaaaaaaaaaagaaaaaaagaagaaaaaaagaaaaagaaaaaaa

SEQ ID NO: 63546 - DNA, 420 bp, Oryza sativa
  unsure (1)..(420): unsure at all n locations
agcttatccagaagagaccgagttcaaatataatgcggcatggcaagttatctattaattaaggatagtttgttagtttccttttatctataagaaantgtgtgtagtgtcctataaggactttatcttttccttttatctttaggaaagtttctttcgtgtctaacaaggacttatatcaacccatgggtataaatacgtacacccggggtctatacaatctatcgctacgatcaatacaattagggttgcgtcaacgatcgctcagattgcaacaaaactcacacggatggattcggaataattctaggagtttggaataggtctccgacttcgattttatggtcaaacggatggtcaacttgatagaataagaaaagaatttttctgatttatcttgtcataggaaaatcggatttc

SEQ ID NO: 63547 - DNA, 329 bp, Oryza sativa
cttattgtatgtcatggatcgaacatggatgtacatcacgataattgctcattcaacgttcttgaaagaagcagccataattgttgagctcgcacaggcacatgctgtgagcgagaatatgaagagcattttttgcccatgcaaagtttgtaagaacgaaattttgctgccaaatctgaattaaatattgtcgcacatcgtataacgaggatttaataaaggctatgagatatggacttttcatggggaagtcggaggtcgtagcaaagagttagatgatatcttgtttgatgatgcaaaatatttatattccaagacatgtcacatgg

SEQ ID NO: 63548 - DNA, 419 bp, Oryza sativa
  unsure (1)..(419): unsure at all n locations
agcttgtaaaaggttagactttttgattatccactntaatctgattgggttggcataaagcctggctgataatcttagccgacgtgcaaggacttatccagcttttcatcaatgatggcaacataagtgcatgacttaaagcctcccaagggcctacacagctttcattttatatggttggagcaaggttttgtttattttatataaataccatactgtactgtcgaagtgtcaagcagctgatgtggatggattttgacagaaacttggcaaaatcatcaaatttcagacaattttctttgttaaagttatacggataaattgcgggaatatcaattaataatcaaggaaaattattcgtgatcaactataaatcgctgttaggtttgggttcgagtaaatgaaacatggaagtacat

SEQ ID NO: 63549 - DNA, 443 bp, Oryza sativa
  unsure (1)..(443): unsure at all n locations
tcagctcattcgccttaccagattntcttccatacatnttgctgcattgatgaagaggatccaacatcttccattgtaggctgtttatcctgcacagtagtttgctgtgtcgtgggatattcacccacatctaacacaaaaactattacacagttacaaagagtgcaacatcaagataaatgagacaagatgtaaatattacctgtttttataggatggcacatagtacagcatggagtctgactttgtgataatctattagtagcaacaaataaggattagaattaaagtattatgtaaaagaagctcacaaaaagttcagtatacttactcctctgtgatgtccaccttaattagaataaagcaccagataatttctggaagcaaatcacccagataagcaggtgtcatcaattctattgattatctggaaaatttctttc

SEQ ID NO: 63550 - DNA, 391 bp, Oryza sativa
  unsure (1)..(391): unsure at all n locations
agcttgataataagagccttgatcaagtacatacntttgaatgttaactacataagagaattgatcattatgttgcaatgtagttacatatactgtccaagtgtgggtcttcattaatcatccttgattgtgttcttgcacggcccacaataattggggactgaaatactttggcgctctgaaatttaaaagcctgctcttgatagcttcatgttggacaactagccaacttggaagtgttacaacaaaaggagcacataaaccagcaacagataccaccagttctcccttgaatttcgtgtttttgacgttgagatctctatctgtttaaattactttcttattaacatcacatatatgatgggtttggcaccttttaaatctcagaata

SEQ ID NO: 63551 - DNA, 412 bp, Oryza sativa
  unsure (1)..(412): unsure at all n locations
gggctcgtagtggtacatatgttggttattttttttaatataaacaccagctataatatattataggtattatttttaaaaaaatactaatactatatgtaccagtttttgtctaaaactggcccctatatgtgcttaaaagtctcggttttaaaaagtgcaaaagtaatgcctaatttgtataggcaaaacagaggacgcacaacaaaactcatgtggaaaaaggacctacatggaataatacacataatttttgagaaaaaaagacttgagtctctagctcanactgaaaagggttaatttgatccgcgtcattacaaatgtgtctattcagataaatatcattataattcatttattcgtaaccgtgccacttaaattttacaaaatgggaaccatactatcgacgtca

SEQ ID NO: 63552 - DNA, 420 bp, Oryza sativa
agcttgaagttagcagtcaaagaagaaagatacaaacgaaatgcctaagcataaaatcgacgaaggtgttcaatattccaagaattgttggtgagagtaccatcttcgcgtttgagtcgataagaacctggccgagtgacttcagcaattatgaactgtccttcccacaagggagataatttatgccgatcttgtgtgatttgaattttcctcagaaccaggtcaccgactaaaaaagctcacgatcgaacattccgattatgataacggcacaacccttgtaagtaccgagtcgactgaattaaagctacttcacgggcttcttctagtcgggtgatgtcatctactcggccttcctcatagcgctcctcccggaaattgcgaaatcgaagggattcaaactctacctcacttggcagc

SEQ ID NO: 63553 - DNA, 422 bp, Oryza sativa
  unsure (1)..(422): unsure at all n locations
atctctgcgggttgaaatcgcaaaaaaccgacacctcataccaattataggtgccgattctaaataagaatcgacacctattctataggtgctttttttataaaaactggcacctttaatatattataggtgtcggctaattaaaaatcgacacctataatatattataggtgccggtttttttaaaaaaccaacacccacataaatcgagccgagccgagccgaaccgacccccgaccacatcgatcttatccattaatctcctctcctctcctctccttatacattccctccccccctctctctcagttctctctatctccaacgaataggctctctctctctctccctcaatcaaataagtgtgcggcggngggaggggatgctacngtggccgcgggtcaacaatgggtcagcggtgg

SEQ ID NO: 63554 - DNA, 418 bp, Oryza sativa
agcttgctgctatcgccatagccgatattaatcatcagattgctcttcagcgtgctgcccgtaaaaaaggcgtcgtccacgtgttgacggtcaaagcccgacatcgggccggtatccagtcccagcgcccggcaggcgacgatcagataggccgcctgcatggaactgttgcgaaacgctgtttcttcggcaagttgtgggctggaggtaaaccaactgcgggcatcaccgtggggaaacagtagtggtaaccgttcataaaattcactgtcccaggcgacgatagcggtgacgggcgcggtcagggttttttgcagattgccgctggaaagtgccgggcgcagacgttctttttcttctgccgtgcgggtaaacacgatccgtgccggagaacagttagctgatgtcggcccccatt

SEQ ID NO: 63555 - DNA, 426 bp, Oryza sativa
  unsure (1)..(426): unsure at all n locations
agcttgtcataccttcagttacctactacaagtctacaaccatgagtccatgatcaactctgaattcagataggtggaaacatactgctgaacaacatagttttctatagataaatgcatgcacaaggagagcctcaaggtagaatctgattgaaacgtcttcacaagaccggtggcatttattcaaggagaaaaatcgtcctgcatttgtttcggatgcaataggatcataagtcccattttagttcttggagtttaacaagtttccctgtcctccacaaggttccataaatttatgttttcttagagcaagtttagtagtacagcccactacttactataagccaatgttaaagctaacatatataataggttagctataagggtagctttattnttttcatcctctctctttatctctctacg

SEQ ID NO: 63556 - DNA, 470 bp, Oryza sativa
  unsure (1)..(470): unsure at all n locations
tcttcttgaacacccacttgcaccccacaggtttacacccatatggtcgctctgtcacctcccaagtcccgtttgcgataatggaatccatttcactacggacagcctccttccagtagtctgcatcaagagatgcatatgcttctgaaattgacttangagtgtcatccacgaagtacatagtgaaatcatcaccaaaggacttagccgtcctttgtctcttactccttcgaggagcttcattgacatcctcctcagagacatgttcatgtgtatgttcagtttgttctggtggtgtgattgaactgggaattatttcagaggggtggctcgaaccactatgagtatccttcattggaaaaaagctcttcaagaaggtagcatcacgagacttcataattgtaccaacatgcatgttaggtacctccgatttaactattaaaaatctataggtaatgctgtgatgagca

SEQ ID NO: 63557 - DNA, 409 bp, Oryza sativa
agcttggagcccggaccgggtaatcacatgccatggctgtcttgttcttgtctcagctcgttgctgcgtttggacaatgttagaaatatggtcacaattcagcatattgtaatccaaaatattaagacaataagtatgacttttgcagggaaggaaagagagtaaactacagatcatgcttaatatagaataaacataagcatttgtcacaacacaatgtaatgaaaccatttcacctaacagaaatatagaagaaaagaacatgaacacaatgaaaaacgagttataccctaagaatggccctccgctggtgtttgaggcagtattgcctccgttggtgttgtctctaggcgcactgccgttggtgtcatctgttgacatgatcgtcgatcaataagaacatgagctg

SEQ ID NO: 63558 - DNA, 395 bp, Oryza sativa
tttgtcccaagctccaccaaaatcaagtgcgcaagcccttaacatgtcctccaatatttgattgactcttctgtctgaccatcggtctgcggatggtaggctgtgctgaaatttaaccgggttcccaattcctcttgcaatttctgctagaactttgaagtgaattggctccctcgatcagatacaatcttcttgggtactccatgtagacacatgattctcgagaggtagagctctgccaaccttttgcacgtatacgtggtatgtactggtatgaagtgagcaaccttagtgagtcgatccacgactacccagattgaatcgtgacccgatgatgtccggggcagtcctattataaagtccattccaatcttctcccattttcattccgggat

SEQ ID NO: 63559 - DNA, 432 bp, Oryza sativa
  unsure (1)..(432): unsure at all n locations
agcttgttctctttcttcatccaatcacacagcattntatcctcctttgcaacacccttgaattgaatcgaggcaatccatcattttaattaatttgcagttatgtagtggcaatacatttagtttaagcgcattagtgttttggcagaaggatgacgcaccagcatggcaccggcggcaacaagagattggcatccttggagatggaaaaggctcatggcacacaggcgaatgacactgctttgctggatgatgtcatccgtatcagtagcgccatgcttgagcaactcaagcatcagctcagcctccttagcgatacacttaattggatccattcgtttaaattacattattagtcaacacacggccaacatgggcaaataaaataatgagtaaattttagaaaatcccaactttaagatgcacacaact

SEQ ID NO: 63560 - DNA, 429 bp, Oryza sativa
  unsure (1)..(429): unsure at all n locations
actcagcttgttgttttacgctagagaaatntctttgaaaaatatactcctcttcgcattcgttgcaaagcgtcgaagggagggttatttantctcttttattactatgaatagtaatgggccctgtgggcttttccttttccgtattcgggctttttactgttcggtatcgtcccgataggaatttaccgtttcgtctgccctttgacacgtgtcagagctcgattggttggcaggcaaacggtctcgctacggggttatatatacccccaaaccggcctgccattnttcactctccccgtgctctccccttttttaccgcttgacacgctccgngctcttttcgctcttctggttctttagctntttcgccatagtcgtgctcctagcctttcggctgtttgcctctcttttctgtccacgagccta

SEQ ID NO: 63561 - DNA, 426 bp, Oryza sativa
  unsure (1)..(426): unsure at all n locations
agctngcatctcatttagaaggtacgtggtctaatacaaacatttatattaataattatgtaaacaagtgcaaatagagcgtttgcaaaaaaaaagtgcaaatagaattacttaaaaaaatacgctgatgctttaatggaactaattatataaacaaagacaatatccaccttagcacacactaacggagaagtacaggccctatgaacataaattacatgactaaaataattgtcaacattctagcaaatatggtttctagtatgtgttccaacattaatgaaaacatacatctccatttaaaattagtgcagtgtttcaaagacaaggaaaacaacgtaaacaccgtgttagtgaagaanaacaagtacatttagtgcttaacaaatattaccttgcatccttcaaccattgaagacttattac

SEQ ID NO: 63562 - DNA, 277 bp, Oryza sativa
atcatgcgaccctcttgcgccatgatctctcgggacagaggatgtgtacttatccaggtaagacattcgacatgtgacatatcaactctcgtgccaacatcactgtattgatggcattacctatatcgaatggttattatataagaaacattgaaggatatactgaaatatgcagaccattacacaaaatcttgcacaccgataggcacaggtgtgggcatgctctacatgatacatgtgatgtggtacgagagaaaatatgcacccgtacaaagct

SEQ ID NO: 63563 - DNA, 409 bp, Oryza sativa
agcttgtttaattgctaaatcctccatgggttatctacggcatcttagactagcccatgttggaatgcggaatttggcaacccttctaaagggggaacacatcctcaggctcactaatgtcacatttgagaaagatcgtttgtgtagtgcttgccaagccgggaaacaagttgggaatccacatcctatcaagaacatcatgactacaacacgccctcttgagctttttcgtatggatctattcgggcctgtggcctacataagtattggaggtaacaagtatggttttgtcattgttgatgatttttcccgcttcacttgggtgtattttctccatgacaagagtgaagcacaagatgtcttcaagcacttcgccaagcaagcccaaaatctttatgatttcactatc

SEQ ID NO: 63564 - DNA, 278 bp, Oryza sativa
agcttgtacgaagggagaacattgtactacttccttcttatttttactgacacttttggccatacacacaaaaactagaaattataaacgtccgtactttgcgacgaataaaacatatattagtagtatactattatctaaaatactttttttatgaaatgtggtacttagtgttttgctattcggaatattcaccttgatattacttcatatttggttacccatttatatgaaaaagttcaaggagtaatttttaaaactaccataagaataggtgg

SEQ ID NO: 63565 - DNA, 280 bp, Oryza sativa
  unsure (1)..(280): unsure at all n locations
tcctcaaacaagccattntatcatgcacagcatcttaatctattattatagaatcaagctaataagctaaaaatcataacctacttctttggcttctctagattttcactaactgaattcccatatctaaatctaaagttgtcccatacatcgatcccctaataattaatagtacggtggtaaagaacaacctgattgatgaaaagaaaaaaaaaatgcacaactgaactgagctttataaggcggacgtgaacgtgatgtcctgcgcacagaggctgcc

SEQ ID NO: 63566 - DNA, 423 bp, Oryza sativa
agcttatccaaagggcataacccatctttattgtcctgtgaacaaaaatgcattgcataccaagcttaaaaaatattgaatattattttggatttcaaagtgtgttcagaaagaaatacctgcacaaacattgttggaatcttcagtttcagtagtgtctcatccctcactgccccgttcactccctaagaggaagaaagcaaggatgcaaaacaaaacatccctaagtagagccataacagagagtgaaaataaccaagtggagcatgttttaaaatcacagcaacccttttcctgaaaaactggttcaggtcctacaaattattatataatggaaaccgaaggctaaatcattttttgatgtgggttacatcctcatacattgtagcaatcatattaccccacacaacacagaggatacct

SEQ ID NO: 63567 - DNA, 394 bp, Oryza sativa
  unsure (1)..(394): unsure at all n locations
tatcttgagcatcctttatccttggtttgctaccacagatcaagttntttgcacgatacagagaggaagaatagaatttacctgctcggctacggtcagtgtcctccatcttctgccgcagcacctggtcatcgaacttgcgaagaagatcctcggtgtcatatgtggtgtccttgagctgcgtgagaagcaccgcgagatccttgttcttgaaccttccccactcgccacgattgatgactaagcgagcattgtgcaaggatgcccggaggcaggatagatcatctttcagattggtcgctccgtggatgttgatcccagctgagatgatcttttctacggtctccatcaccgccatagtcgtccttggcttcttcggatcatggcttcgtct

SEQ ID NO: 63568 - DNA, 350 bp, Oryza sativa
tgcaagcttcgttaatgggcctgtcgcgctgcttgttctccgagcctcatgccgccgctgaggacggatgggcggagctcatattttgtgaccaatgagcacgttaatgtggggggcgtcttcaataacctgccgcagacgctgcggatctctgatctgtcgcccgcgccgatgcacgggtcccatctgctcctggcgtccaaggcgtcccccgtgcgtacagccagaaggcggccggggaggagtacccgggctgcgatgccatcccctgcgaccaaatcgaggtggcgttctcagacgtggagctgtggatcgccgaccgctccgtgctccccgtggtgaacttgctg

SEQ ID NO: 63569 - DNA, 374 bp, Oryza sativa
  unsure (1)..(374): unsure at all n locations
tcngctcatcnagcatgaggcgacaggcanggattttgtgtatgtacgtggtggagcagcggcaacactcgcgcggggccaacttggcctactgcccctctactgcgtggcangannggagcggcagctgccggcgggagagggcagccgccatggctccttcaattaagcagcatcaaaccactgcccaatccccacttcaaaccatgtagtgctcgccgccgcctccctgcgcccggcccgtggtcgagagtgtcaatcccagccaggcggcgccatccctgtggcattcggctcatggccccccacggtcgggtcctgcgcgacaagcggctcgccacgaccgtcctcggtggcgccctactgccccgctt

SEQ ID NO: 63570 - DNA, 419 bp, Oryza sativa
  unsure (1)..(419): unsure at all n locations
agctntatatgctcagttagacatgtaattcattgatcctggaacctcagcttgtgatacaatttccactttttttggaacgcatctgcgttccacctattggtggttcacttaattgctgtgtgctggatattttgacatgctatcgattcaattatctgaagctaatactcttatcttcaaactcaggtggcagcagatcatttatccgctcatggacccttgtagcttttttgacatgccgacgagttcatctcatgagttctgcggttgctgtaatgtgatttctccaccgacgccatggaggcacttggattttgagactcataagctaacatagcaagtgattttcagagagcaggaattcttctgacattgatagattgttcttcggagcttttctccctgccgaccaccgc

SEQ ID NO: 63571 - DNA, 394 bp, Oryza sativa
  unsure (1)..(394): unsure at all n locations
cctngccaaaacaaagcaacttcgacttcagcacatacgtatgttgtcatctccgagctcatcacaaaaagatcaagtagctccgacttttcatggcaaacttcagtcaaagccaccatattgccgcttcctacacatgtctagcaccaacacctagaanaaggtaccatgtcatcgccacttcctgcacacggttgataaggaatatttcccttatgcttgaaaaacaagcagtagcatttccctctattttcaatacataacaaaaattacatatcttgtagtgtcttactctttaagaaatgtcatgaattgttagaatacttcgtagctacaataacatctactgcatgttggtccaaagtcccaaacagaacaccttgatccttattgg

SEQ ID NO: 63572 - DNA, 363 bp, Oryza sativa
  unsure (1)..(363): unsure at all n locations
accccgacctctaatcacctcagcatcagcttatattcatatatcattttttcttcagtcactttcnttgcaactgtaatcaacatattatctaacaaaattattcaagcgaaacttcaactattataaaacatttatcatctctaaaaaatgttcccattaattaaacaatatcctatattatctcataaatacaatttaccacaacgaaaccaccatctgaacattcgatcaatttattcatttcttaatcttcaatctttcatatcaaatttcttaacatccacatatcataaaacaacatcaccacctatacaattctttgaaaaatcaatcatatctgctttatatttacatcactcc

SEQ ID NO: 63573 - DNA, 380 bp, Oryza sativa
tatgatactaagcttctcttctgaaagggggtgggaaagatcgattattatttagtactaccacagtactcagcaagtctcaccggccgatgcatgaataatgcaagggggtacaaggggtaataatataagggttatgttttgcataaacaacatttaaagtcacttagttgccctaagccaattctaaaaaaactatcctagagctacacagtatgattaatcaatggcgtgcacccacacgaacctgccttaacctcaagcctacgatgatttataccgaactggctacccgaccctgggttccatcttgtaccaagccaactcaagccaaccttttacattttatttgttgagcacatttttagaattaaaacact

SEQ ID NO: 63574 - DNA, 390 bp, Oryza sativa
  unsure (1)..(390): unsure at all n locations
agcttggggggttntgttgacggtcattatcgatcagtttctaccaacaatattaccaaaatagagaagaactagtgatgcttgcaatgcataaatatgtcagaaaaaaaaattccactagtattaggtctactaaccttttgcagagaatgacaataaagtggaggagaatcgacatcaacatagaagataaatcaatcagacgatgtcgagaattagacttatgcatgaatgggccaagaactcagaattgacacgtcaaactgggccaaaatttacaagtctacataaaggagcaacagaggaggccgccagccgaaaggtaggctggttgggttggcccctatttcggccgaacctccctcacctccgttggatccaggttttggc

SEQ ID NO: 63575 - DNA, 484 bp, Oryza sativa
  unsure (1)..(484): unsure at all n locations
gacctataaaactaagcttnaaccaagctcttacaagatcttaccaatgcaagtggaatggtgacatacaccaactcaaccaagcaccccaatgaaggttggatgtatcgatgccttggcaaacacttgcggtacggctgtaatcaaatatgtggagctctgggtaggcttaaatatgtagcaaaggaatagcaaatgctcaaatcagataatgccaagttgaataattgttcaaagtcaagtaccgtgctggtcctaggctagaacgtactagagacgcgagcctagacacaaacgataccacaagatagcactaggaacaactcatgcacaactctgatatatgaagtttagctcaaacataacagnattttctctnttctttctttcttctttcttctttctttttttttctggggttttttgggcggctnttnttttctcttttttttgcacctttctgccttttttttctcactttttc

SEQ ID NO: 63576 - DNA, 391 bp, Oryza sativa
  unsure (1)..(391): unsure at all n locations
agcttgttccgcagcgtaggacagttatattctctgtcaacgagtaacgacctatgcgagtgctgtgcaccgagatcaccatgctgttcgacagaagtaggatgcctcccctagtgcccctggacggtttgaaagcgtaactgtctagcctgtaggctcccaagaaacgggctagctggtcatcaactgctcttagtttggtttcttggatgcagacgaggttgcaatatgtctctgcgattagctcgtttagtgcagtacacttttccggggagttaagccccctcacattccagctaagtagttgtaggctttggcttgacattaggacatanatgctcagcggcggtctggtttacagcanggaagtggcgacacatcgcaattttgg

SEQ ID NO: 63577 - DNA, 422 bp, Oryza sativa
tcggatgtgcatcgactacaccgacctcaacaaggcatgttctattgacccttaccccttgccacgcatagatcagattgtcgactccaccgcggggtgcgacactttgtgttttctagatgcatactctggttatcatcagattcgcatggctagggaggatgaggaaaaaactgcatttattacccccataggaacttattgttatacgacaatgcctttcgggttaaagaatgcaggtcctacttttcaacgtactactcgaatttctttgggtagccaggtaagacgcaatgttgaggcctatgttgatgacttggttgtgaagacgcgcaaccaagagaccttactctcagacctagcggaaactttcgaaagtcttcgcttcgcccgcataaagctgaaccccgattagtgcgtgt

SEQ ID NO: 63578 - DNA, 417 bp, Oryza sativa
  unsure (1)..(417): unsure at all n locations
agcttcacaatcgagtccatgaagaggtctccatagttttccttgtagctgctcccgtggacgatacccttcttaaatagcanggcaaaatcagacttattcgagaggagctctcccatgaacataacatatcttcataaaatcctctcctctcgcgggcaccacccacacattttcagtaacacaaagttggccaacatcccctcctcntaaaacccccacctaataaccacaatctttancttcccgtccttgaactttacttctgtaaaccagtaggtctccgccttctttatcctcacaccaactctgacgagttcttttaacngcgggatcttcttccaccataaccacttcacacgttttgtacatgaacaccataacatccccttacaaaattcgtaaagatctataccc

SEQ ID NO: 63579 - DNA, 435 bp, Oryza sativa
tccactataatcaacaatgggcacaaatggagtcttcactataacatctttaggcacatcacaacagcagctattacatcaagttacgcacttggcatcatcaacatcaaccatcaaagctaacaagaagtatatcaacaaacaagaagagaaatggcctgtcctcttcagttctcaactaagatctcccaaaccatagatgcaaattgcactaaacttggcagaaatgatggtctaaaagtgaggaacaaactcactaagtttgatgccaatccaaccacgtttgggcctccaatcgctgacttgatgaggatcgggtaagaaccctcaacatgaacgaactgcacttcttcttgtccactctcctctacctctctcgagattatggttgtatcttcttcaccccaatgagtgctgctcttcactctcttaaat

SEQ ID NO: 63580 - DNA, 419 bp, Oryza sativa
  unsure (1)..(419): unsure at all n locations
agcttgaatataggcatcggagtttttntgtctttgcgccaggtttcttctaatactagcatgcaaaactgaggttcagtcgtcgttgccaatggtagtctaccgatttttttatatataataattaataaccccgtaattaaatatttggtaattgcgtgcaagtaattagtaaagtaggatggacgttgtttttgttagcgtccagatgtggacgctattctctagagcgtgcaggtctgaacgttattgtgaacagcgtccaccatacgggtgcagtcgaaccgtgccaaaccggcccgaacgtatccacctaaaaccaatcagcgccgagataactgccgttccctagcgaccgcatcctggcctcctcggcaatacctcatcgccaccggcgggcagcaaaggcggcgcagtat

SEQ ID NO: 63581 - DNA, 382 bp, Oryza sativa
tctcttactgacagggggagatagatagagcaagattgtgtacaaccacagtactcagcaagccacaccggagatgcataattaatgcaagggggtacaaggggataataatataggggttaagttttgcagtaaacagcatttaaaagtcacttatttgcccaaagctattttgtaaacacgatcctagagctatacaatattattaatcaaggccgtgaaccctcacgaacctgccttaacccaaggcctacgatgattcagaccgaactggcaacccgaccctgggtcccagctcgttccaagccaacccaagccaaccattccacattttatattgtgagcaaattgtaagaattaaaacactaacttgggtacattg

SEQ ID NO: 63582 - DNA, 422 bp, Oryza sativa
  unsure (1)..(422): unsure at all n locations
agcttgtaccgagtttgagcctattcttctcattcttctcctangctcctagctgcagccgcggcattacagtaactggcctctttgatgctgtggctactgcagaactggaaagcactaccgaacgtcccctggctacatgatgtgcttaggtgctgtttctttcagcttatgattattataatctagattattgggagtaagctgaaagaaacagacaacttattaaaatagtttattataatctagagcccagcttattataatctgataagctcatttagatgagctttttccagattattggatgaaaaattacccaccatgccaccccactctctctntagacttgcaaaccaaataatctagactgtaataatctatgaaagaaacaactaaccgcttattctactacagattat

SEQ ID NO: 63583 - DNA, 392 bp, Oryza sativa
agcttcggagtaagaagcgctcttattgtatcaaaagcagattgattagatgggcttattccatcaccaccaagaccacaaatcctcagcagagcctgagttgcatgtacagcatgcagatttttagcaatctgcacccttgcaccaacaccatgtgcttcacttgttgcattctcttctgctgttgaatcgtactgaagcaataaaggcaacacatacctgcgagtaaatcttaattaaatatatcattcacataacttgggatttcagtatgccattccctaatctatctatccagattaataatagtaattgcaattaagatagcaaagcattaccataaaaatccaaccgcgaacaaaaaactttgcaattcttatgacacttatata

SEQ ID NO: 63584 - DNA, 405 bp, Oryza sativa
  unsure (1)..(405): unsure at all n locations
tcctttgattgatccgactccaccaagaacacgacatcgtggcgacttgactcccatcggctgattctagaactntgaagccgatactgactctaaatcgatggtaactttgggcttaccaaatttcactgttaacaactatatatagaaaatatttgaattatttgaattcaaattcaaatttgaatcgggtgtataaactttaggtgtatatactttagatgtatagaaatactatatataaaaagtatttgaattcaaattcaaatttgaatcggatatataaacttttgacttataaacttttggtctctaaattttagatgtgtaaacttgaggtgtataaactttangtgcataaatttactaaaatagaaaagtaatgcggtgccaaaaaagtaaacc

SEQ ID NO: 63585 - DNA, 388 bp, Oryza sativa
  unsure (1)..(388): unsure at all n locations
agcttcaactgctctcacttctgtcatcttatatacagcaaaaaaagaaaaaaaaagtatataaccccacttgattttataattctcagcttacctncangcatcacccaaaatacttactgaaaccactccttctttcctcatctcctcaagcgatctacaactctgcgccccccttcttcatcccccccccccaaactgctcttctccccaccactcgcctctctatttttatccatccacccataataaaaagaaccactgttacattactactctcaactaatgaaccaaaagctgtaaataaaccccccctacctaaactgantacacctcactcccttcttttcctaacctatactcttcttcttatctccccctttccctc

SEQ ID NO: 63586 - DNA, 432 bp, Oryza sativa
  unsure (1)..(432): unsure at all n locations
tcgatcactgacaaagataacagtggaaggatcaccaatttntcctggtcttcagaacttcccatcgctgacgagtgcgaatataatcgcgagcggtgagtttatttggggatcatggcgctccctttcttgtcttacgtccatcacccttcgcatactgccgatggagcacatcccacctgtgttaggacggctccgttttctgcgacaccttgagatcattcgttgtgagcaactggtgtccatgcctgaggattgggcaccttgcaatctgactcgcttctccgtgaagcattgccctcagctttttcagctacccaacggtctccaacgcctgcgagaattggaagacatggaggttgtatgatgtggaaagcttacctgccttccggagatgagataacttacttcactagaaagactggagatttc

SEQ ID NO: 63587 - DNA, 424 bp, Oryza sativa
  unsure (1)..(424): unsure at all n locations
agcttcanacaagatggctttcctcgacttctgtgcaattcatagacgtgatggccttgtcgaaacagaaccatcacagttcgcaaagacaggatatttcagaaaaaaatgatattgtgtggtacatgctgaaatatactcttatctatcgcaccttttgatcctatgactctatgagtctaagtgaccagtcaaccaacccctacacagccttggcatgacagtgggcatcactctatatttttaagatcttcgccacgctggtagtcaggtttggtgattagaacatctgcttgctggactgggatttggctagcacaaaggtcccattagttgtgttgtagtgaaaaaaatggaggctatatatcattaggtttcaataacactctgtggatgaaattgctaatcggtgatagctccgaat

SEQ ID NO: 63588 - DNA, 444 bp, Oryza sativa
  unsure (1)..(444): unsure at all n locations
tgtatgcataggatatgttcccgaatttcggacccactgttattgatgctcacacatctgtttgtcagcccattaactcaaacaacgacgcccaattggccacacatgatgatgatgatcaaatggcaaattaaagtatgtttcttgttagtcgttatttcctcgttacttctgccatatgtacaacatgcatggattgatgcatgccatttcatcgttgaaaagcagtaacagaaagtgaagaacacagctagcatatgacacgatcactgttgtacaatgacgtcctttctccttcttttntcttttatgaaaaatacatattgccaagtgttggaattaatgaatgggccttagcccactcgaaaattaattctttggaaaatcacaaaagcccacctcatgggatggcatgcatgtggagtttagtaccaccttgcttat

SEQ ID NO: 63589 - DNA, 390 bp, Oryza sativa
  unsure (1)..(390): unsure at all n locations
agctttaatcgaagtgggaatgcccgtacctcatcaagcacacgtccaggacaggctcctttctcctagcgacnctggnaagcaagcaagacgaccattcctgnaacgctgcttcccttaaacgtttctatgtgtaaaatgggtggcactcaaatcgccaacttgtaaaaatgtacatactcttatgtaagcctttcggcattatgtaagcccttcaacacgaaaattcaaaaaaaatataggaaaattaaaaataaaactgtatgtagggctattatccactctagaggcctgaaccaccataaaatatttgtgtctttcacctttttgtgtgaatgataatttgtggaaaaaccccaatgcaaacgcctgatcaacaaaaatgccatg

SEQ ID NO: 63590 - DNA, 401 bp, Oryza sativa
  unsure (1)..(401): unsure at all n locations
tattattatcttcatagatagggtttagtatgctcttgtcttgctaacgtaggtcgactttcttgtactgatgggttcctattggttattgactattaaaataaattctaacattataaactgatttgtataatatacgtcactggatctggttattcctatatgcaaatgcacaacttcaactagaagcagctgtgtttacgttaatggtactgactgatggttatatatgaacttgtctgaagttatttatgaaccgttctgaactctgcatgcttcctcagatgtctgacttctttgtaatgcactnttatttntctgtaataatgcttgggattacgactcatatagagtngctaactgtttccacatgtgcagaacaagtgaaactagccgttgga

SEQ ID NO: 63591 - DNA, 425 bp, Oryza sativa
acctgcggcatgcaagcttgtcaactggagagggtcgaaaatccacatgatcggttcgaagctcgggagagtgagctcatagcccaactagaagaacgcccctccgagttggctctacagcaaaagaagctaaccgatctcccataggcgatcgaagaacacatatcactgttgaaatcgggtatcacaaatgttgctgatatgactaaatgcctcagagatattcctggaaccgatgctcaagacacttcagccatagaagatgtataacaacatatgcaacggactatatcgggtatacagtgatattaggcgcaatgatcatacatgtcaaaaggcttagaacaatctctgtgatcagctaacatactctttttaattgcgaactttctccagcatcgttatcggatatatatgtgcccccc

SEQ ID NO: 63592 - DNA, 328 bp, Oryza sativa
  unsure (1)..(328): unsure at all n locations
gactgtcaacagccatctacgtgttctggtccacgtcgcacaggtggatganagtgtgcttttgcatctaccggctgatcttgcagctgcgcgtgaggggccagatatactgccgctgtccaaagctgtccggcgaagtacacaagcacttgcctggcttgttgcggaatgggctggatcggtgcttgtggatagacttggggtgggacgtatcccagcgaatacttgaggattggggccgaagctgacttggcccgcctcgctgcctcatacgcttgctggatttcttgcatcttgctaagcatgtgctggaagcatgtcatgtttt

SEQ ID NO: 63593 - DNA, 414 bp, Oryza sativa
  unsure (1)..(414): unsure at all n locations
ctgcagcttacaataagcaatttggccatttgatctcacttaatagacaaatcgcgtacatatgtactccttcctaacttctacagatacatctgatgcatggaaaccttgncgcatggttgagttctaatttgccacagtaattacacacaaagccctaagtgtttgcaaagaatttgttcgtgtaaccatgttctgaattcagaatgtcagagcaacccatttctgcaggcgcagctattgcgtgagcgggacacactctagctccatctcaagatggccacgctcgacgttctgaagcctgacggtcacctcctgcttcaccttgccatcgatgatggagatagcactgtccttttggatccagatgccttcttttgctagccatctgttgagctgtgccgtatcagcgac

SEQ ID NO: 63594 - DNA, 375 bp, Oryza sativa
tgagcgatttcaccataacgctctctgagggcttcaagtctgattattctctcaagcatccatatcgacttctcctgtgaagctgagtttcctgcctcagcaattctcagcagagcatgaacacctgatgccttttctatcaccttgctcccgttttcccaaatctcatcctgcataaaggtagctagtgctttcaatactgcaccatctgcttcacgattgtcatcttctaagatttggatcagaggactgacagcaccaactttcactaagcataaagtgctcttgacagtgcactgggagttgtgaactaaacagtaagtttcagctgatggtgcaacacacagccaccgttggccatttgtcttacgtaat

SEQ ID NO: 63595 - DNA, 411 bp, Oryza sativa
  unsure (1)..(411): unsure at all n locations
agcttagacctcctttgataaaacgttgttatctattttcctgttaagcactttgcaactaagcattggcacctgcaaattcctttaataaagctaatgaaatgggctactctgttattctgtacgatctttatggatgaaaataacaattgatcccatatcctatgttttcattgatgtaccttgaatttataattacttcaaatatgccatccaaatttaatccaaaacattgtgtgtttctaaattctattgtggnttaatggacaatgacattcaatttctgtatttatcctatttcctccacattttttgaagctaaaatcatgtgttacaacaaagacctttttactgatcccgttaatatcttcaacagacacttacacaaaaaattaactccaccaacaaaac

SEQ ID NO: 63596 - DNA, 458 bp, Oryza sativa
  unsure (1)..(458): unsure at all n locations
tcggcgcactctattatttgcgggacaagaaagaaagagtcaattccatggatatcgctgcaagactatcagcgattcctcaagaaatcgctgatatagaaaacactaagctcgaactagagcaaatgctgggtgtcctcggggagcctttatttctggctttcgtcgatccagcagtgatcatacaagatgatatagttcttgttcagaaccaaatccgcattcttgaaaacaggaagaaggcgctgctggaagaacagcaatcgctcatcgtgatggctgcccaccacggtgactaaaatagaataaggtagttactcgtctatctcaacgtaaatgaacgaagtcacttaaggcttcctactactactgctccttcttacnttatttccttaaatcataatatctgactatcaatacttgtatataatgaaataaaacatggtgtccaacttagt

SEQ ID NO: 63597 - DNA, 418 bp, Oryza sativa
agcttgttcacttcgatgtgctgcgataataatgagcaaagcaaacaagaaaattgtaagaacacagtcgcagtaccagtactagcaatgagtaatataagcaacaatcccaggtttttttttctatcatcaccagatcatgaaacactacagattcacacaacatatagtatcaattagcaacagcaggggatctagaatctgtggtatttgtgcaaaactacttcccttcccttctgaagtcaatcacgaactgaacaaacgcgcccaaatcagctacacgataggtgtacggaaccaagatttgctcacggtggggagaagaattaggggggtaggaatcagaaaccggccgcaccttggtgatcttgagcttggtgaagacgacctgaagaactttgtagttctggatcatctc

SEQ ID NO: 63598 - DNA, 441 bp, Oryza sativa
  unsure (1)..(441): unsure at all n locations
tcccggctgcgggagttccaccactgccagagcagatcatgccttgcgtgccagcggatgatggcggacgaaggcatcatgcggtggtacaggtatgaagactggttctggcgccgggatgaggtgagctcacttgatctgcaagactatgggaagctgttcgatgcagagtgcgaggcattgacagccgtggaatagatgataatggtcaggaaattaaacctaccattgtaggaagttgtttgaccagacattntcataaaatcatagcaagcaccgagaggctgtaacctagagtaataaccataataatggtaacaataatgtgcatgcatggtggtggtgtggngtagctgatgtgtaaatgcatgaatagtttgtcttgtccttgtttgaaaggtggcgtttatcatctccatggtatgaccagaatgtaaaaat

SEQ ID NO: 63599 - DNA, 337 bp, Oryza sativa
agcttttcctgttcagcccaatggccgtattatctaatgctcacaacctctcttccagtgttagcggtgacgaccgtgagcccaacccacatccgttatctcgtactacaccgccccctccacgcctaaattctatgtgggaggaggcgctctatagggtccaaggatccccgacttctacatccacgggtgatggggaagggcggcgagatggggagcgtcccctcctcgtttaccgagactgcagcacgccccatggcgcgctcctagctgcgggcgcgctcctacgtctactcgccattgtcccctaccctgagtctccatcccaacgttggct

SEQ ID NO: 63600 - DNA, 424 bp, Oryza sativa
  unsure (1)..(424): unsure at all n locations
ngaatagaagtgcanaatcaaattatcagcaaatttctctagatttggtttttatattgccatgcttttctttggggctggaaaaacattctggtaatactagaaatagtcacagtgtaaatcctcacctgcatccaacactaggactctatcactgtccatgacagtcggtatgcggtgcgcaatgctgatgatagtgcaatcagtgaactcttctcggatgatcctctggatagtcgcatctgtctgagaatcaacggaagctgttgcctcatccatgaacaggatccggctgcgcttcagaataacacgaccaaagcagaggagctgcttctgtcctacgctccagttctcccccatgtcggcnactacaaagaacaacataaaagcanatatgtgcaacagtaatggcagctacaaaaac

SEQ ID NO: 63601 - DNA, 424 bp, Oryza sativa
  unsure (1)..(424): unsure at all n locations
gcaagcttggntgctgaggagctggttattttcttactccagctgcttatcttggagaacatcaattcaagttggagaaagccaaccagagactagccgaacgccgtgaacgcaaagaaattgaagttactattcaggctaatcggcaactcgtgcatgaagagaagtccaaacttgatcagctatcggaatgcccgatcaagtgtaatattagtcggctagaagctcgcaagatcgatctcttggcacaacttcaagaatgcaacgcccgaattggacctggaacacaagaaactatccgatctcccgtggtccgtcgaagaagaaaaggcaaggctgaaatcagctatcaagaatgtcgctgatatgaccaagtctctgaaagtcatctctagaaccgatgctcaagatgcttaagccattg

SEQ ID NO: 63602 - DNA, 385 bp, Oryza sativa
  unsure (1)..(385): unsure at all n locations
tcaccggcataacggtcgaacactngcctagagactcaatcgtggaagcagacgccttggcgaaatccgctgcttgtggtggcccacattcgcctggcatctttttcgaagtcctacatgctccaagtgtgcccatggacagctcggaagtcatgacaatcgaccaagagaaactgggcgaagacctatatgactggcgaaccccatttgtgaaacaccttgaaactggttggcttctggtagacgaagcagaagccgaagcgttgcaactcagagccacgaagtataggatggtctcgggtcagctttaccgctccggggtacttcaacccttacttcgttgcatctcttttgccgaaggcgaagaaatggcaaaggaaataca

SEQ ID NO: 63603 - DNA, 423 bp, Oryza sativa
  unsure (1)..(423): unsure at all n locations
agctttttgcanaaactaattccattttttagctttactaaagcattaaagtagcactgcaatattctcttgcactgatcgagtaggaagcatggaactactcaaatgttttacaaggatcatctacttaccattatctgatcctcttgaacccacagctggaatctgcatcacttgaaccccaaaggagcctgggccagcaacagcaaggcacagctaccagcagcgaacacatctagtatgaatcttgcattaaacagcttctagcttgattggtgcttttgtaaaaactgataaaacaaaaggtgcttcctctccaggatggatggttgtgggcacaattgtgtatccttttggataaggctccaacactaattcacatgatatctcccttgaggtaacataatctgttccacccactga

SEQ ID NO: 63604 - DNA, 331 bp, Oryza sativa
  unsure (1)..(331): unsure at all n locations
ntcatacattnttaaaaactntntactcaaattttaaatcttttgtatcaaaattcaaaaaaattaactcaaacttcaaaaacttttaactcaaaattcaaaacattcaactcaaaattttaaagtttcaatttcaattttaaaagacttatatcttaaaatttaaaactttcaactcaaaattttaaaactttgaactcaaatttcgaaatcattcaactaaagaaggggacatgcgcatgggttgggctggcaatataaggtgggccacatgttggctttttttgatgttctgcataccgcatgggacttaacatccgcctgataacgc

SEQ ID NO: 63605 - DNA, 422 bp, Oryza sativa
agcttgagacctgctaaaaggaacatgtctacaaagattgaactaactgatggatggtatgtggttgctttctctgtattgcacgaggtgaagctgaaagatgttagaaccttttccttttcgcaggtattctctagatgcgtcattagatctggcacttttggagcaactagagaaaagaaaactttttataggacagaagcttcgggtactgtgctatttcaactagtcatgagacatgactataatttactcatagcacctaatatgtatttcatcttggcagatatggggagcttcactatgtgggtgggctgggcctgtgtcatttcatgaggtttgactaatcttctaagtcttttaacctcattagctgtgaacattgactaccatttgaaccatataatcaatttttgttgatc

SEQ ID NO: 63606 - DNA, 467 bp, Oryza sativa
  unsure (1)..(467): unsure at all n locations
tgtttcactacgtggacttaacctgtcacacaatgccttctcaggacacattccatcgcagcttaattctctgactcagctggagtcattggatctctcttggaacaaactctcaggggaaatccctcctgagttagcttctctaacttctcttgcttggttgaatctttcgtacaacaacttgaccagaagaataccgcagggtaaccagttcgggtcatttagcaacagctcctttgaaggtaatgtcaacctctgtggaaagccactctctaaacaatgtgatactccaggctcaacatctccaagtgcatcagctccttcaggtaccaacagtttctggcaggacagacttggcgtgatcctttngttcatcttttctggcctgnggttcacagtgggcttcatattggcagtctggttcgaatcattgtgccacatagaacgatggaatcgcaaaaaacgat

SEQ ID NO: 63607 - DNA, 419 bp, Oryza sativa
  unsure (1)..(419): unsure at all n locations
agctntagccgactatgtcgccaagtggttctatgtgccaaaaggacacgtccgaagaaaagatggagtattggactatgcattntgaccggtcaaagagactttcatgcactggggccggaggttttttaattttcccacactggacgaaagactgagctatgtgttatggatacatttttttgcatctcacaacgcggcagaatacaaagctctccttcacggactacagatcgcaatctcttctcgaatcacgcatctgataattcgcggacattcacaattcgttgccaaccaagttatgaaagagcggttctgcctcgacgacattatgaacgcttattaacaagatgttcctaagctagaagattatttcgatagacttcacctactcactttttttgcgcataatcacctcc

SEQ ID NO: 63608 - DNA, 356 bp, Oryza sativa
  unsure (1)..(356): unsure at all n locations
tcatactcacggttaagnttattgatgtttatcctaattgcagcgcataacaagtacatcgganaataatgaaacttttgggttgtgttattatttagagggcaatccagtatcgtctgttaagtaacaatttcaggcttcagcacatgttttttatgatgaaatggtagctttggtagctgctgatttactattttgtagcaccacactaaaagtgatggctgaaggaaaatcatgggtccatggtagtattcatgcacatcaactggcattaaataatgtcacattattccttgcttaatttacacataatcagagcttattttatacacgcatctaacattacaacatgaaca

SEQ ID NO: 63609 - DNA, 420 bp, Oryza sativa
  unsure (1)..(420): unsure at all n locations
agcttaaacctcaactgaatgtaaaatgttttgcatttgttctgtttggttccctgtgcatctctttcccatggaccaaggagcgtgatataagtgtttgaagttattgtacactgctccttgattgtcattttattatctgcaaaaggttagtgaacaagaaatacccgagggactataagaattgcaaagattttatcgtagcctcgagtttagttgttcacatccacgctaaaaggaaattggattcaaaacttaagaagcgtggatcccataagtttgtcaactttttattttatttttcaagagacactctcttttttattctaaaaacacattttttttcaaaatttttattattcaccaaattntcgtttaagcaaaactcatacaagggcttaagataaaattgcacgaaca

SEQ ID NO: 63610 - DNA, 405 bp, Oryza sativa
  unsure (1)..(405): unsure at all n locations
tncaccttcttctttggttgccgatgcacggatcccttctatgacttctgcttcaggactatgcccttcttcttgggggcatactgctgtttcctgataaaaaatatatcagcgtgagattgaaccacaacatataagcaattcacatccatccttcatgattcaaggaacttacatattacaattcaaccaagttatgtcccatatttctatttattaaaattactttgattgcacccatttcgtagataaaacaggaaaaaaattcccacacttcatctctagcagactgaagcagagctactgatttacttctgaattgctggcttctggttttgggtctacaattaaaaaaccttatgggtggcatgaaatcaattcatgagtctattatatgttgcttaa

SEQ ID NO: 63611 - DNA, 417 bp, Oryza sativa
agcttgcaatcaaggataattaaatgtgtgcctacagttaattacggaagcttgttcagcagagcctgtggaggtggttcaccgatattaacaacctctctggtatgcatggagaggagcagacgatgtcacacaatagtgggagtgtgggactacaggagctagctcagttagtgtctcggtgatggaatatgcacgatggtgaaaagaacagaaacgagagtgagaggaacctgagaaaaaacagagggaacaagggcactagtgtcttttcatggcctacttaacaccaacttaacagtagtctaacagtagtggcactaaagagataaaaattgaaacccaacggcatagaaggaaatgtaactttttcggtagcatatatggaagccgggtaatttcgagtggcatataata

SEQ ID NO: 63612 - DNA, 461 bp, Oryza sativa
  unsure (1)..(461): unsure at all n locations
tggctccaataaagaccacaagaaaggccgatagctcctcaccacttgtcaaagacaagaagcgtgaacgcggcaaggggaaggtcggggagttggcgccggagccaaaaaggggcaaggctgcgacgtcgatgccggtgagcaaagcggggaaggtcgtgagggcgccagcccaatttgagctatgcatgccattggtagaggacaatgtgttagccgtgatgggtattgcttgccgagagctacataagcaatacatagagctaagcaatgccaagcggaaaatgagggagtcatccatagttggacatcacgaccaccagccgttcctattgtcgccttgctatataactatgggctttgatgacctcttcgaccttttcaggatccgggaagtggacactggtcttctaanatgctacaccttgtaagtgcataccttctatacttgtgatatgatt

SEQ ID NO: 63613 - DNA, 420 bp, Oryza sativa
  unsure (1)..(420): unsure at all n locations
agctngacaacgtgccaccgttaatccgttcatcaattactctaaaatactggagcagtattatttatttgtttacaatgtaaaattttaatcacaacaatcgtatgtattttgctactcaaattccctatgccattgtgttcagtggtttggatgcgtggcacattttactcttgcttcgatgagtattacgagaaaaaatactttgtcgtgcattataagagagaaaatatcaaaattggtggtctttatcgacaaactcgggctacttgggcttgggccatgaagaccagccatatatcgcacctaattccatatttacatatatatactatacagtatataaagagaggagaagcttggcttatcttacattataaagaacattcaacgagaaaaagatcatgaactctgtttcat

SEQ ID NO: 63614 - DNA, 403 bp, Oryza sativa
agcttatcttcttctctcaaatatagctctcaatctaaaatgttaaatgtgggactaacctcaaactttagaggcaattcaagtttatatgtattatcatttatcttttccgatattctaaaaggcccactggctctagacgccaagtacaggaccgctggttagataactctacattgaaatgtcatttttgggagttaaattgctaatagtgttgaatgatgaatatattaatttgaaagcacgtaaagtttttatgagagcttcggaagttagagaagcatgttgattgaaacaatacaagcaatatgattttacatgccaatttgacctccctttatagtatgtctgattgtggcaacatttatttaactgtaaaaatattgtagtgaaccagcgccgc

SEQ ID NO: 63615 - DNA, 456 bp, Oryza sativa
  unsure (1)..(456): unsure at all n locations
taatggagcanagaccgattgatacttcatcggtcacttgtgaaactatttcggttacatctatggctaagatcgaaattgttagtgatcctctccctattaattctattgatgttgacaaaaagaaagggacaagtgttattattggggatcctcggcccaagaataggatcaaaaatgcgaaggccgaagatcgtaaagttgcaaaggatgagtcatctagttcccaaaagaccaaaaaactgaagctcacttttgagatgcttatggctaagtacaagaaaggattagctggtcaacgagttgataatcaaactagtgattctaaaagaccaagatcatctcgtatgaagagatatggtcaaacatcaaagcaatcggagccatcaaccataccaacttcatacaaacctncgggtgtgatgccatggtatctatattcattggcactatatg

SEQ ID NO: 63616 - DNA, 422 bp, Oryza sativa
  unsure (1)..(422): unsure at all n locations
ggctcatttggctccggngcgactagatttgtgttagagctgagatatgcctttaactgagtgagggcatgttcagcttcctccgtccaagtaaacggccccgagcgcttgaggagcttaaacaagggtagcgccttctctcccagccttgatatgaaacgacttagggcggccatgcaaccggtgacgcattgcacatccctaagtttgctgggggggcgcatccgctcaatagctcgaatcttctcggggttggcctcaatgcctcgggcagagaccaagaacccgagaagcttgcccgcaggtacaccaaacacacacttatcggggttcagctttatgcgggcggagcggaggttctaaaagtttccgctagatctaaaagaaaagttcttggttggcgtttttacaaccaagtcatc

SEQ ID NO: 63617 - DNA, 462 bp, Oryza sativa
tcggatgtgcatcgactacaccgaccttaacaaggcatgttctttgatccttaccccctgcctcgcatagatcagatcgtcgactccactgcggggtgcgacctcttgtgttttctagatgcatactctggttaccatcagattcgcatggctagggaggatgaggaaaaaactgcgttcattacccccgtatgaacctattggtatacatcaatgcccttcgggttaaagaatgcaggtcctacttttcaacgtactactcgaatttctttgggtagccaaatacgacgtaatgttgacgcttatgtcgatgacttggttgtaaaaacgcgcaaccacaaaactttacttttagatctatcggaaacttttgagaacctccgctccgcccgcataaagctgaaccccgattagtgtgtgtttggtggacctgcgggcaagcttctccggttcttggtctct

SEQ ID NO: 63618 - DNA, 423 bp, Oryza sativa
agcttgaccagctcatcgacctgctccgatggctcatctccgatcttgcggaggacggcgtgcacgacatcgagctcccgtgagagacttgatcttctccctcacgcccgtttgcaggccgtactctttctcgagcagctgaagcagcttgggcagcatgctcctcatcgcccccgtcgccagctccatgcttgcaaactgggggtcgggaacaagcctgtcgtagacagcaaggaaggcccgcccgccccagatccgccgcctcctcttggcctgaagcatgagggacgcgcagctctgctgtccctgccgctcgccggccagatccagcccctggaaggggttgggtgacttctgtgagaccggaatggaaggcactccggatggctaacgcaaacagcatgggagtgagtgagtagtgac

SEQ ID NO: 63619 - DNA, 480 bp, Oryza sativa
  unsure (1)..(480): unsure at all n locations
cgtgacctataaaactaagctaaacaacagtgtaagcttcaattctccctctgaaattccagccataattagagaagaattctaagaccctcatctctaacaccttgcaataattnttcaacatgttgccatcctcttccttaagcaacaaagaccaaagtcttgcccagtgtgtccctctgaaaattacctgcataaaagagtaagcacatgatccattaaaaaccacatcattcctacttaaccacaccgcctagcacaacgccgctatgcccacaaaaacttgattntttagcctaatgttaacaccacttagccaactaccaagtaaatgagacatattgtgcggtgggcagatgccaaaagtgaaatgtactacgctccacacatatcttaccatggngcaatcaaagaagaagtgttgtatatctcatgagacctacannagcaacatctaaggcttacctttcaccctctctt

SEQ ID NO: 63620 - DNA, 399 bp, Oryza sativa
  unsure (1)..(399): unsure at all n locations
agctntaacattatgtatattgatgtctgtcctattttctttaatttgtggcctcctagaaagcagaatcacatgcccatcaatatatgttaaatttatgccaagtcagtgcagatttaactcttatactttgggtactgaacagtccctagagttctgttatattttctgtacgacaaatggtgttttgactcccctccaaaaaaaaggagggcgttttgactttttgcaaatgtatagggtttacatgcctgatctggcttgacatgagttggctgttcgtagtggtggacatctatgctgctgatttttatggcacaataaatgtatccaaacaaacgataatagtgtatcttgcaaatttattatgcatttacaccttacctatactcaggagct

SEQ ID NO: 63621 - DNA, 463 bp, Oryza sativa
tacggacctatgaaactaagcttctatcaacaaaaaaattaatgttctgtttttaaaccagattggaatcgtataaaccattttaccccaatagttgacttaaatcttttcgtctcatatgattgagaacatgataattatccatgtacaacttgatcaagaaaaggagggcagatatccaaacactcaagtatcaaaaagtgattcaaccatacaaaattatcattaccaccctcataatcccaaatagttgcttatgtatttactccaaattttttgaagtaaagcttgcttaactattttgggttaaaaaattccatgcagttacttttataaatataaaatatttatcaaagaattactaagaatacataaagagaagcacaattacaatgattctaccccatcaagtactgtaattaatttgggcaattgttctcgtgtactcttgtgcacaatttat

SEQ ID NO: 63622 - DNA, 364 bp, Oryza sativa
agcttagggtgataatagcacaaataagcttagtatgtaaacttgctcaaatgtaaatgcaacaaataaatgagacaagagacaaggaatttttcaccgaggttcggaaactcgccggtttcctaatctctgttgaggcgaggccaactccaccgctcaaccacgaagccaccgcacgcccccttcgtcaaggggtgggcaaggtgggggccggcccacagagaggattacacaagcctcgatcactagggatagttcttacttctctccgaaggtggttaactccaaaccactcttaaccggcgccgggtcttctccacaatctcttctgagaggtcaccggcaacacctccacaaagccgtc

SEQ ID NO: 63623 - DNA, 468 bp, Oryza sativa
tgaaactcagctacaattcagcgcacggagaaggatattatgatatgcaagtgaaaaggggaagcagaatggactatgacaggtttggggcaaggtggaattggaagggatttgcatgcaattggactagtatggggattaatatcaatacaagtgcttatgtacctacagttttaacaatactggatgaatttgctttcgtatatgtccatggcatggctggtaagttcctacagtagtcagtaacactagacatggtcaccactcagcacatcaaatcagaaattatattaagtgtggcacatctgtaatctaaagtgaaacacaggtgccaagtccagtatgcaattctcatagttagggatccacttgaccactggggtaagtttattaacctatgaagcattactatttagactataaatagtaccaacatatcaatgagcataccttgcaaccagtactgtg

SEQ ID NO: 63624 - DNA, 450 bp, Oryza sativa
  unsure (1)..(450): unsure at all n locations
ctcgaccggatcttaagtcacctgcggctgcagctttttggctgtggggacgatctcagtggcagctgaatttgtaatcaatggtacatcgttggggctgggagaggtgagggaggcaactaaattacatgggtgattatgtgattgggataggagagggaagtccagcagttgagccgcttagagtaccttgtggaccatggtagcgtgccatctggcatggtgggtgaataagagagaggagtatttagtgcagctggctgtaggttgatattagtgctagtagagtagggtatggtcgttttattttttattggtggcacattggtaatgttntgatactaaaatgtactaatgtttctcttccgcgtattcgagaaaaatgaagaagagaggagagcagaaagagattggatgaagatgataagtggccgtgtaagggcaagaata

SEQ ID NO: 63625 - DNA, 408 bp, Oryza sativa
ggagccgagctcgagccgagcctataaaatattcgagccttccgataggctgggctcgagctcgactaccgagcttgatttttaagtaaaacaatatatatttcaaagataatctttaaaaaataattaatttctagttcatcatattaatagaagaggaaaaaagaataaaataaatatatgatgtcaataaaaggcatacaaataacatatttgatcttctaatttattaaataacaacaaaaaaaatcatatattattaggctcgttggaagctcgagctcggctcgacaaagctcgcgagcttagggagaggcttaagctcggctcgtctggagctcgagccgagctcgaatcgagcagctcgcgagcctcgagtttttttgacagccctatagtggagagagc

SEQ ID NO: 63626 - DNA, 406 bp, Oryza sativa
  unsure (1)..(406): unsure at all n locations
agcttgcacctatgtgcnagtttattctctcggagagaatccatggaatcccgggaaatgctttcctcctagcctctcgtaccacgtggggtcacatactaagcaagccaaaggcaagaagagttagaatcagaagagaaaagcaccgatgcgaactgaagaagaagtacgtaagatgactattaccagcaccgaatggcctccagcagggataactattcctagacgtcaaagaggaaataccttccgaggtgcacgacagttgacccagcacctcctaagccgtggtggcagagtatctgatagtgaagggtcagatcaagtcttctcggatgaagaagatgagtctccccgacatctcggcgaagaagagatggattccaagcattgcccccgtggggagaaa

SEQ ID NO: 63627 - DNA, 401 bp, Oryza sativa
  unsure (1)..(401): unsure at all n locations
tctcttactgaaggggggagaaagatagagcatgaatgattacaaccacagtactcagcaagtcacaccggagatgcataattaatgcaagggggtacaaggggataataatataagggttaagttttgcagtaaacagcatttaaaagtcacttagttgcccaaagctattttgtaaacacgatcctagagctatacaatattattaatcaaggccgtgaaccctcacgaacctgccttaacccaaggcctacgatgattcagaccgaactggcaacccgaccctgtgtcccagctcgtcccaagccaacccaggccaaccattccacattttagttgttgagcaaattttaagagttaaaacactaacttgngtacattgctaggcttgcccataaccg

SEQ ID NO: 63628 - DNA, 366 bp, Oryza sativa
agctatagcaccatttcccaatttgtgtgtcatatttctctgataactaaatatgtgtaaatgaattcattgttttttcctaacttaaaaattcagtgaaaaatgcacggtacccggtccgttttcatatttgaagaattcgagttccataccattttgacaatttctttgcaaacagcattagcgttggagctaagactacactacccaggcaccattcaattatcacaaacgaaatacacatctgaacatgaattcttctcaactactaatatgaagtgaaccatccaattaatgattcaactggacaaaatatttcttcagatttctgaaaagtcactgatcattcgttctgacctatgtaca

SEQ ID NO: 63629 - DNA, 468 bp, Oryza sativa
  unsure (1)..(468): unsure at all n locations
ntctaataacatagccactccatcctatccctctgtccattctaccatctcgcacaatgccaccattcacctcacaaccttcttcttccccaccctaggtgcacacacacaatggctaaaaaccaatatgcagactcaattcgacacgatgttataacaatttatttgcatgggcttgaagataaggcattagtcattttgcattccctaccccttccatagccaccatagtgaaaatctagtaagaggaagagtcgaaggcaccttattgtgcgcaagggacgttgatactttcagttgttttctgtaaggtaaccgagttactttgatgacacctcccctagtgacaatggacagatctggtttgcaaaagagagaaggccaaccaaatctattccatattataaatggtagaattcaatgcttatatttggaaatacaagatatctatcgtcatcatgtgcttat

SEQ ID NO: 63630 - DNA, 414 bp, Oryza sativa
  unsure (1)..(414): unsure at all n locations
agcttctcanataggtcttaattcttcctgtggcaactgctagtgtagagagggtgtgttcttccatgaattatgtcaagaacaagctaagaaatagaatgggagaacaatatttgaatgttgtttagtaacctttctggagcgtgatctttttgtgcaagtaacagatgatgacatcatttctcgcttccaagccatggctacccgcaaagttaaattgtaatttgtttcagttttcatgtaattcattcaaaccattttataatttagacatttttaccattgtgctactgtttgtacctttaaacatgtcattatcagtttactactatattgttatgctagtatttgtactttaaattttgccactccaacctttngagctctataagaatatnttttcaactttgaata

SEQ ID NO: 63631 - DNA, 461 bp, Oryza sativa
  unsure (1)..(461): unsure at all n locations
tggcattgattctggttcaaactctagcaaggtcccacatctcttgattcgtaatgagaaatatgtcagacttctgaatcctttgttgctacatatgatgatccttccattgatgccacacatagttttaagtttgagaaaacacaagctgggtattgcgccaaggatctcaatatcattcggtcccattctatggatccagagttgtaattcagtgaggcttccaagcgagctcatccagtttgggaccttacggatgtaacagcctatgatatgaagcttccggatgatgcaaggactangagggtaccacttctccatgatcagtgggccaccggtcaaatataaatgatgaagggtgctagatagcaaagctgacacgtaattntgacactcctcagcatctgacccaccaaaaagatgaactttcacgtcctaagctttgatagctgactgaatct

SEQ ID NO: 63632 - DNA, 420 bp, Oryza sativa
agcttatgatctgcatctaacaacacacatgtaccatggtgtaatccaggttgaataattcaatgaagtccacataaactgcagttgcattttctcatcgttaattatatatggccatgaaggaaaaaagttataccatgtgttgttgccatcatatgctatataggtttttatggtgctaaactgtacatctattccatttgcaaggaaaaatatatcatggcctacatgatatgcccttagccataaaggcaagtggtgaagtcataaaaaagacctatggtgctaaactacatatctgttctattagcaaggaaaaatatgtacaaagagctatgtgtcgcatgagccaacctaagactagactagatgtctagatgaccatgtaggttaactatgctgtaaacagatgctacactt

SEQ ID NO: 63633 - DNA, 422 bp, Oryza sativa
  unsure (1)..(422): unsure at all n locations
tctaactnntttttctttanatttctaattntaatcaaacttttaattntgatgttgaactaaacacagcctaagatgactggcccaatactaataggaaagattaataaaatgcttgccatacattcgagaaaattgtcacgagcaaccaaaggttttgtttggcttgactaattgtattgtaacatttgtttccatttgactgtgtcaaacctttttcctttattctttaccaacttgaacatggattgtactcgtcctgtggccaattctttacgcctcttttgaaacatgggtttgtcgactaatttcgtaggattacagctgtatatatacttttttttctatttggctcattgaaattaaagattacaggtttttcggagcctatctttatgttgactcatgatagaatgcttaac

SEQ ID NO: 63634 - DNA, 428 bp, Oryza sativa
agcttagctaagcgaaaacacacttaggcgcatgcttactacagtaattaattctaattaacaaagaaattagcaacaacaaccaaaaaacaaaacaagaagaagagcaaaatctgagaggaaagctagctagctgccgccgccgccgtacgcaactcaccttcttgctgcggcagcctctgagtctgcgcggccgcggcggcgcaccggcggccatctctgcagccggcgcccagcagcagcagcagcaaaggtaggaggaggaggaggaacagacggctgcctcccaccattgcccttcggcccctcccaatactgggcagcaagcaagctacagagagcttttggtagagctaagctagctaggctaagctaagctcctcctcactgtgctcgtgctgcgcttgcgcgtgcgatgcgacgctggt

SEQ ID NO: 63635 - DNA, 424 bp, Oryza sativa
  unsure (1)..(424): unsure at all n locations
ggcnnttggaccaattgggttgatacaaaagtntcatatagtagcttttttgtagtacgtaggccaattgatcatgtgaaatttatttgatcatatatatctcttcctattttaattcaatttaataagcctataaatcccacataaaagcttccttacatttctacagctaggttgcctttataaaagagtacttactttccatatatactccaccttttgtacatcttgtttatatggtcaaatggatataataaatacatgcaactttccctattcttttattgattgtgtttttttatatggagtgcttgaaatttatcatacagcctataatataattcttgggaccaccaaaatcgccacataggtatacgataagntgtcttggtacatgtaagggtaaaaaaaaaatttcacatat

SEQ ID NO: 63636 - DNA, 364 bp, Oryza sativa
  unsure (1)..(364): unsure at all n locations
gcccatcttttggaatgccttccgcttgagcctatcctttgcttcggctggaaatgtgaaccatttctccattgccgtccaagctcgctctttctcggcttctgtgaccttcccgatatctttatggaggatcccgaagttctcacgtgccgctatcccgcagcagttagaccatcttccaatgacagtcctgggcgccgtgggcctaccactagcgtcaacctctcttataacttgcactgtgggcggccatatantttgtgaccgcggatttctactagacctacttgcacttgtctcgcccgacatcgacgtatgttgttcctgcggcaattctgcagcacaaacagaanggcatatttgc

SEQ ID NO: 63637 - DNA, 430 bp, Oryza sativa
  unsure (1)..(430): unsure at all n locations
agctntactggttgacacattttaagatgaattgtaccaactactaaaaagttgagtaactgcggtataaaagggttttaaggtattgggcacttgatcacacgcactttggcctaagcaaaaagtgcctaaatccctaaaagaacgtgacggaccacacctgaaaatatgggctgcaaacatattaggcctaggccaaaaaaatatgccttcgacaccctttaaaggatgacgcatgtaacatgctcccgagtaataaatcttccgggtgatatagaccaagtgtagctcatatgaatagcttctgatctgagtgattatcccttatgggatactccaaaatagatataaaaattgaatcccgactagcgcaagtattcggttgatagcccttacggggaataatgattggccagtcttcagcatagaa

SEQ ID NO: 63638 - DNA, 409 bp, Oryza sativa
  unsure (1)..(409): unsure at all n locations
agcttcattgttaatcccggcatgcatgttttntaagacctctttctttacaacctctcgcattgcattattgagccttcgttgatgttccctggagggaatactctcggggtcaataggaatacgatgggtgcaaagcgcgggattaattcccctgagatcttgaagcgagtagccaagaacagaacgatgcttttccaacacggtgagaagacgttgagtctcatcttcagagagcttgtcactgaatataacaggggcttctctgtcattgtgtaagaaggcatagcgtangcctggaggtagaggtttgagctcaagcggaggtcgaggtggtggttccatgattggcaggttgagagtctcaccgggatccacttcctccttgatgaaatcggggacctcatct

SEQ ID NO: 63639 - DNA, 450 bp, Oryza sativa
  unsure (1)..(450): unsure at all n locations
ngcattggtgaacacaaaaaagatacgcgcgaaagatatcgactgaggtgcatgcacagtagccgtggaccaccgtaccccaacgcgttgatgcaaaaaggacgcgctcttccatattgagcgatatagatgcaattaatgcagtgatcgacctgcacatacagatgagtatatatatcccgggaaagtttcaggtgcaacaaacccacccaatcagttagctagctagctggcttattgcaacccacccatcctatatatatcagctagctagctggcttattgcagcctcgatcaagacagtgatcggctcaaaaagctagcaacgacccaatgcaagctctgtcgatgcaatccttctacatataagggatcggaggatgcatatatagccatcctcatcacatctcttacagcttgatggagcaccagntgggtatttttcttaat

SEQ ID NO: 63640 - DNA, 466 bp, Oryza sativa
  unsure (1)..(466): unsure at all n locations
tcaggtggtgaaaggggaaaanaaatggatcagtacaacatacccggcgnatggtagagatcatggacgaaatgaacgcgggatcctgtgatgaactccgtcctcacccttcttactcaagcgatcaaccaatcgatggatgctgcagcacagagaagaatnttataggattatgtaagaagaaagagaaggggatcactgtttggcttgccacgcaatattaggagatatttaactattttgtcacttttagagcaagtctaataatatagctggctactagctccaattcatccataaccaatcagtccattcatataatagctgcttactatactattaatatatgggtccacctatcatacacactacgtcttgcagtccgtgctgtagctggctataaatctgtagcccggtgctgttctctatcaatttttatctcattaaaatatggttataattttct

SEQ ID NO: 63641 - DNA, 412 bp, Oryza sativa
  unsure (1)..(412): unsure at all n locations
agcttggngatggccaaccangttgtaactagattcgccaccganaccncatgcacctggagcctcttcttctacacctctgctctcctcaacgacaggtccgtactggccacaacaaagatgcacaaccaccatttcaaagttatcagagaacaatgaaaacaatatgaaggaattaccttaacactcacttttaaagtatgaagtctaacatttctgttctccaccatcaaattgtatgcttcttgttgcaaatatgcattcccaactaaattttcgactgctttagaaccaaacatgaaagctaaactagaatgtgctccagacatattacatgtttctgctatttggcctctacactaacatcataaccatatcagaactgctactggaatacacctcatcgaattca

SEQ ID NO: 63642 - DNA, 418 bp, Oryza sativa
  unsure (1)..(418): unsure at all n locations
ntaacatagttttaaaaattaaattatacgagatcttttgccacattggtgtttactgctactattgttaccatggatccaccaccatatgatgcgtgggctcgtcagtggatcatcaaaatgagaccctcactttacattttttttctcttataatttatttttttcaaactatgttaagcttatttacataattattctaatgaattatacacatttttttttcatattttggaaaatacatatttctaaaaaatatattactagagcaactcgttttaagatagtactccaagttgttaagcttattccaaaaccatgtaaataatccgcgacaataataatccgtttggaatctaaatcaaacggcgcatataagggttgtttggttgatggcttaagttactatacctcactt

SEQ ID NO: 63643 - DNA, 338 bp, Oryza sativa
agcttgtgatgagaataaagtcttgacattcgatggacaagacctccgcataaacatggttcaaccggatggtcacaagtgttgatctctgctcatgcttgaccccaagatggatggcgcaaggcaaaggtataatgtatctaacaatgttttcttagtctttttccggtcttggtgtttggtgtagaccggatttgctagataggcgtcgtattattaaaaggggtctatgaagcgagcttgtagatgatcttgtgccatattatttcatatgcatgtatgtgcatcttgtgggcttgtctaaccaagtgtgatgagttttctcatgtcctaaacca

SEQ ID NO: 63644 - DNA, 364 bp, Oryza sativa
  unsure (1)..(364): unsure at all n locations
tccatgatcgtaggcatgtgcatacttatggcttacctagtcagaggagtggngctcgattnttagctaaacttacaagcgcgtctgatatgtagttgcgaatacttatatattgcattgtactcgagagtgtgtggcttcagtaataaatattttttggtcaaattcatagtgagtgaattacatatgctttgactgctaattcatgtattgtatattttgagattagcagcctctccatccacatattgagggcctggttgaaaacattgaatttttttccacttgtaaaatatntacaagtgtacttttacgtcaccaccttctaccaccaagaatacanccgttttttgacaaattggtc

SEQ ID NO: 63645 - DNA, 420 bp, Oryza sativa
  unsure (1)..(420): unsure at all n locations
agcttttgggcctgcattggagttaagcttatctcctatgcctcgtgtttttacatcaacaggctatagcgtcacaatgccgaagtgggaggagatggaggccaccttgattgagaggggtatcaaaccggccaccgctaaatggccggatcgatcgaagttctaatactatgctcacggtggaacgcttaaccccgttgatggctccctggtgttcagcgatcagatacgcgaggctgccagtcgactaacggacgcagtggaagcctcttctcaggcacgttccgacccgacagagagaaggacgagctgtcactctccttgaagactnccgagcattctggaagaacacgaggaaaaggcatggtttcttggaagattggattcaaggaggacatccacacgtacaggagtctgatg

SEQ ID NO: 63646 - DNA, 441 bp, Oryza sativa
  unsure (1)..(441): unsure at all n locations
tctcanagttggctgcatcagagaggcactccatccagtgtggctagccaatccaatcatggtgcgcaaggccaacgggaagtggaggatgtgcgttgatttcacagacctcaacaaggcgtgtgccaagcatcacttccctcttcctcgaatagaccaactagtggactcaacagctggttgtgaattgttaagctttcttgacgcttactccggctagcaccagatcagcatggcaaaagaggacaaggagaagacaacattcatcacgctcgtcggtgtatgatgctacgtcaagatgccgtttggactaataaccgcaggatatactttccaacgcacggtccatgggaacaatgtcgaggcctacgtcgatgacattgttgtcaagactaagacaagcgactcattgatcgatgatctccgggaaaccgttgacaa

SEQ ID NO: 63647 - DNA, 418 bp, Oryza sativa
  unsure (1)..(418): unsure at all n locations
agcttgtatcggcaaccttaccctgagtgtgtttgagagagttcctcttcccaatcggttcaaggttccagacttctccaaattttcgggacaagatggtgtgtcaacttatgagcacattagccgacttttagctcagtgtggtgaagcatcggctgtggacgctctgagggttaggttgttccggttgtccttgtcgggatcagcttttacttggttttcttctttgccatatgggtcgatcaatagttgggccgatttagagaagcaatttcacagctatttctacagtggggttcatgagatgaaattgtctgacttgacaacgattaagcaacggcatgatgaacctgtgcacgagtatattcagagattcanggagatgaggaacaagtgcttcagcttgagtttgactgac

SEQ ID NO: 63648 - DNA, 329 bp, Oryza sativa
  unsure (1)..(329): unsure at all n locations
tctattgaaaatatttcaaaacataaatattggttgtgaaatttaagctcaactatctatacaaaatttaaaaagttcacattaagctttatttagcgccttttgaagtgatcacatgactattaaaagggcaacatggccattttggaaaaaagataacggtgaactaacggtatgggtataaacgggatctagacganatctcagaggtatacaagggatgtgacaaaattcaaaggcatgcaatggatggagcaaaactttatgggtatgtaaggaattgccccatttttcttttgcagactttagtcttgctccctttttggtat

SEQ ID NO: 63649 - DNA, 427 bp, Oryza sativa
  unsure (1)..(427): unsure at all n locations
agcttgcggagaaggatgctgcatgagattctcttaactggctgacaggaggagctccctccgactcaagagatccccaagacatggatcacatgtccatgcttcagaaaccaccacgcaggaagaggcatcatcataggaggggttgatcagaggccactttggcatttcctttctatgtagtagcaaccaggggtagtcagcattagaagctaaaagctagcaacaaaaataattgtagcttagggtgctctaaacacagcaattttgttagtgtgcccggaaattttacagggcgctggagtttggccgtggcaaaagggaaatctacaggggaagactgactgtattggtgagagtctgcaaggagtacaatccatttttggtttagtagattntaggatcatttcacacaatgcccactatg

SEQ ID NO: 63650 - DNA, 382 bp, Oryza sativa
  unsure (1)..(382): unsure at all n locations
tacggaccttaaaactaagcttgtccctttgttggttnttgtaaatctgagaggagcggtttttacttaaacaacaaaaaaaaaaaccctgctgaggtcattatttaaaaataaaaaccctgctgtggtcctttggtaaaaataacaaatgataaaaagaaaaccgcgatgcgattatgaagtaggaccgcatatatataatttggacgggatatgcggcatctgtgatgggattcgcgtatagttcggattagtagcgaacgacatcgatccatctcctcgggaggcttcgtttcacggaaaaagaaactgtttggccgtgcagtaatggctccccgaaatggaagtgagcgatcgaacaagaaaagagaggcaaaaatat

SEQ ID NO: 63651 - DNA, 368 bp, Oryza sativa
  unsure (1)..(368): unsure at all n locations
agcttcnnttgattctaatgcgcggaagttatatgtctttgtacggcgaagaaccggcttcttaaaatgtactattgtattgtctaactttattacacttaacttactttatggcaaggtcttgcgctttcaccccaccatataaagcttatatggcatattttttcccctttgtggctaatcttaaagctatgtggcctcgtagaccttgtattacaactactgcttttattgcgctcgtatctgcacgaaagaactgcctttttcactgtcaacatgtgaggccaaatcctcttcgcgcaaatgctggagacaacctgttcccagcagagctttatggttttgctaggaattttccttgtttctgc

SEQ ID NO: 63652 - DNA, 358 bp, Oryza sativa
tagcacatgatagggcaaaaatatctcttatggtgggagattataccttcttaactcaggcttttcgagctcctactgttcgtgctatcattctttaaaattccttgaggtgttcttcatagatagaagtattacagatcacacttttttttgggagtagtggtgataaaaaaagaaaatacagggaaattatatatcactactagaaaatgcattcttcccgatgtgggggtctttttttacagacggacatgacctttgaagccaaatgaccacctataaaaatataaatcggggtgagagttgctgtccgcctgcgaaaatcgtacctaccgcaaaaaaaatctaagtcttatat

SEQ ID NO: 63653 - DNA, 410 bp, Oryza sativa
  unsure (1)..(410): unsure at all n locations
agctntcaagcatttatagtgttaagttgttgttctcggcgtctttacagatttattcatactccattgttttcttagaaaaggaccagttataagatgaagccaaatgatggagtcctgatggtgtgagcaaattaattagtttatttcctacctaccattatgtagaggacttagctagacaaaatatatgggtcatttgtatgcatattcaagtggttcttccaagcccagctggccacccagctgatgacgcacaatgatttgcactgattgaactgccactctgccagcgatagctgatatcagtttttattttctgcactgagacaaatctccagccagaaaatatctggtgcgaaagagtgtgccgtaatcgagaaaattggcaatattgggactacaaacat

SEQ ID NO: 63654 - DNA, 415 bp, Oryza sativa
  unsure (1)..(415): unsure at all n locations
ttgctgttgccggcaagagggtgtttntgtgcatgtttgtactttgtggtanntgtgggggtgatgagatgtcgcatccttttcgttattagtttgtctttgtagcttttaactttcttgttgtgccttgggtcttccttttcttttatcctgttctttttttttatcttgtgatatgttaacaccgtaaattattactaccaaataggctctccagtgcctttgtaatggttggatggttaagatagcaaggttgtatatagcttgtggaataaaccttatttcttgacaagtgtttatttatggagacaatatttcttcttttcaccaacgagataagcaacacaaatgtgtatatatgcatgagatctgttaacctcattccacgtattgaaatatattttttgcctctgga

SEQ ID NO: 63655 - DNA, 418 bp, Oryza sativa
agctcagcaagtaggtagtgattcgatttggctcttttacaacctttttgttcctacgctaaggcaaatgcaacaagaaaaacaacacctttgtgcgacccgtcctcctgcttcaggcaccaaagcacgaggcgggcgtgggcatctgtctgcatgagaagaggcgccaccgtgccaccatgtcgaacaccacggcggtctccactgtgtagagcacccggaacctccgggacgcgtcctcaaaggatcctttatttttgagatctttcagatatgattcatatcaacctgtcctgtctagtattgtggctaccgagaactaaacgcctacaatcgcattcttctaaggactgatgtagagaaaactcctattggcccgaagcggtattgctcttattcatcataatcatggtggagc

SEQ ID NO: 63656 - DNA, 265 bp, Oryza sativa
tggacttctctgataatcctccagaagatcgctaaccaatacttatgttctctgaccacccctttgccggtgagaacttaaatggcgaggttttgccttctcaaccatgcttgcataaaaacaacaaatcttccgggtgcatggtccttccagaatagatggcaatccaaataaattccatcttatgctgatagagggtgtgggtttacggagcataggatttcctgaagggagggacctaacctactgctatttatcattaaaa

SEQ ID NO: 63657 - DNA, 392 bp, Oryza sativa
ggctgcagcttggacgtcattaatcgattattctccctgctgggctggcgcgccatgctgactgaagtcaatctgtcaccgaaaccaggcctcgtggatcgcattaactgcggtgcgcacaaagatatggcgctggaagatttccaccgcagcgcgctggcgattcaaggctggctaccccgtttcattgaatttggtgcctgtagtgcggaaatggcaccagaagcggtactccacggattacgcccaattggtatggcttgcgaaggtgatatgttccgcgccactgcgggcgtaaacacgcataaaggcagcattttttctttatggctgctatgtgcggcaattggccgtttgcttcaactcaaccaaccggtaacgccaacaaccgt

SEQ ID NO: 63658 - DNA, 466 bp, Oryza sativa
tgccaccagaggcttcatattgtttgccaggttttgctgtatctttggaggcaagaattgccgctgctgtcgccgggctttctggcttgataaccccaaccaacaatgttcttaattgcactttgccagaatctacccacgggcgcgcctgctgccagaactgtttacaatatgggcagaacggatcggcgaagacgtaaacaatgaccggcgcatcttttttaccgtcgaggagccagtgggattgttccatccgttgccacatttcgcgtccggctggtgcgtaaatatctttttcgataagtgtgttactcagggtttcacctttctcgttgtacatgtaaccagagatagcgtgcttaccatctggagtcaagtagatggtgacgcccatattctgatactttccgagataacctttcattccttcgggggcatcgaatggtttgatgattggaatgccctg

SEQ ID NO: 63659 - DNA, 423 bp, Oryza sativa
  unsure (1)..(423): unsure at all n locations
agctntagccatattagaagcattgaagatatggaaacattactttttgggttcttctctcttaattcgaactgatcaagcaagcctcaaatatatcaatgaacaacgtatcacagatggcattcagcacaaattactcattaaattaatgagttttgattacaaaatagaatacagaaaaggtaaggaaaacaaggcagcagatgctctctctcgaatggccccacctcacaacattcaggcactcaatgttgttgttcctgaatggataacacaagtactggccagctacaacctcgatgacaagtgtaaacttctccttaccaaactcagtgtgaatgcccaagctcaaccccctttttcattacaaggaggcttacttcgttataaggacagattatacattggcaaagatcttgttct

SEQ ID NO: 63660 - DNA, 455 bp, Oryza sativa
  unsure (1)..(455): unsure at all n locations
ttattcctgggcttccaccaagtaatatacgcatgtaatcatcatatgagatgataaaatatatcattgtagtacattgcattatctaaaaaaatcattgtagtacattagatatttgttctctgctagacataagctttctcatcaccatgtacaaatttccgagacatacttcaacggccatctgactgactccacaatacaattgctttgagcccttaacgaccatgaaatgcccattgtacacaaggtaatacaaagttacaaactacagtagcacaaatgattgttactcgtcggctagcaagcaaaanaaagatcaaggacgcacccccatccatctctgctatcaaatcaagggtaaactccatacaactcaatgatgaagtaacaaaatcaaccgtcctgtagttaaagctatcgtctccgtatatgatggtacagagctaaaatga

SEQ ID NO: 63661 - DNA, 416 bp, Oryza sativa
  unsure (1)..(416): unsure at all n locations
agctngcggtgctagaggaatcatttgtcttttgccagagtctggagagagtatggacgaagacttgtatccagtatgaacctcgacgaacgatgtgggtcccgacgactatgtcaaaagtccaatggtggggagatcagagctggcggagaaaatgctggggaggatgttgctcgccgacggcgaggatgatgagggcgaccggccgctggttttaccgatagtgggagggcctgtgatgggaaagacatatctagcccggttcctattcaacgacgatagggtcaagcaggcgttccacgtgcggcattgggtgcatctctcaccacatgttgatctatctgagggtgtcagtacgattaccagcagctggttggtccattggaatgatgggccatcctatctgcacaagtaat

SEQ ID NO: 63662 - DNA, 393 bp, Oryza sativa
  unsure (1)..(393): unsure at all n locations
ttgatttgtaaaagtgaaaatatgccctatatctttgtatagaatgagtacctccctttacaatatatgcacatgtactgcctatttatgaaatttgaccactcatcttctctataaaatattgtatgatcaactaagagcgcagcattagagaagtgtgtttatatctgaagtattataggttgcaataccctacccgcaccacaaccgacaccccaaagccatcgtccacgacatggatgtactcgccgccgccaccatcatcgacatgcaccacctcgtcggactcctctttctctctgcactcgantttgtcgtcgatgtcgaccacctccacatcgtcttcgtcgtcatcatatacctcaacctcttctctgtcgtcagtgtgcacat

SEQ ID NO: 63663 - DNA, 414 bp, Oryza sativa
  unsure (1)..(414): unsure at all n locations
tagctcagttcaagtcccgggacagagagcatntgctgttaacgagttcttgagctgacaatcccgcggccggtttcaccggagagatgcaggttttcaggtttggacccattaacttcctcgcatgatcatcacacggattcaattgcttatgcgaaattctgtgccacaaatttatgttttagtaaatcttaaagttcaagaatgggatcaatgtattgggtggaggaacctggtacactacttacaagagtttttataaggtgtagacgaaaatatccctacgtttatgtgacggacgatattccttcgaccctgtttcctaattttctgtgtctaacagcggaaatttccactgaattcagaagtttatctgttaaaaccgacaacagggtatgtagtgtgtatctgatc

SEQ ID NO: 63664 - DNA, 421 bp, Oryza sativa
  unsure (1)..(421): unsure at all n locations
agcttctagattntctttgaagtttttttgaggttgaaaccagtcacacactaccctgttttcacaacaaaacgtgaaaacaaccaaggttagcatacaaaggaaaatgattacacagaggtaaatataaagttttagttcaagtaatctctattatgaatcttccccagcaacgacgccagaaatgcttgttggtatttctgaacgacattactagaaatataattcccagcaatggcgcagaaatacttctggtatattgtggttacagagtttatccgcaagcgcacggatataccattgtagcatttcacccgagagtattccaagggtatcgtatttattttatcttgtgggaagatcatatagagagaactcaactaataatttatatattaattgtgataatcatattctaagc

SEQ ID NO: 63665 - DNA, 367 bp, Oryza sativa
  unsure (1)..(367): unsure at all n locations
tgtatgttgtgaataaagaaatttccaaagtattgggcatacgccatgcgcacactgctttaacagatgtgcttaagtccctagaagacacatggttccaccacacctggaaatatacggcatatgtggtataaaatccgagtaaataaactcataaaggatttaccaaccgcctgaaaaatgaccacaatatataatcagcctaagccataatattggtcaataaaaatgcacacttacgtggcaaaaagcaacgatattgtaaccaatcaattgctttaaaacccaaacagcaccatgactatattaaaaagtcagcgggacagctatataaagctntacttgttgacaccttttaagatgcatt

SEQ ID NO: 63666 - DNA, 418 bp, Oryza sativa
  unsure (1)..(418): unsure at all n locations
agcttcgtagaaattaagatcaatttgtgtatcccatataggccaagttgattctgtgaatagcctgtctgtttttcaagactagatctgtttagacaacttatacaacaatggtatcacagttatggcattttatggcattagtagtttaatcgatctacaaatcattgcaagcatgcatcttctgttgctttaatttttctttttctgattggttaatccggaacatatgtgctcatgttttactgctacaatggcaattttggataatcctaaaatcagaggattntctagactgtattgcatgctttctgttagtaggttaccctgtaaattcagagtaaaatctagcaaaacatctnttacacccgcaagcactacgtatagatgttctttaccctgttgaactntatggtgg

SEQ ID NO: 63667 - DNA, 436 bp, Oryza sativa
  unsure (1)..(436): unsure at all n locations
tggaagagaggcaagggntgtttgcaaatcctttgtttgttatcattnttgaaatcactaagtgatttacttcttgttaggtttgggtcgaaaagagacttgcgtctcaaatcgacttaagaggtgcttttctacaactcaataagtaatgtaccgacctcccgggtcagatcattacttctcggcttcctagagccattccacttgattaatcggctcccagagcctttttcattntcagcagcacaacaatccgcttccactcgggaagcctagactatgatgcccatagacatcccgaatcacacagattcgtttcttgaccactcangtcatccatctgccacataagctgattctggttacgatttccacaccacaacaactttttacaaagcacaggcaaacaaatctacgcaacgggaaccaactcaca

SEQ ID NO: 63668 - DNA, 418 bp, Oryza sativa
  unsure (1)..(418): unsure at all n locations
agctttctcaagatgttcctgctgactcttgccccctggttcgtggtcctagggggagattgggcaaagaaaaagttggagatttttacagtgggagtcagattccgatccattccaggagggctggtagcattgtcattcgtgatgcaccccgctctccctctccagctgcatctgagtcagatgatggtggcaatgaggatgagcctggatctgaaagcaatcctttgaggctgtacaagacaagggctgttgatcctgatcctaaacgcacaagagtgaactatctgaagaatctactcaagtgtggaaaggacagaatggttagtcctgatactctgccagctgactctcangatgacagattcaggaccttggtgcaggttgattggtataactttgtgatcatgggaagatc

SEQ ID NO: 63669 - DNA, 374 bp, Oryza sativa
  unsure (1)..(374): unsure at all n locations
tgtagaatgaatatatatttcagaatgagtgaagcccactatgatataactaactcgagtggtgatcagcataacaataagagcggttgtagttntgatcactaattaataatagtgatacacatgtgtcgtacacaacataatagcatatgtcatacatatgtatatataccattgcataatgacacacgcagatactaataatactaataagcttatttctttcctgtccataccaattagcaatttgcttcaccggtagggatcttggcgtatgcataatccatggcctctcccttgctgtccattgcttggcagtagtacaccgtggctgctgcaagtagaacagctgctctgcaccagacagcagagca

SEQ ID NO: 63670 - DNA, 427 bp, Oryza sativa
agcttgatctctacatggtggatggcagctatggtccctgacatccttctggtcatcttggcaaggatctttgtgataccacctactccatttcatcacgtggcatgagagctcctgatgccttccaggccaacatccatggtgcgtcatctgctccatgaaatgttgctcatatcgaaacattatatactgaaacttgcccaccgtcatgccagttgtaaatcgtcagcaaaaagaataatttctcggaagatagaagtgatcgtcaccaacttatcgatttctttatgggagcaaatgctgtagtacctctaattaatgcactttctgctggtataggctgatagcgaacattaaagagtaaccatgttctagaaatgtgtgaaaaatttccaatgcaaatattaataccctgatgtgtattagc

SEQ ID NO: 63671 - DNA, 310 bp, Oryza sativa
  unsure (1)..(310): unsure at all n locations
ggcacaggtacaactatntacttagcaaacagttattctatatttttaagaactgaaaancaagaccccgctgagcattgccatcactaaacaatccacaccacattttggatttactattattctttcagaaaactacaccgaaacatcatatattcagaagcaatcagacaccacagttttgacaaactcttgaggccggcagacagccgccaatggcgacgccattggcatcgtcaacccgccgccttcagccatgtcgactgcgccgccttcgccgatctaccaatcgaagcactgcacgagcgcc

SEQ ID NO: 63672 - DNA, 419 bp, Oryza sativa
  unsure (1)..(419): unsure at all n locations
agctttactgtttntcccaaagaagagcgtgcttctttcaagggagagagaacggatggacaactctcctttttaaatagtagagatgtgtagacgggacataaacaactttaaattaggttgtctatttagctagctatattagattgtacaatttcgctatgtaattttataccagctaattgaattggatttgttatacaactcctagtttatatttcaatatatgtaattatattgtatgtataatagatactaaaagtagggttgaatttaatatacaactctaactcttttcttcttcctcttatgtacaggtggatttcgtatataaatcttgatatcaatctacactataatttagctccataacaatctaatggcttactatttttttagtaatgtaataatttttaccc

SEQ ID NO: 63673 - DNA, 425 bp, Oryza sativa
  unsure (1)..(425): unsure at all n locations
ntctgaaattgctaggaatgactcataagaaactagaaataactattaagtcctactcttctcaacctgatagcaacctatctaggtccatggctgcaaccgtgatgaagaaaccaagaatatagttgaagatgaaagtgtaaggaagcatacctaaaaggggcctccgcctgtaggttaaagcttccataataaaaccatgaaaactcagcttttctccgatgatgcactgtcggtgatgaaggaggcttgcatccttgtggttgcctcgctagagataaaccaaatggacggtgcaaccttctgtgaagcaaactttgtttacttccagnttgaggatggccaccgggacaagagaaatgtgacgctggtgaactcttgacttcacaaaagtaccaaagaatagagaatacaaaggaaaacac

SEQ ID NO: 63674 - DNA, 429 bp, Oryza sativa
  unsure (1)..(429): unsure at all n locations
agctnttcaagatgaccaaaggtggacaatgtcatgtttgagctctgaagtctgcatgagttttaattattaatttttcttcaaggtcctcattcttaagttcttaaaccacttatgatttttaacttgtttgtggatacaaaaaaaaatgcacaagtctttattcgattgcacaatactcttgtgatggacaatccgctggccattgttggtttactcagtggaatctttaattccctccaatcgcagcacttaagtgctaatggtttaattcttctcaaatggcatggtttaagatgcctaaagttagtaatgcaatataggtgtattctagagccagaaaacaatattaatctgcgaaaaccggaaacttgaatcactgctcataatagaagtgtggcaatatttgactttgaatatnttatatta

SEQ ID NO: 63675 - DNA, 372 bp, Oryza sativa
  unsure (1)..(372): unsure at all n locations
tcttgatgcattgaattataaaggctataaaaggatttctaaataatctggntattgatgctattgtttggtgtcctccttgaggcgtaggtgtaactattccttttctttctgtttgatgagaacatgcgtgctcgatcttaggtatttcctctggtctagcatcagcaagacaactccctgcctagtgacaaaatagttnttaccttgatgtgcaggcaatggcccangttggaggtctggttatgttgcaacctgaagttggtggatctcgagagaacttcttttttgcagggattgataaagtgagatttcgtaagcctgtgattgctggagacaccttgattataaggatgactctgatcaagttgc

SEQ ID NO: 63676 - DNA, 342 bp, Oryza sativa
ctattacagcattttctatatgaatgactccactcttatgttttgctatagacttaaaccatctatctaatctatacttgagaactaaggttaaatgagaataacttatatgattgaacttccagcttcggcaagaactccaagatagactctgaaaaatgggggctgaatcaagggtgagtacaacgtactcagcaagctattatattcaataataaatgtatgaaatggtaatatttgagtagagctaggtttaattgtccaaagctgagaataaagaagtagaaatcctgaaatgtttgatatgcaacagtatttaataacagtttgaaattattgttt

SEQ ID NO: 63677 - DNA, 357 bp, Oryza sativa
  unsure (1)..(357): unsure at all n locations
tgatgagtttgagggccaagcttgngaccattgttcttggtgatctaccacctttctcgcggggccttctacctcgcgcggattcctcgtgttcaagtttcaaatccagaggtgacctccagtgttgatgcccagaagatgtttgatgaaatgccaagaaacaaggagcttaccacagcaagtgttgttcgcgtcaccgtgagccatgtgctctgtccagtgaccacagaggtgcttcacgaagtatttgttccgtattgtcagagcgggtgatgagtgcaatcgacgcggctacttatgtggaggctgtcgtctcactcaagtacgccatgccaagacgcagcatgagcttcacat

SEQ ID NO: 63678 - DNA, 420 bp, Oryza sativa
agcttagactgagaaacgcacgataacgatgtacggctagtcttcagaatttcagatcgcaataaaacagtggtgcaggtcgtagtacgtcgggtcacaaatcttggagcagtacgtactgcagcacttcggttaggtggagactcgggtctggcttagttcccaactttttcttcaaacttccaaattttccatcacgtcaaaacttttctacacatacaaactttcaacttttccatcacatcattctaatttcaattaaacttccaattttaacgtgaactaaacacaccctcgatttgatgcatgcatgggaggcatggtgcacactgcagagggattgtattttccgtagctggggtacacattcatctggtgaatttttttcgggtttagaatttttttaaaaaatatttacag

SEQ ID NO: 63679 - DNA, 375 bp, Oryza sativa
  unsure (1)..(375): unsure at all n locations
tctttgtatcgcaagtccttcgagcttcagtggcacttggcctgtgagaatctctagaaggataacaccgaagctatacacatcgctcttgtcggtcaattggcacgtttgcatgtattcgggatcgagatagccacatgtaccttgaaccattgtgacaaactgctctttgtcggatggagctagtatagatgctccgaagtctgtcactttggccatgtagttctcatcaagaagtatgttggcagttttcacatcaccatggagaattggtggagatgcatangaatgtangaagtgaagcccttcagctgcttcatgagcaatcctcaagagggtgctgaaagagatttgcaacccttggttctttccatg

SEQ ID NO: 63680 - DNA, 380 bp, Oryza sativa
agcttgtaatgcttataccagcagattcctaaatcgagctgataagaggttcttggaagacaaggaggaatcaagcgtttacaccaatgtgtcccaaagtatcttatgtatctccgtactaatcgcagcaagttcatttgctgctgctttcactcctcctgggggatacattgcaaacggtgaggatgctggcatgccattgctcaaagaatatgctgaattctcgagctacgtggctgcaaatagcatgtcgttctattgctccacatttgcgacatgtctgcttgtgcatgacagtctaacaaataggcgtgttaggaactcccaacgattatctctcacgaactggaattaatcacgaattgcgcatacaagatttc

SEQ ID NO: 63681 - DNA, 423 bp, Oryza sativa
tcttatgataatttgcctcgttagttagccaccattgcccagaggaataataatacgtactatgacctacatacatttacatcggttgatgatcgaacaaagagtgtgctgcaaagagcctttttctcattgggtgcttgcatcaatgcttttgtgcattgtcgacctgttctatgcatagatggaacttttatgacaggtaaataccgaggtcagatattgacagcaattgggtgtgatgggaacaaccaggttctacctatggcttttgcatttgtagagagtgagaacactgaaagctggtactggttcctatagagagtgcacattgcagtggtgccgatgaagcccaacgtttgccttatacatgatcgtcatgcgggtatgttgcgggctattgactacttgcagaacgggtgggat

SEQ ID NO: 63682 - DNA, 417 bp, Oryza sativa
ttaagtcacctgcagctgcagcttgccctgcagcggtatatcttttataaaccctctgcaaaccaatcccatatcaaaacatcttttctaattagctcatcctcatgatatttgcttagagacaacaagcaagacttcatatgaaaaagcagaacgtagtaactgaggcttaatatcttccgcatgttgtccacataaaggctgttctccagccccaaactgatagacttattgaccttgtcccattcctctgaaatacttggtttgctaccaagtaggcatgctgtagtgatgattgctagcggtacaccaccacatttcttcaaaattttctcagtgacaccacacaaaatagcatgacagtcatcgttaagagtcaaatattcctttgcagaacaattgtctggaaacatcatc

SEQ ID NO: 63683 - DNA, 454 bp, Oryza sativa
  unsure (1)..(454): unsure at all n locations
tattacggacctataaaactcagctngtagtgcttntgtcacctcctctggaatctgtcaaatgaaagaattaaactttttcaacggttagcctttacagagttttttatactaactcaaaaaaaaatcaatatctaaaaagagttacaaaattagtcttgtttaaaaatatcaggatattattctcttgtacccagagcagttccagattttggaggaccatttcaacctcgatttgaaggatcttaataatcaaatagtagtagcacaaggaaaaacacagtgatccactgttttgtatttggcaaattcaatccttataagagaggggtaccgaagaaatattcatacctgttgaaatttaccccagattccaatatgttagttcaaacttgaatcttttgtgaggtttcccctatgttgaattatatccaaactctagttcatatctttt

SEQ ID NO: 63684 - DNA, 191 bp, Oryza sativa
ttttagcacaaaaaataaaccggtcgaaacttgtataattaaataccatattaccttacactaagaaaatgatacacataggaatcatggatttggatctctcttcaactacatatgtaccaatcaaacctcatcatttcatgaatatcaggaataactagcgccactcaaggagaatttcctcatcatag

SEQ ID NO: 63685 - DNA, 433 bp, Oryza sativa
  unsure (1)..(433): unsure at all n locations
actaacctgagcaagctanacttagcaacaggaactgctctgttatatatcagcaggattatcatgagtacttatcttgcataccttcagcttaccttgcgcgactacatcgcgaacataatggtacttgatatcaatgtactttgtcctctcatgaaacatctgatctttagtgaggcatatagcactttgactgtcacaaaacaagttaatgcaagaatcaactccacaaagcttagcaaacaattctttcaaccaaactgattctttacatgcttcagcaatagccatgtattctgcttcagtggtagactgggcaacaataggctgcaatgttgcctttcaactcacagcacaactggctatggttaacacataacccgtgaggaccttcctttatccaaatctggagctaaatcagaatccacatatt

SEQ ID NO: 63686 - DNA, 417 bp, Oryza sativa
  unsure (1)..(417): unsure at all n locations
agctntgtgccccatctctctctctatatatatacatatgtgctaactttgagaagattcctagctcgcaaaagaaacagattcatactctagcagatatgcctagcgttgaatgggattccctgctgcaccttcgatctaaagagtaaagaggtgcttcaattcattcgcttatcctggctgcctagctatgtctcttgcattcttggctacagattttcaaagctatccttttcttcttcatcgtcatcttcttcctcctcctatcggagaatcaattttatcgagattaaaagtgaattatccggtctttcgcattatagattaatcttttttataataaaccagctggtgtagtgtacacgggttacgatcgaacacaagacctcacaattaanactatacacccttatcact

SEQ ID NO: 63687 - DNA, 382 bp, Oryza sativa
tgtataattgcacgacgggtgccatgtcattgtcgattcttgttaaaatgtacaatggaaatcgacaccaggttggtcggctaagacccgcttaaggaatctgcattgtgatttcgtagaccatatatccacatgcacagtctttggcgggtattattaggtctccgcaacctagatgtagcctgtaggctgtagtaccgctatacctcgtttttattttttaatttttaagataataatggaatagaaatccattctagcctttgctcaaatgagttacaactaattattacacgaaatcactcaaaacgagtgcaacttaaagagaacttaaaataactctttcaaacattaagcgaacacaaactcataaatgcccaca

SEQ ID NO: 63688 - DNA, 424 bp, Oryza sativa
agcttgtatgaattgtttccaacaataaatgcactcacaatcactgtgctgtttggctaaataattaggcatgctatagtaatacaaaatcataataaatgtgtgaaataattttagacagacctataataagataggcttataataaatacactcacaagcagaggctactccattcagtcgaaaatatatttatgtatttatgtttcataataaatgtactcacaagcagaggtacaactttgaataagatcataaaatcttaaaagttaatgatattatgaaacttcttttcaaaacaaatacaaacataccaattttatgttttgaaactaagtattttataatttcttgatcaactagaaaaagtcaaatgacatattctttactagagagagtatttttctatgtctatccataattc

SEQ ID NO: 63689 - DNA, 430 bp, Oryza sativa
  unsure (1)..(430): unsure at all n locations
gtataacacanaananaaacatcgaacacacaaaagtttacaccaaattccgaaaaaaaaaacaattgtaggttagaaactgaacatgtataatccatataaatgtatcgattacaaaatcgagaaatgttattaaaaataatcaagggatgttactcagagtttagaataccaaaagaagtttcgagaagagaggagaatgtttgttgccctttgtattttaaagcttctaaactagtacttgtagcaggttttccatttgtcttcctttctagaaaaaaaaaaacttatcttggtacccttgtaataaactggtcctgtggctataagctgataatggaagattacagtaaagaaatttgcaaacatctgaatatatgtcatcaatgtactcttgtacttgagagaaataccatatacatgaacaatg

SEQ ID NO: 63690 - DNA, 411 bp, Oryza sativa
  unsure (1)..(411): unsure at all n locations
aattggaagtcgaagctcttcaccgagtttgtcaacccgcccggcaatcatacgccgttcgatgaataccctcaaataaccgaagcggtttgggaggaattctgctctctcaagaccacccaagagtttaagggaataagcgaggcacatcggctacttgaacagcggaatgaacacccgcatcggctgggcaccgcagggtacatctgcaaggaggcaatatgggctcaagaagatgcagccgctgcagcagcgaatgtccctgccccgtttcaaacatccctgaacaaagagctccaactgggcgcggcaaagggtaggtcaacccggaccgtctgtcacctagagaaaaaagtgatggcgtcgctatangaactgggagtcactacttaactactaatatccgtcgat

SEQ ID NO: 63691 - DNA, 450 bp, Oryza sativa
agcttgtgtacatacaactgtactttatattagacatatatatatatatatatatatgcataataaatgaagtttcaaatctattggttcaatcaattagtatagatatctatcgtggactggtacaaggttcgaaaatgctactacctccgtcccaaaatgtagctatttctagcacagtactttgttccaaaatgaagctatttttctacctaccttctactctcaactaatcacaaccattctttttcacctactttctcttttcaaccaatcacacagccttttcaatcattctcacctactttattaatacccgcgccaaccttaaaaatgcttacatattgggacggaggaagtaactagctactcctggcagtagaaaaatacttcctccgtttcatattataagactttctagcatgtctatattcatatatatgttaatga

SEQ ID NO: 63692 - DNA, 281 bp, Oryza sativa
tatccagtgcgtcgacttctggctatactacatagcctatctttgttgtgccactgctgggctagtgtacagcaacaacttgtggcagattgcacaatcatttcaccgggaatctcagctcaccatgcttcttgccgtgtactactcctgatccttctttggtcagacttctctctgctctaacaaacttacctctcccggccctctgtattgatgtatgtactcgaatgcatcctaattctcaccagctggcccattaactaactatatatattgaattt

SEQ ID NO: 63693 - DNA, 358 bp, Oryza sativa
  unsure (1)..(358): unsure at all n locations
nnttagctcttttctttaggggtgagccttcaaaggctaacctgtaaactcttttattttgagagaagtccgggctgttcgatattattctgattttgtttcagcattttagtgtatgaatgatataaacaaacctaacaatttccatctgattgttgaaattatgactgtttatttgttgattttcataacatcatggttatttgcttaacatgatttataccagtcttttttactgacagatatctcgctaacaatattcagttacaaggacaagcgatatgctattacatctagctataagaggttaaagccctagatctgctctgatcatctttatattctctactcttcactc

SEQ ID NO: 63694 - DNA, 427 bp, Oryza sativa
  unsure (1)..(427): unsure at all n locations
agctntggacttgcactggagttaagcagatctcctatgcctcgttntttctgtcaacaggtggccggcaatgagcgacaacagcagggactcgagcaccgtatgtcggagctcgagaacaacttgtcggaaatccgtggctcgttgcgggtcacctatactggtctgcaccagctcgccggggagtgcgaatcccgatgagttctcattgacgtcttctcttgcaaagctggcggcggcaatggaggagatcccctccaagcgtgcggccaggatcggagaggagacgttcaacgggatctacaccggggcgtgccacgttcttgcgtgtgtgaggccggcgcaccctgaactcgatctacggaagatcttggatcagggggcggctagcgatgtgcgaatggatgtgatggaagaaatcggcgat

SEQ ID NO: 63695 - DNA, 421 bp, Oryza sativa
tgcctgccagtccttcatttgcgccatcattgttaccactactgcttatgacacgagtagaccagcaacctgtggcaagtgacttgtgatttttatttaacattactatctgtcattggaatgtgtaccactcacatatatttagccttcctagctccacatattacttatggacagcacatgttcttgatccctacaatagatgactacgccttccaagtattcattgcttggtaaaggcttggaaaggatcttcatattgctgagagtagttgagaagcaccactgcacctgccttggagattattattgataaccttcacatctgttgttgttctgtgtttaaaggcacgtgacattattagaagactgccacgacttgcttactgtgtcaatttgacgccatttacatcattttgaa

SEQ ID NO: 63696 - DNA, 421 bp, Oryza sativa
cctgcagcatgcaagcttgtgattgtataatattttcagaagctgatatcctttgatatatgctcgatcagggttttcaattctgaaattggattctatgccgggggttgccaaaatattataaatttcgagacgaaattatttgaaaatttgactgaatttaaatataattagaccaaattcacaaaaaaaatgtaataaacacaaaatttctgacgatattttagcgtgccggcgcggggtttcggaaattccattacccaggaacaagggggtagatggagtgcttccactcattcttgatgcaatgcaagccagattggcatattccacagaacagaagttttatcgtcacatagtcatctccagagctgctgcagaaatggagtaattataagaaactactacactgcataattgt

SEQ ID NO: 63697 - DNA, 412 bp, Oryza sativa
aactcaacttgcgatgagctacatatgcacaaaatcaccttccatgttatgaataactgcaccggctcatcccaaggacatatgttttctttttttttttagcctgcacatcatcatgctgctcatactttattgtaccgccccactccccagcaagaacatacatgtaatacccatcaagccatcatactcttaaatggcctataataaaacccaaaaataagcctgataaccataagactcctaaaaaacgcgatttcatctgctatataccagaaaaacacagacaatatgttctttttcatatgcaccacgatgctcgatgaaaaataataaaaaacctatggatctagctccctgaattcagaaacccatttcaacactcacaaatccctccctgcacccaattaac

SEQ ID NO: 63698 - DNA, 447 bp, Oryza sativa
  unsure (1)..(447): unsure at all n locations
agctttagctctgcatcagactttgcagaaactcgagctgatgcagaaccctgtccaccttagccagcattccctcctttgccagtttgtcctataaggaaaagaaaatagagcttaacagtnataaaatagcacatgaaagaaataaattcaagagccacagaaaagtaggacccttggccctggcactttgagccattgcagaattgaaagatatcagcagctttagaagcaaaaaagagtaaaatgtgtatttatatacctttagatgaggccttcccgccagtttttaggctctcatatgcagacttcccatttgttttagagttgacacgaggcagttcttccacgaaacctaagcgcatgcagtgataaatgatggccacggcgttaaaatagtgtcatcatattacttatatttcaagtgccattcaactgcacatttgt

SEQ ID NO: 63699 - DNA, 189 bp, Oryza sativa
ataaaactcaagcttacacgggcccttctaagggcctcttttactctgccaaactccccttgtctgatgcgacgctgtcagactgaaactactctcgaaaaatctcaatctctcggtcgtattttaccacccgatgttattccttccaccgaatggatggattacggatcttactctattgttcttgcc

SEQ ID NO: 63700 - DNA, 444 bp, Oryza sativa
  unsure (1)..(444): unsure at all n locations
agcntttgaaacanagtggcgcatgagttgagattcagagccacatacctgtggaagatgcacacatccgcaataaattgaagtttcacattaaagtctgatatatccgagaagtccccagattggtggatccttcttgtttcttctactatatcgctcaattcttttcggatagcattgtgccaacacaaaatctcatctattggatgcataacaagctgactataactagattctgcacgctttctctttccagttttaaagtgctcatgtgagcatccatacttgtctgtttgatcaatagcatccttgcatctaacattgctttttgaacaaggactacaaaaatcatgtgagtattgtttcactgctttccctccaatccacgcaaatacaacctttacaaatttcgaaactatagttaagtaaagcatggcaacatta

SEQ ID NO: 63701 - DNA, 286 bp, Oryza sativa
gcttgcgagactacgactatcgcgttggctaggaagacaacttcctcaattctaggttaacatccgggcatattagagttgcccctatattctttccaggggaatgtactatcattggtcacgcaaatttgggttttccaacatttcttttacaaaagcttgcgatatgaaagaatgggaagcttccgaatcaaacagaactatttgtggtactgagtttacagagaacatacccatcacaacgtctggagcatcctgagcgggttcagcttgaatgtgattcaca

SEQ ID NO: 63702 - DNA, 388 bp, Oryza sativa
  unsure (1)..(388): unsure at all n locations
agcttcttgatgggaagtaatctgtgcctatcaacaaaaatattgcagactttaggtgattttacagttttgacttcagaggacaaagtatgcagataaatgaacttaatacatcagcagctatatatgtctcttaccacaaatagctctccaggaagcttctcattttctggcatgtagcagatgaaatttcattgagggtacagtaaaatgattacttaaagaataatgctgatctatggtttccattactgaaaggaaaaaaaagggtctcgcttaagtgaatgaaactattacctttcccatagaggtaccaaagaagngaccaagaagcagcctcatccaataacagttgcgctttttgctgcataagtctatccttcaccat

SEQ ID NO: 63703 - DNA, 459 bp, Oryza sativa
  unsure (1)..(459): unsure at all n locations
ggacacataaaactcagcttattcctntagaaactatagagaatacanagtggatgagggaattgctccttgaggcgtgttgtgggatcctctatttgtagcctcctttaacggtagtaagtcggttgtaggtcgaaaaacgggtataacagtcatcaaaagtgaaggaatcgccacgtggaagctcaatggcgcgggcgccaagattggttcggccaccgcctttggtgagggaaatattattctttttgaaaaaacaaatgctctagaattccagtatcactcagagaaagatcataacaactctatttcaccaattcatattcaacaacaatctagatttagatcatgctttatgcacccacaagttcatgttgaaggaaagattttttaccaacaactcataactatagtgaagactaactgaaactattccttcgcctaaatataaagctatat

SEQ ID NO: 63704 - DNA, 415 bp, Oryza sativa
  unsure (1)..(415): unsure at all n locations
accttaagacacgcagctgcaactagatgtactctaccttggattttgttacccctgcttagaaaatgagtatcacaagttatatataaaccatcagtccagttctctgtcacgaccggaaataacccaacgggcgttccttacgtgcgagcattattccttgtcccatgaggcaaggtacaccaaaagctgatacagctcaaaggtaaacgagcggaagccgtaatagataatttattacatgggcagcgaatgcccatcacacacaaagacaaactagaaacagctgaagactagggcgacgaccacaggcgcttgacggtaggcacgagctatacaccaaagccctcatctttcacggactcctcttctgggttngggaaaaattgagcaagactgagtacaaccaccggtc

SEQ ID NO: 63705 - DNA, 391 bp, Oryza sativa
  unsure (1)..(391): unsure at all n locations
taaaactaagcttataattgttctaccatatgtattgtgtacatctttttcagaaatacctaaaattactttatagatataaaagggtgacaattaattaatttattccattacaagtttaaaacaaatatgatttttttatgaagcttccttagtccttacacaacgtataagcttctacatatatatgtgtcactatttctttcatgagtttgttttctgaaaacttttttattacatatatatgagagaggaatcactctcacaaaagataatagcacaaaaataatttatgcagcatgtgaaaaatgatcataaaaagaacaacacaagaagtttcatattnttttggaattttctagtggggtcaaatcattgtcaacatttacat

SEQ ID NO: 63706 - DNA, 438 bp, Oryza sativa
tgcttctgattgcacggagttgcgtggactgacgtgctggcagctgtgttacttggttttgggcacttgtcggcgaaatgacccattccttgacaattgaagcaacagatatcttcccggactcggcattttcttttctcatattgattcctctgtcctggcactggagatatgctgaaacggagatcttggcggggatttgtgttgccttgatgcttctctccgatggaactggcgggttggttggccatcttcttcgtcagcagaggactgaattgacaatcttttggtacatgatcagttccttcacaaaagatacaagtgatcctgctcgttggacacctgtctggcggatggtcttcctcacaatgaacgcatatagtggcacacgagctggcgacatgacccgattcttcacaacgagagcatgccttacat

SEQ ID NO: 63707 - DNA, 443 bp, Oryza sativa
  unsure (1)..(443): unsure at all n locations
agcttgaggagaagattcatgcacaggaattggagaaaagcaacatgcaggcgaaatcaaaggttcatacgttatgtctcttttcatggaaatgaacaatcaatcagttgtaatattcaagtcaaccagacattttcataaaatctttgcattggttgtttctttataccatgcaggaaacagaagaagctgaactcaaaaagctaaggaagagtttgaattttagggcaaatccaatgcccagctcttataaggaaccacctcctcccaaggttgagttgaaaaaggtaattctctcgcttgagatatacatgtaaggaaaggaaaatttaagattatagaccatttacctactgattcacagtaggacctttggcagtcttcttttattntagttacacaatctatacttgctaaaaccagttcctgtgctgcctgtagtt

SEQ ID NO: 63708 - DNA, 450 bp, Oryza sativa
agctttagccataactagataaactaccatggaccgcatatatggcagatgggctggctaaccaatagctttgtttcgacttgatgcagcagatgataagtggcccctacgaaatatttgcccaagggcatagtccttccattagcgaggcttatgctaagtgttgcatatttgctatcgaacctaaggttgatccgcagaagacaaatctttcaagccataagttatggaaggcaacttgctctcggttggaaaatgttccaaaagtttttgcatgcctagtaatgtagttggcccaaccgtcggcatttttagtaccaaggccgctgatcatagtgacctccatcaggtttggcgcccttgcccatgactgaagaggaaggcgttcaatgtatcgggccggaagtagcatgccggtacaatgaaagattcatctttatccatctcagc

SEQ ID NO: 63709 - DNA, 453 bp, Oryza sativa
  unsure (1)..(453): unsure at all n locations
ctgcagcttttatataaacgaaacgatcctgctttaaatacaaaggatcatcctcctcacatagtactgttattttgatcttagccagcacactaagctctcgacttacgtaaaacacaactacacttattccattctaagctcctcctcacattggtccacgttctaacagctcccatctgaatgtaggagctgcataaacctttggacaggtgtggagtagcaggccgacgcagacgcagatgacggcgatgcccatcacggtcagcatcgctggcctgtacaggaaggtcctcgccgtcgagttggggtacatcaaggcctgacngctgcangcgttgcanctcggtgctggcggcggcacggtcatgccgatctccaggctgacttcaccaggcttcacaccatcggttattacaaggtgtatgctgctagggacgccgaggacaacat

SEQ ID NO: 63710 - DNA, 308 bp, Oryza sativa
tatcagcatgttggcgatcaccttgagcgtgaactgactaaatctattaaaaccaaaaattcagtttcagaaacaatattttcaagaaactgagaattgattacgagcttaataattacagatgaggcctcctcgagcacaagcactcttctgtcgagccatgtgtcaagcgtctggacggcgaggtcgatgatgaagtcgaagtgcttcttgagcgcgtcaatggagagcggctcgccgatgaggcggcgcagcttcttgtgctcgtcgccgctggtggtgaggaggctggtcggccctagcacctg

SEQ ID NO: 63711 - DNA, 284 bp, Oryza sativa
  unsure (1)..(284): unsure at all n locations
agcttgcgactntgcagacactgctgattgtgttcttttcatgtgtgctttctctcatcagacattgttcttgccgtagtttccagataattagaacttttcagaaaaagaaagcagtgatatccaacgtgttttataacacactacgatgtacttcctccgtttcacaatgtaagtcattctagcatttcccacatgcatatttatgtgaatatggtaggagacgtctacatctgatatgaatgtgggaaaagctaaattacttatattgtgaaatcgaagga

SEQ ID NO: 63712 - DNA, 422 bp, Oryza sativa
tctaatgttagtcaaactctcaatattgacgtggtaactctccctatggcgtaagctgtctggtgtggttctggatagagcagcacaactcgaatgactccaatcttcctggaaacagatgctactgtctagaagcggcatttactacacaaacgaagagtttgatcggagtcctaactgctctgtttaggctgataccatcgtttatgtcttctcattttactttctgttcgacttcatcctgtcctaaaacgtgctcacgagtctactgccactcataagaaaatgagaattgagcctgtgattaatggacgctcctgtttccagatactgtttttcttaaaaaaaaacatatgtttgtcacatgtaaagcgatgtggcgctcataatagatcaaactgaaatccttaccttcaccatat

SEQ ID NO: 63713 - DNA, 451 bp, Oryza sativa
agcttggacgacaaagacgatcgctacatgaagatactgaaggagaagctgcagacgattgacagcgcgggtctcattcaggtctaccgcaaacagctgggcgacaaactgcttgtaagctaaaactgaagcttagcacaggtgacgaaactaatccaccatcttgctatataggctatggctactatctgtctgcatactgcattcagggtacgctcttattatcattgattatatatatgttcatggagttctacgcaagcctggataagttgtattatttcttgattattttttgtgtggttggattttccacatagcaacaaaaactgtgtggcacatttcttgagagcaactctctagttaactagtgatagaatacgaaacggagtgcgatacacgcagtaactatgtgcaatcagatacaacgtcatagaatacgaaacggagt

SEQ ID NO: 63714 - DNA, 432 bp, Oryza sativa
tatattttactaaatatttgttttatccatacataatatttgaaacattcaaattaaatttgaaactctctattaaaaattaaaattcataccctaaatttaaaactttccactcaaaatttgaacttttcaagtcgaatcaaaactttcaaatcgaaatacgaactttcaagtctaaatttgaaaactttcaactcaaaatttaaaaactttcaactcaaatttggaaaactcttaactcaatatttgatactagaacttaacatttcaaactttcaactcgaagtttgaactttcaagtcaaaaattgaaaactttcaactcagatttaaacacttctcagtaaagaattaattcaagttaatatgaagatacaatatatttgcacatactcgatattgctgaaatattttatatcatatatcacatatt

SEQ ID NO: 63715 - DNA, 411 bp, Oryza sativa
gcacgcttctcgcgttgagattcttaagacgtataatggtcttttcagctcctgcatgctctgcggattctaaggtatgtcccacaaaaaatactttaatttctatatataaatgtgtcacattaataccgaatacgtctatatgtataggctggtggaatgattttcatggattttcgacataaattattgaggaattttagaaccccgcatgaaactatttatccagaaaatttcataacaaaatcattttttttctaatttagtcaacgcttattcaaataggggcaaattaaatttcctctttcttgcacggtcgcccgttaagaaattgttctaacgaaactgccaacgaaaataatttgacgatttattcttggtttatgacctttacgaacgtacatacaatta

SEQ ID NO: 63716 - DNA, 258 bp, Oryza sativa
tatcaccacaagacaaggagtccgtaatggtggatgatggaagtaataaagaacattctgtctaagaggaacaatgcgcttctgaatatacagacaatgatgatgatgctgtgtctactgaagtgttcactgatgcacagaaagcagacgatacgcaacgactgctcgagagtgcagagactgccatggaggcatgggctatgcttgccacttcattggggcgtcacagtttataataatagactttgacaagatatg

SEQ ID NO: 63717 - DNA, 445 bp, Oryza sativa
  unsure (1)..(445): unsure at all n locations
agcttgtaccggtggcgtttgtttgaccatggatagagtagatggatgtgcacaggcactagcttgcgcatatatgcacggggaatgatcgatctccgggttattttaagctggcaacaccggcctcctttccttcccgagagatgatactactcctacaaaccagcaggaaagagtcatgcacagccagtctttgtcagaaggcctccacaacaacaagtgaagtgatccctgcctgcctgcgagctgagagcacctgcagtccccagccttcaccatcttttttatactacttgctactangactagctagtgctggagtaatgtttggtatacatgagtgcatcaaggaaatcatcaaaactaaatctcaactcatgtaatacaattctttcatctcatcatttataggaatatgtaatgaaaattaatcttgctactacac

SEQ ID NO: 63718 - DNA, 440 bp, Oryza sativa
  unsure (1)..(440): unsure at all n locations
agcttgatgctgattattcaccatacaatattatgattccatgatacatgcataaaaaaaagtatttttagcgaagaagtcaagcagatgattctccttatgcaatatgtccattctcagttttgtcatagaaatatgatgagcgtggacgacgattttcttccgttatcccacggctcttttcatccaaacaagagaattctaaaatgctgtcgcttttctcgacctcttttttttttaaaaaaaaatatcccattatgatccactagcgattccacaacttatgtagtactgatgagagaaagctaatcaatggtaggagtaacccgagagtcaaattaattcttttcttcttataaaacattgaattctgtagacatgtntatccatcatctggaaactgaattctgcagatgttatctgctagctcacctgtatac

SEQ ID NO: 63719 - DNA, 438 bp, Oryza sativa
  unsure (1)..(438): unsure at all n locations
agcttatcaactcanacccgatgtcgtacacaagtcgtattgtcagaatcggctgtatcacttaacccagtctgactcggacttagccgatcctagttgtagccgatccggactccagccgattcttactctgtttccgcgacaatccttatattcgattccgcttcgatctaatcttcatctccgatgctaatattaccaaatttggtcgttaacaagcgtatgtaatattgttgtgctaatgttgagtctagttgaagagattttatgctccaatatgcatggcttctttgtaggttcatgtgtaggtaagtcttgatgcctcgggagagcgttgtcagtgatggatcgggagtcaacctgggagaagatgatgtccggataattaggatatcatgtgggatggttaagctaaacatcaatgcacgtggttggtat

SEQ ID NO: 63720 - DNA, 386 bp, Oryza sativa
  unsure (1)..(386): unsure at all n locations
tctagaagctcaagtaagagataggagtgtgagttgtccttctactctttgagctgttgccacttcgttntcaggttcagtgatggagtgaagatcatatcataggagactgcatgtcatgagtgtcttcataagcaagcgtgcatgctctgcagaggtttgattcttttgtaattctggatatgttggttttttttttaaaaaaaaactggatatgttggtaaggtatgctttttcaacggaatcatttgggttatatggacaaacaaatcgaagctagtacttccttcgtcccattatatataaccggatattcaaatttattgtattatgagatgtcccatccggtattagattgctatattatgtgacggaatgagtattaa

SEQ ID NO: 63721 - DNA, 399 bp, Oryza sativa
cacctgcagcatgcaagctttctacaagtacgatgagccaacttatctctacggccaggaccggtggatgaactgggtaatgaaaatgcaccattcgatcatcaggctcatctatgactggggaaacacgctttaccaatcccgatgctttcagactaaatatctcgaaaagcacagaactcatgtgtttagaattcttaacactgcacttcaaaaaaaagtcttttaacactagggctgcatttgggagagctccaaactctaacacccaactatgaactgcaacttcatagggagctatcttctatatgagcttacgagggtgtaaaagtgtttgggtagacttagtacttcacaccaccacggtccttgtcatcatttcgtcaacacatggttgga

SEQ ID NO: 63722 - DNA, 415 bp, Oryza sativa
  unsure (1)..(415): unsure at all n locations
agctaatattacttggcactcaattttcttctgntnttgtatttcgggagcagtcaacttacaattctttggagcattattcaaaaccaccttaccaacttcttcaaagatttctgctagcatactcaacatctcaaggaaatttcctttattaagtgacttttcactttcataatggccacgggcagccaaaccttgccttaaaagaaacttcaagcacttcattgaatatgttaaacgagccatatatctagccttgtcttgttcattggtggcagcaaagctctcaacaatatttgttttatgtgcaaggaagtgaatgtatctatcttgtgccacattgtgaaagctagtcataccaccaacatgttttgccatcctttttctcatgtgccaattcctaaatcccctatta

SEQ ID NO: 63723 - DNA, 400 bp, Oryza sativa
  unsure (1)..(400): unsure at all n locations
tcagccccatgactggtgatggctccattagcactgtgatgatttccagagggcttgccatgagaggtaacgcaaccatagcatggtgattgccgatattgacattgagacacatcccttgtggccataagtgtatacatcttgatgtcagtgatggacgttggcgagaagatgtcgactagcacaactgatgctggaattatcttagacatgcctataatggtcggggacatgaccacagctttggtggcatccccatttgtctcgaggccaaatgtcgaacacttggcatgcatatccttganacagccaatggtatcgatgcagagtgcgtgggccttctnctcatgatctcctagctccaggcaacctccagatagggttcttattgagtggatga

SEQ ID NO: 63724 - DNA, 440 bp, Oryza sativa
agcttagcaaagtagatacaactgtccacataaaaaggtcaggaaatcatatagctgctgcagatatccaaaagctaactggtattaatctgaagatttggtggatgcaacaattctagtatctatcatggcaatacaagttcactaaggaacaaagcacacaaagaacagcagcaatttggatgattctggtaaaaccaccagggacccccagaattgtatgccccttcttagtttgattgtacaaccccaaaaatggcaatactcaattactcctaagttatccaattgtgacaggtcataccatggaaagaggaatgcagtgccctctgtctgaaacatgatgactaactcaattatcatagcacctttcgtcacatgccttgcatataaatacacgtttcccattcccttttgtatcagacccacttatctttgat

SEQ ID NO: 63725 - DNA, 361 bp, Oryza sativa
gcagtgtcacagtaagagtactattttgtattgatttatacaaagcaactgttgcaaacattaagatggcactctttgcacattgcatgtactttgcatggaagctgtgtatgcctgtatggtatgcacgataagcaagagaagatcaaggagggaagttaccaaccaggaaaatcaactatgatgagttgggttggtgtctttgttcaaactggagttatataagttaattttcttaccgagtttgtaaatcacacgggctagatgaactaacgctagtcaaatttagctcacgttacaaatcttaagttgtccttgtgtggcctaagactctcgtgtgtgtgcggcttatataaaagca

SEQ ID NO: 63726 - DNA, 440 bp, Oryza sativa
agcttgcccaggctgtaaaatatttctgattagctactaagcaggcaattaatgcggacaatgatgttattatgccagaaagagctgaacttttccaaaagcagttacaaaccacaataaaaaccatattttaatccttcttgttaggatttcataatatctcatgaatcaggaagcttttaaacaaaagtccatgttgtaccatttgtatgtgagttttgcgtctgtggtattccatcacaaatacatggacatagtacatgttttctccctctccctctctttttttgtggtattttcactgtatctttcatcttgtgttgatgcagtacattcttgtttgttgacattaactatttttctgtagttcttgctttagtaatactcctggtagaaaattgtctgagtgaaaatatgtcctaattagcctattttagcat

SEQ ID NO: 63727 - DNA, 373 bp, Oryza sativa
tccatcagcaataggagtctgggactcttcctagccctcagctgtctttatggaaaaatcgtttttccacaaaggcagcttaatcttataacaaaccaagttgaagatgacgaaattctatcatccagccatgaagttgggaaaaccaattctgattacacggcttagttaatacgcattccaaatagcacaaaggaacgataggatcgacttcaagacagggcgatataagaaaagaggatcaacggacaaatattacatatacaaacacttacagaggttgtcggagaatacatctcttgaacccatcttgtcgaaaccttgtagcaccaaaatccccatacctggcgtgccactgtcgacggttgagatc

SEQ ID NO: 63728 - DNA, 435 bp, Oryza sativa
cctgaagtattataaatactagtagacaagatatagatctaatttttaattattagattgtgtttcacgtatatgctttataatccaaaacgaaaagaaaaaagagaacatgttgattatagaaaaattaggaggaacctagaattagagtcttatgggcaaggacactattgctgatttactaacctctataagaaacgcggacatgaataaaaaaggaactgttcgggtagtatctacaaatattaccgaaaacattgttaaaatacttctacgagagggttttattgaaagtgttcggaaacatcaagaaagtaacagatatttcttggtttcaactctgcgacatcaaaagagaaagactataaagggaatatatagaactagaacctctttaaagcgtatcagccgaacttgctacgaattatgccacta

SEQ ID NO: 63729 - DNA, 398 bp, Oryza sativa
  unsure (1)..(398): unsure at all n locations
agcttctggatnttcattgaagcaatctgtttaatataaaccagtcatgcactaccctgttatcacaacgaaagtgaagacatccaccgttagcctgctaaggaaaatgatagtacagatgcacaattaaattattaattaaaatagtctctattatgaatcttacctgcaacggcgcataaaaaatgcttgttactattacttaacgacgatactataaatataaataccagcaatggcgcagagacactcctggtatattatggatacaaatgtcatccgcaagcgcacggatatactattgtgggattttacccgacagttttctagggtatccgaacactttatgccgtgggaagatcatgacagagatcttgacttaaatgttatatattcct

SEQ ID NO: 63730 - DNA, 116 bp, Oryza sativa
ttgccagtcattcacatgggttgggtttggataccccaccgttggaagaagaaggaaatccaccataggactgctccaaagaacgaactatacttgcctagactactcggtctatc

SEQ ID NO: 63731 - DNA, 443 bp, Oryza sativa
agcttccttctgattgctggttgaagcggatgacggtcttctgcttggtatcgccctccggagggtgattgcccttggctcggcctggagtaggtcggggagagacacaacttcttccatctacgacaattctttgctgaggctgtcgatgcagagagtggttggtgctaaaggtattattgccatgatttattgccgagttaggtggagcaagaggagcattggtgctgtggatgatatcgtcgatgtttgtcacaccctgaaaattcaaaatatataaattgttggttaaatggaatttctagaacttattttaaaagtcttgaaaagaaaatctaattctaattaataaattccaatataaaattgggccagataaaatttcattaaatactttgcttaattctataattcctagatttttctggggattatttgagcta

SEQ ID NO: 63732 - DNA, 257 bp, Oryza sativa
gaatgctgcacctaatgcactttctatgaaatatcctgaagagatacctgtacctcatgtggtttcccgttgcaatccttgtatggttcaagaagtttctgatggtcatctctcagatgtcttttctgctcaacttttgactgacttgactcttaatgctgagtctccgcccaatttctctctgtgaatggagtacctcgctttaaaggcaaagtctggatagattactattcatctgcgcacgataagaatatctc

SEQ ID NO: 63733 - DNA, 445 bp, Oryza sativa
  unsure (1)..(445): unsure at all n locations
agctttactgtttgacaccttttaagatgcattgttccaactcctaaaaagatgagtaactgcggtataaaaggattttaaggtattgggcactagatcacgcgcactttggcctaagcaaaaagtgcctaagtccctaaaagaatgtgacaggccacacctgaaaatatgggctgcagacatattatgcctaggccaaaaaatatgccttcgacaccctttaaaggatgatgcatgtaacatgctcccgagtaataaatcttctaggtaatgtagaccaagtgtagctcatatgaatagcttctgatttgagagattatcccttatgggatacttcaaaatagatataataattaaatcccgactggcgcaagtattcagttgatagtccttacggagaataataattggtccagtctttgagcatagaanataaactcatgac

SEQ ID NO: 63734 - DNA, 444 bp, Oryza sativa
  unsure (1)..(444): unsure at all n locations
cctgctgcatgaagcttgactttctaggtttattgtacattgggatntacatggttgcccttatgaaagggacatttacatgggtatgcagtgtcatttgcacatataggcctttaatgggctgataggctgggcctggtctatggcaaacgggcttaaaaggccaggggcggcctgttgggcctccttgatgccgaactcgtcatggcgaagtctttgtagttcgccgaagatgccttcacccgagatgcctttactttcagaataccgacgcggctttccagccttcgccatcttcgcttatggctgtcgccataaggcttcgcctgaatggccttgacatctttggcttgaatccttgctggtactatagttcccgcacggccggtcgaagggcttcatggcatgcctccaacactaaacaacctagaatacaattaattg

SEQ ID NO: 63735 - DNA, 447 bp, Oryza sativa
agcttttctggggtgatcctgcgaatatcatgtgaagcttgtgttcagtccaagctgggctttattttgccttttatctgctggtgcaacgggcactccatgaactgcgtgctgccgtatcgttcgtatagcttttgaggctgctatgagcaaagcgtacagcacgtaagtatatacacttatagagtttcaagcaacaacaggtagcaaaaggccaaacaaataacaggcagcaaagttgaaacgagcaaaagaaagaatggggttcttttttccaagacaacaggtgccagcttgaaccgctataacatgagaagcaatatggtcagtagagaatcacagatttctaagcgcattgacaggataatagactgacaaaagatccaatattgcatatgtaaaaacaaacggcgggttacacgtcaaacgaaacacaatgtatataga

SEQ ID NO: 63736 - DNA, 384 bp, Oryza sativa
ttagccgaatattgcgctaccttcatgcagctgcatcatattattcttagcagtacgtgttaagtaattatgacccacagaacatacaaagtacttatcccatatacttatacaatttatccccacaaactttaattctctactctcacaacgtgccacatcaccttaaattaattcggccattagatctacaatcgacgtctgatatatcaatggaaaactattgtgaaccctctatgtatatcatttgatgcagattatgtcttattcgcttaggtcgctcttcaagaacgacaacaagctgatacatgaagacattaattggaaaaagagaaccatgtcattattgctgatatgtacctgcctgtagtggcatatgaatac

SEQ ID NO: 63737 - DNA, 427 bp, Oryza sativa
agctttctcatactctctcaagtttagtttattagcatctagctggcggaataagaatatagtagaaatcaggagtccggaagtcttcggaagagatcgggtatggctctagtagctttcctttcctcttttgtaagctttgtacttttattagaatactcttctatatacatttatggtattgaaatatttttcgagtatacgaatgcctactttacattatgttcatgttatactgaatatgctgctagcttatctgggagatgctttggtgcgggtataatgttcgcatatgcaattactctatgtcatgacgatgatattagagtagtatctggtagtttagacagggtgtctagaatacgggatatcattatttgcggttatatgctgcggatgatatgtgggccgctgatggtgacagctc

SEQ ID NO: 63738 - DNA, 437 bp, Oryza sativa
agcttgtattgcatgcaagcgtatacattaagcggtatatatactccacacatatatatatatacatgtgtccttctactgatccgataattatattattacatactccctccatttcaaattgatctacatataattttttttcctaaatgatctacatatttgtgtccattcattaagtctattcgttatttgtgcattggagtaaatgagcattgatgcatgcatgcactcaagtatttataatccacatgcagtatcttgatttgctattggctagaaaataatcgggatggtacatgcactgagtttcgtgctatagtaaatatagtatgagagagttattagcttctctttgtcttagtgtatctatgaaatatgtaaatcaatttggaatggatggagttattaacacgattaacacgaagcttaccaat

SEQ ID NO: 63739 - DNA, 435 bp, Oryza sativa
  unsure (1)..(435): unsure at all n locations
agcttcaagcagggccattccaaaactgctcttttgagccttgcgtgtatgattcaaatatgccaatgaaatgccatgtagatcaatgaattcctgaagtaacatcaaatatgtcatcgatggtgtcacctccttacatcaatgggcttattttatcgctaacacaagcagattggaactttggaagagtttatggaaatgttagatatcttggaacaaattctaagagtttttctgattgcagctgtgaaagatctctcacatatctgctgcaattttcataatttacaaaagatgatagtgcagaatttttcaatccaggttaattaagtggaaggactagtaacttcaagtaatgtacagttattccgttcatacctgcctggtaaacatagaccttctttgcgcantttatttactcatttccatgcgaaa

SEQ ID NO: 63740 - DNA, 392 bp, Oryza sativa
ggtcaatctaaatcctcaccatgacaggttccacactatgctattttacatatatgctccagaaagaatgtggcaacatgtaaaggacctaacgggctccatgaaacaatggcatgtcccaaaaattcctggctctagtgtgggtgaatcatcactacctttgtgagaatatatcatatgatggcacttgaaatcagaatacaccgcttaaagtggtttgactcaagtttcataaggtactgaaccgatccttaatttcttatcagcagaactagtgttctagctatcttatgagttgctttggtagcttgtcattcaaataatctttcttctgtctattttttcacatgtttttacaaaatgtatatttttcacataagctaaagtttttg

SEQ ID NO: 63741 - DNA, 432 bp, Oryza sativa
agcttgtcaccttgccattgaatcaagcattgatgcatggttgaaggaatacaacaattggcgtgaatccaatcccttccaagcaacaagctgtaggaacccttcccatcgatgacaaaaaatgttgtagggatggttttgctgccgactgtcagctccacattcaaaactccttttgtttccgatggattgccaccaaagtccttgagaaccatgttcgtcttgatgagatcttcagcatttctgcccagcttcctaaatttagcatatggaatcaaattcacagcagccccaccatcaaccatcatcttggacatcggcttcccattgacatagccgttaatgtataatgccttaagatgccgattctctgtcccttccggcttctcaaaatctgcttgctctggtgacaaaaccaacctagccgaagct

SEQ ID NO: 63742 - DNA, 439 bp, Oryza sativa
  unsure (1)..(439): unsure at all n locations
tgcatacttctctctcccttatgtgtatataattntgggtaagacttgcgagtacaatcttgtatttaacccggtgtctgcaatttcaggagaggattccggctatgagttatgcttcttgtgtggtcattgctctgccgagggccgcgaaggcaatgagtgatctcttgcagcttggctcttgcccgcgtggtttgccctaatggggttgtggcaccaccggttttatcttttacttatgaactctatttgagacttccgctgctatatttatgtgttgtatgttgggacctcggaccctattatgtgtcatgtacctcgctgcactttaaccctaatatgggacttgctatgtttattaatggcttgcgatgaaagtgtgaggctagtctcatttcttgggactatgctagcatgagtaaccgtgtttgatcgcttg

SEQ ID NO: 63743 - DNA, 438 bp, Oryza sativa
  unsure (1)..(438): unsure at all n locations
agcttcagttaacttgatatccagttctgttctatgttaaaaataaaacacgcttaattgcagaacatgttgaaaggcttgaagctcatgtggctcaccgtgcattgtccttcgttntcgtccttttaagagcaatcgatggatggagaaaacgtacaaatccacgtgttacatggtgaataccggatagggatcgctcctattcagctagtactatattattggagagtttactataagcagctgaccgagggaaccttgacagcaaagctcccatttgtctgtagtgtgattcccgtggtaatttatcttgcaacctgaacctaaaatagaaaagtatcatgtgtaaaagatgctaattgagatgcccttggacttagagactcatcacatcctgattctattgtacagcctgccagtagaccacaataccacatg

SEQ ID NO: 63744 - DNA, 435 bp, Oryza sativa
  unsure (1)..(435): unsure at all n locations
gttgcctctccgtacatgggcagccatgagaccgngaaatatgtgatcgtctccaacgtcgncagaaacgcgaggagaatcctgaacagcacaagcaattgttcagattcttcagaattcatgcaggatgcagcatgattttgcaggtttgtttgtgtagggtaatgcttcatcaccagtactgacaccagaaacgcaactgatcgatctgcggtttgttcagttccagcgtcttgtagcagtcatacgccgggtaggcgtatcctaaaaccagcctgcgttgcagaaagatgcaaagaggacatgaattgggcttttctgatctcttccacgaactgttcaaacggactgaatattttttcgagaatactcacgtcagaagtctagtgataagtaacacccgcatcttcagtcgtcagaacaaaagaagaacac

SEQ ID NO: 63745 - DNA, 441 bp, Oryza sativa
  unsure (1)..(441): unsure at all n locations
agctttcaactgccaagctgcattntagaatgcattattatggaatgccttttctaagttttatgtcatctagaatacattacaattcttatattttataatcgtctctcataagctgggttattggtatggaggaattttttttccatggcatcgtgattatcctccctctggatggtaagatgatcttaagggggctactaaagtggcaagatgtgcagaggtgttgtcgctctgccttgcctcgcaggagaaagaaagggtgaaatggtaagatgttcaacgacagttgagtgttgatagttcaagtccatctcttccttgcttcctccagcttagtgtcgcagaacttgcaccagtgccatcagactatctctagatcgctgtcactgtatcatttcttgcagtggcagtggtggacagctagacaagcggatgcat

SEQ ID NO: 63746 - DNA, 447 bp, Oryza sativa
  unsure (1)..(447): unsure at all n locations
agctngcagatgctctgatgcagatatgaattgcatgctacagagggttgtgtgccactgcgttcaaagatcccattgactataaagataagcgtcattttcccaccttcttcttactaccttttcctatacttgaacacaaacatttgctacctcaaaatgatttcttattcatgtgatccctaagaatattggcatgcaggctgcatacattaaatgcttacaccaatactttaattagtagttattaagaaccggctgttaaaaaattacattcatgtgagtgatgactgatgaatgagagtgagtgcatcatgcactgtgcatgtttatgctcaatttctatgccaagagatcaacttgcatcttgcaatcaaactagatatctattccattatctaaacatcttgccatgagctaatctgctaaaacagagaagaaatctgc

SEQ ID NO: 63747 - DNA, 305 bp, Oryza sativa
gaccatagaaactaagcttgctctctcagaatcttacgcccatagctgaattttgctgtagaaaacctacacacgcgactacagaaccctgtggtctctggttgaagtaaatcttaacacggctgaagatcacactgaagaaggaagatggacacgaatgacgaagagacggtcactaatgactcggaccctcttctcaagaaggaaaacgaggacgcatagtcatcgtcgcacctgacaccgactaagccagcaaccttgagcgcgctggagatcgaggatgacgagaccgacggttcttctgc

SEQ ID NO: 63748 - DNA, 448 bp, Oryza sativa
  unsure (1)..(448): unsure at all n locations
agctnggacaagggtttacatcggccgatccattagaagaagtagatataggtgatggaactaaaccaaggccgacttttgtaaacaaaaacatgaaagccgattataaggttaaggtaatcgagctacttaaagagtatgttgattgctttgcgtgggagtaccatgagatgccgggtcttagccgtgagcttgttgagcatcggcttccaattaaaccgggttttaggccttataaacaaccacctcgtcattttaaccctttactatatgaccgagtcaaagaggaaattgatcggttgttgaaagcggggtttattaagccatgtcgttatgctgagtgggtttctagcataatcccggtggagaagaacgggagtggtaagattagaagttgcatagattctagagatttaaataaagccactcctaaagatgagtatcctat

SEQ ID NO: 63749 - DNA, 287 bp, Oryza sativa
tggcttacctgtcgcatccgatccttttcatcctccaccggatgtggtgatggcggaagccttctccgtgatcaagagcaagttgagtctctttcgccgtgataccaagagagagatggagaatgtcggtggtgcggatggaaccgtcatttgtcgccttgtcgtggcgcttgatgccgccttgctcgatgccggctttctctatgcaaacccggtggggtcttgccttcagctgccacagaattgggcgtcatgttcttttgtccccgtatcgatgaagtacaccc

SEQ ID NO: 63750 - DNA, 442 bp, Oryza sativa
agcttgccccccgctctatcatgtgagtatttttaggatatcctaaggatcacaaagggtacaggagttttggtccttcctccaataggatctacatttcgtgtcatgtggggtttgatgagcactcgtttccatatgctgagatagttaataatgcagatgctactaaccttgattttctcgaggatttttctgcaacaataccaggtccgatcgggcgtcgccgcataactgcacaaccagggtcagcctcccacgatggctcacagcatgggccggccacctcccgtgggccattgactccacgacctcacgggccaccttcgccaccacctgtgctgtcagcatcttctagctcgtgggcggtgtcacatgggccgcctgcatgcctctggccacctgcctcccctgagacatggtccctttggctcgtgccttctgc

SEQ ID NO: 63751 - DNA, 303 bp, Oryza sativa
ctaagccatgaatcccttctatgcatatctggatctggttcctgctgaacacacatctatgatgagtagcatctgacttaaatataatactccgaaaaaaatctgcatttaaaatatttatgaatatgtatttctcctctcgacaattttgatttcctcgagcagatgactctgtacgtttaaacactcttgccgacttgtattgccaccatacactggggagtgggctaagcacttcccacacatgcatatgatggacatgagttcggtctttatggaacacaagttcacggatcggagtta

SEQ ID NO: 63752 - DNA, 200 bp, Oryza sativa
  unsure (1)..(200): unsure at all n locations
agcttgctttatctcctagctcctcatctagctttcgntgagttgacttattattagtcattccaatttccatccatccattcatcccctcttcttcttcttatgatctcttcttgttctaattgcgaccgcaattatcaacaactagttagttacatacgtagcatgattccaggcggtggcggcggcggctnttttat

SEQ ID NO: 63753 - DNA, 422 bp, Oryza sativa
  unsure (1)..(422): unsure at all n locations
tagctggggccgaatgaattgtctgcatatatactatataatgatgcattccggattgctttaatctgatgttctgaataagtttcagaaagaaacatacattctagttctactcctatgtaagaaaggaggatttgataggcagccggcccaacagcaacaataatgcagctagttatgtacgtccccacatcactcacatctaagcataagtncanccagaccctccatcttcctccaaaagattagattaaaataacagccacattatcaaacaagccaggccagaacaggccagcaagtgtaatcgatcactttgttaacttcttcttcttcttcttgtatggacaatgatgcgcaagcaaagcaagccaaccataaagacaaacatggatggatattcttcttatttctaacgcgca

SEQ ID NO: 63754 - DNA, 439 bp, Oryza sativa
  unsure (1)..(439): unsure at all n locations
agctttacagatngaattgtactattgccctggttattttagctaataattattacgagcacgttttacaagccgttaattagtgcgaattttatattaaaaaactattgaacacttttttgggctattttttcaaatttttaatatttatttcgattgtttatggccttaagtaattgtcatgaaattagaatacgtatgtcaaacggcgtaggggaaaaaaaggaatatatgcaggtttcactttttttggtgaaagtagccggtcaaaaacgtactctctctctctctntgtttgacaaaatgttaatgcaccatgttatgtatggcattacaatgtcaattctacgacggtgcaaggatttgaccgtgcaatgcttgttccaatggtcctctagcttccttgatgaatactagctgttttgctaggcttttctac

SEQ ID NO: 63755 - DNA, 286 bp, Oryza sativa
tcgtgtggagattcagaatcatcaggtgtggtttggtcactagatgccacaaccttggatgaatcaatgacacggttcacattttgcacagatggctcctcaattttcttctcattggtagcatcaaatggattgtaaccagatgatgagaacccaagtggttcctcaccaaccaaacccatcccttggaatgctttatcaaactccatgtcaaccagggaaagggttttccctttgtcaaaggatggaatccagtgaaggtcatccttcagtttatgctcacagg

SEQ ID NO: 63756 - DNA, 444 bp, Oryza sativa
  unsure (1)..(444): unsure at all n locations
agctngaaggaagcagctcgctcgctgttctctggagattggtcgccgggctgtgcgagagagcgctacaagtacatttgactggctatctcccgctggctctagcgctctgggctctggctcagctgtgttggttggtgctcgtgtttctctttggccttttggtctccttccagagaggtgagcactgagcacagagaaagagagagagtgtgtgtgtgtgatcaggttcaggtcaggtcgcagtggtgtgtgtagtgtagtggtgttggtgaattgggttgccctggagggtgtggcctcctctgcctatatatatatatacacgcgcgcgcgcgcacnagtgggtgcgtgggggagggagacgagagcgtgtctgccggggggtggaacggaatatatctcgcccgatcgatcgatcgatcgcctctcgccagcccaagc

SEQ ID NO: 63757 - DNA, 451 bp, Oryza sativa
gaccttaaaactcagctcgcatacaattgatgttcctgcaactttcccaacaccttactgttatgctgctgatggtcttcctctgattgtgagaacaccacaatgtctgtaatgaataccacatcaaacttatccaaatattccatgaacactttgttcattaagttcatgaagaaggcatgagcattggtttgaccgaacgacatcaccgtgagtcatacagcccgtatcgcgaggtgaatgacgtcttcgggatatcttcttcacgaatacgcaattggtgatatccggagcgaagatcgattttctgaaaaacagtggcacctttaatctgatcgaacagatcatcgattcgtggaagaaggaacttgctattgatagcaacttcatagagagctctgtaatcaacacacatcctctttgtttgtctgtctttcacaaaatcaccgga

SEQ ID NO: 63758 - DNA, 431 bp, Oryza sativa
agcttgaataaccacttgccaggcaaacatttattctggatatccagatttaggattccaagaccctttttttttgtctacatagagtattccattcagtaagtcactttgccagaaaaatcaatatcaggaataatccagcttctccaggattctccttgggacatcaaagaaagacaacataatcatagccaaactatttagtgggacgactcaagtttcccccaccatcatagacaaacactttctctttgtgacaagggaacatggttcctacaaccaatggcgcagaccggttggatgccccgttacctcacccctaagccattgaacaagacatagaccaatctcaggtcaacacgtggctctccaataggatggcaagcgaagccccacggagctaaggaggagccccgagccttgggcacagc

SEQ ID NO: 63759 - DNA, 446 bp, Oryza sativa
  unsure (1)..(446): unsure at all n locations
ntgcgcgaagagcggcggtgacagagagagtaagcacctattaattttatccgagcaccgaactaacctaaacctatccttttgctcttggaattgacaccggaaactactgactgaaagtactatctttcccctgtagaaaaaatagcataagcaactagtagtatctaaaggaagaagagtataaataagcattttacttcttataggcaagctaagcatggagaagttttcctttaaaactataatttctagcggttaggtcagttctaagcttcacaaacagtggagttgaagtgggcattaagaagttatgtgctgtatcataccctttgtccaatgagtgatacacttattcacgggagaagctcagctcaatttcgttttgttgaaatccaaacctatcaattagtattacttgtaattccgtgcttaatagttaaccc

SEQ ID NO: 63760 - DNA, 422 bp, Oryza sativa
agcttgaataaccacttgccaggcaaacttttattctggatatccagatttaggattccaagaccctttttttttgtctacatagagtattccattcagtaagtcactttgccagaaaaatcaatatcaggaataatccagcttctccaggattctccttgggacatcaaagaaagacaacataatcatagccaaactatttagtgggacgactcaagtttcccccaccatcatagacaaacactttctctttgtgacaagggaacatggttcctacaaccaatggcgcagaccggttggatgccccgttacctcacccctaagccattgaacaagacatagaccaatctcaggtcaacacgtggctctccaatatgatggcaagcgaagccccacggagctaaggaagagccccgagcctt

SEQ ID NO: 63761 - DNA, 262 bp, Oryza sativa
  unsure (1)..(262): unsure at all n locations
gcccctacacttgacatcattcgccaggggagaagcaccctaatcactacccttcaaatgttcaagaatcttgggctcaactgccttgccactgcataccttctgagtgtcatgtacttggatggggtcaaactgggtgatgttcaagctactatcaaccgggtcttcactgcagctttcttcctcttcatttnccatgcctcgtcccttcaaacactgtctgcagagcggcctcatccaaacatattctgtgcatacgtct

SEQ ID NO: 63762 - DNA, 414 bp, Oryza sativa
agcttctaaggttcttggtctctgcccgatgcattgaggccaaccctgagaagatacgggctatagagcggatgcgccccccagcaaacttagggatgtgcaatgcgtcaccggttgcatggccgccctaagtcggttcatatcgaggctgggagagaaggcgttacccttatttaagcttctcaaacgctccggaccgtttacctggacggaggaagccgaaaatgccctcacccagttgaaggcgtatctaagctctcccccagttctggtcgccccggagccagacgagcccttgttactctacttagcggcgaccccgcaagtagttagtgcggcattggttgtggagcgcgatgagaacaattctcatttcacgcttccccaccctgtgccgacttggcccgggagaga

SEQ ID NO: 63763 - DNA, 450 bp, Oryza sativa
tttaatatttaatactcgagtaatcttgtgcttatgacttgtgacatttcgtgtgcgctgcatacgctgagtcaatgagctataacgaaccgaagctaagtatgagaaaaaagatattggtgtggtgtcaatgaatatatttgatcttcaattatcttataatatatgaattgagtaaacacataatacatataaaaatatttctgataaatttataacatcatttttccatatcagtattttttacaagagagagtgagtaatttttgaatttctacacacacttgaagttgtttttattttggaaaatgtaagtctcatttaactatcacataatctatactttcaatttatttatattctttaatggggggttcgaagacatgcgccctaatttgatacaacctcgaatagcatatattttacaactcaaagcatagttgatttaat

SEQ ID NO: 63764 - DNA, 457 bp, Oryza sativa
agcttgctgctatcgccatagccgatattaatcagcagattgctcttcagcgtgctgcccgtaaaaaaggcgtcgtccacgtgttgacggtcaaagcccgacatcgggccggtatccagtcccagcgcccggcaggcgacgatcagataggccgcctgcatggaactgttgcgaaacgctgtttcttcggcaagttgtgggctggaggtaaaccaactgcgggcatcaccgtggggaaacagtagtggtaaccgttcataaaattcactgtcccaggcgacgatagcggtgacgggcgcggtcagggttttttgcagattgccgctggaaagtgccgggcgcagacgttctttttcttctgccgtgcgggtaaacacgatccgtgccggagaacagttagctgatgtcggcccccatttcatcagggcataaatctcccgtaacgtctcatcgctgg

SEQ ID NO: 63765 - DNA, 455 bp, Oryza sativa
agcttgagtgtgtgtgatatttcagctgtcactacctattagttgataggagcgtgcatattcttgtgtatgtttcttatttgctactaaccatggcaggattgtgcaaggggaaacgagatggtcatgctcaacatcaacatcttcaccatcaacaagatatagcgacttcttcacgcatcacatatgaggtatatgataatgatcttgcaagggtagaatctaaattgccagtgtttgatggtaagtatgattccgccgcttatgttaattgggagctagcattagacaaacaatttgatgagtatgatttctctaatgctcaaatgattaaggctgctactaataaatgtaccggttctgcatctttttggtggtacactgttggcaataagcttgaaacttgggatgaatgcacaacaatgatgagggaaaattttgtgttttcatattat

SEQ ID NO: 63766 - DNA, 462 bp, Oryza sativa
aaaactaagcttctcacgtgcttacatcgtcagcagttaaacgcattatgatgtatctgcaacatactctagaatgggaaaattggtattctacatcatattctatatgctagaggggttattcggatgcggattttggtgggtgttgaattgatatgtaaagtacaagtggaacatgtcattttctttggacttctttgattgcctggtcttttaagaaacagtctaatgttgctcaatcaaatgctgagtctgaaatatgtgctgctgcttaatggtgttctcagatactttggctttgttcaacattgagagaatattgtcttacttttgaaaagttcctcttctttgtgataacactagtgctattaatattgttaagaatttgtacaacactcacgcccgaacacattgatatatgctatcactttttaaaggatcatattgagaacggagatgttg

SEQ ID NO: 63767 - DNA, 395 bp, Oryza sativa
  unsure (1)..(395): unsure at all n locations
agctnttctccagggtttctatcggcctacttctctcaaagatgcggtcgacctggtccggcgatgtagagcgtgttaatatcactccaagctaattcatcactcggcccagaccctgcataccataccactttcgtggccatttgctgtctggggactcgatattctgggaccgtttacgcggaccccgggcgggtttgagtatctgtatgtcgcgatcgacaagttcactaagtgggccgaggcttattcggtcgtcaagatcgataagcactccgcacttaaattcattaaaggcatcacgggccggtttggagcgcctacgccgattactacggataatggcaccccaatcactantgaactcttcggcgactactgcgaagaatgggcat

SEQ ID NO: 63768 - DNA, 451 bp, Oryza sativa
agcttcttctggcgtacgtaatgtgaggtctttccttctctccgctactagttctcctgggccaagattgatttggggcatcatgttcaattgtgagttggacagttcgttccggatctgcatagtcagaaaatctcgttccaaccggtcatgaaagatagtggaagtgtatgactgctttctttgttaggtgattgatagagtttcgttttccataactctcgagctcattcatcgtagaaagcgtgcattgtgctctttctatcgtcgtataaagaaaggtgtctgttttttcagaaagagagcaaagctgccagaaaagtataatgccgtgaacaagggtggtgtaaaatcgtgcgtgaaccccaattttcactcaatgcgataaaagcggaggcctctctcttcgggctagaaacaaaaacgaaagtgcttgcattccattatctag

SEQ ID NO: 63769 - DNA, 448 bp, Oryza sativa
  unsure (1)..(448): unsure at all n locations
agcttacccgcaggcacgccgaacacgcacttgtcggggttcagctttatgcgggcggtgcggagactttcgaaagttttcgctagatccgagagtaaggtctcttggttgcgtgtcttcacaaccaagtcatcaacataggcctcaacattacgtcctatttggctacccaaagaaattcgagtagtacgttgaaaagtaggacctgcattctttaacccgaaaggcattgtcgtataacaataagttcctatgggggtaatgaatgcagttttttcctcatcctccctagccatgcgaatctgatgataaccagagtatgcatctaanaaacacaaaaggtcgcaccccgcggtggagtcgacaatctgatctatgcgtggtagggggtaagggtccttangacatgccttgttaaggtcggtgtagtcgatgcacatccgaagct

SEQ ID NO: 63770 - DNA, 449 bp, Oryza sativa
  unsure (1)..(449): unsure at all n locations
agcttcctagctagctctgtcctatcagctacaagtggtgctatacagaaagaaggcgactgaaacgttagctgcagagtcgacgacttaatttaattaatttctttgtttttatcataccaagttagctactagtactcctgtttccactagattaattacgaaaattaatggtggcaataaaatggaaatcagctcgcatttaaaacccgaaatattcaacagtggagaatacggccactgcattcgcgtcaagttgttgcctaatacttaatcatcaagtagcactaggtagatctccaaatgggaaaaggataaccgggtgaagtaaataattaatcaattgcaagctaatctaatcattgaggagattagtatatctgttgattacccgacgcgtncatttnttagcacgcaaagaccaaatctagaggaaaatgtcatccacg

SEQ ID NO: 63771 - DNA, 190 bp, Oryza sativa
gcttgcaaatagcaaaactagagtacttactctagtagtttatgcagttgaattcaatagcaaaagctaagtaaaatgtgttattatagtacggatcaagatcctcaaccttcgaagttaactgattccatcactaatatgtaagcccgatgaaccctagacccacacatgttgggctggtttggttata

SEQ ID NO: 63772 - DNA, 426 bp, Oryza sativa
  unsure (1)..(426): unsure at all n locations
agctntgctggaagaactaatgacgtgtcttaattacttaccgtttagaccaatgcaaaggatacgaaaagcttcatcaaaatggtttccttgtacggaggtattgtttggcaactttgctgacatggattgataaatgagagcgaaatgagtgtgtcactgtcaaatcggattacatgagtagttcagctgcaaaggctaaaagcaagaggataaatacgatttcagaattcagatagcaccaaaaagagtaaccaaagtttgagtgttaatagatcatctgtgcacaaaacttgacgtctcttgcaggtctgcttgtgcttatcccttttcactctgtttaaagcttcttttcttnttgtgaattcttgaatgttgatgaatgaaaggtcgagcatacacttattcttattcgtcactaaatgc

SEQ ID NO: 63773 - DNA, 432 bp, Oryza sativa
  unsure (1)..(432): unsure at all n locations
agcttccctattggattccatgcgatttcattgatgcaaattactcctattttgcttttgccgaaataggagtaatttgcatcaatgtttgtcatgtttgtcctgttcaccttcctggagcctgaggcggtactgcaacggttgtgtacacaaattcgaaactattacttccatgtcatcctgcaacagttgtacacaaattcgcaactatgatcagggcgactgcacctgtacaataatttagaaagtntatttagtcgctgataagtatcaaaggtgagtggagtttgttttcgttgtaatggaattattatatgcctttaagataacctcgaatcattttcttttgcaaaacagtttttcctctccaatcctatatttctcgacattgccgtcgtggcagctccgtgctatgaccgtgagcccagaaaa

SEQ ID NO: 63774 - DNA, 437 bp, Oryza sativa
agcttagagtaagtttaatagtatatccttctagttaatacaaatcacctatagccaatgtaatagataatttatacaatagttgcttactatataattagtacatggtcccacctgtcatacacacattacgtcttgaaatccgcgctgcagctggctacagatttgtagcccgctactattctctctcattttttatctaattaaaatatgtttacagctggttaatagcctgctattatacacgctcttagaagccttttcttttttttttcctccccttgcttttgcaatgcttttcctagccttcttgtccctagctacgctacccgggccactttgccggcgtctcgcgtgttgacgactacactgacgaagtgacgatccgtgcagtgcagcaacatggtgtacatgtatacgtacgtagtggccacttc

SEQ ID NO: 63775 - DNA, 439 bp, Oryza sativa
agctttaacaaaataatttctctcttggatttctgacactgatgcaaatactcaaaagaccaagcaaggcaatcttggataatcctagctttgatgaaaccatattgattttggtgaattatactaataataactgattgcaacctgtctgctagaaccttttttattagcttgagagctatactttgcaaagcaatgggtctgtaatcattaaccttctcagggtttggctttttatgggcaagagttatgaaactcctattcaaactttccaagcagagagtaccttcacaaaactgagcacacaacatatagaaatcttgcttgatcaaagggcaacatttttttcattaagaggccattataaccatcatgtccagaggccctatctataggcattttattaacaactccatctatttcagagatagaaatatta

SEQ ID NO: 63776 - DNA, 416 bp, Oryza sativa
tcgaagataggtacaagtccgttgtaatatactgacatattgccaggaaaatgataagattatatagatgggtaccgtctaaatcactatgcatgctcttacagtgaacttaaattctttaaatacttcaagggccacttatgcttatacttataaagctaaaatttaaattttagaatttaattttaaatttatttttcatcatagtttattttacattatttacactcacaaatgatttactatttaccaatataagtgatacggataagcacgtgagtaacgctgcaaatgggccgaaacgattcgagcacgacaatgccaggagcccacgaacgttagatgtggatcctacggtcatacgccctcggaagcacaccctcactataatccttcactggcgagccagtcgcgcc

SEQ ID NO: 63777 - DNA, 433 bp, Oryza sativa
  unsure (1)..(433): unsure at all n locations
agctntccatcaagtccatgaccactcaaatcagagttggcatgaatgcactatgtccgtttgaagtcactgctgtcttcggaggtgaacttgattccaaaactcattggactttaatatcctgtagatcatccattcatccgatgtattctttagcgatgttttatatttatcatgcttgattgtatgcatatacttgatggtcacatcagtttgtgttcccatctcctctcattcgttttccgcgtgtacgcttttgaaactactaaatgatgtattttgtaaaaaaaaaatctatagaaatgttgttttaaaaaatatattaatctatttttcaagttattttaattaatatttaattaattatatgttaatgagctgctctgtttttcatgttggaggggaagggtgtcaaccaacactaacgaaccca

SEQ ID NO: 63778 - DNA, 289 bp, Oryza sativa
tgctgaggagaccgagtctctcgttacactcgcaacatttatctatgaacgatgtgtatatatgaggcctcctgtccagcagattactcttcaccattccactattttcctttgacttttgctgatgcttcagggtcaagacgagagatattaaccataatgcacgtggcgcacagcaattttgaattccaatctgttagcggcaacagcagcggcactgggtctactgtacttgcataaggtgggttgccctggcatctttggcatgatgttcctcccatgtgtaact

SEQ ID NO: 63779 - DNA, 454 bp, Oryza sativa
  unsure (1)..(454): unsure at all n locations
agctntgttgaacaaccctgacaacgtccttttccgtgagatntacacacggccgaccaagacacacgtacggcatatagctgcaggacgaatttgtaacggntaaatatccttaataatccatacccgcattagctacgatatatccatcgaatctaatgatcgatctcctcctcctcgtgaagaaagaaaaagaagaagaaaaagaaaaaaaaacaaactactctctccatcctaaaatataaaaacctaggactggatggaacattttctagtacagtgaatttgaatgggtaggaaatatctcatccagtgttaggttcttacattttaggactgatgaaacacctcttaataattgataaaaacggtttatatctcctgtctttattactgacacagccaaataaagcaacctggctaatgtgatcatcgctagtacaatagcactccc

SEQ ID NO: 63780 - DNA, 346 bp, Oryza sativa
tggaagagaggcaaggttgcatagcaatcttcatctgaaatccatttctttaccactaagagaggtatttctttttcgggttgggtcgcaaagagactttcgtctcgattcaaccttgagagatgtttttcaacacctcaagtgttatgaccgacctcccgggatagatcattacttctcggcttccagagcccttttacttgattaagcgtggttcacagccctatttctatttctctgacttccagagttcagtttgcccagcagcacaacatttcgcttccgctctgggtgcctagtctatggtgcccgagacattccgaatccacttgattgtttttgacca

SEQ ID NO: 63781 - DNA, 454 bp, Oryza sativa
  unsure (1)..(454): unsure at all n locations
agcttatctnttccataaccctaattgatctggcttgttttctatggatcagatttaattttctagatcaaatatatacaaaaacatgattaactatattattcttaggtgctgtgtgtcaaatgagctaaccatggatgcatgcaccggtcaatgataatgcaggtttagccgatgacggtcctgggtacgagtattgcttcctaaagtgcatcgacgaatgcaaccaaacctgtaagtcgagtggttacacccatggaggcgactgcaacactggaccctgttgctgcctttggtagtagtgtagtagtgctcatgaaaaatcaatggattaatggaatatgtttcattacttccattcatgtaaacatgattactgcttgatgtgatggctattggtgaactgaaatataatgcgaatgtgtttagttgatgcatatgatgtgagctactg

SEQ ID NO: 63782 - DNA, 445 bp, Oryza sativa
tgccacctccttctccaagccaggaacggctgccacgttgcatactctcgctagcaccccagtgcgccaccttgccggccaccgcaatcccgatctcctctataaatagcgttgctttgcccaccgacgaagcctttcatcctcgccgcgttcctcccaaaaccctagcgagatcgtctcgggagcttctggagcgaatccatcttctccgacgccgtcaggatccaccactgtcgccatctttctctggtgaggctcaccgaggaccaaccgtgggaacacgatcccctatccacgcctaaaccctcggtgctgtcccctaatcccatgtgctatacttattcgggtgctcggtgccagagcgcaggcacagtttgatcgtcggttccgtgacccggtgaaacctaccgagcactggccagggaggctcttaatccaggcgcag

SEQ ID NO: 63783 - DNA, 439 bp, Oryza sativa
agcttgtgtcgactgcagacaacttgaatctcgttagcaacggtagtgcgaagcagcttgaactgactagttctagccattggccggctccagtcgacttgaactagcaaagagaagctcatgtcgacccgcgggggcagtaacacgttcacgttgactcttgtcagtctcaagcctgaactgcacatattgaaacttcaagaaagctcaaactcgatgagggctaattaagcataattcaagtcaggcatgccagtatgaagaatcaaaaaattgcaaatttgctggttcaaagaaagttcaaactgacctgtcccatcttaacaagtttctatttgacagaccccaaccaacaggaacctggattagctttttttaaaccttgaaaagacattcaacaagattggacgtggcttatgcttttcgtgcactaacacat

SEQ ID NO: 63784 - DNA, 426 bp, Oryza sativa
ctcgcgacacatgatactcaagcttcaaataatttttctcttacattacttatccaatttatgatcctatcacaccattatatttgttctaattaaatctttacaataaaatatcacatgattttattttgataaaagaaaaatatatgtttcaattcgttaatacttgttgtttcatatgtgccagcgacatgtttcaacgtgtattttcaccatgtttcataaaatacttaaatgtttcggttgctgattttttttgtttcaccatatataacataatgtgtcacttgctggttaacgctcacccccgcactgtcgtgcgcatactcatgcatgtatgccggccatgctgcattgtgcacgtgccaccgtgcttgccatcccttgatgtggtgcttgcgcttgctgttgcatacactcccttcc

SEQ ID NO: 63785 - DNA, 449 bp, Oryza sativa
agcttcaatgttgcggccgatctgagttgaaaaacatctctggatcatgcgttgataagttgctcctgcgttctttaatccaaaaggcatggtgatgtagcagtaagccccgaagggtgtgatgaatgaagtctttaagtagtcggattcctttagtcgaatctgatgatatcctgagtagcaatccaaaaaactgagtagctcgcagccggccgttgagtcaactacctagtcaatgcgaggtaacccaaagggatctttgggggaaagagatgttgaggtcggtgtaatcaacacacatgcgctattgtcccgtctttttccgaaccaagactgggttggccagccaagccggatgaacgactttcttgatgaagcctgctgctaacagcttggtcagtttctccttgatcgcattcttcctatcctgtgcgaaaaggcggagtcat

SEQ ID NO: 63786 - DNA, 319 bp, Oryza sativa
  unsure (1)..(319): unsure at all n locations
tactcagcttatgtcggcgcatactaatactggaacttatgagctagaattgctctatcaatcaccatctactttagacatatcttctgaaacttttttcaaatccaaaagtccagtatcttcctacaaattagtgaattaggaggagctctttgtgcccgaaaagaaagagcagggcaatatttcaaacctgcattcgaactgcgaaatatntatacaaaggaagagagatcaagataatgcagcacggttggttatctaattggctagtcaaacatgaggtgggtcatagatcttggtgcttcgatcatcgaagaat

SEQ ID NO: 63787 - DNA, 414 bp, Oryza sativa
agcttcggtggagatgactctgccgccactatcgtatcttgcatcacattgcatatcttcctttcattgcgtgttacaatttctgcatttgcattataaacctgataacaacatataaattcgcaatactaaaaatagcaaagagacaggcgtgatatattatgctacgcaagacatgcttagttcttcatgttgaaatgaagaatactagctctgtgttatatctaccagatatggggccatggttatagactctctcaaaacttgaatatgagtatccaacaattatcctggaacctgagcgaaatgagctgcacttagatgatctgagtcaacggcgttgcgaggaatgagatagctaataagagatgctatgaccctgctctaagcttgacttgaatatcggatgtctta

SEQ ID NO: 63788 - DNA, 398 bp, Oryza sativa
ttatgcatttaagattatgaacaaccacaattataaactttaaaaattgcttccagagcaccaaatccacaagacacaagtttctcagcagtttagagaatataaacattgatcgaaatattaatattgttttgattattttacatacccaagcaaggctcacagccataaggcacagaaatgtgacatagttttttctttcaacacaattgttcagccactgcatcagaaacaccaaaacaacatcagaatatccatgtcaacaaactaaagtgaaatggcaaaaggacaagtgaagtttatgatacagaagctttaacttaaacctacccggcaatgatgtatcaaaccatcaacacatatgtacaacttcgaaatgttactatttttctgcccta

SEQ ID NO: 63789 - DNA, 447 bp, Oryza sativa
  unsure (1)..(447): unsure at all n locations
agcttgaggcctgctgggccggtccatgttcggcggcgcccagtctggttagctctccacgtggacatccaggattgcttctcaatgacggttgtgagggtaaaatggacatttcacatgccattaaccgccataccacccctataaaaggaggagctcattcactctcgcaacacattcaagcaagctcaaattcctcttcatactttagtattagtatcttagtgctaagtggagtagaatagaattttggtatggctctagcagctcttgtgttctcttctgtaatactttctatattaatgaaatactcttctttatatatcttcggtactttgtttagtctgagtattgttcttactctatatntgtgtcgtaccaattctatgggtagtgtaccagagaggtgcaatcatgcgggtttaatggttaatatatcagttgctc

SEQ ID NO: 63790 - DNA, 448 bp, Oryza sativa
agcttcttccaattcatggcgatgctggttcagaatcgataactgaccggattactcaaccgtactgccattgaagcaaccgaatcaaggtatttcaaagcaaatatcgtagatgagacgacagtgaaggaaaagtaatagggcttaattttgtgggcgtcttgagtacgaactcccagtccagatacatcttgtgctagccaaaggattgatctgttgattgttgggatcaatctgcggttctaaccacgacaacgggatccatgtagacactagcgactacaacaagtttgttcgtgggtagtgctgtcagtggcgtatctaacatataaggtatgggtggtccgacttataaaaaatttaaaacatctcgaatataataatgttaatatataaaatataaatataggtaatagatccgcttcttccgtatctcggttagagtata

SEQ ID NO: 63791 - DNA, 438 bp, Oryza sativa
agcttttcttacttagagccattgagccattatataccttattctattatggatcttctacgggtttatttctttcattcttgctcgagccggatgatgaaaaattctcatgtccggttcctttgggggctggatcttaaagaattcacctatcccaataacaaagaaacctgacttaaacgatcctgtattaagagcaaaattagctaaagggatgggacataattattacggggaacccgcgtggcccaacgatcttttatatatttttccagtagtaattctaggtactattgcatgtaatgtaggtttagcggttctcgagccgtcaatgattggtgaaccggcggatccgtttgcaactcctctggaaatattacccgagtggtacttctttcccgtgtttcaaatactccgtacagtacctaataagttatt

SEQ ID NO: 63792 - DNA, 441 bp, Oryza sativa
agcttgtgagtggggcaagtggtcggtttatgggcgggaaacggccggcgggaaagcgagggggaggcggcattatgtgttgccgccaccattcgtgtgccgcgtgctcgacccggtgcggggtctgcgccgggcggagcatggttatacgcggagggcggtggaggcaccgcagctggtggaggagatcgagggccggagctcgtggaggtggagctcgagaagcgtgacggcagctacagcttgagaagctcgagaagtgtcgcggcggccgctgctccgtccctttgccatgtcgcctgcagccgtcccccctttgcggcctactccagccactctacttctcccgctgccatgctcgcccgccgctggtcccccctcttgcatgctatctcgccgctgttgtgccttctggcgctctcgctcgccggtggtccctcc

SEQ ID NO: 63793 - DNA, 348 bp, Oryza sativa
ttgtagtgcttgtcaagccggcaagcaagttgcatgttctcatcctactataagtatcatgtccacatctagaccattggagctcttgcatatggatttgtttggcccaacaacctataagagcattggtggtaatagtcattgtcttgtgattgttgacgattattctcgctatacttgggtgttctttttgcatgacaagtctattgttgccgagcttttcataaagtttgcaaaaagggtccaaaatgaatttaattgcactattgtgaaaattataagtgacaatggttccgagtttaagaataccaatattgacgactattgggatgatcttggtattaaaca

SEQ ID NO: 63794 - DNA, 413 bp, Oryza sativa
agcttacacatcatattaatcctattgtcttatccgactacaaaattccaagtcatattacacaaagattattcagataagtatcgctggatagccgatatagctctttgcctaatctgttctacttcttctatggcttgggcatcttgagcgtcggttccaggaatgaccttcaaagatttggttatattagcaacattcttgatagctgattttaaccttgctttttgttcttccatatactgtgggagatcagctaacctcttgtgctctagatccagttcaacattgcattcttgaagttgtgctaagagttcgatcttgcgagcttcaagccggtcaatattggatttgatcgggcctttatataattgaacgagcttggctctctcttcatgaacaaattgccgatt

SEQ ID NO: 63795 - DNA, 437 bp, Oryza sativa
ctctcgtaattgcatgcatgaagatcttgtgccataattacaagcaaaatgaggacacctgtatgtgtgaactatataaaaatgagccagcagctcatgttagataaacaattcagttcatccattaaaaaaattaagcactttggcagatatgaaagatatttgcttctcaaggtacaactaaaccaagtacagaccagggacacatacatttaaagtaggtcaaattgtgcacgccttcccttgattcaatctatacatcctagtattatatattattactatattgcagatgtactataggtattcatgtatacagctaggcgttcatttttattgaagacaaaacatattgaactagccagtgcatatatactggtgaattgttgaagcgattcatctctttgttgatccttgtgggctgtacatgtgctatt

SEQ ID NO: 63796 - DNA, 415 bp, Oryza sativa
  unsure (1)..(415): unsure at all n locations
gtgtgctatctcatactagcacatgtggttggactgtattctaaatgaactgacattgagtgaagtccttatgtctgtctaggcacactctccccctatcagcacacaactaattaccatatgtttaccacatgatgcctcaatctaaaatccacaattttcaatattttatttaacaaatatcacatcctatcatttcttgcaagaccatatagtacagcattttatatacattaattgatcccaaatggtgagtaaacaccaccctaaagcatgactancatttttatagacatgtgacctcaaactattaaccttatgggacaaaatgaattgtactcacgcttagaatcatgtgtatcgtcttttctggaggttatgtgatacatgcacagtaacgagcttgacctacaaa

SEQ ID NO: 63797 - DNA, 346 bp, Oryza sativa
  unsure (1)..(346): unsure at all n locations
agcttctgaattacctgatatgaaccggtgaatatgacatatgctaatcttgagagaagtgtaatgcgatgtcccgccattaaggaagaaatgtatatgtctaaaactctatacggcaccgtgcgagcaaataagcgagctaatcatcctgtcctactgtccgagcaatctttaattttttaattggaatccgacgagcagtattaacgtcctaattacgcgcacgtacgatgacttcgttattaaatactggccttgctttgacatgtgctaaccacggttagntctttaatctattaaaagcgaactcgctcgagaaagccttcttatatttcactgtttaaga

SEQ ID NO: 63798 - DNA, 324 bp, Oryza sativa
tcttcagggagttctcgtcaccggcctggaggatgacgactattgtcgtcttgtggcagtgacggccatagtttccagcgactgcgatgatgatagcatcaggttcttctggggtcattgcgacgaccaggaagagacttacatctctgtggtctgagggacaagacagttactaatgtgcctccaagtattctgttgttagaacagtctactcgcataatagctggcatgaatgtccgccttcgaactcagatcttagtttcatagtgccattggaatagactttaagatgaaagctcgcctagattcctaccatatgatgta

SEQ ID NO: 63799 - DNA, 320 bp, Oryza sativa
  unsure (1)..(320): unsure at all n locations
tgagccaggtgctcatctgcctcaccccttaatccagattgtctgtggtgagcaaaccccggccggcgcgcgttatgttaagcagccacccacccacatcgataatcactctcacagttaagcatctgcctgtaatgcgtgtgtgtgaacgtgcaaaaacgcaatcatgcatgggatcagaggacggcgtaatggtggcgagccatgtcttttggctaatctaatcaccaattatgagcttaccacattaccactatgactatcatgggggagggaagaatcanggcagtgtccaatggcaagagcccgtattacaacta

SEQ ID NO: 63800 - DNA, 402 bp, Oryza sativa
agcttgaagggcagcaactgcgtcttcttcaatgagctgttgcctggtggtttctcacttggacttcgtcgtggttgtggtcacctgtaatttagagggacagttggcagcatgccgaaaagtgtatgatggatgatgtcacattaacaggcccacagcatctgctgcatcgcacagcgctggtgcagctatggcaaccaaaattctgttacgcagcaacatccatctgatctgactattctttataactggatttaacatccatcttctgtatctgatgttgctgcaatggattattatttactaaggatgcggtagtggctgcgatcgctatgatggagaattggagacggttgacggtgggcaggaaccttgaccacaacctcgccacgtgagcaaatg

SEQ ID NO: 63801 - DNA, 297 bp, Oryza sativa
ctattaactacgaataatttgctagttcccttttatctttaggaaagtgtgttaagtgtccgatacggactttatgttttccttttatctttagaaacagtcatttcttgtcctacaatgactagtatctaccccatgggtttaatatatacaacccggggcattgtaatccaaacctccaacaataatacattcggcgcattgacaccctctttaccctagtttttacttattatcccgcggaacttgcaccttaccggagctgcatcggcttctatctcccgcgaagggtaagcc

SEQ ID NO: 63802 - DNA, 441 bp, Oryza sativa
  unsure (1)..(441): unsure at all n locations
agcttgagtgtgtgcgatttttgagctgtctctacctagtagttaataggaacgcgcatatttttgtgtatgtttcttgttttctactaacaatggcaaggatacacaagataattggggatagctgcgctcaacatcgacatcttcgtcgagacatgaggagggatcaacatgaccattatgaagtaagtgatgatgttctaggtaagatcaaatctgcactgccttatttcgagggagactatgatcctcgtgcttacattaattgggagctagcggttgatagttgaattacaaagcatgtcttgtcggagaaacaacnagttatgtgtgcctctattgtttaattaaacatgcttctaatgattggaaacatctttgtaggcgtaacanaataccacaatcttgtaaagacctgaaacgatatttcaaagatgttta

SEQ ID NO: 63803 - DNA, 396 bp, Oryza sativa
ttgacatctattgcgatgcatctcgtcaggattcggctgcgttcttatgcaagaaggccgagttgtggcctatgcatctcgttagttaaggcctcatgaagtgaactatcctaccaatgaccttgagttagctgctgtcatacatgctctaaaaatatggcggcactatcttatcggcaaccgctgtgaaatctacactgaccacaaaatctaaaatatatcttctcccaatcagacctgaacctaaggcaaagaagatggttagaactcatcaaagattatgacatgggtctccattatcacccgaggaaggccaatgttgttgctgatgcgttgagcacgaaaccgcagtgcaattgcatgtcggtataaccccgatcggagaccttgtgttca

SEQ ID NO: 63804 - DNA, 433 bp, Oryza sativa
  unsure (1)..(433): unsure at all n locations
agcttattaatntctttactgcgttcaatgcatgaccgcgtgataggtgtccttttccccctactcaagaagagttacatctaagttccgatcgtgatatgacaaacaaatcttactttttctttcccaagctggcgcataacctctggactgataggaagatcgatgacccgcatcctacaacttcaaagaagtatttgtatcacacccgaacaatggaccggggaaggagtttcattcatttacggagtttggaagcaaggacaatccaggatcaactgctatctgaagaagtggaatggatctgattacccattggcatctgcattgacgcttttgactacccctactctgtgtcttttgcgtttccttattcatgtactcatgtctatttctatttgtatgatactgatattgcgatcgatctatccct

SEQ ID NO: 63805 - DNA, 424 bp, Oryza sativa
  unsure (1)..(424): unsure at all n locations
attttgcataccactatgttctcttttctgcagctttcaggatttttggagtattttttacttatcttgattccctccacgttaaatagagtttcttcatcaggtttgctcctctcctcaatagaaatcttatcaaaatgctcctcccaagaatcgatttcgtcgacttgttttttcacatcagcctaaaattaaatgtacacccaaataacaaaacacggtgagttaattcacagggtcataaattagtggaacacanaaacgttgcgtttgtctcgaaattaaaggttctgaaaattgtatatttctcttaccgataaggctgaagagaaccagtaatctttctgacggtcaaggaacatatcgtctttgacaaatggggcatgaacatatataaatttctcttctactctaagtatcaaat

SEQ ID NO: 63806 - DNA, 366 bp, Oryza sativa
  unsure (1)..(366): unsure at all n locations
tattagcttttatgacattatttctaatataaaaacaatggtcaaagttcttaatgttngataaaaccttgccctaacggtcatatatttctgatccaaggaacgaaaaggagcacacataaatgcagtttaattaatgagaagaactaatagttgattaggatcgaatcccagctctgcgcatcacatcattgaacttatttcatgccaaccttttgtgtgtacagcatgtcatcttcgttatcagaacaacattgcaaattagagtacactttcagagaaaaaaatcacttactatgtatcaagacaacacagtatatctaactgtctgcacctttaaagttgcagctcataagtgtatcaaca

SEQ ID NO: 63807 - DNA, 358 bp, Oryza sativa
  unsure (1)..(358): unsure at all n locations
ttgggatgcttccatggcttcacctttcacagcanagcatgcctctgttgcccctacacttgacatcatccgccaggggagaagcaccctattcactacccttcaaatgttcaagattcttgggctcaactgccttgccactgcatacgttctgagtgtcatgtacttggatggtgtcaagctgggtgatgttcangctactatcaacggggtcttcactgcagctttcttcctcttcatttcccatgctcgtccccttcaaacactgtctgcagagcggcctcatccaaacatattctgtgcatacgtcttcctttccattcttggtcagttngccatgcacttgttcttcctgatc

SEQ ID NO: 63808 - DNA, 272 bp, Oryza sativa
tctggtaatacgtgaggggcggggaacaactttctaacacaagtctttgaacaccgatataagaagttgttgggtgcttctgactaacgctatgcttattacgttctgcatatgcttcaatgaccactttgcgaatggcatgtctgctttcttaacacgttccacatgtttgaacatacaataactatggtacgctccgggtcttcattttgtgcttagaattctatggctggtgggccggaacactcaaagggacaatgccgatactggcc

SEQ ID NO: 63809 - DNA, 408 bp, Oryza sativa
  unsure (1)..(408): unsure at all n locations
tgtagaanaagtagntacaatttcaacctaagacaaatctattatgagaatatattgcaatattgatttgatgaaactaatttagtattataaatattactatatttgtatataaacttaatcaacttgaaacagtttgacttttaccaaaggcaaaactttttatagcctaaaatggagggagtaactacctacattcatttggagcatgtggaagagccatagcacttttagtaaatccagctgtggcaaaaccaactggtcattaatttggagcatgtggaagagctataacactcttaacaaatccagatgtagcagaagcaactggggatctatcccattccctggaaagggagtgatgctcatgtggtgctcagatataggtgtacaaaacaattatatatg

SEQ ID NO: 63810 - DNA, 456 bp, Oryza sativa
  unsure (1)..(456): unsure at all n locations
agctntaatcttttcttaatcaacaaatccacgtcggctacacgtcggaagtcggcgcccgctgcgtgcagctgtctcctccacgtgggccccgtccagcctccagcctctcagctggcttgtttcgtctttctcgcgggccgggcgctgctgctagtctggcccacatggcagtggggcccacggtgtcaagctgggcccaggtgcgctgtgctgtgcgaagacatggggaggcacggtacacggttgcatccatgcagccgcacacgtgtgcatacctgacctacgcaaacacgatcaagtttggttntgattctttctagctattgnggatcgattctcgaataattgtctgtgttacactatactcgtgctactttaaacgtagtataagttatttctaaataattataagttatttctaaataagttatttaaaaggagtaacttcttatt

SEQ ID NO: 63811 - DNA, 333 bp, Oryza sativa
tagatatcttgcaagaaagttcatcacaaagtctgaaacaataatatagcttgaaaggcaaagcgagggaataaaatagaattgtttcagccatttgcacaaatatgcaaccaacatgtgataacatatgataatcagcgaaatagctccaccaaactagcaatatgttatctcagcggtatgtggcatgggatgccacctctgaatgaatactccatggactaacttagaaccctatagaactcatggtaaaattctcagattcatcagttgtacataagcaactcatacgggcactgaatccaaccagattgttaaaaccattgatgctgg

SEQ ID NO: 63812 - DNA, 444 bp, Oryza sativa
  unsure (1)..(444): unsure at all n locations
agcttgaggccactcgcaagaagatgaactgcaagaatgaactgcatgttattgatggtggtgaccactcctttaaaatcggcaaaaagtatcaagagtctactggagtgaatcaacaagctgcagaaatggaagctgttaaagctattgcaaaatttgtgcagaactccatagcaggaacctgaacttagctgtttatgtactatttagggtgttgcaagaattagtatgttcatgccttttggtatcacttagatgtaatagaaagctattttgctaagatggcaagaattaatatgttcatgcacttggtatcatttaggtgtgaaagaaagctatattgccaggatgctagttntgatttgcgcatccgcatccaacatctatttgttntcttgtcaaggtatgccactggtgaaatcattatcctgactactttacata

SEQ ID NO: 63813 - DNA, 382 bp, Oryza sativa
tgcacaaggtctctatagcgaatacacggagatgacctaactcttctaggtcaattactttatgtgagattgcattgaagaaataacacagttctgtgacaaccatctttacgtgtactagattgattactttgattgcaatagcaatgaatattatgagcattacatgacagtcatgagaaatgtagcccaaaagctataaatccttcatcgacactagccgctctatgtttgaggagaaaccggtagggactcttacctcttgtagggatttgtacaatgccattttctcataatttgcaaggtgtataagtcagcgaaaggtgcactcttgtgacatcctggcctaaggcttaatacgattaatagaatacttatacca

SEQ ID NO: 63814 - DNA, 456 bp, Oryza sativa
agcttcgtcgacaacagcgtcaaccccggctttaaccaaggagtttcttcttcaacaatgctggtgtggactcaagtcggcgaaatcgtcttcccggtttacaccacggtgccgatctcgactggtccatcaatgaccggaagcgagaacaccatggttacaaccctgaatggctctgcagaagtggagaatggaacatcgacgatatccaagcccaagaaggatcctaatgcggccaaatcttgtccttccgacgagaatcacgagccgacaagaaccacttctgaggcaacaaggtcttggtgtcctatccacaaaaccaagaagcacaccttgcaagcttgctgggtttttctcgacgtacaagctgagatccgtgccttgcaaagcgtggaattcaacgtacttctccaacccgtgatgtctattgttctattcacaagacaaagaatcacg

SEQ ID NO: 63815 - DNA, 415 bp, Oryza sativa
tgaagcagcaaggagcacagcagaagcagagctctctctctatgccatcagagtgctggctgtggtcgactcactgcagaaaacaaggaatttgtcagccacatataaatattacactatgactgaatcaaaattgttaatttaacaaaacaaacacaatcattcaggcattcggcaataacacctaccagcgtgtatatacggtaaaaaaaactactaaatcagcaagagtagaatgcatgtatatctatatgtaagttgaacaagtcattatactgcgagcatcagcatactcacccataagccaagaaacataactacaaagaaaatgttgagcttaagaaaacaaagcatactattacaataccagcgacacaaagtgcagctaccaagcacttttaattaagcatattct

SEQ ID NO: 63816 - DNA, 435 bp, Oryza sativa
agctttggccggaacttctgggcctaggagtggaagagaattttcctaagtgttggccgaaagttcctagcgcccaggactggaacttccaggcagtatttcatatcaaatatgtgagtaatggctagatgacgtcacctagccgttgtagatatcaaactcgaccccagctcattctttggtcatttcacttttgctttcctattccctagttgtttctagcctctcccaatgtgaatgtgtttccttccaccaaatcttaagccattcttgtataattagcatttgtttcttggatcattaacttattgtgttgatgtctttcaggcagcgcgcaaaggcgcgccccaacatctagtactaagaaagctggattggggtgcctatgtcggtatcattggagttttaactttttgctaatgaaacctgatcgca

SEQ ID NO: 63817 - DNA, 405 bp, Oryza sativa
  unsure (1)..(405): unsure at all n locations
cgtgcgtgtagaccattactttccactgggcgttgggcatgcacacagttacacggggacacatagatagaaggggaagacaaacagttcggtcctatnggatcgggctattatttgcaggtcgtcgggggtaaggaataagtctcttctacctccctcaactcacgtctctggttgaatagtatccctcaatcgtaaaaccgggtgtaacccatcctaaactctaaaaaccgatgcgaaacaattcccctagttttggaggtggttttgcccacgtggcattttctgactccattgactagttgagtcatcttgtggaacccacatggtatgacaagaattaaaataaaacggtggggccattatcagggcactgtatcgaccattccctgcggttacttgcct

SEQ ID NO: 63818 - DNA, 448 bp, Oryza sativa
  unsure (1)..(448): unsure at all n locations
agctntccaatggtatataactcactatttaataaaatatattaatatcaaatgattagattatggtcaacttaaaaatgtgctaataaataaaattgatattgtacagtagagtagatgtcaaataaatatatttaacatgttttgtcactgtagcaaccacataaactaagtataagtaatgtctcaaatgaatggatgtataggaaaatactagtgcttatttaatattcgatggccatataattaaattcatgacttaaaaattagttacataaagtttagcttcatattttgtaactaaaatattaatactcatagatgaatctttaacttgtttatgagaaataataacagagctagtgtgattaaatcacctatacganattaattacttaatgtcatgttctttggaatagtatcttntaagttggtaatcttaagttga

SEQ ID NO: 63819 - DNA, 435 bp, Oryza sativa
agcttcaactagtagagcagccctttaattgtgacctgctgactatggaggaggaggaggaacattataaatttttcgaatttgtgtaaatgcggcacccacggcctcctcttaattgatatctttattctttatacttttatctggaactaaaacaagcactcgctgtgctcttcccttgaattatttttcggttttcaactgcatgtatctggaatttttttcccccacatgtaaggaagtatcttccgatgtgttttcctatcaacaacgtaaccagatctatttgctcgatgtcttgaaatatctcacattttccctctgtcgtcatttgcggtttgttgctgctggcattgtgatttatgattgatatgcagtaagtgtgtttttctgtaacgtcatgtatatgttgtgttgcctatgtacatccatttt

SEQ ID NO: 63820 - DNA, 406 bp, Oryza sativa
  unsure (1)..(406): unsure at all n locations
ttgagcccttcttcttaagtttttagcttagcattcatgatgattgcatggntatttcctctaacaggaatggaccaacaatgctgcacaacatctgaaaagcctgggacattgacccaaaagttctcaaacctgaagatagaagattttggcactgaagtctcaattgaaatatgacagggcacatgatctgagatgtactttgaggttgctgtgaccatggtgtgagggaacttaagagtccaagctattgaggtaaaaacccaatccagttattgcagaagaggctgctcttgcatattgctccaagtgaagtttcttcctttgagagggatttctactaagcctgcatttgtgattatttcaattaaaatgagaatgcattcatgtctcctctacgatgttc

SEQ ID NO: 63821 - DNA, 358 bp, Oryza sativa
  unsure (1)..(358): unsure at all n locations
ngtctcccgtcgacatgttttctttctaccacattcttcgtagttcacataacaaggagtccaatatggacgaggggaaattatattaacgctgtttgactgtggggttgaataattcttatgttcctagtatggtttgattctacttgtgctaattgtactatggcttgatcttgttgagcatatgtctatcttgttcaagatctcttcaactaactctagagacatgtggtttaacactctgcatatacataacaagaatggccatgtccgcctcgttccatgttcataatctttaccagcttacttgtttaaatacactcatcttttataagaaactgcttaatgaaaactattc

SEQ ID NO: 63822 - DNA, 421 bp, Oryza sativa
agctttattgaatatttcaataacatattcaagctctttaaattccatctgttccttcaaaacctgagcttgacttgtgaagcgaaatacgatggtgccctctcgtatgtctgatcgagtgatcgtattatataacgcagccacagttatacttttgcacgcgtcagttatccttttgcacgcgtcatgtgattcgaataactctgataaaaggggataaatatgtcatttacgtcttccgtatgtaatgtaatcatcctcagatggttcatctataaacagtggtttatggtagctatcactaacagttatcgctgcgcctcatctgctttaaaatgattcgctagaagcctaaaacggtcacacgatttgcgagttctagtgatgttttgcatgctaattcttggtaaggcatggggag

SEQ ID NO: 63823 - DNA, 363 bp, Oryza sativa
  unsure (1)..(363): unsure at all n locations
tacacgaaatatatttgagacttcacacactctacagctctacntctctccaaactaaaacnctttgcacgcacatgtctcactcgaataagcagatagctgctacaattgacccacgctttatattagattcgtatgtacaaacagatcaccaccgattgtggtacatctgcattcctaattggcgaggccacataatttctggaggaattacctctgaggatgggttcattctcgagcacatgcgcttccacgtggcataaatgaaggtgctctccccctcactaatcagctcatagacaacagaatactaccctacagaattccaacccgattacgctcacacagtcccattaaagatct

SEQ ID NO: 63824 - DNA, 426 bp, Oryza sativa
agcttgacaaacatatttatacttgagttttttatgtatatccctgaatgtgaggtcatcacttttcctcaccagtaatatatccgtgctaatacaacagattcgatcaatagtgtgaatgagcaaccacaaaggtggtcatatgtaatacattgaagccgtgaactccagcattccagcataatataatcagttcgagtgcaaaggtaatcaccgaggagtacgatgtggccgattaagttcatctgatccatggacaatcgctatcaccatataaaccctctaatgtaatatcgtcttcttccctcatagatcagatggcttcttgtggcgactattgtggagacgacaacattattgtgtatcgaggctggtaaagttgtaaggggtgataatgaagctgattaatagatgcagtgcggagca

SEQ ID NO: 63825 - DNA, 416 bp, Oryza sativa
  unsure (1)..(416): unsure at all n locations
cagctttccttgaagtcatcagtcggtggctatcataataataaaggagtgtgattnttattatttcaatttgcttactcgatttatcattgccttgcttaattttttggcttagtccatgaggactgaaagtttttaatagcttttgcgggttttaggctcaataaggctcgacaaaagcttttaagaaatcagaagctaagtatgaaacactgagcacagcataaattcatcagtattatacaaattgtgcctccatcattttcattaaaatcattcttatcacattacatcaatcagtatcagttttttcatcatcagagttatcaggaccagtctgtcgaagatcggtgtcctggaacctctcgactacatcgaccgctatcttgtcggcggctttctgcgcatcattgata

SEQ ID NO: 63826 - DNA, 424 bp, Oryza sativa
agcttgtcgccggccatcttccgtcgctgttcgtcatcacgcaagtgttggtaaggaccgatctttcacgctctttctcccggagttctccctttatgccggcgctccgtagttcaccggggatcggtgcttccgtgtgcgtcatccggtgatatcgcgtggttgtcttatctttgccacgacgttgcatctctgctgccacatcgctgtcacctaaccgcctatttggctctgctgtgccatgtctatctaaatcctagatcggattcgatctaatcccgtggattctggccatctctatgtctagactaatctcatccaaccgaaatcaatataaacatagtatcctctttaacggcatattagcatgttttattatatggcacccaccatatatctaatctatccggagagtttgtaaact

SEQ ID NO: 63827 - DNA, 463 bp, Oryza sativa
  unsure (1)..(463): unsure at all n locations
agcttgagatcgagctcagccatggcttgttctgtttcatctcaaaccagggacctcctcacaagaatttatgttaatgtagggttctttctgcaaaagctcaagacacacagaacagtcataagactgcggtttgatttcctgaaaccctaggggcctctttgcatattggcctgagaccgacaagtggaccccatgagtttaaaatctgaaaatgtaaaagataatactaaaagcctttactttttaacagcaaaacacctaaacttgtgaaatccatataaaatcaaatataacttattctgagatgattcaactttctataggttcacaaaactatgaactntaatgtggtaacattaagctnggcaccctcagcacagaccttgtctctaaaatgggtctaatataaatcatacataaagcatacacaaacttataaaatgcatataaagtacatctc

SEQ ID NO: 63828 - DNA, 425 bp, Oryza sativa
  unsure (1)..(425): unsure at all n locations
tctgtttaatacattatacctggtttaatatcttgatatatagtagtatcggagtattagccgatacacgctagatctatctgatcggctatgctataaacatatataatcctgttattaatatatatttcgatctaagtgatttatactgtctcggcatggtgaccgatctatcccaatcacttgatttaagtatatattaatataagaactatatatcgttaatatctacagccgatcgaatagatttagttccttactatctgtttataaccgccgatcgattcgtatatgacatcggctcaaagataaatgatgtgtcatcggcacctagccgatcggctatcatttatagaattaactgggggttctttgcttctatttcttgnntgatacaggatcaaatcaactggcacgctcataca

SEQ ID NO: 63829 - DNA, 470 bp, Oryza sativa
agcttcgtggaattacttcagctacggtgtcttgatatcaatgggcatatggtggccagtctctttcgagtactgcacactattttaaagttccttaaacacactgataatgaactgaaagaggacttcatttgtatatctgctcatcatattcttatggttgattgggatttgtattatcaactcaatgttggagaacctctaaaccttgtcaaggatagcacatttagcttgagtgatgatttgaaacagttaggatttctttcaagcagtctcctccaactattgtgctctttacttgagcaaagtgacctggaagacaacaatggacaagatatctatgctaagcttgtaggtgtaattcctaagttagtggctatattaccagagcatcaggatgcccccaaaagtctctctcagtacttaaagcacaaatttctggtaatatcagacatgcaaagattttctat

SEQ ID NO: 63830 - DNA, 416 bp, Oryza sativa
tatttctcagcataaaataagttaacaggaacactaatataacaatacatttagataaactaatggcagtgataaatggaagatttttatgttgccccaaatggacatcatgtaatcttatttaggacacagtcaattaacctgctctaactgcttcaaagactcggcagatttcgcatcatcaggaattatgttgacttctttcattgcacaaagagctccagtttgcctgcatgttaatgtcagtaaattgcattcaaagctcaacatgaagtagcatccgtaaatttgataacaccaaaaaaagaaaaacactctcataccgattggtagcttcatatacacagtcaaatgtgccgctaccgaggagtcttcccttttgcactgacagccactgaggcatttaaatttggagc

SEQ ID NO: 63831 - DNA, 369 bp, Oryza sativa
catgcaactcttctagactaacctacttcattgtgtctagccagtacccacttgaccctgcgcaccctgatctggcataatcactatccccaacaacggaaatcatattcctgagcttagaaaaagaaacagggatatagcagaatctaacacgttctataaacctgctcgattcaaacccttctaatcattgctgaccgaattgtacatgaatacaatagcggcttacatatccaccgagtgattatcctatcgtgaagagagaaatgtgagagataacttactgctaaaagctacaagcaactatgcagagaaacgcatcgtttgaacaatgcatattgctgatacagaacagtcatgatgctactg

SEQ ID NO: 63832 - DNA, 464 bp, Oryza sativa
tactaagcttaacaataatgggagtacaattttcttgttgcaacagcaatctgcctaagacagaagctgtagccttaaaagaaaattttcaacatgcctacaccttttgagcggcagaaattgcgtgctttgttggccaagagtgacagccatggcggccagccgtgaagctacacagaaacagggccaaggaaacagaggaagaagaaaggaattggaaggacgattttggatcgtcggatgataacgaacggcggatagagcagaactgtacgtctgtgactttacaacccaaagtcagaggatctagatcagtgtagaaaaaagttgccacataagtgagaaattgggaaaagaaaaggaaagaacattcatttgagtccgtagttgcgctttcaaacccatcacccttctgcttaagatctgaaagctacaaaagaagttgtgcttgaaatacaagtcaa

SEQ ID NO: 63833 - DNA, 404 bp, Oryza sativa
agcttgtggatcgcaggtggcaggcaatttgtggatcccatgacctggttcaagataaacagaggtggtggttacaggatggcaacaaaataaaatatacaattgaaccagaaataatttataattgaatgggaactctggttagagctacatttccgtatgataaccaaacaattctaccatttccaatggagaaagccttgtgaagaaaatattaatatggctcctgtgtcaaccaaattcactcgtcttcacgaagacgtcaaaagttaaaacctcatctcactccttggtcggaaccatcttctttttcaaaatatgatctttcatattcaattactccctgcacatgaatatatatcttagagcaagcgaattttacgttgaaaggtgtacgatggaag

SEQ ID NO: 63834 - DNA, 458 bp, Oryza sativa
  unsure (1)..(458): unsure at all n locations
tatagggttaatgacgccttgagcttctctgttctatatctgtcttgtaacgatctttgcatatctgctgcatttttttttctctctgatcgatgagtagtccttggtccgagattgtagagccgcgtatgtttcctctcgtcgttgtgctctgtatgcaatcgacggagatgtggtttaacttgtctcacctgctgtgatttcctttcatctgttcttcagatgtaagaaaacgaacagcgccaccgccttttcaaggattaaaagagtaggattcagaactttttttttagagaggagaatcaaaacgcttcctggttatctgaaatctgatgtcagatgccttaaacccttgactgaaagggaagtggntatctgaaatctgatgtcagatgccttaaacccttaactgaaagggaagaggtttgtcagctctgtttcaaactgtatcactgtca

SEQ ID NO: 63835 - DNA, 393 bp, Oryza sativa
tatgcgggcggagcggagactctcaaaagtttccgcttgatctgaaagtaacaattcctagatgcacgtttttacaaccgagtcatcgacataagcctcaacattacgtcctaattggttacccaaagaaattcgagtagtacgttgaaaagtaagacctgcattctttaacccgaagggcattgtcgtataacaatacgatcctatgggggtaatgaacgtagtcttttcctcatcctccctagccatgcgaatctgatggtaaccagagtatgcatctagaaaacacaaaatgtcgcaccccgcagtggaatcgacaatctgatctatgcgatgcaggtgggaaggatccttatgacatgccttgttaaggtcagagtagacgatgcacat

SEQ ID NO: 63836 - DNA, 425 bp, Oryza sativa
tgagcgcatgcttttgttatccttgtagtgaaaagaatgtgccatcgagcgtgatcctgcccaaaagtatggcgcctccttattgacagtccttgtgaccacagagaaattacttcaggaagaatggcatgttgggatcccagctagcttattatgaaagaaaggaatttatgatggctaagttaatactccatcagttccaaaaaaaagtccaatcctgaaaatgtattaagacgtacacgttgtccaggtacattatcaggaatggtattttttattggatagagattagttcttatcaagttgtactatgttggacagtgtatctgtcaacatatgcactattcaccgcagggctagaatatgctagagtgatggccatctccctccttttctctctctttcttttttcttgcctaacatga

SEQ ID NO: 63837 - DNA, 352 bp, Oryza sativa
  unsure (1)..(352): unsure at all n locations
agcttgacccatcttctggaatgcctttctttgatcctatcctttgcttcagccggaaatgtgaaccatttctccattgccgtccaagcttgctctttctcggcttctgtgaccttgccgatatctttatggaggatcccgaagttctcacatgccgccagcccgcagcagttagaccatcttccaatgagtcctgtgcgccgtgggcctaccactagcgtcaatctctcttataactggcactgtggtcggccatatattttgtgaccggngatttctactcgacctacttgcacttgtcttgcccgacattgatgtatgttgttcttgcggcaattctgcagcacaaaca

SEQ ID NO: 63838 - DNA, 371 bp, Oryza sativa
gcgccgcgtcgcccatagacggtatcatcgtcgtccaccggccaagcactgcgggccttgctgagcagagataggagagagatgatgaatggagagaagaggtgaaaaagagagatgttgtggccacactaacatgtggggcccacgccgactcagccgccacgattgttgaaatcggtttcaaaactaaaggacctataatgataaaaatgaacgggcttgtaagttgagggttgtcatatatctgagttttgcggtttggggatgattttgtaactcgatgacaagttgagggaccttcggtatacatattgctgttgggctattatttcagagtatatggcatggtactttctcatgacccaacatat

SEQ ID NO: 63839 - DNA, 441 bp, Oryza sativa
tcctttgcatcctccactcaaatctagagcctatcttgtgagattgagagattagatgagagtgtaggagtgttttggagatggcttgacgattagatttgtttgagcactttggataccttgtgggctgtcacttgggcttattactcttggagatcttctcctagacggttaggtgtcgcctgtgagcttccaaagatcttgtggatgtcccgggaaagtttgtgaaggttttcctcacctccgcaaggaaacgaggtaagtgagtaaagattcttgtgctgagttttcagaggttgtactatgtagagcaacttgcacttgtggtcttttctagaaggaattttgagttggatcttggtggtcactcaattctagaaaatgacctacaagtgttgagttgaaggctgtggacctcttcttggatctttgcataagtga

SEQ ID NO: 63840 - DNA, 393 bp, Oryza sativa
  unsure (1)..(393): unsure at all n locations
gacgcgtctcatgtgttgggacgaggctcatgtgttgggcagccgcggagtacgggtaaagtgtacatccactgcagtgtgagtaaaccaaatctattcgaatagccatgcttgcgggtattgagcaccgggacgtgtattacacttggctagactcaaaattcttaacttgtgtgggagggaagggggacgtcctcagaaaaccatgacgactcaatggcgggaagctatccttgggatcacaatggatggtggacagaaccgtcgttgtttaatgtgaacactggtactaaaatttgatcagtctatgctacgtattatgcttgtgaaaagaattacacaacttgctntgcgcanaagaaccatagccattccttgaatacccgctatcat

SEQ ID NO: 63841 - DNA, 438 bp, Oryza sativa
  unsure (1)..(438): unsure at all n locations
actgcaactaggagcaattcgttaacgcagatatgaatccccatcctttctgagccttagctatagagaatgtgtgctcatcttctatcgaagtgaggtttcttaaccttccaaccttcggaggaatgattccaccgcaagagttgaaaccaatctgtatccgcgacaaagcggacacgttacctattgatacagggatgttgccatgaaactggctgtcgttaatgtacaagtgctgcatattaggaagagagttgatcacattacgatgcatcgtcccatgcaacatgtgttgctggagattaagctctgtcaaagaggaaacattccagatggaagaggggatcagcccggatagattgntgaagcctatctcaagccatgacaatccagagagcatgccaacggatgatgggatggctcctgatagcatgttgt

SEQ ID NO: 63842 - DNA, 389 bp, Oryza sativa
  unsure (1)..(389): unsure at all n locations
agctntgattaatcaaaagatccatcgggtccatgctactggtgtcttcctactgtaccgttgtaatctcaactgatttaccttggacttggctacctagtacagtagtacccagggtgagtctaagcaactatattttgcttctcttttgggtggcaaccatatcctgaatcctaacttttgagaagccaagctagtaaagtcaagatattatactcctgcttgatcatcgaaaagtttcgaagcacgcttgcatgatttgtacttgagaagccataacgtgcgaatcagggacttgcaggaaatactggctactccctgttctgaaagcaagttttagccctgttaagatctaaaagctgttaaagggttggacttaactgtcacat

SEQ ID NO: 63843 - DNA, 392 bp, Oryza sativa
  unsure (1)..(392): unsure at all n locations
tcccggcagccacaagcaggaggagcagaagcaagctggtcacacggctccggcggccgggacggggacggngacggtgacgcatgcagcggggaagcacgagaagaagggcatcgtggagaagatcaaggagaagctccccggccacggccaccactgagcgagagctcgcgcgcacgcactttcatcggttgacgttcgtgcaactgtccatgcatgtatgtataataccagtcgtgtttcagttcgttaattttacggtcgatgtgtggtctcggtaaaactaggtggtgtacagtgcgtctatgcatgtacggtgtatccaataatccagagtcagatctcttttaattatcctttataacgagtcacgagtgctttacgtttcgcac

SEQ ID NO: 63844 - DNA, 454 bp, Oryza sativa
  unsure (1)..(454): unsure at all n locations
agcttatccatggntcattgtgatttattctgatactcatcttttacaaacttgcatctttgggttatcttttgattattctgtattgccataattgaatctacaaactgtatctgttttcctgttgttatgagaatgaaatggttccatcagatggttcagtgaagaaatatcagtatataaaatgaaatggatcaatcggatggtttgatgaaaaaatatcagtacctgtaattcaatacggacaccatagacatagtatggtcttattcatggaaagtttagctggttcctgatttgatctatccatgtatttgctgtgattggtttaacattgtgctttntagcattgaacatcactggtcttgcctctgggtgctcttttgtaagctatggataggaatgtgtaattaattgacttcacaaagctgtttctagagggtactgattacct

SEQ ID NO: 63845 - DNA, 446 bp, Oryza sativa
  unsure (1)..(446): unsure at all n locations
tgcagacactcatcaacaatgtacatgtcctctctttcttcccaactttcgnttttgtaattctatgtcagataaaactttatactctgttttattaatacatttgtgagataaatggcgatgcaggtccttcatgaagccagcaaggcgaacaatgaggagcagctgaagatgctggtatagatgctgcangaggagaggaggctcctgtagcagaagccgtatgttcagctcgaggagaagacgaagaggctcatgcaggcctgcttcaaggccaactacaagaagaggcgcctcttggctcttgaagcttgggagccgcgaagacagtatttattgcccagcacatatacataatataatataatataatgcanatcctctttgcaatgctaaatgtcatattgtcatgtctctatgatgggaagtctgcgtgttccatgtgt

SEQ ID NO: 63846 - DNA, 427 bp, Oryza sativa
attctgtgactcttactacctggcattaagcccacaaagttgcgggtatcttgatgaaaaataacagaaaaatcaggagtaccaaaataaccaggaaatggtgattacatcattgaactccctcgcttgttgtagcatatttaagccagtcgtgccatccagaaccagcaagatctcctgttaagcaacgaatatatgctagtagttaataacaatgagagcgctatgaagtattaaaatcataaccgcgcttctctaaagctgcgcctaaaagtactgcacatgccaaaatgatccaatcaacacacaatcaagtcctttgcatgtaaacacagcatacattaggagcaccccgagaggctttagctatgactttcttgcaagaaaccaattcttcatcggaccataattgatgaagcctgaaaaa

SEQ ID NO: 63847 - DNA, 407 bp, Oryza sativa
gagcttagcttcgctggtagaggtggtggctgtgccgttcagccgctgccatcttcctcaccagcagcagctagcagcggcgcccttctccggcctctccgtgctttgctgttctttgctttggttccgggatccgatttccattccatccatctcttgctcccgcgggtctcgtctctgtctgtgtttccctggtaagtgctaacatatgcgtctttccctttcttcgggattccttgtttctgttccttaattatttaggaattattttctgctctgttctgcgccaattcaatttgggcctatgtaaatcatgcttttagagctcgtaactggacgagtaatactactagctgaatgatttaacatgaatttatatatggttcatccatctgtgtgcacatgtc

SEQ ID NO: 63848 - DNA, 100 bp, Oryza sativa
tgatcacaccgtaacaccaccttgctcctgtggttatattcccatggtaaaatggggcgagattttatctttcgccacgttttataaaactgtgaatccc

SEQ ID NO: 63849 - DNA, 378 bp, Oryza sativa
  unsure (1)..(378): unsure at all n locations
agcttggcagcaagccggcgacgaccagttgttgatcgggaggggaggttgtgctgtgtgtgtgagggtggctgcccgctgcgatcaatctgcggcacgcggccggagcagatggttgaggagtggaggctttggagccaccggaggcagcggcgccgctggcttactcaacccctacgccggccgtctttctccgctgcgctcgcggacagatgggcggcatcgagcaccgccgactactgctgcggcggcggcggcaacggcggaagtaccccccttccttcttctctgctcaaagcacattgcggccgcacacgtggacaccatcatacggcacaggggangttggttcctgcgcccgccgatacttggatgagc

SEQ ID NO: 63850 - DNA, 439 bp, Oryza sativa
  unsure (1)..(439): unsure at all n locations
taatgtcctctanataatttatctatttaattaataccctctccatcttaaaatataaaaatttagaatcggataaaaaatactcttatattttagaatggaaagagtacaaattaagatgatcgcttaattaatttatcttcggctatctctatcgctattgtacacagttgcacaagacgtgtccaacatcgtgatcaataggatggctgaaagctctagtgctgtaaatgtcagcttgtaatagaagcatcaatggctttaatatttgggtctcgttttcaatcggtagctacagatgaacttcatctagatcgtctttttggtttggtgcaaccaaattgggcatttgctcctctgccagtagctatgccgtcgagcatcactaaggagatatcatacttagttcgtgcttctgacttttcgatgtgtgtttgca

SEQ ID NO: 63851 - DNA, 469 bp, Oryza sativa
  unsure (1)..(469): unsure at all n locations
agcttgcgcggcggngctcgctggcgactgcgatgcgcggtgcgaattggtagacagacggtagggtttggccggttntggagatggaggcgccgaggctggcagcatatcctctgagctgtcactgacatatgggcctgggcctcatgccaatggggtgattcttttttaaaaaaaaactttatttttcttaaaaaaacaatggggggattctctctctctcttttttttaaaaaacaatatgctgtgattcaaaacctacatgcaatgagtcataccctatcataggaattgtataagatttgaacaactcctatcataatcaaaagatcaaataggaaaatttcttataggatttcaatccaataaaattcctctaaattctttaattaaaagggacccttaacgtacattcngcagtacaacttataaaacttgagattaacattgcatgtttatgaagttatat

SEQ ID NO: 63852 - DNA, 456 bp, Oryza sativa
  unsure (1)..(456): unsure at all n locations
tcggctcgctggcttgccggctgcctctcccttaccctctcagacttgccggccacctctccccacctctcccgtcggccgcctccccttgcgtggctaacaccgagactggggaagaaaagagaagaaagaagagggcgtgggccctatgtcttttcttgtcacttacatgggccccacataatatttttatttttattttgctgactaggatgccacatcattaaaagcaggcatctatattgctgtgggatccaaattgcacggttgtgtacagtttagaggtaaaaaaacacgatgtaaaagtcaaggaactgacaggtgggcttattgctaattactactaggaataagtccattttacctccctcaactcatggccgtgtatgaatatcatccctcaaccgcanaaccgggtataacccatcccccaactctgaaaaccgttacaaataa

SEQ ID NO: 63853 - DNA, 441 bp, Oryza sativa
  unsure (1)..(441): unsure at all n locations
agctntagttnttgagctgctctgatttcaccatttaacagcgcatgatgacagtaggtagaaatgcatttccaattcccacatgtttatacacacttaagtgaagtaactgaggtcacaacattattgtttcacaagagtaccaagcaccttttttaaaagaacttgtctgcagcgaagatttatgggatgcttctgaaatggaagagcagattatctttcatgcttgctcacattgggtttatatttatttcctttctatttcaactatgcttattcttccccagctcaatcaaccaccggcagcttcaactcaacgaattcagacaggttacgggataggcctggagctgccccatcaactaaatgttagttcttgcaaacatagtatcgtcatcacttgcattatgattataataaactgcaggcatctctaataca

SEQ ID NO: 63854 - DNA, 456 bp, Oryza sativa
  unsure (1)..(456): unsure at all n locations
tgatgacagactgcannaacttgttaaacagcctacttacagtccccattgacctctcaaatctgtcctcagcttgtctaacagattgtggggcaccaaccatccaaagaaacatcgtaagtgcctcaaccgaggttgacttgctactagatttaagctcatacgactgtaccaatagatcatgcaggcgaaggaacatagttggactcattctaaacatgttataacaggcctttctatccccaagttttttatgtacccattccaaaccagtcatggcaggttgcctatactcagctctagtcaaatgcttgtcaatgtgcatggcatacttgtacataccgtacacataaccgtcgtcatcatcatccatcaatgcaatgatcaactcgtctatctcatcctcccaacgcttaagccgacggcgcgactcctcataacctgattggtcatcat

SEQ ID NO: 63855 - DNA, 421 bp, Oryza sativa
  unsure (1)..(421): unsure at all n locations
agctngccgatcatccgcatgcgagtcatactaattagaattggctatattgttgtgccattcagcataagaactatgaaattatactcaaagtacatctgcgctgatgttggatggatttttattgttattttccgtatagcagtaggatatgtaggagtaggtgttttctagtattagcagaaattggttgaaataagttttctttgaaccggtatcttaagcttcattgttaacattgcaatatccttggttcttacaaagttgcttgtgctaaactgcagattccacacctgagacctgctgagtacaagaggtccagattgtcaaggaatcgcaggaccgtgaaccgtccttacggtggtgtcctgtctggtactgcagtcagagagaggtaaaccatccacacacattacatgct

SEQ ID NO: 63856 - DNA, 421 bp, Oryza sativa
cttgcctgaggcaggcttgtctgtgtttcacccgtccctttctccttttccttcctccctgcttttgatccatccatccatcgctttgtgaattggtgatgcgcttgtttggttttgcccctgctttgctttgctttgccatcacgtgactctgcctgcgaacaagatgaacatgaacatgaagatgagagagaagagaagaaattggcaatgccaaatgccaaaagcagccacagtaaaaaaaaaaaaaggcatcgagcacaccaccattcctctcgtacgccgacgccgtatacgtatagtcgtatactagtctactactaccaaatggggtacctctacgttgtagtacggcgccaaaaaggcaaagctgccgccgatgggaaacggacggcggtgacgacacgtatggtcccacaca

SEQ ID NO: 63857 - DNA, 449 bp, Oryza sativa
  unsure (1)..(449): unsure at all n locations
agcttcaggatcctngacgatagtggaacgtgttgcttctgcctcgaccattgccatcggagttacctagcacaatttctaattcgcgcatacacgccgcaggcgcgcacttccgacccacacgggccacgcatacgctcgttttctccttttttttttcgggaactcgggcgttagtttacttttttttcttcagaaatcgccccctttttctgtccacacacacttttttttcttcagaaatcgccccctttttctgtccacacacacgcgtgactttttttgcgatattttataaattgaatctttcaccttcaatatcagctgagagttntgaatttaaattgaagaggtcttaaattaacggtgaatggttntaattctgagatgaaagttttcaaaattgaatacatattttgaatatcgaggtgaaagtgtctaaatttgag

SEQ ID NO: 63858 - DNA, 455 bp, Oryza sativa
  unsure (1)..(455): unsure at all n locations
cgataaaagcctttaagaaatcaaagacttggttagaactatcaagcacagcataaatacaccagtattgtacaaattgagcctccatttgctacatttatactcagtcagaatcagtcctttcatcatcagagttattattgctcggctgaaggtcgttgttgtggaattgctctacaacatcacttgcaatcttgtcagccgcactttgagcattactgataagatcaagagcagcttcttcacttgtcccgtctgcaaagccatcaatggtatcaatttcaatcctcgggtacaaggatttggtcatcgccaatgccatactagctcccatacttccagctntcttgatattcttgaagtatacatccggtgcaactctcagcttgtcaaagatttcggttgcgtcaagtgcactcggaccactggtattaaggaacatagctnggacaagt

SEQ ID NO: 63859 - DNA, 460 bp, Oryza sativa
  unsure (1)..(460): unsure at all n locations
agcttattgccaacagtatatcaccaaaaagatgcagaacctgtacacttattactagcagccttaattatttgagcattataaaaatcatactcatcaaattgtttgtctactgctagctcccaattaacataagtggcggaatcatacttaccataaaaaaactggcaatttagattcttcccttggaagatcattatcatgtacctcatttgcaatgcgtgaaaaagtcgctatatctcgttgatggtgaagaagtcgaggttgaacatgaccatctcgttttcccttgcgcaaatgtcacaccctaaaaatcccaaatatataaattggtgtcntaaatggaattattatgaattattttaaaagcctacaagagaagatctggttntaattaataaattccaatataaaatggcgccagacaaaattcataaatactttacttaatttataattc

SEQ ID NO: 63860 - DNA, 423 bp, Oryza sativa
tatcattgtacttccctactttgactgtcaacatcaagttttcttcttgaagttgtcagtcgggggctatcatcataataatggagtttgattttttatcaattcaatttgcttacttggtctatcattgccttgtttggttttcctacttagtctgcgaggactgaaagtttttaatagcttctttgggttttaggctcaacaaagcttgataaaagcttttaagaaatcaacgacttggctagaattatcaaacacagcataaatacaccagtattgtataagttgaacctccatttgttacattcatactcagtcagaatcagttttttcatcatcagagttattactactcggctgaaggtcggtattgcggaattgctctacaacgtcacttgcaatcttgtcagccgcgtttgagca

SEQ ID NO: 63861 - DNA, 273 bp, Oryza sativa
tagcttcagtttctgtttcgcttcttctctattttccttggaataagaccggctggaggattgtattgtgtaacaaaaactcttttccttttcttttaatatattggcgtgcaatccttttgtgcatttaaaaaaaaaagatccgacaagcagatttaaacgaagccttattatatggtaattcaccaaacaccgagtagagggtgcagactacaaatgaaatttaaatatcaaaacattattgttaaagattttgtttcttggggggagggg

SEQ ID NO: 63862 - DNA, 429 bp, Oryza sativa
tgacaaatgggagggggtgtctcatggttgtgcgatataaggttataagcctaaagcggcagatttgctactgatttcagaaacgagaccggcaaatcaatctgatattctcaaacagtctaaatcctgtgtcattgtatgggttggtaaggtccagggtaataagatgacagtcaaggcatcacggaggatggagacaggggttcatggagatgaacgacaacaaatgggcatgaacaggtatgacaagttgtatgcggaaagttttgacaagtcttgggaaatgctggaccaagaagcagttgctccagaatctagcaactcatttatgcatgaaaatgggcgtaaagaacattcaaaagttcgaaagtgctttgagaagtgtagtgatctgcaagaacagaatgagatggggacatgtggaaaatc

SEQ ID NO: 63863 - DNA, 453 bp, Oryza sativa
  unsure (1)..(453): unsure at all n locations
agcttgcggcctcgtactgtggtcgcagtatgtgtgttatgatggcattgaggaatgggaacaatccaggataattgagttggacatgctgatccctaacttcttttactcacgtggtctggttggtttcgcagaaggcacagatatatatttcatgttgacagatgttgacttgtttgcaattgagctcaaatcaggccaagtgaagaaggttggtgagagcaggccctactatgccgtcattccctacatgagcttctacacttcaggtaatagcctagatctagtacagcttgccttagttgaaatttcaaaaattcacactatgcattgtttgagttagtggcttaaaaagtatgggttaccacatatatgccctgtgcttcagaacagngngtatatatatatatatatatatctacatatatatatatatatatatatatatatata

SEQ ID NO: 63864 - DNA, 395 bp, Oryza sativa
  unsure (1)..(395): unsure at all n locations
tattaacttattgacattacattntccttttatgttctttattcagttgaactaatgaacttccttctacctttatacccattggaggaacataccatgtaagtttgctaatcattttttaatcaaaccatttattttaatagatttgctatggtgctgttgatagctttcgaggtccaaaacttcaatttttcatccattcagtcttgtgccaagattcgtgttacggtttgggtccgaatccgctttgagcattttgggtttcactttgggccggcctgttagcatttcccctattttgaacagtgaaataccgcgtcatagtcttgtctctttcggctntctttagagacatcttggtggcaatgaggcctangcggaggcgacaggctcgg

SEQ ID NO: 63865 - DNA, 408 bp, Oryza sativa
  unsure (1)..(408): unsure at all n locations
nttgtgaaaagaaatggttggagaacccanaatttgcgtgtaccaatgatagtacattcccctggaagaaatataagggcaactcaaatatgcccggaagttaaccttagaattgaggaagttgacttcctagccaaaccgatagtcctagactcgcaaagcttggacatcattctatggatggattggttggctaagcacaaaggacagatagattgtgccgaaaagtccatcaccttgcaaggacctggaggaaagcaaagccgctttacccctaacacccctaccgcaagtcggtctatcctaacctgtttgcaagtcaccttcttggagtcggtgcccatagtctgtgaatatcccgacgtattttcggaagaattaacaagaatgccaccagatagagagatt

SEQ ID NO: 63866 - DNA, 427 bp, Oryza sativa
atcctctgagtcacctgccgcatgcagcttctcccaaaattcaaggctttttgcatgagcaaggagagatagcccaatctcaacaatatgacggtgtttccgttcaacggcaccatattgttgatgggtatgagggcaccacacttgatgtgctatgccaattttcttaaagaaggaattcaatttttgatactctcctccccaatctatttgcatgcctagaatcttacgattaaattgtctctcaaccatgctttggaactctttaaatttctcaaaaacttcagacttaaatttaagaaagtagatacacacaaacttactataatcatcaataaaactcacataatagcgcttggctcaacggagtcagaggcaggaccccatacatctgaatgaataagttccaaaggattactagagacac

SEQ ID NO: 63867 - DNA, 448 bp, Oryza sativa
  unsure (1)..(448): unsure at all n locations
tgatttcattcttatcaacatggcaatgcttttggcttggtgaccatcaacccatggtgtcatccattatcctcatcacagtgggacctattcctttgcacagctcataggagaacattagtcccaacaaatcggttgtcatcctccacttgatgaccaactggttgcatatgaaagatatgtatatgtttgttaagtattcattaacaccacaagtgtactcgcatgcaagctcaaatgcaaagatccaatataaataataggtgaacaatatggatctagaacatgcacaacaagagtgtataggatttgttcccnctacatatatgcatacaaaggaatatacaagagagacaagtgtatgcataactagagaatgaccaatgnngcgttatcctatacacataacaaaaagcgtatgtagtaattgtggagattatgggtaccc

SEQ ID NO: 63868 - DNA, 426 bp, Oryza sativa
  unsure (1)..(426): unsure at all n locations
agctcgaagaggttgaagtgacatccaactccagcaaggtgtctgcatacagggacgctgtccaaaggcatccaaggattcaagacatacatgtcacgtttaatacccatgatggaagtgcaaggactccgaaatagcgctgcaaggtactcgtgatatccttatagtactttcctttgcttgaatattaatgctgctgttttatggatcacctaaaggcactgttttaatgatttatcgatgactatgtttaggactgtcctgaaacaacctgcattttaatcacttcttataatagaaattaaggggctaagttaaatagatagttaaataatttatacaaattattgtgatattgtcaaatacctgggatcgcacagatgcatatacacaaacatacatgcttganggttcacatcagacata

SEQ ID NO: 63869 - DNA, 444 bp, Oryza sativa
cttcctggtccagtgagaacacacggttctgaacatagggatcaaaggagcggatgcatgcgttaagagcatgaacaataccagactattatgccattcccaacccaacaagctgccacctatgataaaaaataatataacaagtgaataaataagaaaagatgcatgagacatggtttctacacaacattcaaaatatcatgtgagataagtagcactaaattttagtatagaatagtggtgcttgcattggaagagtagtgtctagtactaatttcctaatgatgtggagtttatagaaactgtctagtgtcttgggttgggaatggcctaattcagctacaagcatatgtgaaggagattaagagaggagagagaaaacaaataggctatagtatgaacttcaagacataatatgcgtatgacatatgggattacttatta

SEQ ID NO: 63870 - DNA, 281 bp, Oryza sativa
tctttcccccccacaagtttggggggatcaagtcaactgaactgaaccccactatcccaagatggatccgccccgtcactgctttgcattaggccgcaaatgtctctctgttgagcggatgagtcgcacactgccaagtgtgcacctcttgatatggtgtccatcatctatctggggcgaattcactgcgatgttgataaatctcttggctcttgaccaagaggatggtgcggatgttgatccttacgtgtgctttttacttgattacgtctagactatct

SEQ ID NO: 63871 - DNA, 288 bp, Oryza sativa
ctggccttgtcttccatcctcgagtggcaatatctatgaagtgcttcaaccatcccgatgatagtcgtggagctatctttcccgagaccggacgcatcggcttgactacatatgatccggcgcttagccgatatattgcagccgatactatttgatcccattcgattggtggccgatgccactcgtaatctatgtgaatgctgcttctcaaatggacttcccctacattggttttgtttctagcctcgaattcgaccaaagtgcatgccaaatatgggagtcaacaat

SEQ ID NO: 63872 - DNA, 453 bp, Oryza sativa
  unsure (1)..(453): unsure at all n locations
gcttgcaaaaacaccanaatttttatagggttattcacacacctaaactacagggcgtatcacaaatagcttaggttatacatgtccaagctaccaaaaattgttaacttagagactgtaccaactttagtaaattaaccggcggcaacaaagtttgacatttacttattaaccatcattaacccaataatactagtgacttaatcctttagagaggagaatgaaagcatgttcaacactgctgtcgaaacgacaattgcatatgtcgaacgacgtggttactcaacagtggttggaaaacagatatagtgtattgaattgagatttttttcttgagatccctctattacatggccctagggggctatttatagccccattacaggntcccactactagggtttaagttatacatgggaatntacatnggtacccttatgatagggatattat

SEQ ID NO: 63873 - DNA, 461 bp, Oryza sativa
  unsure (1)..(461): unsure at all n locations
tgtctttctgtgacgataaaggagaaatcgccaaggcaaaaagaccttgggattttgtatcagcaggccacaaaataggaaagccttcacctctatttaaagaactggtacatatttgcaatttttgtaacttcttgcaacttttgtgacttttttctgtagtctgtcaaagctttacatctcttgacctcattggatgcagaaagatgaagaagtagagtccttcaggaataaatntgcaggcagccaagctgagaggagctcanaagcacaagctgatgctgaagctaagaaggttgctgacaagctcaagggcacaaaattatctggtaattatctggacattgttacactgttctgattaaattgcttgcttgaatcagaacaaaagccagcttttctttgtttcacattcagcaagtggatgaaatccattgttaatggagttaataattaatata

SEQ ID NO: 63874 - DNA, 422 bp, Oryza sativa
agcttgtccgtgacctgaagggtctcctttccaatatatgtattgtgcaagattcgggttgtttcttgatgattaataagaacaacattccgatggccagagtgacaaggcttaggctcgatcgagggcgatgaaggccgtttggtttcaggaagatggaaaaaaggtttatatgaaacgaacagagatacctaacatcaccttctcgaatgactcacgctcgagaatgtccgacagggatcgttcctaacctatggctattaagccaaggcggaataaatagctggtggatggaattgtgtcctaagacggaggcggcttatataattcgcccgtgggagcagacaatctaaagataggttgttgctccaaggtaaagaagttgtttataggacaacttctctatgggtagcacgggtaga

SEQ ID NO: 63875 - DNA, 447 bp, Oryza sativa
  unsure (1)..(447): unsure at all n locations
tcaaaatntctcanagaaagaggggaggtcatgccaaaattacttgtgaaatttttttagtgattatatacaaatcggaagtgtctaaaaggttagtaacttcatcctccaatgtattttgttgttatattacttttggagttatgtttcacacattaattgtctccaaaactttgttgtaagttgatgagagagaaaatttgtgtggggaagaagaatatatagaaattttgtttgtttacttaaaaaagttttattctcatagtttaaaatatgatgaaaattaatcttaaaaaatagaaaacaaactaaattgaaaattaagagaagtacaacattaatattagttcaaaacttcaaaaattgttaataagaattggttggtggattattttataattactaattgtatgagtaattatatgtcattattttttatgcttgtcg

SEQ ID NO: 63876 - DNA, 474 bp, Oryza sativa
  unsure (1)..(474): unsure at all n locations
ggcagcaagctttgaaagaaaacccccgcagaaacatcaattacctaagtttcctcttcatataaaatacagttccaaaattcatattagtattctagagcatctagatagctttctgtttcccttatagtatttctatgtgctggtaattacttaacacagttctacaatcattctcaggttgaggttacggatagtgctcttcttgctcttattgaaaactattgccgggaagccggtgtgcgtaaccttcaaaaacagattgaaaaagtttaccggaaggtaagtgacacttctatcaaacaatattgacatttgtagctaatgtttagtgtggagaagaacggcggctatntgtctgtctcaagtctcttgacagacctgcaactcaccagtagttgataccttgatagtatatacaagtctatgactgataagcacgtagattctattcttatttcttaaggtatcatc

SEQ ID NO: 63877 - DNA, 449 bp, Oryza sativa
tgtaactcgtaacagtgtgtggcacagtggctgtaacgtgtgggatcgatgtgtgtggcaatttaagacgcatgcagctcgcgtctcatcgactttactagcagcgcgttgtttcttgtgatcgatcgatcgatcgatcgaccagccgttggagacaaacagaaccgtctcagcgcattaacgtacgcgaccctagcagtacgtacgtatgttccctgttgaatccactactgcgcagtacgtacgtatgccgatgcgcgtacgccccgttgcgtcgtccgcgcgcatcgacaccggcgctacagtatatgtccagccgccggcggcgccgggtgaaattaaatacacgcagatgtggtagctcgagttgcaatctgtacttgtcgatgaaatcagagcgatatcctagctacagatcaagtggactacaggaggagtacgtacgctag

SEQ ID NO: 63878 - DNA, 293 bp, Oryza sativa
  unsure (1)..(293): unsure at all n locations
agctntgcgagtctaggactatcggtttgtctaggaagtcaacttcctcaattctaaggttaacttccgggcatatttgagttgcccttatattcctcccaggggaatgtactatcattggtacacgtaaattttgggttttccaaccatttcttttcacaaaagcttgtgatatgaaagaatgggaagctcctgaatcaaacagaactattgcgggtacggagttgacagagaacatacccatcacaatgtctggagcatcctgagcggtctcagcttgaatgtggttcacc

SEQ ID NO: 63879 - DNA, 427 bp, Oryza sativa
ctctatagacactcaagcttatcttctccggcttgcctataaaagcatccccaccatcttcctttctccccacgccatcttggctgccatcacaaggccaagcccccataaaaccccatccctctctgcctcttccttgtacacatttcgtcgaacatcttgtgggcgtgctgcaccttcttctccacaccaccactgcagccgatcttcgttgtcccgccgtctatcggtaagtcctcgctcctctggcctcccctagttccgtagaaactagagccccctttaatttcaccaattagcaaccgtcgccgtgccggtccggccaccagtttgccgccggtgagctcgccgtggacaagccattccggagcttctcgtagtcatctcgttagtaaaatggaacccttacacgtcgtagatactcacg

SEQ ID NO: 63880 - DNA, 92 bp, Oryza sativa
aagaaaccggcggcaacaaagcttgacatttacctatcaaccatcattaacccacaaatactagcgactgaatcctatagagaagacaaaga

SEQ ID NO: 63881 - DNA, 453 bp, Oryza sativa
tagccctagtagaagccaaagccagcattgtcgttgtatctgcgattacgtctgccctgcttatagacaaatcaaaggaaggtagcctggtagatcaactgggaccaatatggagtatcttcgaacaggacactgcgtctgcgtgcctatgaattgtgaggcactagttctgtgccctggtgaatggtgattgttcagagaatcagagctcaaattgcagatagttttctgattgtttctgggtagttccttcgccggcccggcaaaaaacaggattgttcctgatcagtacacttctccgtgaaagctaaggacgatccttctctgtgcccgtatgtgtcgctttcctgataatacgatctttttgctaggcaagttgcagactcgcggtatcatttttttacaagcgggccgccattcttgtcgtctcgagatgatctcttgtctgtactg

SEQ ID NO: 63882 - DNA, 435 bp, Oryza sativa
  unsure (1)..(435): unsure at all n locations
actcagcttgcaagggaatctaaccatttcaaaattcanaaattgtctactgaagtgactaaaaagaatattttgacctaaccttagtattttttaagcaacctagaaatctttatattttggaacagagggaatagtcttctaggcatgcagaattcaaactttaaagagtaaatccataccgggatcatttccttgcattctctacttccacacttaaatcgagggagatcaaaaaacagatgctggataggtttatttacatatccacagggacatgcccagggcttggcatcattcttgcttctccgtcgtctgacaattcggcgccacagcccgggaataatctgtaccctgngagcagacaaagcatatttcatgggatcattatcagggtctagatctccctgcagaggcactcccttttcttccatc

SEQ ID NO: 63883 - DNA, 381 bp, Oryza sativa
  unsure (1)..(381): unsure at all n locations
agcttaccgganagcagctgtgccagatggttgttgagcgcgccgacattttcggaaatcgacatttcattgtcgttgagaatcaccagcatatcaggacggatatcgcccgcgtgattcatcgcttcaaacgccatgcctgcggtaatcgcgccatcgccaatgacacagacggtgcggcgatttttgccttctttttcggcagcaaccgcaataccaattccggcactgatggaggttgatgaatgcccgacgcttaatacgtcatattcgctttcgccgcgccacgggaacgggtgcagaccgcctttctgacggatggtgccgattatgtcgcggcgtccggtcaaaattttatgcggataagcctgatgccccaca

SEQ ID NO: 63884 - DNA, 252 bp, Oryza sativa
ccggaacttaagcgccgcagcatcaactgccatcggaatgaggtattttgtccaatagtctactatagcaacacgaaacatcacatcgatcgtgcgtgtcttatgtgtaatcgcggctttctcacaggcccctctttctcgggatattctctccgtcttctcctgatccattcatccctaactttcgtagtagctgagtacctcccatattagctggcgccgcccgaacgtgccgcctcgccggtgtttccg

SEQ ID NO: 63885 - DNA, 441 bp, Oryza sativa
agcttgtcagcagttgttttatcaagggggacaacagcacctgtctcgtccataaacttatcgcaggcagccaacactatttctgaagcacctttacaatgtgcacggcatcctcctccaggaagcttaagaacaacacacatcctcttttttgttgaattaaagggttccattttcacaatcttagtttcatcacgctttgccttaaaatttccaccaagtgacaatgcaaattccaacaaagctgtctctgttggggtacctagaatctgatatttcccatcttggtcaatcacaacctcaccaccagtattgttaaaaatagactccagaagggtttgacaacagtttctggaagctcagaacacaaatcagatgcattcttaggatgggtaacttcctttatgtttccacaaatgcaggccttgacaacagtcatat

SEQ ID NO: 63886 - DNA, 358 bp, Oryza sativa
acttgatctggaaaggtgaatttaattttacctccatatgaccataggtcatgggcaatgataccatgtgattggagatatgggcctgtgctatttgaattccaagggaaaaggcaacttccatggaaacgaaaaatagcagtagaggggcagccgccttttgatatgacgcctagttgattatgttcgcaaaaaaattatatggtataaataccctcaacgaatgttgtgaacgttaaacaagaccaaattgtcatttaggagaagccttagaagatcgggagcttccactttcaacaaaattgacatatgcgtgaagcttgacgtgcattgaggaacagacactatcacttttctt

SEQ ID NO: 63887 - DNA, 455 bp, Oryza sativa
agcttatccctaagtgaccgagtttaatgttgatgctgcttggcagcgtatctattaatcaggaatagttcgttagattccttttatctttggaaaagcgtgtatagtgtccgataaggactttatattttccttttttctttaggttaggtcctttcttgtccgacaaggacttgtatcaacccatgggtataaatatgtacacccggggtctatgtaatctatcttcacgatcaatgcaattcggcgcatcgccaccctttttacttctacttttgtttcttaagttccgacagaacttggcatcagtgatcgatctccggcgaaagggtaatgccaatgctccgtcagctacgcaatagtatcgttacgtatgcgtcgtctaagctgcatcagacattcgacctcttcgattgctctcggttggatgataacattgcctatctatttattat

SEQ ID NO: 63888 - DNA, 458 bp, Oryza sativa
  unsure (1)..(458): unsure at all n locations
ntcttgttcctatgattctaagggaaaaaattgacatccaaactaattaaactcatgtttttctatatcgcgtaggatcgagataaaatctagtagatcttggtcacttatttattcaattagtgcaggttagatatgtataagtagataattagtccaaatatattacaccatcttaaaatataacaaattcgaatattttttttgcggggaacaaatacgaacatttaatactcatttcagaatataacatgttaaatctcaatcaatcttctttctcatctcaacccaccacaaccattacaatttatatccacttgctttcctaattntcacatgaaatcttagaaatgcttatattttacaatggaaggagtgtcaaaaaagttcttaaaatttacatttaagatatttagcttaaaaaaataaactgatgccatcaccgtccatttgtttag

SEQ ID NO: 63889 - DNA, 459 bp, Oryza sativa
agctctgataagtcggaatataaggatgttcagttgcagcttaatgtcattgaaacttctgatccatggatgacctgaaaacgacatataaagattactaagaacaattcatcattcattggaatccatatggatagaatggatcttacttaaagcctgtgctgcagtcattcttctacgtggatccttgcaaagcaagcgcttaacaaaattcattgcttccacagtaagagaaagccaaggagcctcattataactggggtcagacttgagaacagaacggaatatgccagattcagtgcgtgcccaaaatggacgactgccacaaaggagaatatatgcaattacacctatactccagacatcagcttctgtgctatagcatctgtgcagaactttaggagcaacataataagcactttcaacaatatcagttagcctctcatctgcataaatatt

SEQ ID NO: 63890 - DNA, 458 bp, Oryza sativa
  unsure (1)..(458): unsure at all n locations
ntagcagatcaaagtttacttataaacatctaacaatagagccatatcaagagcaccctggtgcaaatttcagttctttgttgtaatcggaaacagcgataagatgagagtcacccgcattgaacagtctagtgtgatataaggccaagaaatcacatattaaggagtgaattaaggaggttctcaaaaatatatagaaaaaaagtccgattttttatggagtattgcagatcaaaggaacggtagcacaatggatggtccaagcgatcgatcagactgtatgggggcagaaccagtcaaccagatacacaatatcaagtagcaattagtcaaatcaataaaatcaacagcaacaattttaaggaaatttcctccaaaatattatgataaaccctttccgtgcacaagcaccctanactaaaaatccaaaaattttcacaaatcaagaatctgatcag

SEQ ID NO: 63891 - DNA, 447 bp, Oryza sativa
agctggctcctctgctgttgttcggcactttgactctttgttcctgtacagcgtgccgaagagagcgctgttgccaatgccaacgccaacgagggtgggcgacggcggcagtgacgacatgatgagaggccaccgctggtggaccacggcgcacggctggttgctcatggcgcgccgcggctcgccgagcacattcttatgggaccctttcaccggccgccgtgccgggctgccccccgaacacgacggcaccgttctcgtcggcgaaggcagacatcgctggaggtgcctcctgtcatgctgcagtcccatggacccgaccagctgcaccgtgctcgtcattgacctcgactacccggagctgtggtattgaccccccgcgacaacatgtgtggaagctacattacatcgtatcatatcgtatccctgccaccggaagccttattg

SEQ ID NO: 63892 - DNA, 454 bp, Oryza sativa
  unsure (1)..(454): unsure at all n locations
taacacaacacagcacacacacacatggatggatgcattatctctcttcttcagtattcagttttcactgaaagcagggagacagagaattcaatggaaatttttgcatgatcagaatgagagaaaaaaaaagagcaaagaatcattggagaggataggaatctttaattaaaggtgaaacgaaacagtgtcattgatgagggggacacgcacgccaggcagacagagagagagagagagagtgatagccattgcaccaggatcagcagtggtcatcaacgcacgaaggtggttggtttgatttggattggttttagggtttgggttggcaaaatgatgcaaaaagggttgtactgtcctgtgcagtttggtggcttgctttntagcgatggtaggcctgcacatagttgatgtgcatgatgatgatcatggtgatggcgatttcttctttgta

SEQ ID NO: 63893 - DNA, 442 bp, Oryza sativa
  unsure (1)..(442): unsure at all n locations
agcttaaggtatacgaaaacacaaagcgattcacttctacttaataaacagnttttatcaacggatcaatgtccgtgtaatcaaatcaaatgcgactcaacaatgatctgtagtatgtgtacctgtagcacaagcagagagttaggacaaggatgagcgcgacggccgggaagtcgagcgcgttgtagcccttggcgatgccgtcgacctggatcctccacgcgtccggctccgtgatcccgcacgtcgaggccaggtagtccgtgaagctcctcgccaccgccgcgttcgacagcacgtactccatcaggatgttggctcccccgaagaaccccaccagctcacctgatgagagcaacagatggagtcaattaaccgcgctcgattgaattgatccatcgatcgttgaagagtgcgttggattaattcaacaatgtccctg

SEQ ID NO: 63894 - DNA, 466 bp, Oryza sativa
  unsure (1)..(466): unsure at all n locations
acggacctataaaactcagcttacacactaaggtaagcaatttttttaccgggaagctatgcagtattaaccacaacacaaaaggcagtatgttatcagttctcaccctcctgtttcttttttgctaggtactcccctgacatcaatctagctgaattaagacatggcaactattgacaggtcaacaatcagcagaccatgggagcaggagcaactgtgccatggtggagatattttactatttgtcactcttacagatgacaattaagaatttaccactggactcacatatcatagacgcatgagggctcacatgtcatacactgcgagtgacaaatccttaattgccacatcttataagtggtgaaaagtcagattataaattgaacagagcaaacaaagcagaagaactcgactctagggtgactattgaaaggaagaaggngaggaagagtgangagaactg

SEQ ID NO: 63895 - DNA, 351 bp, Oryza sativa
  unsure (1)..(351): unsure at all n locations
agcttacatctttntctcaaccatatgatcggctgatccaatgctctaaacgggtatattgtgatctaacgtcgaactcaccatggtaaggacacaccctgcgaggaggtgagcgcggcctccccatgattgggcgtgattgtcgccgatccgcaatgcactgtttttttatacggccaaaacctatttttatatgttgttaaaccgtccgtctgcccgaaagtatgtgcgaaaaaatcactatttttttatatgggtggcatgcttgtacgcggtaatcgcatttttgcttgcaagtgcctatgctgtccgcacgcaaaaataaaatccccaaaaataaataaaaaatcg

SEQ ID NO: 63896 - DNA, 400 bp, Oryza sativa
  unsure (1)..(400): unsure at all n locations
tatcagccattaactntgttaggattttcaggcttattcccatgagtgaaataggcctgaagtcattgacagtctctggggagcttttctttggaacccgggttataaaagagctatttaggatctccaaatcaacacatccagcatagaaatgagctactagtctgtaataatcttgagctatgatgtgccaatactttttcatgaaatagccattaaaaccatctggtccaggtgctttgttagctggtaaaatggagatgagactgtcaatttcctaagtagaaaacatatcaaccagactactcaaatctgtatgtctgtcaaaaagagcctccagatcaaaagccatctgtggggaatggaaacacctatcctgttcttgagctgtgatgaaaaa

SEQ ID NO: 63897 - DNA, 466 bp, Oryza sativa
  unsure (1)..(466): unsure at all n locations
agctntngctccaaataatatattcctaattatttagtactgactacatggtccatgatttatgattttgtttctaaccatggaaatagggaaaaaaatagattagacttacacagtgtgctgtttcaaacatgaaaaactggatgcatatatcaccttttttttttttttgcttacatggtacaaaaattgtttatctcacgaaatattgcaaatgcatttcacagattacttaaggaagaacaattattcttaatgatagtgtccctttagtcacaattatgagatttaggctctggtaacacagagtaaattgcctaacacatgtgttgcttcactctgtttgtttttttaccaaacactttctttntaactgaggataatggatggattagggtgagaaggatgacaagataatagcagnttgggctgatgatcctgaatactggcactacaatgacatccg

SEQ ID NO: 63898 - DNA, 434 bp, Oryza sativa
  unsure (1)..(434): unsure at all n locations
tgctctaataccaattgaacgtgcatagatgtagcctagagggggggtgaataggctttcctgaaaatttctcaacaatcgcagcggttaaattgacagggccgggaaccttctagtgataaacaccggaacttcctatcagtgatgagcagctcggaacttccagagttcttgagccaggaacttccgggcaacagagataaacgaaaataatagaagaaaaataggtcctagctagggaaaatcaggcacagggttgcacaagatgaaaaacacaagataccagccaattcaaacacagatcatgcacaagagagacaaaggagatttntccagaagatcggatcacacggatcctactctccgttgaggtgcttaaagagccgggtctcaattaaccccttacctcacttatgcaaagatctcagaagaag

SEQ ID NO: 63899 - DNA, 467 bp, Oryza sativa
agcttctgttgtaagtgttatgttggctcataacctattttacagattgccataaatttccaaatgcaaattgaaaactgtaatacagatcctgagttagagaaaggataaggttattaagagaatgcccatgcctttccaaggttctcaattggatctgaaaaacgcagtgcttggtaaagacagcggcatcttaatctctggatatcaatcggaagaccattgttagcaagtcgtgaatctgatttcgggatgtgaactacctgtaacaaatatggttggtgtgagctcgcataaatggctttcacgtttcaaagaaggcaaaagtgccatttaaaaaaaaaacagatattttctctccggtcatcttttcagttggaaaatcagagttattcaacaaattttgtatctagttgagaatctcctgatgttatttatgccagcaggtgctcaatgcaataatgctg

SEQ ID NO: 63900 - DNA, 451 bp, Oryza sativa
  unsure (1)..(451): unsure at all n locations
ntgctgacactcaccttgaagcatcagcaggtgctgttcatggagtggtttgagacattcagtgggcaaggcagggaatgcccaaatctgatgagggctttccaggtctggtggagacgatcattcgtaagatccctaggtagcagcagctgagactgttcatcttcttgcaaattcctcacctgagtcaattgtgtgtaagcttacatgtaccatgtatgtttgatattgtcatatatatatagcttgtttgtcagattccctgacgaagcctgtatctgcaattctttagcactgctgagatgtaacaaaaggaaagaacaattctttagctgttgttccattggcctgagctgaatgcatttgcttttggtggttgataagttgatccatgattatgctccattgaatgtgagctgttagtagtagtacaggttcatttataatcgga

SEQ ID NO: 63901 - DNA, 459 bp, Oryza sativa
  unsure (1)..(459): unsure at all n locations
agcttcctctccgccgctcccatcttcgtttgtagcgcactcctangacgggcccctccccatcgctgtctagagccacccaaacatgcttgtcgccactcgccgccgatcaattcccactccccgctgcctgcagtgcactcctagccacgccccttcctcgctgctcccgctgctgaccagagctacccagtcacgccccgccgcccccactacaacaaaaggaatgtattaagacgcttggccgaagacgagattataatcgtcccaccctgaatataaaggcgctccctgaccggttcccttcccattgtgcctaccgccagccggagccgcacccgcgcgtcgctcaccttcaacaccaacagcacacaaagagagaaggggttaatatgacatgtgtgccctatatttctattatatatttttttgctgatggatttcatatcgcccacgtga

SEQ ID NO: 63902 - DNA, 449 bp, Oryza sativa
  unsure (1)..(449): unsure at all n locations
cttggctcggtgatccagagttcgatcccccttcccgctatgtatggtcctccttttatactctaaggggatacacatgtgctgcgagtgctacctanggagaagggaaaatattctctatattaactatatgtcttgtgccttagccaagaagctatctgcacatcagctactgcgcggggcccatcaaatcatgtagggcgcccttgtcatttgccattcaatggatgaggactttcgggttctcgttcgcaccagaaaacggaagcccggggtcagtttagagtggttggaccagctctgaccggtgtaagaggatgtgaagtccctcattattgtgatgggacaggacggagcacgccgcacgccgcctgacaaactgacagggcgagggaatacagctgccgtcccatcggtcattcgaccggtcatggacctgtcacagatcg

SEQ ID NO: 63903 - DNA, 280 bp, Oryza sativa
  unsure (1)..(280): unsure at all n locations
agcttatgtaacacaccagntctcttcttgtacttgataggcacataggaactgcgcggtcgcgaacatttgcattaccttattgtgaccgtcttcactacttcctccgcttcacaatgtaagactttctaacattgcccacatttatatacatgataatgcatctatatatatatactaacaaaatctagattcattagcatctatatgaatgtgggccatactagaaatggagggagtacttgctattgtgaaaaaacaaatgaataatgtgctttat

SEQ ID NO: 63904 - DNA, 446 bp, Oryza sativa
tagtagtacccagaaatcgagggagaggaggcaatggctggagagcttgtagcggaagcagttgaggaggggctcccggtataggaaggcgtatgcgcggcgtatcgccgcccgctgcgccgccgttcgccggcacaggatccgggtcagggcgcccttgtccgctctccatcctgcggatgcaacacgcgtcgtcaccatgcgtccatgtcgcactgtacgacaacagcaagaacaacacgaagagtcgaagaatccagagaggaagttgccatggattttttcatataatggaatatagttctggcctttactcaaatatccacagccaattattacatcaattcaataaaaacctcacatacgaataaacaaaaaaacacacaaatactaataaaaactcccacggtataataagatcataaaaattattgaattctaatttc

SEQ ID NO: 63905 - DNA, 435 bp, Oryza sativa
  unsure (1)..(435): unsure at all n locations
agcttacaccaaggttcttaaactggactgttcatttcacttctgcagnttattggttttattttctgccatcatattttacatttacatgtaggaatgaagtaatggctaccacttttttacttgtttctatatgtatgcagccatggctttctttactaacctagctgtggtatagatccaagtagctttatactcacatattgctgtcttccataaacctttccatttgccagccaatgtaatgcgatcctttttctctatcatgttttctatctgaagttntattgtgctccgtatttttccaatattgttattccttcaacaaaatcaactgatccacacattacttccaacacatacttcagttnttnttccagaaacaggatgtggctctttttacagtatttctggtgaagtcagaattcataaatc

SEQ ID NO: 63906 - DNA, 455 bp, Oryza sativa
  unsure (1)..(455): unsure at all n locations
tatcaaactgttctcataaatgtaatggttccactatcctcacaggtgggttttatttgaataatttgatgctggcatgctgctgcatatgtggctatgctcttttttaagttgttagcaatctctttattttcatgttgagcatgactagtagtatatgcgtcatgtggggcagtcctgccggctgccggtgtcaccaaaggggacctgatagtgctccagcacacatgccagatgtggaacagtagctctctcatcttctctttccttcatttctctccttatttcctctctttcttgaatcctgatctaaaggagatggagcagcgagggtaggagcagcactgggttaatcagtaggagaagtgacaaagaagatgatagcacggatgtcaattaatacttacagntgctattcctcatcgtgtgaaaagaaattaaagtgacaggtggat

SEQ ID NO: 63907 - DNA, 435 bp, Oryza sativa
  unsure (1)..(435): unsure at all n locations
agcttggcttttgtccaaataatgatgattctgcacaattgcggattgttgtgtcacatgtcatacaaaatgatagctctgaagagcaattaaaacaacaacattgtgggctgccactagcccactattcaggaaaattcaattgagcatctgtataacaaatgtagaaatcataacacgccatgattcaatgttctggtatataaccatggttaatcgaaatactcagtggagcttactactaagagagaacctacaagatactcatgtcagcctttgtactttcattaagcaagtttaccattcttaactatgatgcagcaggcacacacatatcaagtctagtgctantttatgctttcacaaaaagggagtggatggtatgtgacaatntaaggcagatgaactagtactctcaggattctcacttttttt

SEQ ID NO: 63908 - DNA, 454 bp, Oryza sativa
  unsure (1)..(454): unsure at all n locations
agcttgagtgtgtgcgaattttgagctgtcactacctagtagttaataggaacgcgcatattnttgtgtatgtttcttgttatctactaacaatggcagggatacgcaagataattggggatagctgcgctcaacatcgacatcttcgtcgagacatgaggagggatcaacatgaccattatgaggtaagtgatgatgttctangtaagatcaaatctgcactgccttatttcgagggagactatgatcctcgtgcttacattaattgggagctagcggttgatagtgaatttcaaaagcatgtcttgtcggagaaacaaaaggttatgtgtgcctctagtgttttaattaaacatgcttctaatgattggaaacatctctgtaggcataacaaaataccacaatcttggaaagacctgaaacgatatttcagaggatgttatgttcccatgta

SEQ ID NO: 63909 - DNA, 465 bp, Oryza sativa
  unsure (1)..(465): unsure at all n locations
cggaccttaaatactcagcttgcaacaggaatgctttgttgtggtttggtaganaatgatgatgctggtatggctagatccatgggtgggcttaaccgagaaattcaagacattctagcctacaaagaatataattcaattaatcgtttgtttcatcttgcttgtaaagctgaaaagggaagtacatggacgaagagctagcttcaggactaacatttctgcaggtcgtgctagctcttggacaccttccaacgctgctgcaccgtcaactcgagcagcagcaccatcgtcctcaagcaacaagctgcgttcctctacaacaaactctacaccatgcccgagtgaaccaacaagaggggttgctgctacaccttccaagagctcatcatcagtagcatcatcatgaaggacaagagatattcagtgcctacgctgcaagggctatggtcacatgcgcaaagactg

SEQ ID NO: 63910 - DNA, 454 bp, Oryza sativa
  unsure (1)..(454): unsure at all n locations
agcttctggggtgaactggttggtagtatggtatacgacatcgaaaatgccgatgtcatttaagctttttggttgaactggctagtactatggtttttaaacggttatcatagttatcacgtgcgttaaccttctcagtttttgaaaccacggtatacctcacggtaaccgcacgattaccacgattaccgcggtaaccgtcaaaccgtgtggtggcggtaatcccaccccaaacggtttggtaaaccctggtcgatacgcgcacgacatctatacgaaactgatgtgttattcttggtgatgtgttcagagcatgccggtgtggtggaggtggtactcgtgggcgtgcccggtgtcgtggacgctgtaccggctggtggcgtcgcagttcggcgacctgaaggagccgctccgcgacaccggcgtccncattgacgtcttccttagggagtac

SEQ ID NO: 63911 - DNA, 429 bp, Oryza sativa
  unsure (1)..(429): unsure at all n locations
nnttgctgctctngcccccaagtaaatggctgatcggcttttaaccttaataaaggtgtaaaaggttccaaccttccggacaaattagaaataaaccttctaacaaaatttatcttgccgatcatctcttgtagctctgtcttattttccgggggctgaatcttcttgatcgcattaacgctcctttgggttacctcaatccccctttcatgaacaagaaatcccaaaaactggccggccgacacaccaaaagcacattttgtcggattcatcttcaagccatattttctggttctctcgaaaactttccttaaatcggctatgtggtcctccacttctttagatttgacaaccacatcgtcaatataaacttcaaccaaccagccgattaaatcatgatatatataattcatggccctttgatatgtt

SEQ ID NO: 63912 - DNA, 462 bp, Oryza sativa
  unsure (1)..(462): unsure at all n locations
agcttctgaatagagccactcaactgcaattgtgttgtttatatttgtattctgtttcttcgacctcttttgaaatttaaactaacgctagacgaaccagtgatgaggcatgcctttttattattactccagtgttagttgcccaactggtacagtcctgtacctttcattctgacagatctagcacaacggggaaaaatcacaagacgtaaagtagaagctcataattacagcacactaagcatcggttaaatcaacatttaactaaccacccgaccaaagtctctgaacgcattccacaaaagcatcactaaaattatntggcttctttgtcagaaaaaacaaatttcagactttangagctaagctaacaggtcgattcccaattcaaattgatagtggtctcaaaagaaaaaaaatagtgtgctatgtcgtcagactgtgaaacataaaagatgctga

SEQ ID NO: 63913 - DNA, 449 bp, Oryza sativa
tcatttattttcccgcacgaatcaattctattagcttctgttgttgcagatgaaagtacagttggggatttgtgtccagaatctgcacatgggaagttaagtcaggatgaagaatcagaagttaaagaactcttcctgttaatttacaaaattcatcgcagcagaacatacagcattaagagaatgacttttgatttaaggtgttgtttcacaaggcttctaggtgctcttttaaggtacataaactgtcaaacttggagaagatttgattgcacatcacatgatggccaatactgtcgatatgaacagttcgtcaatcaaccacgtatgtaatttctggattcccgtagatattttcttgagtgtttaaagaaaggagtgaaatacttaaaaaagtatttatgaccaatctggtgagtcttctttttccaaataacatgatcagagct

SEQ ID NO: 63914 - DNA, 243 bp, Oryza sativa
agcttgacagcgggaccgtggtgtgcaagttccacttcctgccgcgttgaaacctattatgagaccgtggccgctcctatgttcggctgttgatttgattggtaacaaatgtcctttttgatcacaggagcataagctcgagctagatgctacggagtactctcccaagtgcgtagtgactgcgccacttgagaatatgactcatacaggaggaacagactctattgcggagcataatatata

SEQ ID NO: 63915 - DNA, 464 bp, Oryza sativa
cactatgaaactcagcttacttacgataacccatgcgcactagcgaaaggcttgttaatgaaagattgtattgcaccacaatcaaacaatattactgccggtgtagagttgacggcgaatgtgcccaatataacctctggggctgactgcgcctactctgcagatgcatgattgacacgggcctgagcgaacttgagtgtggcacgtcttggcttcaggcacatacggaccatgggtatatgctcgttacaattgatgcagagttcgggcttttctccatactttttgggctgttcttgctgaactgactgaactgactgagctggaatcattattggacttggaggatggttgaagctgtgctgatcactattactgtgactgccactgtttgtgatgctgccgaaattgaccgggtggtaaggacgaaggtgcctgataatcatggctgaacgtacaccctg

SEQ ID NO: 63916 - DNA, 443 bp, Oryza sativa
  unsure (1)..(443): unsure at all n locations
agctngaccctccgcggntgccttggttgttcgctatagctngcagaagttgattntgggtggccataattctggccagagtgtttaagtcgggtgtctgagtttcgtcattgctggttgttgcccgacgtcggcttgccatctgtgtaggttgatggagtaagtatcctaattntctaactagctcctatggctttatcccattaagggagttgtgtcgatatgaactttgtttcgcaagcatggtggaataaactcatttacaacacaacaacaatagatatcataaataacatcacagagtttcacaaatggtacataaatcatgatgcaattgactgcatacatacgcagtccaaataaggttcatccaaacgatacatcaaaccaatcatcaaactactcgtcaatctatgtaagggaagggggtgtctcgcatacta

SEQ ID NO: 63917 - DNA, 474 bp, Oryza sativa
aggacctatgaaactcagctttaattagggggagaattcgcatataatatttggttcagctgttgacgcagttggagcggcagtaggagccgcagtagttcatgcacttgtagtagtaggcctgcttgcagctcgtgcatgaggaggacgctgggtcagtgcatgcgccgctgcagccacccatcccaccggcgcacgacgagttgcagtactggtcacacttgctgcagatcatctgcgccgccgccggcgccggggaagaagacagcacgaccagcacgacgcacacggcggcgacgacggccaccttcacaggggaggccaccatcatatgggctttgtaactttctttggatcttggtcagaagaggaattaagatgtgagatgtgatagggaaaatttcaggcaatgacgctatttatagctaggcaactgatgctgaagcttgctaatatatgtacttgtatatatct

SEQ ID NO: 63918 - DNA, 332 bp, Oryza sativa
agctcgacgaaatcgcgatcaattgagtattctttattattgatattagcatcttgtatagatggaagatcctggatctgccatccgcaatcgatatcggaagtaataatcagcctctcgagattcggagcctgaattatccaatcctcaaagtcgtcatcagtaacctcaacattgctaagctccaacgagacaagcgacggggacatgcggatcatggcctccaatttcctctccccattctccgggaggccaacgtatacgaggctcaacaaggtgagattcgggaacccttcgaagccctccggcgcggtggggagggaagcacgctc

SEQ ID NO: 63919 - DNA, 403 bp, Oryza sativa
  unsure (1)..(403): unsure at all n locations
tgcattaaacacctaaattcccgtgacttgctgagtacgaaagttctcacccttgctctatataaatatatatagttcctccgctctgaagtgaagatgaagtgaagtgaagaatagggtttcgtcctggttcccagccgtcgcctgtggtgttgggtgttagtccgttggttccgctgctgctgctgttgttggtgtttcctcgtccgcgttgtcggttttattctcaggctgttctgagctgcaacctaagttaacataaataaggcctctatttattttaaggattgcaatgatccatatttgtcactgtgggtaccagcgctatgtcctgngactggtactgagatcgcggtttcgtaaaaagcggttcacgccgtttttcctatgacacgctcctgtc

SEQ ID NO: 63920 - DNA, 262 bp, Oryza sativa
  unsure (1)..(262): unsure at all n locations
atgacccgtgtcttttttcaaacccgacctcgcacctgcggcccagtctanaccattatgggggtcatcttatatgcggacgtgcgtgtcccattctcacataagccaaccattccatagcgtgccgaggatatgagaattcctcacgtctcaagttataagccacctagtgttgtctaattaatcagcgaagcatctaccttaatttatactagtgcgaccatgaatatattgtccactagttagggttttgtttattcta

SEQ ID NO: 63921 - DNA, 390 bp, Oryza sativa
tcgcagaaccctcattgatggcggcagtgcactcaatattctcttcgccaagaccttggatgatatgcagattcctcgctccgagctaaagccaagcaatgcgccttttcacggagtaattccaggattatccgcaactccactcggccagatcactcttccggtcactttcggcactcgggaaaacttccgcacggagaatatcagctttgaagttgccgatttcgagacagcataccatgccatactcggacgcccggcgttagccaagttcatggccgtcccgcactacacgtacatgatgatgaagatgcctggtccccgtggagtcctatccctacggagcgacatcaagcaagccgtcacatgcgacaaggagagttgcgacat

SEQ ID NO: 63922 - DNA, 409 bp, Oryza sativa
  unsure (1)..(409): unsure at all n locations
agcttataactaanagnccttttcttatatagtgagtactaagggcatgcccaatgcaggatgcaccccaccatccacacgagcaaaagtgaccaagcacctagctagagatatgcctcacacagtgcaagctatactcctatggaatttttatgtttcagcacctgtcagtctgtcacattttgcatttaaacccttggattattattatttgcatatacatccaatatttgcagtataccccctaaaaatcacaaagatatatatacatcaacccctcctcaatcctctcatcaccatctcccctcccaatctctccccgcgtctcctccctctccgactctctcttcgccggcgccgcctctcccctccctggccatctctccccggcgctcccctccccggcgcc

SEQ ID NO: 63923 - DNA, 443 bp, Oryza sativa
  unsure (1)..(443): unsure at all n locations
tgacacaactacagaaccaggtttgcaccaaataacttgtcttctcatctctatatcgnttgtgctgtataccctgaattttgggtgaacagacactacaggttttgatattatgaatgagcaaattttgaaattattgtgcgtgacccaatatttattgccgcctgcattttgtaggttcaattgtttgacagcacgaactatctgaaatcatttggagtacgagatgtatgggttgcagtgggttggagcagtgatgttattcctgctgcgaagcgaatgtctgacgttgcagtggtggttcccaagtcaggcagtagtctatgggctgatctatgggtgtgttatgaatnttccatgcataaccgcgaatgccctatggccacttgtgtgttgtcttgatgtcttgagctcagtctcttactggttaatctggtcttatg

SEQ ID NO: 63924 - DNA, 438 bp, Oryza sativa
agctttctctctaccaatccgggatatatttattcatcagcaccacaatattccacagcactaaatctctccccgccaccccgtacctctgataatggtctaaaatcatggaagccacttgcgacgacgttgctcaataaggaaaatttggcgtgaataatattcaacaccagtgcagcatcatcattacatacttacaggcgccgactaccgctttcgatatattgactcaattttccagcctggttaaaaatagcgaccagctcagtcgcaaatatagtgactaccctaactaagcaacaataaggaatacactatgactgttcaaacaagtaaaaatccgcaggtcgatattgctgaagataatgcattctttccttcagaatattcgcttagccaatataccaatcctgtctctgatcttgatggcgtggacta

SEQ ID NO: 63925 - DNA, 448 bp, Oryza sativa
  unsure (1)..(448): unsure at all n locations
tttcgagcgaaatgtgcagttattcagtcgttttcttatcgctcaccattattcttttagacattcatcctatgaaactgccgcacagttggtggtgggaactgaagttgcgtacagaagggttcaataattgagtcaaaaaaggaacgcggccgtcagattaaagccgcgggacaaagtccataatttccaagagttgttgaatttcgcagcttttttgaaagcctttgtatcatactaacaagtaaaaaaggtttaaataccaaaattaacctgtatttttgataagtcttaccattgtacgatttacacagtttctgctcctccttgttgatagtggaaagggtgcattgtgcacttgcgtaaacatttatgacgcgttgatgtccatggttcacatttccttgtaaggggatcgacttatntgcggcgaggcatcattcgtaac

SEQ ID NO: 63926 - DNA, 355 bp, Oryza sativa
agcttctactactagctagctatgtattatcatgcaagaggcagcctgatgactctgatgtatgttaacaactgcaagcaagaggggttatttcactagtcttgtcttcacatgttaactgcatgagtagctgcttagtttggagaggcagtgtcctaatccagcaaagggcagggcagggtcagaccacaaatgctgcctcatggtgagtgggaacattagctttctcactggaatatgatgccattgcttgaaacaactgtgctcactgtagtgtaacaaaatctttgtcctgctatctttgataatggtacccgtgtttatcggaaaaatgcttactgtaccatcctaatga

SEQ ID NO: 63927 - DNA, 396 bp, Oryza sativa
  unsure (1)..(396): unsure at all n locations
agcttaatgtaatgtcaagcagcctatgcatatatatagcttttgcaatgataaccatatatggacttggtgggtaataatatagtcacggaggagtattgctctaaaagaactttttttaattttcgcaaagacaaaatcccaagtatcatgacagttggacaagaatttcttttgtcataaccatatcacgtatatcaattacttagattagcaaggttccccatgatagatgtgtgttcacaagtaacaagtgttagcaaagaataaaaggtatatatgatcaatcataggacaattctattcgttgagagttaatgttttcaattnttattcggaatcaaactaaattgtattcaagttttctgccaagtttaactcacgaacaggggagga

SEQ ID NO: 63928 - DNA, 434 bp, Oryza sativa
tgatgaaaggatcttcacgttcaaacacaaatacggctgttcaacaagctttgattgctcactggcaagggattgtaaagagccttggaaatttcttgaacatgctgaaattgaacaatgttagtaaaacgttaattgttgaaacatagttttgtttttttacatcattgcaataaattcttggggcatttgcaaatttgccactggtttttataatattgcaagatgccactcgaatgatagttctagtggtatttttcaattttctagtgacagtcttgcaataacgattcagagtactggtaaattcttaattgcccctaaattctttgagtggttgcgcaaacaccagacatatgaatatgcatgcttaatactatatatcagccagcacttgtgatcaggccgaatgtgataaaaccatatataacaca

SEQ ID NO: 63929 - DNA, 446 bp, Oryza sativa
agcttgtgagaaaacatgattattctcataatctgcgcgaaccagaagaatttgtctacgggatcatcttagaatctcctacatttgatcatgatcgatctctcctctcaaaacccatttcatgtacgatgagctcattcaggggcggagccacgttgctccttccttgtgcacatgagtatgggacacaggaggtccaaaatttactacaaaacatgttgctcattgcacatcaattttaaatgttaattagagtattaactgtgtgtaatagatatgcatggcaatttctatatatgtataaaatagcgtaccatgaattatgagttcttgggcttggatactctaattgattcagtaagtggtattttcctttgtgttgatgagtcatagttagtagataaatgttgcattgtgagcattattatgttctccttgatacatgt

SEQ ID NO: 63930 - DNA, 444 bp, Oryza sativa
  unsure (1)..(444): unsure at all n locations
ntgatttcatccattcaacatcagaagaaacgaactctatcttctccaataacaaattctgcaaatgtctaatgccatcttcaagttcaagtgctaggtcatttgcttcaagcaggcttgccgcaaatttcttttccattacctcataagtttggtctttcacgtccagcagcatcttcaaactacttatctcagttagtaatctctccttttcagaaaggaacaaagcttcattttctttgaaattttgtatttgaagttttgctttttcatttgcttcaactagtgcattgacagtagtgtcagcatcacttatagttgcctgtgcctcttcaaacttggatataagagtagaagcctcgaatgatttttgaatcgcaagactttttgcctctgaaacctcaagttcaagtgcctgaaagattaatgatgttataattctag

SEQ ID NO: 63931 - DNA, 350 bp, Oryza sativa
  unsure (1)..(350): unsure at all n locations
agctntcatgttgtgtaacgatccgatggacggctttgattgttcacgcgccggatgaagcgccgatgaggagagaggggctaaaccctagctcccaaatggtctcccaatccctttctctccggcgacgagcaagcagaacgacagcgaaggtggcgacagcgcgtctgcgagctggtgcgcgcgtgcattgactaccgccgagcggatactgcttcgccggctgggggaggggggcacctaagggcgctcccaagccatgccgcgtcatggtagctcggcgaggcatgcgctcaaaccgcgagccgcctagtggcccggacctcttcagctgtcggagagaggaacgc

SEQ ID NO: 63932 - DNA, 451 bp, Oryza sativa
ggtcctcgtgcttcacatcgtgaagcggtcaagcgaataatgaggtatttgaattatacacttgagtttgcaatttggtattctactccatcttctatatgcttgagtggatattccgatgctgattttgctggttgtagaactgataggaaaagtgctagtggaacatgtcattttcttggtacatcattgattgcatggtcttctaggaaacagtctagtgttgctcaatgaactgttgaatctgaatatgttgctgctgctaattgttgttcacagattctttggcttatattaactctgaaagattatggtcttacttttgagaaagtgcctctcttttgtgataatactactgctataaacattgctaagaatcctgtacaaagcatattgatattcgctttcacttcttgagggatcatgttgagaacggtgatgttgaattgac

SEQ ID NO: 63933 - DNA, 220 bp, Oryza sativa
  unsure (1)..(220): unsure at all n locations
agcttgacagccggaccacggtgtggaatttcatcctactgtcgctangaaaccaaatatgagaccgtggccgtcccaacgtcgagctatggatttgagtggacacctataccctctgtcatcacaagagcgtaggctcgagctagatgctacggagaaatctcccaagtacagcatgtctccgccacttgagaaaacgactcatacaggaggaactaac

SEQ ID NO: 63934 - DNA, 410 bp, Oryza sativa
  unsure (1)..(410): unsure at all n locations
actctatagaacactcacgcttcacanaagataagccatgcgcactagcggaaggctcgtgaatgaaggaatgatttgcacctcaatcaaactatattactgccggtgtctatttgacggcgaatgtgctctttataacctctggggctgactgcgcctactctgcatatgcatgatggacacgggcctgaacgaacttgattgtggcacgtcttggcttcaggcacatacggaccatgggtctgtgctcgttacaattgaatcacagctcgggcttttctccaaaatttttgggctgtccttgtctgactaactgaactgactgagctggaatcattattgaacttggaggatggttgaagctgcgctgatcactataagtgtgaatgccactgttggtgatgctgttc

SEQ ID NO: 63935 - DNA, 427 bp, Oryza sativa
  unsure (1)..(427): unsure at all n locations
agcttagacagcagagaaagcctacacatctgtactgaagacaacagagaaagcgtacacatatatatatagacatgcatttcttttttcccttcttacaaaattttctccaaaattgcttatctgatctacaatccgattacaccattgtgttcgttacaattaaatctttacaacaagatcttacatgattatattacgacgaagaaatatntatgtttgtaaattacttttattatatacgtaagttattttcatcgtatatataaattatttttagattttactaagctacttcttatacattcataatgatttaaattaattaattgtattattggttttagtcaattctataatttgtggactcgtaaattaatttttcgatagaccatattttcttccctacaacgaatttacttctaat

SEQ ID NO: 63936 - DNA, 457 bp, Oryza sativa
ggtccgacattctaatcttggcaactgcatgcatcgaagtttatcattatattagtatatatcagcatcataaatatgtgaagttggctagtacatagtatatagacttacatcctccgcgttagtcctgtaccgtccattaaccctaaggaattcgcacgcataatacccgcaaaggaccgttcctcgcggttgctagtgacacttcaggacatatcatagaaaaaaatagttaaaatttgcaattagtaaaacaattggaatatattaagtgagtggagtattaccgggcaataggtacgtactaacaccttctcccgtgttcgggactggttttcacccttgaacttgaagtattggtatgcactgtatggatgtcgttccgtttctcagtaacgatgatatttatgtatcaataattcatattccaatgctaaagttataatcacttactact

SEQ ID NO: 63937 - DNA, 451 bp, Oryza sativa
  unsure (1)..(451): unsure at all n locations
gcttaacatgcaaagatgcncatnatttttcttatttcactaattaacaagataccgcatgatcttccactaactatcattacatttaaacatcatacaaacatgatgtattatcctataatgtgtatacgtcttataatttaagagctttctatatacaagcataatacaagcatgttaaattatcatcccacataagttaaataatatttcaatatatatctttattatggcttatgatatcctatatgcttatatagtttatcctcacttagttagtgcttaaatgattaatttatgggctaacatatctttctccttcttttttctctaatgaaggcatatcacatcaattgtttttagcctttagatgagtaatctacgggccaaactatcttcctactcttctcaccttacttgtgagttggaatcaccattctatatactaatt

SEQ ID NO: 63938 - DNA, 449 bp, Oryza sativa
  unsure (1)..(449): unsure at all n locations
ctttaatgtactntggtatgtttctttaatcctgaataggaagagtttcaatatgctctcattgtataagactatttttttcttatatggaagaacgattgtttgggttcatcttgcatgacctagctgagatatgcaattaccagatttgctcagcagtcaacatgagttcgctcaatgttaacgtggcaacacgcaattggttccatgaagctcattcacaataaggattcagaaagcacttgaagtttttttttactttcttacttttttacaacaaaccaaactaagaacagttgtcctttgccttttttgtttgaaaccacccatatgggcagtatggcaaatactttacagtaagtcttccaggagttggtttgcataatctcttagaaaacatagccccctccttgcttgagctgtttctttttttcatttggcaagcttat

SEQ ID NO: 63939 - DNA, 398 bp, Oryza sativa
agcttgatctacaaaaccaagttctcattaccaactaagaaaaccaaagcaagaatttgaatagattaaactcattcttttctctcttagataagttatccttcactcttataaaggtttttaaccatgcgacatacatgcgcatgctttctccagtttttcccattatgtttttctggagatttaaaaaggcatagacatcacgcggtgagtaccaaaaggactgttaaaaaactttatgcttggcacatgaaggccgggctaaaatacacttattgtgtctatcactgaaccttccatatatggagttgcactacataaatagaagagggctgctcacttgaacatttgaggttgaaagagatggttcccattatcctcgagttcttagtcaaact

SEQ ID NO: 63940 - DNA, 430 bp, Oryza sativa
cgctgcactgatcttcggccagttcggtttagcgactctattttcagctgacatcagctggtgatgggtctgactattggcggcttatatggaggaacgatcgatcagggctctgccctgtgtgtgacctagcctgtgatatccacaaactagatccgctgatcccttatcttgaggaatacctatgagtaccgtgtatgacgctttaggatgcatgaatggtacacatctcactgagttgtatggcactggtcggccatttttacaataatacactgttacaacatagccctctgacaacacatgactgttgactttttcgtctgtgccgcccatatgggcatttgtctgatacctgaacgaacgtgtttcagacccggttcgcttgtctgtagaaaacaagtcgcttcttgcttggatgctcatttta

SEQ ID NO: 63941 - DNA, 412 bp, Oryza sativa
agcttggtgagttataatatagctattcttggcagggcaaaaattgtgtttgaatatttagaaaaatagtttaagttaactattaaaataacctatatttgtcaaagtttagcttcgatttgaattgacactacacattcttataattaccgaatattggtaaggtaatctagaagacaaacccaatcaaccatccataatcgattagccatgacgcacgcgcggcacgggccaccatcgagtattcgagtgatgccacaacggcaaacagaatggatcggcaggaacaatcaaccgaaagtgagtcaatcatgtcatatcaagggaagctggcaggaatccatccgataaaatttctacggccaggatcaaaagttgagaaaggacgtggtgacttaaaccgtgctgatga

SEQ ID NO: 63942 - DNA, 451 bp, Oryza sativa
  unsure (1)..(451): unsure at all n locations
nntacagtgaagaaatcctggacccatcatagtcataggtatgaagtgcagctggtttctttgttttccttgcatgcatgtccagtaattgttctgtttgctgctcctagattctgcaagttatatatatacgtatgtatatactaatgcatctggggataaagcgagcatacattttctgttggacactatacatgaatgtaggtgacatagaatgatttatatatccactgtccaacaagaaaagtgagttggtttatatatctactttccaagatgatagcaaaaatgcaattagagttttgcaaactttgtaatcagagaaacaaccaatcacatcctgtgtgattaccctttggtttgctttgcttggagtgtaattanggatatatgtggattatggatacccttgcagtataggcaacaaactcaatgtatacactatgtggat

SEQ ID NO: 63943 - DNA, 423 bp, Oryza sativa
  unsure (1)..(423): unsure at all n locations
agcttgngatgaccagatataattccacatagcctcatctctatcgcatgttgttgttaaacataccatgcgacgtccgcctccattgctttgtaggtatttgccgcgttggacagggaccgatgtcatcgagatccactcttaatcctgagagtatgaaggcatggaagggggcctccaccaccacctgcctaacgagattgaggtggtggcctatgggctagatccccctccccccttccaagcagcaagctcgtggcatgctatccgatcaaaggggagcaaggcggtggccccttgttcggagagtaaggaagtgaccgcacatcaattggagggtagagagacngcacactgtgcatgatgagagatgganggaaaataccaaccgtggtactatcattatcaaattatattctaaat

SEQ ID NO: 63944 - DNA, 368 bp, Oryza sativa
tgttcattcacatcgaacatcaaaattctatggttcactttaacagctcagaaagttctatagcatcaaagtctctcgtggggctctgagtctatctaattttcatggttagcgtgtgagcctgtagccaatacaaattaaattgtaccatgtattctagtaatcgttattgttacaagtacgagccaaacaacatgtattgtgttgaacaatggtggtgttgtgcaaaatgctagctattcatatcgttacccttcgtgcacttctgcggttgtcctacctccaatcctctctcaccaagattgaatatcatcctcctcgctatcatcgaatgtgcgtttcccgttgatgtcgtcctccctaccata

SEQ ID NO: 63945 - DNA, 451 bp, Oryza sativa
  unsure (1)..(451): unsure at all n locations
agcttcttccaagcatacggctttctatatgtatatgacgatctctagacagatggatcttatatgaatcgtatgatgaagtaccacatgagtggatatatacgaaaggaatccaaatctgccgaatcgctcatgttatgatcttctacatcctaagtctccgcgttccgtcatctggcttatgttcttcatgtagcattcagatcgaatgactctatgaaattacgtcgatacttctacatattatgggtaacgtaggagacatccctattttcccccgggggtcttaattaccactgcttagctctcaattcgcctctgaccatcaaattaaatgtgaataacccgtcctcctctctntgaaacaaggggcgctctcngttctgtgcgtgcttcaaacaatattgtcttcttcatattaccatatctctagagtcaataattttctatg

SEQ ID NO: 63946 - DNA, 446 bp, Oryza sativa
  unsure (1)..(446): unsure at all n locations
tgcaagctgtagtactccactccactggccaaacctcggttntgcttgtgaatcgcagcaggctagcatgtagcagcacctgaagaaaaatatgttcagatttagcacaaactgtatgtgtcaacattttgtttgattgatacaagcacactatagctaggggcgcgcctttggcactccgcctggacgctatcatgtgcagatagcatgaggaagtgtccatatatcaaaatacacacacgtatcttgatatttagaggtctctaatatcagtatgtacatatatatatgcctcttttattaagaggtttcatgattacattgttatgtcttaaataattcatgttatctttcatgtatcacttttgtttggggactaaagaatggtgtctactttccttgaaattgtttgttctattcaacatcaagtgcttccttcgagtttt

SEQ ID NO: 63947 - DNA, 435 bp, Oryza sativa
  unsure (1)..(435): unsure at all n locations
tcaatgacttcattaataattggatcatgcaactcctccatatacttccaatcaacccactgcatgagaatcgcccccttcttaggtgcaatcactgtctcatagtagtcctgctgaaaaaggttccaaaaccgaggatcagtggacaactgttgatatttgtagggatctttcttacgctctttctccacttcagtccacttgcggttccaccttgtgactctccgatgataattaggatctctagagggagcagtgacaaagaaaggcccttcttcatgagcggcttgctgagcggcaatgtcctcttctaactgaatctcttcctcaaaggatggagcatgagaaccactatcttgccccagatcagaagaagccgnggggttgcctcgcctcactttgctagttggagcactttgagccttctcactgact

SEQ ID NO: 63948 - DNA, 425 bp, Oryza sativa
  unsure (1)..(425): unsure at all n locations
agcttaacagctcacaaccagctgttgagtccactagttggtctattcgagggagagggaagtgatccttgtggcacgccttgttgaggtcggtgaagccgacgcacatcctccacttcccgttggccttccgcaccatgactgggttggctagccactctggatggagtacctctttgatgaaactaactntgagaagcttatcgagctcttctcgtatggcatgtttccgatctggtgcaaatctccgcagtttttgttttactggcttggcgtcgggtcgcaccataagtttgtgctcaatcacctccttggggacccccggcatgtcggacggttgccaagcatatatgtctgcattgtcacggaggaaggtgatgagcgcaagtttctatntctcgttcagtgatgccacgatcctgact

SEQ ID NO: 63949 - DNA, 403 bp, Oryza sativa
  unsure (1)..(403): unsure at all n locations
agcttaagtatatggaatgcccgtgtcaccccttctagttgtattagccatgtactagaagtgcagcaaggggattctccaaactaaccctgctnggcactgggaggtattgcattttcaaatattgcatattggaaacaaacagatattgcatttttgtgatattgagccctcctttggatgatacctacggttcacgtcagcacagccaatgtggccagaggatgaagtatcacgtggggtacgggctctggggaacaaggttggtgatccaaaaacatattattgggcttaaccggaggagttgggtcctgtcatcaacacatgaataataacaatgaatatatgttagctatgacatgatgtgattatacacaagccacatgcatacttagcatacaaa

SEQ ID NO: 63950 - DNA, 358 bp, Oryza sativa
ccccctctgcagaggttaacatactgttcgaacagccgtgcccacggtcatgggtggatgtgaggtgattcctaccgtagttttgtttgactactgccttgtgaaattgctgttgtgaaaaggggatcgatgtttggataatctgcagatgatgggatcagctaggcccgggtggccgcttgaaagttgttggcccgggtggccgtttgaaagttgtggccgggtgccaatcttgaacaattctaaagactggatcattgcacatactccgaccggacgagacgcactgtctcattcgtgtcgtttgagaagcactcacttcaattgttctcagaaaagagttcaaatataatccatt

SEQ ID NO: 63951 - DNA, 417 bp, Oryza sativa
tgataccacttgttagggaacgataggcgaacaaacgatgaataacaatatatcaatcacagaagacacgagatttaatgtggaaaaccctctcagaacaggagagaaaaaaccacaggcgccagccagcaaaattatcttcactatatgtgaggtgaggttatatcgccgcacggcggcttacaacaggtatatatatatatgtggtggaaccctaaaagggatgatgatccactccgctacggcagaagctggcctttattaagtacaaatgaatatggatcgcaactaacattcttcttctttcccttgcgacagcgtccatgcccgtgcctgtgtccccctccccttcccttacagagtcgtcgggacgcgtggcgcgtcagatcgacggcgatgtccctctccgtctttttt

SEQ ID NO: 63952 - DNA, 436 bp, Oryza sativa
agcttcttcctttttatgaagaaaagtatccaagttcatcctgacaactagtagtagggtgtatcaaaatgataaaaataagagaagacgataccatataaaggatttaagttagtaaaggcaattttgcttctgttgaatattaccttggttccacgaatagggattcagatgtacaccctgtccatctgcattaacatgaaaaggtcccacttcttccgcaacgccatatgcaattgatgagcaacctggccctggaagattaaatgcagtaaaatcagtagtgtgctctcagaactcaaggatcgtagcactgcaaccaaatgaatttcatggagaaactaatgcataatatttcagttaaggttcttaattatcatttatcaataccacaagaaaaaaaaatcagattcaccgacaacatctttgctcatgt

SEQ ID NO: 63953 - DNA, 459 bp, Oryza sativa
ggcgtcgaacagagagtttcagcggtttagtagtagaaatttcgcacaaatttcatatagaagtagaacagagcaatttctgtgctgccgaacaggagcagtagaacagagattaatttactattaccagcaagcagtagaacagaatgaatgaaaaacaatttcagtgttcctcctgtgatttacatatacactcaaaaacgagaaacatggtgtactcgccgagacgctagaatttgctcggcgagtcaaaatacaacaatatgctactacgaggtcccaagctgttgccaacaatatccaacacaattacaagtttacaactggattaacagcatgaccaaagggtaaacaataatcactaagctaagcctacagcaacacaatcaccaagaagaaaagaaaattaacgtggttactatctatcattctgtctccaagatcctatactccatacca

SEQ ID NO: 63954 - DNA, 388 bp, Oryza sativa
  unsure (1)..(388): unsure at all n locations
agcttgggggaaccctcggccgcaagctctggcccctccaaaacggngccgatttctctgcaaaatcacgcacgaatgaaacgtcctctctgtccgggaaggggaatcttgtgcccgatcgcctgtgatgatctgatcaatcatctcccgaggtgtatacgctaccatacttccctggttaatctactcgtctcgctgatcgtcagacacacaatcatgcgttgattcgttgcacagtttagctttttacagagggtactgcctacctggtgaaggttctcgcatgattgccaagaatattctttgcttggacaagcaagaattaatggctagctagtaattggctattctgaaattttctgacccagcatttgtagatacacgatgt

SEQ ID NO: 63955 - DNA, 457 bp, Oryza sativa
  unsure (1)..(457): unsure at all n locations
tgccccgtgacannacgaatttgggagaataatgtcaaataagctagggtagaagtggtattttgggctttntgttaacaccgtgaaatattctgttcttaacagaagagggtcaaagtgtagcttcggttttaaaaaagagagtcaaataagcaaagtgacaaaaacagagttaaattggtagttagacttcaaaataagatcaaatgtgcaattgtccctaatactaatggctagtacatcagtatcacacgtcaggctgacgcgatcagtacacgcgacctactccaaaccggcgattgcatcattagcatttcggtgatgacagtacagattntatctatatttcgtaacacgttttttgaactgctaanaattgattaaaaaactgctgaaagattatattacacgaaattttctataaaaatattttaaatatcagataatatatttttaa

SEQ ID NO: 63956 - DNA, 465 bp, Oryza sativa
agcttatcggggtagtggatggtgcatggatgttcaataggctagcagaagttgctgaaactgtatacatgcatgtgcaatgagatatgaacattatgatgtgtatggactacaatctggatccactcagcagatatgaatagatgaaacagggtaataacagaatatggagtatagaaaatgtctatattacagaaatagttataggactatcgagaggtttagacaggtggataactatggtgcttatgttcttatgtcaagtcttgtcttccaagtgttctgtgacctcatgcagatctacaaatgcatattctcacaacattaaaatttggtacaagtaatcttttaaaattattccttcacaaattctttggaaaatgttaagaacactgctttgtattatctggatgatgtagcatttcacaatttagtctatctcgtattctaatatatcttactgga

SEQ ID NO: 63957 - DNA, 442 bp, Oryza sativa
tcttcgctgcacctcgttgcccgcgtgccctcttctgtctcacggagggttgactaccactagcctcctccttctggttcccctccacatccctttccacgtgcccctgctggttcccctccgcatccctctccacgtttccttcctcgttcaaggactggcgtggatcctcgttcccctcttcttcattccagtactggctgcttcccttcgcgattgtatcgtacaatatctgttcctcatcgcggtcagccatctgttgatacaagaaacatgtcgcgaccgggaaaattgcctattcccgaatgctagtgtattaatccccgtcccaggaaaagccggggtacaccatacaaacatgatataaaagacacatctttattacatcgatgatagttacaatattacaaaaggactttaagcctgacaatctaaaataaca

SEQ ID NO: 63958 - DNA, 420 bp, Oryza sativa
  unsure (1)..(420): unsure at all n locations
agcttgaacagaataaggtagtgtacaattttcttcagcctcaatggacagaanatcagagacagatgcattctggttntgagcaaaagaacaaagccttgacatagtatgaaaaagaggaggttgatcagcccatacataataccaaatggagcaggtatttccacttttcaaatgacaccttgcaatacctctaaagacatccattaatttgcaaatgtctctccaccagaatgtgcccttcaagtttgtcagatgagggacatagttaccataataggaggaccaaacaagattgacccagggcaaatcattctttttggaaaacttgtccaaaaacttgatgagcaaagcttgattntggataaaaaggtttagcactcccaagccaccttttctcttatgcttacaaactttatg

SEQ ID NO: 63959 - DNA, 430 bp, Oryza sativa
  unsure (1)..(430): unsure at all n locations
ntgacggttgccacgtgcaatataattaccccgtgttgacgccacacggtcctctgttattccaattcgtagaattactcttgtgttatctctgcctcgccgctgatgaactatatatctaggcaacagctagcatgggcacaaataagagacagccaacctgcaaggcaccaataatgtgttgtgcaggctgtgagctattctggtttgaaaattatttgaaccagctacctaatttgatgctgcatattattcttttaggtcggtgtctaaattatgactgacaactgtttaaattggacattgaaacaaaattattctattaggaaagtttcagattctttggacgtcaagaatctgctggggccacaaatttgatcaactagcagcctactccctccattataaaaaaaataaaaaagatcaatct

SEQ ID NO: 63960 - DNA, 449 bp, Oryza sativa
  unsure (1)..(449): unsure at all n locations
cgngagctngagagcttgtgagctgcggacgactgcgaccgagctccgtgcggcatcgacaacagcggatatgcggacatggctgagctctgtgatgtcgacaaaagtggccgagctccgcggcgtcgacgacggtggctctgtggatgcggtggagctcggcgcgacgtcgacgcggatgtggttgcaaaaccggagtggaggaagatgtagatctaggttttcatcttgaattttgtgacatttcagtccatgtaccatgatgtttcatcaggtagattagaaatgttacggtgggtattcgatggtgcttcattctatctcttgatgtatttggatttgtttcatgtttcgatacaatcgaaaccgttgtttcacatgttggagtacaaagtttcattgtgtgatttgattgtgtttcactatattcagaactggaaacattttat

SEQ ID NO: 63961 - DNA, 446 bp, Oryza sativa
agcttgccatgccttgcaaaggggagctatttcatttgcggtgcgcagctcacatgcttaatcttattgttcaagatggattgagtactatcagtggtgccatatctaggataagggaaagtgtaaagtatataaaagcatcagaagcatgtgagcaaaaatttgaagaaatcattgcacaagtcggaattgctgaagagaagcgtccttcacttgatgtgtccactcgttggaattccacctatttgatgctttcctcatacttattattcaggagggcttttgattcattggatcggtttgatccacactctcaagatgctccatctattttttgattgggacaatgcagaaattctttgcaaacatcttaagatctcctatgatgcacctggtgtgggttccgggacatcatataccactggttctcgctacattcatgaatt

SEQ ID NO: 63962 - DNA, 440 bp, Oryza sativa
  unsure (1)..(440): unsure at all n locations
tatttagaagagtccaagttcaaggaggatgcggtatgacagtttatctattaattaggaatagtttgttagtttccttttatctttaggaaagtatgtttagtgtccgataaggacttgtatcaactcatgggtataaatatgtacacccggggtctatgtaatctatcaatctattgatcaatacaactactctcggcgcatcgccaccctctttaccgaggtttttacttgtcttccggtggaacttggcacctgacgcggngctgcatcggcttttgatctcctgcgaaggggtaagtcctatgttccgtcgggccctggtgaatctgtcatctacgtcggcgtcgttcaaggctgcatcgcttcgatctcttggattgctctggtttggttgattgatntgcttacctaatatctcgattctatctctaattgca

SEQ ID NO: 63963 - DNA, 300 bp, Oryza sativa
cgcttgcgatatgcggatttattgttcatttacatctaccaggccagtctacagatggcaccgcatgaaactttataccgccggaagtgtcacacacctctgttttgggatcagacaggcgaacgtcaactgatcggaacagaggtattatcggaagcctaagagaaagttagaatcatcatggaaatattgatgattgctcacgctttacagaagagcttcgcggataaccgtcgaagggagctcacttttgaggcaggagagtacgtgtatctacgcgtcactccgctaccgggagta

SEQ ID NO: 63964 - DNA, 450 bp, Oryza sativa
  unsure (1)..(450): unsure at all n locations
agcttttgcttccctttactaatttattaactatcattatgtttctaacgaattctagtatgaggtgttatagaaaccacttagtctgttcagtaagatataactttaagatataacttggtccacttgatttgtgcaatatctaattttgtggttatgtttggatgaaaattttgaagcagacatataatggatgacagtgatggggagtatcatgattccagcagtgatgcaagtagtgattatgaacttggaagagtaaaacatctaactcaggaaggcttctcaagtgatgatggtgaatcangagatttgcatggccgcttgctctttcaataccttgagtttgattctccattttgtcgtgaaccattgactgatcaggcaagagttaactaagacggctctataatattctattgcatataaatattctgaccttatttgttc

SEQ ID NO: 63965 - DNA, 445 bp, Oryza sativa
  unsure (1)..(445): unsure at all n locations
tgtntgtggaaaactgatcaaagccaatgcatcagttctgttcaaccttattgaattgttgagtgtaaaagttcctacagatacccccagcataagccacattaatgcttataaccttcaaatcagacctgtctttngtttatttcctgttaccctttatgtccatggtacttcttcttatttcctttaaaccatatagcctccagctgacaagcaaatgccatgacaacaaggacaatattgttcaatacaatcccaattcccaaagatcactgagataaacaccctctcgcgtatcacagccatatttcatcctcacatgagatggaattttcaaagttcaatatgtaagccacagaataatgagaataatttcacttttggcacttatctgagtaccaaatgctttaactattgattccacttcaatcaaagaatgtaaaaa

SEQ ID NO: 63966 - DNA, 381 bp, Oryza sativa
  unsure (1)..(381): unsure at all n locations
agcttatgccatattcaatccaatcgtggatnttatgcctgtcatacctgtactctnttttctattagcctttgattggcaagctgctgtaagttttcgatgaaatctttactactctgtctgccaaattgaatcatgtattcattctaaaaaaattcgaaaaatggataagagccgagaagtcttatattatgaaccttcgattctaaaattcaaattcttctacattgaatgtatagctgcagcaataaatttggatcaagccttctactccctgcatctacgttgagcaggtatctttaagtaaccccacaatacctaacctaatttattgataagagtgttaatataaatcaattcttgcaatctctttcaaaaatt

SEQ ID NO: 63967 - DNA, 430 bp, Oryza sativa
  unsure (1)..(430): unsure at all n locations
tcgggcaatttggcgaagaaaaaactagtcggataaataacagaattaaaacaaatacaggttaaactaagtatattatgcataacaagcgtttcgttcttgtagagtagataattggattttgattgagttatttttctaagggaaaaaggaaaaggaggattcaaaatccttttttcttcggactttcccaaacacaaaatacctccttgtattcgcactctcaaatgagagtggaagaaattcgactttcatataatatcttaatagaattccatgtaatgatcaatgcattttttggattctatattattcgcatgtctagaatcctaccaagagaataccccccattnttatgtaattgaagtatgattgacgaataagaaataaacataatactggttattagtgtcgcataaaacccgaaatg

SEQ ID NO: 63968 - DNA, 463 bp, Oryza sativa
  unsure (1)..(463): unsure at all n locations
agcttgcangttaaacaagtaaaacaatcccacatatcatatattttgacaaactagcatgttaaattgggaaaaaaaccaccttccaacatttgtgtattatttatacaaaggatttctcaaaaataaagtgagccatgtgttgcaatacacacactttatttgttgcgtacaaatcaagatcccctttcttaacgatgccagacatcaataagcctacaacactctatctcttcatgcagcgtatgatggtggtgacagtgaattccaagttattgtgacctgaagtctagtttgttttgtggctttatattatcgaatcttttgtcttttggagtccggtgcaaaaatatatgcctatttcactgtcatggttatccagtatttgtgatttgctaaatggcgcgttatatgcctataatattgtattccaacgtattaacatgtattaaacaattcatgc

SEQ ID NO: 63969 - DNA, 448 bp, Oryza sativa
  unsure (1)..(448): unsure at all n locations
tatctcttacgctctaggaatggatcagttagaacatcaccaccggcttgccttcgccgccgccgactggtgtctccgcctgcacggctggcatattatgccgccgttgttgggcgccgttggtcggcgtctacgtcttcaccgccggcttgccttcaccgccgccgactggtgtctccgcctgcacggctggccaattatgccgccgntgttgggcgtctacatcttcaccgaccggccgcctcgtatgacgccaactggtgttatcgtcttcacggctggccacgtcgctgccaccgctagtaggcgtcatcatcttcaacgcaagctgtctgcgtctgctgccgactggtttcttcactcccatggctgcatgaatctgatactggtgattggccttatcgtctttaccggcggttgtctggtttgctgctgactactgctctcg

SEQ ID NO: 63970 - DNA, 390 bp, Oryza sativa
  unsure (1)..(390): unsure at all n locations
agcttgagggtcggcacatcataacggatgtggaagaagatggacgtcctantgccccggccgaagccgccaagaactatgtacgtcacagcggttgggttgtgcgggataacgtgcctgtcagtacggtgtactggcgaagaacaagggcacgcggagatcatgagagctntgtcccagattcatagaaagagatgctgtggaccacaatgctcgagacattcacccttcctgtgggtacagaggacaaagtgaaaaggtggactctgaagaaaatggcagaacagtttcagagcttcaagggagatctgtaccagaagtatatactgaaggggtagacaccgaacttcgacacatttccaaagctaagggatcactgggacgagttcg

SEQ ID NO: 63971 - DNA, 317 bp, Oryza sativa
ctcagcttcccatggtctggtcctacgcatgtgtgtagttctaggcagtctatggcgttcgttgcttcccaactagcttcccatgtgggccttgttccatgtgtctctatgggtcaagtgggatggcccgacgcctatcctactagcctggatgtgatgctatcatgtgaaagagcatataggaccctactgggttatggctaattgatgaccaatgatacaggaatcaatgtgcttattgagtgtataggtaggaaaatagtcccctgatgaagatgatgatgatgaacatgttgttcaatgaggcttcatggtga

SEQ ID NO: 63972 - DNA, 470 bp, Oryza sativa
  unsure (1)..(470): unsure at all n locations
agctttntggacctgcactggagttaagcagatctcccaggcctcatgttntctcttcagacatagctcagtacgggtattcctgcgcgcgtgtatatagtcctaagttaattttctggggagggtactcctccgtatttagccccggttgtatggtcatgacaggctatcgtaaggaactcggcagtcaggggtggcttctcgaagtactaggagggcatcagaaagagggtattagctagttaatcatataactagaatgtatgtatactatgtatactagaagtataggaatagattcttttctattntctttccacttagcttagataatttagtatgagaatgagtagctctatgcttgtgtgtcattctaccctatgtattatactaactcctgcttagactatgattattacaagtaatatataaattattagtacgggtctctctactataatcttcccacc

SEQ ID NO: 63973 - DNA, 422 bp, Oryza sativa
cagctagtaaccctaatgatgcgatagatatgcaaacatatactcttggaccgtagagtcgaaaaacaatgggagagctagcctttcctccatttggcttttgcaattgcaagcctgaaagcattgcaagcaaacggtgccatgtgcagatgtgctgcgaccctctcaaatatgggatttgggatgagctgatttattgctggttgcccgacaaaaacgtacgccttcaaactcctagcatggaaatttataaataccatgcccgtactaccaatacctcgtgtggatcgggtccaatcatgctacacacacgtacaagaattaattgcacgaataaattctcatctgggttgtacagaaaaattccagtgtgtggtccaaccaaacgtgaatgaacagattcatgtcaaaacccctcaaaa

SEQ ID NO: 63974 - DNA, 382 bp, Oryza sativa
tctggaccacatgaaggacgttctctactcctatgtactgtaacacctcacgattggtgccagtaagagcaagacgagttgacatctactccagtatatacatagttgaaaatcgtcatcagggaagtagccagccatgtgggtccatataaacctgatccggcaacctatatgcctgttgaaggtgataaaagatgaagattaaatatgagtatattaaacgagaaaatcattagtgcgtgattagctagttgagatttattttcttcattctaaaatattattatctactacttcagtctcaaaacataagtattctttctattgaattggacatacagctgtgcagattcatagctaaaaatgcttatattttgggact

SEQ ID NO: 63975 - DNA, 460 bp, Oryza sativa
agcttggaagagaggcaaggttgttttgtttatcttttatttgaagacattttgaaatcactaagtgatttatttctttctaagtttgggccgaaaagagacttgcgtctcgattcgactttaagagatgtttttcaacagctcatttggcaatgtaccgacctcccgggtcagatcattacttctcggctcccagagccattccacttgattaatcggctcccagagcctttttcattttctcggactcccagagtccagctacccagcagcacaacaatccgctttcactcgggaagcctagtctatgatgcccgcagacatcccgaatcacacagattcgtttctgaccactcaggtcgcccatctgccacataagctgattctggtacgattccacaccacccaacttttacaaagcacaggcaacaaactacgcaacggaaccacctacataccg

SEQ ID NO: 63976 - DNA, 436 bp, Oryza sativa
  unsure (1)..(436): unsure at all n locations
actcaagctccngaatgtaggaaacgctgagataagaacagattaatattgtaataatagtcacccttgtacgaatgaatctcatctgaccaaatttaccccccacaccgattaaatttctgggcgaattggtcaaaatttcacagctcttccaagttgtaatcattctaaaatggtttttagtagcagtaattccattaattgtaagatttgaacagcgacttggcaactactggtagatttggtatatacacttgacgaaaccctaagtctaacacgcgcccctcctattgcgttctcgcctagggctccaactctgcaaccaccgccgtatcttttacagatctccaccgggccatggacgccatacccaccgcgccgtctgtggtgtcggcgacgactatatcgagacgaatcgagccctgcatctcattac

SEQ ID NO: 63977 - DNA, 374 bp, Oryza sativa
  unsure (1)..(374): unsure at all n locations
agcttcaacctatattgngaaaaagaaataacagaacaaattagccagagggtgagaaagaaccttcagtttttgttcatcgcaaagcgctggagtcgataatacagccacatacctgtcacatgaagtaggcatgtaagttaaagagtaatgtgcattttcaagaaaaggtggaaggtgtatgtagagaaatcaacatactcgcatctactaggctcatcgacaccattaagttcattgttcagcccgcatcgaagcctaacctgtatcataaggcaagccatattttattaagtttcaagacctgcaaacagaaacagacaatccatcttatgataacgggcacgaaggcatgaaaaggagaagcaccttta

SEQ ID NO: 63978 - DNA, 456 bp, Oryza sativa
  unsure (1)..(456): unsure at all n locations
nggtagctgttntctctagtgtctttggtcttcatctttgattacgcgtcattgaaaagactgtacatgagaaaactcttttgttgaaacatttctcttgtaatatgaatgtattgagtttgtgactatccttctcctgtgctagaatcatatatttcagcttcaaagctcttgtggtacttttcaagtttcctgttgaaccgaatacctagtgcattaactctaagcttgtgacaaacattcatgcaaattcgtggatattaacattggatacttggtctactggaaaattggagctccttattcatgtcatcaatggagagcctagcacagttagagctgttatgtgaaaagctttacaattctagagactccgctgagcgagcacatgcagaaagcaccctcaagtgcttctcggagaacagtgactacatttcacagtgccaatatatattg

SEQ ID NO: 63979 - DNA, 440 bp, Oryza sativa
agcttggaagagaggcaaggatgttttgtttatcttttatttgaagacattttgaaatcactaagtgatttatttctttctaagtttgggccgaaaagagacttgcgtctcgattcgactataagagatgtttttcaacagctcatttggcaatgtaccgacctcccggggcagaacattacttctcggctcccagagccattccacttgattaatcggctcccagagcctttttcattttctcggactcccagagtccagctacccagcagtacaacaatccgcttgcactcgggaagcctagtctatgatgcctcgagacatcccgaatcacacagattcggttctgaccactcaggtgcgccatctgccacataggctgattctggttacgagttccacaccacaacaacttttcacatagcacaagcgaacaaatc

SEQ ID NO: 63980 - DNA, 358 bp, Oryza sativa
  unsure (1)..(358): unsure at all n locations
tctgaatgaagganacgttgagaaaagacaagatttattattggaaaacaagtcacccttgtacgaatgaatctcatctgaccaaatttaccccccataccgataaaatttctgggcgaatcgtgccgaatttcacagctcttccaagttgttatcattttaaaatggttgttagtagcagtaatcccattaattggaagatttcgaccacgacttggcaactactggtagatttggtatatacacttgacgaaacccaacatctaacacgcgcccctcctcttgcgttctcgactcggtctccaactttgtaaccaccgacgtctcttctacagatctccaccgcgccatggacgac

SEQ ID NO: 63981 - DNA, 453 bp, Oryza sativa
  unsure (1)..(453): unsure at all n locations
agcttggttagggtgtgttctgatgcaatatgggaaggtggntgcctatgcatctcgccagttacgtccgcataagaagaactaccctactcatgaccttgagttagctgcagtggttcatgcgttgaagatttggcgtcattatctttttggtactcgtacggaggtgtatacggatcacaaaagtttgaagtatatctttacccagccggatctgaacatgagacagcggagatggctggaactgattaaggattatgacctgngaattcattatcacccangacaggctaatgttgtagcagatgctctcagcaggaaaggctattgcaatgctacggaaggatgacagttgccattggagttatgtaaggaatttgaaagattaaatttgggaattgtcagtagagggttcgttgcagccttagaagcgaagcccactctcatcgatca

SEQ ID NO: 63982 - DNA, 420 bp, Oryza sativa
  unsure (1)..(420): unsure at all n locations
tcttaatcttattaatcaagacgtcatactgagcctgatatttaattntgcaatctgcacgagcaattatattattatcaggatgcaaagataaacttacttttggaattctgactgagattaccttcgacgtctttgatagccaagtctctctcctttgtaagatcacctttgtctttctcaagagctttgattcgcttctccaattcggcgatcttggcagctaggactatntatatattgatgggtatttaagcacagacatcaactcagaatggattgagcaagaataaagttaccttttgacgaaccactcaactcaaattggcgtcttgaagctcaacaacccaatccctgagatcatgttcttgtttcctagctagctccctgctttcatggagtttaactcttgtttcttcc

SEQ ID NO: 63983 - DNA, 455 bp, Oryza sativa
  unsure (1)..(455): unsure at all n locations
agcaagctgctgctgactctgtcagcatgaatgtttgaagcactggtggtaccatattgatgttgccttttactgtcaatattaagcttttgaagtagggccttgcttcagacctcaattttagaaagaaagtatgtagccatatttttaagtagtaaatctaaaacaaaatcagttaatttatgcccccctttgatttatagaaaaaaaaaacatcggaaacaaattcttcaaggacttttgaaacaaatgattgaatcatatccttttctttgaaatttctactgaatgaataatcctatagatattntggaggaaagttagaagtgctccaaaccctcggaagatttactttngagttcctctcttatccgctttctgtggtgtcttatggtctattcaaaagattatttatgtatttcttctatggtttacaatccaaattttttttaatc

SEQ ID NO: 63984 - DNA, 441 bp, Oryza sativa
agcttgcagacagcttgaggaaagagaagatggagattgcaatcacatctgtggacgatgataatcagtaaaaagccctcactgacatcttctcatcttctagatgtgtaatattattgcagcttgattctatggcatgcttctgagtaatataaggcgctagctcacaattctttttcttgctcatgacgtgcttagaccttgctcaaaggcacgcatattatgatgtttccgtgctgcctgagattgtactattacaaatgctccaatcaattgagcaataatacacgatagaacattgaaagattaaggtgatcaaaacattatttcaaaactatgaccaggaggataacataaattacacccaaaaattaaatatatattccctccggtcgcaaataggagtatataccaacttatgattagatgacacatctattc

SEQ ID NO: 63985 - DNA, 476 bp, Oryza sativa
  unsure (1)..(476): unsure at all n locations
tacggaccttgaaactaagcttaagaanacacctgctctgattagctatagcttctntcaattatgagtgacaccagacacacctactggtattcaaaaaatgttattgcctccactagctaccttctcctttaactattttatatattttcccccaacgttccatttcattctggtcttccatatcttctatctttttaggcagtgagaaataacctcatgttcctatcttacttcaaccctttgtcacttagttcctctgatgttgatcagtgtcaggataagaatgagaggcatcatcaacacatcatttacaacatcattcacagactctgtcgacgcagtagtctagctaccaacaattcatgcactgctggngaactcatcttttagtcatgtttgtaaccccctttagtcctgcgttgtaaactgggaccccgataccgggatgtctcagttgaaataaccgggactaa

SEQ ID NO: 63986 - DNA, 409 bp, Oryza sativa
  unsure (1)..(409): unsure at all n locations
agctcggaggtctcccgacgtggctgatcttcactgtctgggtgatccgggttagtaatgtcgtgtgggtaaagtgtaccccctctgcagaggttaacaaactgttcgaacagccgtgcccacggtcatgggcggatgtgaggtgattcctagcgtagttttgtctgactactgcttgtgaaattgctgttgtgaaactgggttcgatgtttgaaaaatcagcagctgacgggatcagctaggcccgggtggccgcttgaaatgttgttggcccgggtggccgtttgaaaagctgttggccgggtgccaaccctgtttcaagatctaaagactgatacattgcacatactccgaccggacgagacgcactgtctcatncgtgtcgtttgagaagcactcacttagactt

SEQ ID NO: 63987 - DNA, 479 bp, Oryza sativa
  unsure (1)..(479): unsure at all n locations
ntatagtatatgtgaaattataagctaaatagtattatttcatgataaccgtgccttatatgagacagagagagtataggtgaaaataatatcggtaattcaataatatcggtaattcctgaccgacagactattacataatatcttttaccatctttaccatcaaatcatgaaaaaatggttactgaccaaaaagaaatgaaaattatcagtgttatggataccacatacctgatagtagttgactaaatctcggcaggacccactacataccatgtcttatacggaaacaaccttcaaatatagaaggagttccggataaggaaagacaactagagttctacatggaaacgagcaagaactactcaaatgtatccatattgatttccctagttctatttagacaaagggacatatatgggtataaatacaagcccctctacgaggagaggggacaggatacaatatatcaacataca

SEQ ID NO: 63988 - DNA, 435 bp, Oryza sativa
agcttataaaggcccttaggatcccttgactcacacaattccaatggcatgttcaagaaaacctacaaaaggggtttcagggatgtttgtgaatattcaaaattaaagtccataacaaagctaggtgcacttaaacagaagataaactaagaattgcttacttcaataaagctaccatctgacaataatgcacgacaagactcacggtctctcctatacggagatatgaaacttgcaatgcatactaggcctgcatctgcgaatagctttgctacctcacctgctcagaatagttggatataaatgtcaagcacagatgtgtcaaaaatgtaaaataacaacaaaagcattatcatatttttacctaaatcagaacttcattcaattgccacatgaaagttctgtgtcaggggatacttaccaactctgcgtata

SEQ ID NO: 63989 - DNA, 446 bp, Oryza sativa
ggttcacaccatttcactaagctaaattcaacttgcacgtactatcttacctaacccaatggatgaagccacccctagtatgacccaccataatccaaatctgatataccaaagcagctcctgaacatgctgcattgaatacaaaaaccttgttatatccatttacaatagtgcatgaaccacagtcacagtccggagaagggaataaagaaagcacatacatttgcctaatatggactagtgcaattaagcatcttgccattctattagtatagacttgttgatacagaatgcactcataatgttttttctaagagaagatgataccttttcatgtggaccgttagttaacaagagcggagtacaggcagaagcaaccaaaagaaccaagaacttcaaccgagcactatctttcagaacacataaacatgtgctttttatactct

SEQ ID NO: 63990 - DNA, 443 bp, Oryza sativa
  unsure (1)..(443): unsure at all n locations
agcttttggcacaatttactgatgttatattgtagtacatgacattttaaaagggatgcaggatgctgcttctataaaaaaaaatcagtaatttagcttctatagattgagtgaacttaatgttttcatctacagggtggaaaaggagttcgagttgtagactgtgttctttctctgaggtcattcagtgaaagtaagcaagtaggaagatcagctccattaaaatatggtggcattctaaagccttcaatgtctggaaagcacttcatccgcaagaactctgagccttttgtgaagacgatggtgagaagctactcagcagagttactcagagatggcgtatcactagagcaaagcttangtcttgatttttcactagagcatgtggaaagagatgcctctgtctatagatcttctttctttgtangtaaatttcttacttc

SEQ ID NO: 63991 - DNA, 442 bp, Oryza sativa
tagttcttgagcatctgtttttcttcttttcccccgtctgctttttcctccagatggtctacaccaggactggcagtcgcgcgacaggcgagggcagcaacggcgaagagcgcactgatggtgtgcaccccaacagcgattctggcaatggtccgccaccacttcccgagaatccgacgcttgcccaagttatggcacatcagactcagatgatggcagccatgatgcagcagatgcagcagcagcaccagcagatgcaccagaggatgatgcagcacgccgaacagcagcatcaacagtttggtccccctccccctcagtccaagttgccagagtttctacgcgtcaggccacccaccttctccagcaccaccaaccctatggaggcgaacgactggctccatgcaatagagaagaagctgaatctcctgcagtgtaatga

SEQ ID NO: 63992 - DNA, 445 bp, Oryza sativa
  unsure (1)..(445): unsure at all n locations
agcttcaaaatttcttcaaaaaagagaggatgtcatgccaaaatntctagtgaatttattttggtgattacatacaaatcggaggtgcctaaaaggtttgcaacttcatcctccaatattttttttgtcatattacatttggagctatgttttgcacacttttttgtctcccaaatttagttgtaagttgatgagagagaaaatttgtgtggggaagaaagaatatatataaatttagttgatttgctaaagaaggttttataaaatatttgacaaggaaaatatagtgaaagttaatcttaaataatagaaaacaaactacaatgaaaattaaaagaagtaaaacacattaaaattatgttaaaactttagaaatagtatataagaattatttggcgtaatattttatgaattttgtatgaataaagatatgtcattattgtat

SEQ ID NO: 63993 - DNA, 424 bp, Oryza sativa
  unsure (1)..(424): unsure at all n locations
ggaatcaagagtaccttgctctaatactaattgaacgtgctgacgaagcctataggaggggtgaataggctgtccctgaaaacttgaaaacaaatcgcagcggtaaaattcaaatagacccggaacttcctggtaaggaacaccggaacttccggtctgccaggcccggaacttccggtgttttatgacaggaacttctgggtaacgtaacaaaggatgaaattcaaatttcgaaacaggagactaagccaatcttcacaagatgatgcacaggtattctaagcagatgatagatcacagaaacatccacagaaacatcacagaaagagacacgaagcaatttttcccgaagttcggatcttgcgatcctactttccgttgaggagctncaaagggctgggtctcgattaaccccttgcctcac

SEQ ID NO: 63994 - DNA, 310 bp, Oryza sativa
  unsure (1)..(310): unsure at all n locations
acttcaaccgatatgcccttaggcacggccatacataacatagaaatcacacgtggaaggggtgggcaattagctatagcagcatgtgctgtaacgaaactgattgcaaaataaggtaaatcggccactttaagattaccatctggggaggtccgtttggtatcccaaaactgcttatcaacagtcggacaagtgggtaatgttggggtgaaccaaaaaagtttgggtagagccgggtctaagtgttggctatgtaaacgccccgtantcagaggggtagttatgaaccctgtggaccacccccatgggg

SEQ ID NO: 63995 - DNA, 423 bp, Oryza sativa
  unsure (1)..(423): unsure at all n locations
agcttcngcacggcacctgaaccacggcttgcattgcgtccctgcgatgaagacgcccctcgggcctctgtatttgcattctctgtgccctctccagtcgccgaatagctcatgcttttaccgctttgactttcagaaacctcgtcaataccctcacaggcatcacgtgtttcatgctccatttctgcaccagattgatccactcccgtatcttgctcgtcaccctcttccatgcagaatccaccaccggtgaagagatagtcttttggtgcagtgtccgtatggcaatcctcgggtaactcaaagcccgaaggatcttcgttcatatcagagggatctgtatgcgtttgatcgaatgttaattcactcgtatcctgatggagcagattagattggtgtgtaagtccagccatgtgacacatg

SEQ ID NO: 63996 - DNA, 471 bp, Oryza sativa
ttggcatatggtgtgtgtgtgtgtatatgttctttgcatatattgggtaaaaattcctgtgcccacgggcttactctaacctcaccggaaaagaagaagaagaaaacaaatagacgacgacaacaatagacataccataacccatgatatgggtttggaagtacaaaatttggacaatgcgattgcaagatccaaacaggaacttcaatcaaattgatctaaacaaaacgaaatcgtgatgacgatatcgtagttttgtttgctagcactgacgattgacgaacaatatgcctattggttcttaagattaaacaaaaaaaaaagggggccaccatagtggggtttggaagggagcactagctgggcaaagcctggagagcatcagcacgcgaagctacacgccaatacatgatgatcgatcagaggacttcgtttgatcacagaaacaaatatttttggctatctttgatg

SEQ ID NO: 63997 - DNA, 432 bp, Oryza sativa
  unsure (1)..(432): unsure at all n locations
agcttggtgagagagcggcangtgtaattgatcttgtgggtctcttgctagatactgggccaccgaatcgtccttgtgcttaacatacgagaatagccttggatatttggagaacactccactctcccattggtcatcccaaaagagtacatcagttcccgatcccagaacgggcttatcaattcctctgaacaaaacatcatactgaaaaatgtctctccaccaaaaggaaccacaacttctcgcagttgatgaatgcctctaaaagatggtagatatgctatacaatctagattaacaatgagatctaactctatcggctactctctggtgatagatattaaccgattgaaggttagatcatgaaactaataaagattatgaagcatatatgataactcaaagaattacataaacaagagtgtcataaag

SEQ ID NO: 63998 - DNA, 438 bp, Oryza sativa
  unsure (1)..(438): unsure at all n locations
tatcatattcactcttcatgaaatgagcagctgggattttcttcacttccccattaaggtctccagactccatgattntgcatgtgtcctttacctccaataacacgtctaattccatcctgagcctctcaacccctgcttcacacgagctatgttgatgcgctgctgtcaagacctccaactgaatattatcattttcacccttcatcaaatccatggtagtcggtatttcctccacatccatcttatggtcttccaattctttcatagtttctgccttctcagcatcaaatgcatttgcagctgcctctntcctatgggccactgcaatcgattccatcttgagcctctcaacctccaaccaaagcttatntatttctatcttcatcttatcacagtcagccttcaattcctggatcttcactagagctaccttga

SEQ ID NO: 63999 - DNA, 439 bp, Oryza sativa
  unsure (1)..(439): unsure at all n locations
agcttgtccactaaaaagtatttctaaaaatacatatggagaaacagcaaaggttgaacacataggacatttggtagaacaacaaaattatgcaaatatatctctacgttctcttggtcaacaaacagatcgaatagagacaatccttatggaaggctacaaaacaagaaaacctgaggtaaagataaatattccctctaattctcagtcttctagttctcagtctgttagtcctatgtttgtcccaacaattgatcctaacatcaaacttggaaaacaaaaggcttttggacccgcaatttctgaagaactagtcagtgagctagccttaaaactaaataatttaaaagtaaataaaaatatcaatgagatctctgataatganaaatatgatatggtcaataagatttttaaaccttctactcttacttccacaact

SEQ ID NO: 64000 - DNA, 430 bp, Oryza sativa
taagatgtcgctgccgcggaggacatgcgtctgttcggtatttccgaccatttgacgatcgcgaggatgttgccgaaataatacaacacgccgacacctctagggaccgaaaccgactactatgctgatcgactatacgcgtggcctggtcggactcggggtgacaggccggatacaccgttgtccaagatcgccacgtattgctgctcccgacatgtgcacatgcatatgcagactcaactaggttgtatccccgcggcactgttataagtataatgagaaataaacacgtaaataaaagaaaaaggtatgttgacaaaagaagaaccgtatggagacaacctaaacattaccatgcaagagtaacaaagttatatgtgcctaaatattagtggtagcatattagcccaattaactgtatagcacacgc

SEQ ID NO: 64001 - DNA, 402 bp, Oryza sativa
  unsure (1)..(402): unsure at all n locations
agcttaaaggcatacttcctacaatctcttctatctctcaaaatgaagaaaaaactttttgcaaagaatatattttgtcttctctagaacgggccaagaaaaagaatcgtgctgcactgggtacacccaaagtaagacattttaacgtcctgttttttgatatcttatattcttctagctctcagacccattaacagactgctttggcatcgtgtatatgtgatttaacttgctttcatcaagtacttgatttggatttttatgtgctacaggttcctaatgtcaaatgggaagacgttggtggtcttgaggaagtgaaaaaggttattctagatactattcacgtaaaantttcttatgttcatcaattgttattgtgacttaagaatatgaagctgcttt

SEQ ID NO: 64002 - DNA, 457 bp, Oryza sativa
  unsure (1)..(457): unsure at all n locations
tatccaaaggttagctagcttcccatcgaagaattatctttctggaacacggcagttacacgagactagtactccaagctgggccccaccataggtagggtcaccatggacaggaaagccggaagaggaaacaaaaaaaatcttttatgaaaccctacaaaaaaaaaatcgtcactctcctcttttggctctttagtttcccattctgcccctcgagtcacttggagagtttggtggctttcttttgccttcgctgcgaaggaccaaggtcaaatcaggtaccagaaggtccccagttaattacggctgattataagccagcttattaacgagtaaaaaaatgtgagtaanaatttgtatacgtgtgtttagcgacttaaatattagtgctcgaaaaaactatgttaanaaagagtaaaattaatcttaaaatataattttaaatataaatattaca

SEQ ID NO: 64003 - DNA, 293 bp, Oryza sativa
agcttgacatatctatctgtataattatctttattgagaatataatttatcaagattaggaggctaatgcaacataaatgataagagattcggttttctggcctctttgctgctagatgccccttgacttcatattccaacattttatcctcctttcccatttatagtctctctactcaagtgaagtatccgcacgcagaactagtaagcaggaagttaactgtatttgaagaaatcactatgaaaagcactagtatgtaacaaggatcctcaaaagaacagcacaacagaaa

SEQ ID NO: 64004 - DNA, 399 bp, Oryza sativa
ttttcaacaaggcttcagttatattatgtagcttaaccatctgcgcttcaggaagagctatctataacggttatggaaatgttataagcataggtggcaccacgatacgccacgtgaattcatctgtagctatggttcagggtaagttcacctttctttaaatgaaaaaaaggacggtcatcttctgtaaaacggatgttatggattattcctgcaagtattaacatgtgatattcttcagaaatatttattacacgtgctagttttaagaaattgcatttcttgtgaacagatgggcagacagccagtacgacttgcatactttcacctaggtgcattacaaaatacagttgcagctctttgtttatatgagttgcatatattccatgtatctttgac

SEQ ID NO: 64005 - DNA, 208 bp, Oryza sativa
gattcatgccatcatcgctcgaagtgcatatactggttcgtattaaggtgttggtgttgctgctgaatatcacgccgagttcgctggtcagcgagttgaaagttcttgtacaacacttgatcttggcttctgtaagatgctggcaacttgcctccggtccatgattcccttcgattaagtctcaccttaaaagaatgatttcatcaat

SEQ ID NO: 64006 - DNA, 454 bp, Oryza sativa
taaccacagatccaagctggacaaatggctctgtgaactcaatgaagccttgtacaacgctgaggatctgctcgacgagcacgagtacaatgtcctcaagtgcaaagcgaagcgtgggagtgattcctctgtggcgcatgtctcctccatcaataacactgtgaagaagcctctgcatgctgcatttagcagggtgtccaatctgcacccagagaacagaaagctacttcgccagctgaacgaactgaagggcatcctggcgaaagccggggagttctgtgaactgcttggtttaccaggtggcaatagtgcagaggtctccagcctaccaaaaactgccggtgtcgctccagctacatcactttcaccaccaaaagtttttggtcgggacatggaccgcaaccgtatagtagattttcttattaagaaagagtgccttgaggctagctacatg

SEQ ID NO: 64007 - DNA, 374 bp, Oryza sativa
agcttcttgggctggatgaggattacttcttcgatcgactcaacaaagctcctgcacttgcaagattcaactactaccctccctgtccaaggcctgaccttgtgttcggcgtcaggcctcactccgacggctccctctttacgattcttctcgtcgacgaagatgtcggtggcctgcaaattcagagggatggcaagtggtacaatgttcaggtcactcccaacacattgctgatcaacttaggtgacaccatggaggtaattggcatctagcatccaaaacactttctctctgaatctgcagagacatctgtaatatgatgataaacccaggtttctgaatcctgatgcatatttggatgcaaaatttatgtg

SEQ ID NO: 64008 - DNA, 448 bp, Oryza sativa
  unsure (1)..(448): unsure at all n locations
ttccctctctcgcccncacaccacaccacacacccacttttatttccctcccatttctttccttctccgcagatattccccaagaatctcctcctcctcctcggattcccctctctctctcctcctacagagtagtagcttgtgcttgctttgctccgattctctctcttccctgtctctcctagctgcaatataccactagcagcagggcgcccagttgcgcgatcgatcgatcgagctccgtggtgccaagaacgccctgtacggcgcgccggtatgtgcgtggaggagtctgagggcgcggagaggctggattatggggagcccgcctgcgtcgtcgtcgacgccgggaagagcaagagcaagagccccgacgaactcccctcgcctcgggtgagtagggtactaacttgttttctctctcttccgaacgagagattcgattctt

SEQ ID NO: 64009 - DNA, 379 bp, Oryza sativa
  unsure (1)..(379): unsure at all n locations
agcttccagacctcgactgtcacaaattatgatttgtatatgacaaataaagagttcgagaaattgttcaattgctctttcccatgtagtactttttattctttcaatttgagaaaacgcaacaacaaacagcagaaggctgtagtttcgattactgttctactctgtatgggatatatagttgtacaccaagaaatatgtgaatccggatcaggtgcagtcgctgctgggactgcaacttangcagtaccagttttcatcgacagatgcaaatggaaaggtccagatcagtgaggcatactgttcgtagcactgtagcacagaatactgtttgtaccgtcgctgtatcactagatctgagccatgatcactgaaatga

SEQ ID NO: 64010 - DNA, 433 bp, Oryza sativa
  unsure (1)..(433): unsure at all n locations
ntatatgccatcacttccctccggctaataccccttatgtttcttacttcctcccctctcccccactctcgatcactttgccagagccgtcgntgttattgtcttttcgatttctgatgtcattctctcgacccacgtctcctccatctctatcggatcgacggttactgccaccacctcttaaccacatggtttttccttgccctgaccccacccaccgtcatcctcaaatccctccttccattaccaccaacctaaaaaacctaatataacaaaagcctttttagtccaaaagtcgccaaaaatgagagcttgccaattaagtcaccatcgacgtttctattaccatagtcacatgtgagtacttgccatctttctcctcatcacttgctcttgctagccctagatctttaatccaatggtgttcatcaat

SEQ ID NO: 64011 - DNA, 371 bp, Oryza sativa
  unsure (1)..(371): unsure at all n locations
agctntacccatcttctggaatgccttccgcttgagcctatcctttgcttcagccggaaatgtgaaccatttctcctttgccgtccaagctcgctctttctcggcttctgtgaccttgtcgatatctttatggaggatcccgaagttctcacgtgccgccagcccgcagcaattagaccatcttccaatgacagtcctgggtgccgtgggcctaccactagcgtcaacctctcttataacttgcactgtggtcggccatatattttgtgaccggngatttctactcgacctacttgcacttgtcccgcccgatatcgatgtatgtggttcctgcggcaattctgcagcacaaacagaaggcaacatttgct

SEQ ID NO: 64012 - DNA, 452 bp, Oryza sativa
  unsure (1)..(452): unsure at all n locations
ggatcagcaggaaccacatgactattagctacatgaatatgatggatcagatcagaagcagtaactttagagctttttgtttctgaaataaagattaccttagcattagtagagtatattaggcgttggaggtgttgcattttcctactgccgaggtgacccccccatacctcggcagttccagcttaaaagactcatggcgcccttgatgccttatgggctggcgccattgcccatccatcattctttccacttccatctccaccatttccagcactgggatcaacaagctgaatctctgaaacattgcattccctaggatctatagccagtatcagtctggagctagctccagcatcacttgcaccacccccttgagtatctccagcagcttgatcaacaaagatatcatgatgcgcctccaaagcactccaagtatngcttctgctatg

SEQ ID NO: 64013 - DNA, 380 bp, Oryza sativa
  unsure (1)..(380): unsure at all n locations
agctntgtcccaaaatataacaacttcttcaccatcattcttttctccaccaatcacaagtctccaccattcaattttctcacccacattcacttctcaaccaatcataaccttctctcatttgattttattgactttcttaattaatacatatgttcaaccataaaaatccttatattctagcctggagggagcatgtaaaacaaaatttactcaaagatagctatattttagtactaaaatctgaatgtgcttggaaataaacttatcgatctgtacgataatctctcaaccgtagattaattttcttcctttttctcatnttttagaagggagaatattctcagtagcatttatttttttggccttcttttcttcat

SEQ ID NO: 64014 - DNA, 484 bp, Oryza sativa
ggacctatgaaactaagctggatgtaggccaccttgtccacaagatcacttaattgatctctttacaattgtctagtatttcttattacctcttatctcttttgtcaatatcgctgatctttctaaatattatgttgccattctttctaatgatcttgatttagtttatgaaaacacataattagatttttcactcaaaaatctggtttcataaaactacaagcttatataaaaaatgtcaatgttatggattaggtatatatcctatacttagattcgtagctaccataaataccgcataccgaatatcaaacagaaaagtatatttaaatatggtataagaatgaaaactccttccataggaatagaggttgtcggagtctgatacggaaaagggcaggtcttatctacctgcattctacaagggctatccgacttttacttggagaggaagttgcctacatgcataaatacaatgttccct

SEQ ID NO: 64015 - DNA, 368 bp, Oryza sativa
agcttccccgcatccccctctcccttttctctcttttaccgcgctcttgcacgccctctaccgcacccgcgccgatctcctctagcgccgccgctcgccgccgtgctccggacgcacgccgccaccgctagagccaccgacgccgttagcttctccgccgccaaagctacctcggccgccgcatccccatccaatcccgctgccggaacgcctctctcttcgtgcaccggtgagtttcgccgcccttcccatctccggctggccacgctagccgccgtgggcttcctcccaacccctaactcctctccattttcctccgtaggtgcaacccgccgccgtctgcccctccgctcgtcgggtcatcgccg

SEQ ID NO: 64016 - DNA, 473 bp, Oryza sativa
  unsure (1)..(473): unsure at all n locations
cttaagggtgagagggaatcatccacggtgcactgcagttactatgctaaaatatacaacggacggttgatgcctattggatgacaatgagctgtgactttgccttcctcatgggaaggcttgaaacatcatcccatatgcaagcttctgttattcgcctgaaataagaaataacaggttcattcatatttgaaaaaggaaaggaattattacgggcaatgatgagttaaaaaaaaggagtgtaactattatttacaggaaatgaaagcaatgcactagtttgacaaaaatgcataatgatgttgttggaaaaatgtaaagctaacataaaaaaaaatactagcaaagtagaaacagctgattgaatttgaacatgttaaatacaataaccacctcagatatgctgtagaccanaatggcttngtaaaacaaataggatgctgacttgaaaacaatatggacagcatggcaga

SEQ ID NO: 64017 - DNA, 172 bp, Oryza sativa
aaaaaaaaaaaacaacaaaaaccacacaaaaccaccaacaaaaaaaaaccaagaaaaagaacacaacacaaaaaaaaaaaacaagaaaaaacaaccaaaaaaaaaaaccaacacacaacaaaaccaacaacaacaaaacaacacaccaaaaaaaaaaaacacacaaaaaaaa

SEQ ID NO: 64018 - DNA, 424 bp, Oryza sativa
  unsure (1)..(424): unsure at all n locations
agcttgtaccgagtttgagcctatgcaagttaagctcgctcctangctcctagctgcagccgcggcattacagtaactggcctctttgatgctgtggctactgcagaactggaaagcactaccgaacgtcccctggctacatgatgtgcttaggtgctgtttctttcagcttatgattattataatctagattattgggagtaagctgaaagaaacagacaacttattaaaatagtttattataatctagagcccagcttattataatctgataagctcatttagatgagctttttccagattattggatgaaaaattacccaccatgccaccccactctctctttagacttgcaaaccaaattntctagactgtaataatctatgaaagaaacaactaaccgttattctactacagaatataa

SEQ ID NO: 64019 - DNA, 417 bp, Oryza sativa
  unsure (1)..(417): unsure at all n locations
agcttgaactgcatcaaaaggtttatgcatttatgctaaacttctagcatatgctaattaattctttccatttttgtgtgatattgcggatggaataagttgatgtggttatgttctaacgctgttcctctgcgtatcctgctaaatgtcaatttgtgatgcatcatgcatatgagatcttttgctcatttctctaatcattcattgctcatcactcgatgtttgtgtagtaagaaaaaacattatccattggtgcattgaatgcctgaagttgatgctatgcatccctttcttgatcactatggaagatgtaagttcagggctgagcacttgtttagtactccttccgttacatattactctatatgacgtttgttttttttctaacttaaaattctttaagntttagtgatgtgc

SEQ ID NO: 64020 - DNA, 356 bp, Oryza sativa
tcggttgcgatccatggaccagcgcggcggcgctttctttgtctactagacccaccgcgtgcagctgccggacacggacacgctctccgacgtcaaggcctttctagacaccaagctgttcgcggcgcaaaccgtgcccgccgagtctgtgcgcctcaccctcaaccgctccgaggagctcctcacccccgacccctccgataccctaccggccctcgggctcgcgtccggtgagctactttactttacgctctaccccctcccgtcgaccatcgcctcgtcggagacgtagccacaggcccaacccctgccccgtaaccctaaccctgatgtactctcgatcgcgggagctgctg

SEQ ID NO: 64021 - DNA, 435 bp, Oryza sativa
  unsure (1)..(435): unsure at all n locations
agcttggcgaccgaccgaaggctcactaatttctaatgacatcaagcgaagcataaagccgtcatctggagtagaggaggccttcggctaaggacctaaaaangcctggcggcccatggaagcccttcgtcacctaatgggctggcccaagaagatcaccttagggcccatgaatgtataagacgttttatacccattgtaatgtccctatcataagaggaaccatgtaaattcccctgtactaaccaaactctatagggtatgagcctgtattaggactataaatagccccctagggccatataatggggggatcccaaaaaattttaccaactaatatattgctttattattccaaacacctaacgggtttccacgtcctttaatgtgacgcagttgtcattcgacaatagcagtagttagaggagagataat

SEQ ID NO: 64022 - DNA, 473 bp, Oryza sativa
  unsure (1)..(473): unsure at all n locations
taaccgctatccatcgaaagttcggaacanagaataatctccgcatggtggtctttcgaaatagtattttcaaaatcccttactataaaaacaaaaaaaaaagcgtatcattcgaaaaagatcgatggtcttttgaaatagtattatataatatttaaagataaatatattactctacaaatttacgtaaatatacgtagttaaactaaatctatattacaaatatgaaatatcccatcaatgatctttgttcgttcgatcttaacatacgaggttgatatatataataattaatgttntgatattttcttatttcacatcatattttagggtgtcaaatatcactcgacaaatattaaatgctaatttaaatntatatttgtgaaaatgaaaacaacacaatttagttgtttcattttacaccgttagaaataatggttctcctatatacggatatatgacanatatataac

SEQ ID NO: 64023 - DNA, 417 bp, Oryza sativa
agcttctggccgtattttttctactctttcttgtcacccaatgtgtgcagcagctccttgtcgtcgtatgtggccggcacttctgagtccttgtattttgagaagaagctaagaatgacaggcacagagtcatagcccttgaagttgaatggatcaacagcaacggatgtaagctgtagaaacatgtcagcggctggtggatattgatactccactgtttcttggatcacctcgttctcgttcttgaggtgtgcaggcctcccagcattgtttttcctaagcctcccgcgtggcctcccgcgtggtgcaccgcttgccctgccgcccttggagaccctcttgcggtcgaaatcgacttcggaatcggagtcagtggcaccctttcttgcgtgggtcccaatcctcatcggagtcatc

SEQ ID NO: 64024 - DNA, 386 bp, Oryza sativa
  unsure (1)..(386): unsure at all n locations
tcactgatgaagtcatggaaataaaaggggagaatattctatgctgttgtgcggaanaatgccaatgataccttctttagcagaaaaaaatatgctgttgtacagaaaaattgccggtgataccttctttaagcagaaaatgataatgatatcttgtttaccagccgttctaacttttagagcatgtaaacctgctatctagtttgggaagttctcgcctacactgaactttataacatcactagcgtgagggcaaaccgtgtatcattgacgctgctcccttcaatcaatctcaggctcagcatgccgcgatcgtgacgaccccaatgcgatttacattagccacagttcattattcagtgcagtacttgagaaggcaaatcatg

SEQ ID NO: 64025 - DNA, 313 bp, Oryza sativa
agcttggtactaaagtgggtatacaaaagctgcgacatatactggtgacaacgtgtgttcccggtcccatcgcctgcccggccggctgaacctcgtatgttgctactaccatcatctctcggggtgtgagatccctagacgcacggcggcgagctttccatcgatggaaaggaaacaacagatcgagcaaatccgcggggagtttgactggttgagcgatgaggagcgtgctgaactaatcctgcaattcatttatcgatcagtccgtctctatcaaatggtgattgtgagaggagacctaacgcatgacagc

SEQ ID NO: 64026 - DNA, 377 bp, Oryza sativa
tgcttccaataaccaagcagctatggggatttcggtgatggcatggcataacttttcactgtgatctccccagaggacctttaaaaccaccacagcctgtataaaagaaccaaaaaccttattatattgcaatggattgccaattaattgaaccatatggtattgagagagtgatcacctccttctgcctggccacagtattaagcatgttcaatgtttcagcattaagctttgctccatatttctttgcaattgtaagttcagagaaatccgacaggggaatcaatgctgtatattaaaaaaaccctacgaaatcaatatgttaagcagccttgtttgcagactaaataatcagcactgaatgaataataattaat

SEQ ID NO: 64027 - DNA, 271 bp, Oryza sativa
  unsure (1)..(271): unsure at all n locations
agcttgcttagcccggaattgcttgccattcttttcatgtcttcagtgaanaatgatcaggctgccacttactgcacctgactgaaattactactaactttttactaaaccttgagaatatctgaatatacagcccactagtcacaactctacagcatgataaatgcactaccttttctgaatctgaacatggattactagtttcagatgatggttgtagattgctacggtactactacctccgtccctgaatatttgacgccgntgtttt

SEQ ID NO: 64028 - DNA, 479 bp, Oryza sativa
  unsure (1)..(479): unsure at all n locations
gcttgtgacaagctgtctgtctagagttacagtattagaatgtgtcttatctatctaaaaaatcttatattctgatatagagagattcactaagtaacatttacttctataaattaaaacatgcgagaaaccacatcctatgtaattataagccatcaaatcgcattagtataaagataacaatagttgaatcaaaaagctacctactcatctaattcactcattggttagtcattcgttcaccactctttgctcgaacttacggtcacgcacaacattatatattatccattctgcacgtgataatgctagcttatttattntccgaatacaacataaattattggtttagatatgagctttgtttgttaggaacgattagaaagcatatattctaaacgcatggtcaaaacttgagatgaagcatagaggcccatacaatctaattgctacatgcagatttcatattggaataacaa

SEQ ID NO: 64029 - DNA, 432 bp, Oryza sativa
agcttaaggattgcactgcgagtgtatcgactcatcgacggccagggcagatcagattgtagcctgtgtactatgggaatgggaggctggctagagccataggagttttttataactaccaacactatatgtgtcattattcattgaatagagtggaaaagaattacaaggctaacacactgaaaagcagtagtcaggaaagaaaaaaaatcgatcaccacgcacggacaaacacctaaataaaacccaagagaaggctagtaccggaccggacgcatgtaagcgtgatcggccgcctctagactaacaaagatccgaactgcccaaaaacaaaccttatcagccgaacactatactcaattatatccagtattggaaggggagagggtgagagaaaaatggaacaacccacacatgcccctccccttacat

SEQ ID NO: 64030 - DNA, 367 bp, Oryza sativa
cttgatttcagagagtttcagaccatgcgtctatatatatgtgttcagaggagaaatttatataggcaaacgaccattaatcacgagctggccggtagtagattatatgccaaagccaaacagtcatataaaaacttatctaatttaaagtgtactatcttcacaatgattaatttccagtacattgtcaattcatgtattgtattatagtactccaccataggaccacacccaacccatgctagccgcggaaatttacaaccagacagattcataagaactgaagagaattatattctacatccatatttaaatactccctccattttaaaatgtttgacaccattgactttttagcacatgtttg

SEQ ID NO: 64031 - DNA, 435 bp, Oryza sativa
  unsure (1)..(435): unsure at all n locations
agcttgttgcaagccaagttgacaaatcctttgatgtttaagaagagggaatgagaaaatacctggaggtcgttcagtctatggacaagattttcaccggcataacggtcgaacacttgccccgaggccataatgaaaaagctgatgcgttagcaaaattggctacctacagaggaccgcattcgccaggagtctttttcgaagtcttgtacacaccaagtgtgccagaagacagccaagacatcatgggaattgaccaagttgaactgggcgaagaaccagatgactggcgaacacctttcgtcaaacacctcaaggagggatggctgccagatgacgaagcaatggcgaaacagttacagatcagggctgtcaagtacaagttaatctccgagcaattgtaccgaaccangatgctgtagcccatgcttcact

SEQ ID NO: 64032 - DNA, 455 bp, Oryza sativa
  unsure (1)..(455): unsure at all n locations
taagaattaatagtgagagagtgataaactcaaggatttattatagttcggagttgtagttgggactctcaactaaataacatatattttaggatatgtacttgtggagcagagcaatattacatattgacatgtgcacctcttttatagcccgtaaagtcaattgatatgggattgtctacaatataaactcaaacaattagaaaagcatgccaaatatgtttttaacttacggcaagttcatcaagaatggaactgattattaggttcattctttntaaacatactaatttaactgctttaagcagcagtccgtacattatttgattaagcatcaagcatcttcatctacaaccagcaaacaacgtgatcaatggagcaacagcgtatntgcgcaagctgacctatataggagatggcattgcaagatggcctgaaaatagtanagaaataca

SEQ ID NO: 64033 - DNA, 406 bp, Oryza sativa
  unsure (1)..(406): unsure at all n locations
agcttgtcgccgacaaccatgtcctcttctcgctaagcatgtcctcctccacggccgcgccaaaggtccgcggcggcggccgtcttctcctcgttgctcagctctggctcctccctgcgattttcttggatagagaggggacgcacgagaggacccggatcccgtcgtataacatttccggtaatttaactcgcaagcacaatctttntcccacagcaccagcccacgtcgcggtcgtctcgtcggaaacctgaaaccaccacgagccaagagcccaagagcgaacccacccacccacccacccggtctgtctcctaaccccggtcgcttctataaaacggaagcccgagacgagaccgacccacctgaccgtgccgtacttgtgccagaactcgggagagcgaac

SEQ ID NO: 64034 - DNA, 438 bp, Oryza sativa
ttatttgaaaggcttatggttatacatttgcaggtcctgtttgccaatgctagagttctggggcttggaccaaagttcatgtcagtttatgtgcccaaactagcggtatatatatgcctaacctcatggaagcacttgtttttgttgttttcttcttagccttgatgtgatcaatcttttttgtgtagatggaacggaggatacattatgacgaagttgagggcctatctattgagtggttggaagccactggaacattggtgcttgattcatgcaggaacaggcctcctcaaaggaggggaaatcacgtgaagtatagagcatttgaggaagtcgccatgatggttaacccatctgaatcaatattctccgaagaagatgaggaatctggagcaacagaagctggttgtgacactgccaagtcaagtttgctgagtg

SEQ ID NO: 64035 - DNA, 394 bp, Oryza sativa
  unsure (1)..(394): unsure at all n locations
agcttcaacaacctttaattcatgtgtacatgcatttacctcacctgaacaaaattatgttaatggtggctggagtcaagttgtgccattcagatctccagtgtctgaaacttgtgtcacaaatcagcgagcagcagcagcaattctgaatttggtgctatatatcaaacctccggttcgaaatttgctagctgaattctgatcaggagacgccgttctgtatttgaaattactgaatctgtttctgctggaaagacaatttcctttcgcttcagatttatatatgaatactgacctaatacaatttcagaatttctctaccggtgatcggattntgctgaagaacatttcatttattcaccagctcgtcaaaacgtatcacaacaccgaattc

SEQ ID NO: 64036 - DNA, 472 bp, Oryza sativa
tgtttacgggcatgaggcagtcataccatgggaaatttttatttctctagaaggatggaattacagaacgagttgacagctgatgaatattataacctcatggccgatgaagaggatgacttggttcaatcaaggttgagagcgcttgcaaaggttaccaaggataaggaaagagttgcttggcattataataagacagttgtgcctaaatcttttttctgaaggagagcttgtttggaaagtgattctgccgacaggaactcgagataacaaattccgcaaatggtcgccgaattgggaacgaccgtttcaaatctataaggtcgtgtccaagggagcttacatgttgcaaggacttgatagagaagtatatggacgagaactcaatggcagatatttgtagaatcattaaccaagtgttggggtcaagtcgtgatcagctcgatactgccgatgcatgatagctgatgta

SEQ ID NO: 64037 - DNA, 438 bp, Oryza sativa
agcttaatccattagagcgagcgttctcacagtagtgctcactgacatatgggccccacagaccctcgggtccatatgtcagtgagcagtactgatctggattgaatcccattagctcactgaatactgaatactagtgcaacgtcattgaaaattttatccattcaaaattctacatcttcagacttttggactagttagaactattgctatccaaatttccggttctgaaatttcttagcagcgatcaaatcttctgtctacatcttcagacttttggactagttagaactattactatccaaacttccggttctgaaatttcttagcagcgatcaaatcttctatagatctattgaccttgacagcagtatggaggagctgatcaatttgaccgaactggcgttgtttacttttcgaacagtacaaagtatgatc

SEQ ID NO: 64038 - DNA, 469 bp, Oryza sativa
gcaaataaggatgtctggtatctcggcgaggtcgcattttctggtttatgcatcaccaacggcttgaattagcagcgtcgagtccagggacaagtagcactgcgtcggcttgaacagacaccggcatcgatgaggcttctgtggcacgtagatgaatcggccaccgcgacttccccggcgacgacgatacgtgcagatggatccctatgcatagatgtgtgcgtgctgtttagatgaaagaaaacgaaacaatcttgctagcttttacctggactagccatcaagctcctctcctgcgcttgctgatgatcggatcaccgcgcacgcactctcctgccggacgccgggactccggccgaagtagctcgccgccgacggtgcgtgtcgtcgatggatggatcgccgatgagagttgatggatggatcgccgatgagagttgatggatggatgtgttgatgccggatgggt

SEQ ID NO: 64039 - DNA, 438 bp, Oryza sativa
agctttagctccagccaccggaacgagagatcgatacagctcgatcagctagccgcattcgccctcgccgccgccgacgatgtcgagccggaggtcgtcgcgctcctccgtgtcggaggaggagatcaacgagctcatcttcaagctccagtccctcctccccagctcccgccgccggggcgccaaccaggtactacatttcaccgttctcatcaccacaagttcacataaccaccatgcacactagcggcatgaacaagctagctacatgagtgatcgacgatgtgtagatttgtcggggttctaaatcttcggctacagctgtttgagaagggtctagctatttaaccactatagagggtctggccgtaaaatgtgtaacccgctattaaaactctctattaattattggtgtaatggcggatgcaaaataaatgc

SEQ ID NO: 64040 - DNA, 472 bp, Oryza sativa
  unsure (1)..(472): unsure at all n locations
tggcctcacccaccatcagcaatccagcatgctctaattaatcttagctaggttgatacgcatgcttgctaagcttacctagcttagctgcgtgcgccaatggccacggccaagcactgagatgtacagagaagggccacctctctaagctactctaccactagccgtagcgatcaagggacgaattattggccatgagatccactaataatacgggtcacgaaacaaaatttccccgaatgtgacggcgatttcctgtagcactatgaaaaaagttatctcctgatctctctcttccagtccatctgtccccaggctaagcatatgcaacagggattagggtcaacgtcgcgcatgcgctntaatctcttcgtcgatccatcggttntgcgagagatgaccatgtcgacattgctcattagcatgtacctcgcacaatgtggtttcttcacaggagattntgatatgcaat

SEQ ID NO: 64041 - DNA, 435 bp, Oryza sativa
  unsure (1)..(435): unsure at all n locations
agcttgttgcgttctgcaaaacaccctgtttcatctcgtaaagtcgaaatgtcgataagcatcgactccacacttgaaatattctccgattcagcagagttgctggaatctgttcaagtataaatgccaatgtaagctaacaacttaatttgnttcaaattctccttgaaaaattttgcagggcatacatggctgagttgctcctgatcgtagcctctccatcctcctccagaagcagagccaaactagaatgttgattagcactaaagctgctatagtaggcagcaaaattgctagaaccaagcgaggaacattgtaatctttccctgtgaattgacagatgtagactaatttcagatcanatgagtnaagttgcactaaacacataatcaatagcattacgcaagcaacgtgcaagagctgccagaagctaat

SEQ ID NO: 64042 - DNA, 458 bp, Oryza sativa
  unsure (1)..(458): unsure at all n locations
ntatatagctgtcccgctgactntnttatatataagtcattgtgctgtttgggtttttaagcaattgattggatacaatatcattgcttttcgccacgtaagtgtgcatttttattgaccaatattatggcttaagctgattatatattgtggtcattttctaggcggttggtaaaacctttatgagtttatttactcggattttacaccacatatgccatatatttccgggtgtggtgaaaccatgtgtcttctagggacttaagcacatctgttaaagcagtgtgcgcatggcgtatgcccaatactttggaaatttctttattcacaatatacaagcttctttatagctatnntgctatatcactcatcatattntacaaagcagttggtatatcactcggatcatgttatttggaggattcacaccgcatatgctatatattgatatcaagtca

SEQ ID NO: 64043 - DNA, 378 bp, Oryza sativa
  unsure (1)..(378): unsure at all n locations
agcttgtagaatcaactaacatagtttgtctgccatcaaatattggtggctattttttttgttcattggtgcaaacataccctaatcatttatttggtcagcatttatttgacttattacaacttcatgcatatgagtcataccatgcaatgtgcacttcaagagatttgaattacggatatggcaaaagaaagtagtatttggaagtttaaacacctatgatgcacttatattgcaatcattacttccactgagtataaacttacggttaaacttggatgtctaagctatntacctttccacagtatgcattgaagcangagaggcaatctgcaggcaaccactacatatagtaaaggattacaggcaagtccatct

SEQ ID NO: 64044 - DNA, 455 bp, Oryza sativa
  unsure (1)..(455): unsure at all n locations
ntgctggctgcagctgaagctcgccttctatgttgtctatgatcgcacggccacacaggtgcactgcccagaagaggtcatttcaattatgatccacgtttccaaccgattggaatgtgtcaagcaagcactgtcggatgttgttcttgatcagtgttggcacctggatagagaggtggaaatctatgccgctaccggtggtctgcatgccaagtgcttgctcataacctggtatcgttgtttgcgaggcaacgatcatctcgaatagtggacgctctgcattgaccaatgggccagtgccgacaatgattgctccggcaccatccccaaacagtccatgaccgacgatttttctttcatctgggtttgagaagcatattagcgtcagctcggcgcaggctacaggaacgcgtgcctcacggttgttctcggcgagctcacttggcaagtggagt

SEQ ID NO: 64045 - DNA, 417 bp, Oryza sativa
  unsure (1)..(417): unsure at all n locations
agctntatctaactcatatactcatcaacgagaaacttgggtgccagaaaagaaaaggagatcttgtcaagacgaaactaaatagtgttgatctatgcaaaatgaatagtcatgctaaactgcattgaactataatatcaatgaaattataccaaattcatagttgaacatgcaaagcagcatgacatcatatcagatatcatattttgctgatggcactcataaaatcaaataatagaatctgcattataaatgcttaccccgatattcagctggaagtacaacagaagggaagactagcagcttggcaaaactaacatcagtttctagaacaatatcataatcaatgacattgctcactaggtcatcaaattctttatttgacctggcaaagtagcaagaatattagaacttaat

SEQ ID NO: 64046 - DNA, 425 bp, Oryza sativa
attcagtttaacctataagagttatgtttggacatcactaatgtcgaaatcgcataaaaaaaatattgtaaattttaagaacctacagtctacttattaaacttacataaatattagaacatttgaccagaaaatggtatgcggatcaatgtaaagaacagtaaagcctcctcggctgttcccaccaaggataagtctaatgttactatgttatccaatgtggtgatgcatatatgggggaaacctttgaattgtcttagaagtcatgtgttcccaattcccattgagaagtgatgaaaagacattatgtccccatagcttgggtattttttaagataaatggaagcaaagaagtaatccatgtttaagcttggtcagttacactatcacaatgtcattactggtgagcattgcatcagataaaa

SEQ ID NO: 64047 - DNA, 442 bp, Oryza sativa
  unsure (1)..(442): unsure at all n locations
agcttaatgttntctgttaatcttggccacttcttttgatacttactaattttcgagactgcgttgcacctaacgttttgtccagtcactgtaaaagctgtcttgtgtattttgcttacttttacttgggcaaacatctaattcataattcatctcaacctgattatggcacctgaatttgtcaaacatacaatcctgcggctgatctggtacttggacaatccactgaagaaacaccatagaagcctgaaggtgctttcaagaagaggatacatcaagaggcggaccctgctggtgcagatgaaaccattccagaggatggtgaccaagatggtcagaatataaagaacaaaaaatagcctaagatagcgatgattctcctgtcgcctatgctgatggcggcaaaaaaaagaaaagaagtcaatgagagcgagagcctcct

SEQ ID NO: 64048 - DNA, 470 bp, Oryza sativa
  unsure (1)..(470): unsure at all n locations
ttctaaagccaaacagttagaaatatgatgatcactcatgtagcttacacaactagtatcgcacaccccgttgtcccattggtctcgacaacctgtatagatccttaaaaatgaaagtaaaatgatattattaaaagtttggtatcagggtctggtcaccactgaaaaatatggtactacctactgttttttaatatatgacgttgttagctttttataaacgtttgatcatgcttaaaaaatatttaatgataaatcatgtcataataaaataaattatagttacataattgtttttaaataacgcgaatggctaaacgtatataaaaagtcaacggtgttatatattcaaaaaatagttacataattgtttgtaaataanggcgaatggtaataatgttatttgcaagttgtcaaactttacacttttggtatcatatattataagaaacttgagagtgcaaacactg

SEQ ID NO: 64049 - DNA, 369 bp, Oryza sativa
  unsure (1)..(369): unsure at all n locations
agcttcacaagcaacgccgcttctctggttaaaatgctctctagtntacttcagataagttacccaagctcaaggctgggaagtactcatcaacaaaatcaccacaaacagatcgtactagcagacctgcagcgatcatcatactttaaatgaatccactatggtcttgagaactttctccgacgactgccactgcttgtcgctggcacttgcgacgaagagcaccaccgtgttccccttggcagtcgccttcgccagattgtgagaaccggtcagtgccaatggagtctctagcacatagctgtagtactgcacctcagaagaattgcccatgcatcagagttcagaaacatttagcactccaaagac

SEQ ID NO: 64050 - DNA, 448 bp, Oryza sativa
  unsure (1)..(448): unsure at all n locations
ggacgtggttgtagtagcctacaccgaggaatgcgattccgtattctaacaggttgatcggcgtgaccgtgtcccggatcacagaccatgagaaggcgatgagcagccaatccttgacgacgccggcgacgttcatggtaagcgcggacgtcttgccgacgagcaagaagactgccaggttgagcgcaaaggcgcacagggagttggtgccgaagatgaagaagtctggctggaacgtgccgacggcgcgcagcctgtgcagctcgacgaaggcccatggaatgacgaggaaggcgaggcatcacggcgcgacgtagtatagcgaggtgatggggttgagcgagatccccttggaggtgaggaggatctggatgangacnangcgagtggcctctaaggctacggcggcgagctggagcgcgacgccgcgggcgtctaaagcggcctc

SEQ ID NO: 64051 - DNA, 439 bp, Oryza sativa
  unsure (1)..(439): unsure at all n locations
agcttcanaatttctttaaaaaagaggggatgtcattccaaaatttctatagaatnnattctggtaattacatacaaatcggaggcgcctaaaaggtctgcaaattcatccttcaatgttttttttgtcatactacatttgcacctatgttttgcatactttttttgtctccaaaatntatttgtaagttgatgagagagataatgtgtgtgggcgaagaaagaatatatagcaaatttattcatctgctaaacaaggttttataaaatagttgagaaggaacactctattgaaagctaatcttaaataatagaaaacacactaaaatgaaaattataagaagtaacacacattaaaattagtttaatactttacaaatagttttaagaaatatctggtgaatatttatgatttttgatgaataaaatatctattatta

SEQ ID NO: 64052 - DNA, 478 bp, Oryza sativa
  unsure (1)..(478): unsure at all n locations
tgccaaggccataaagctcttcaccagagacttcatctgtttctttcccagaattttcaactatataagatctgccaggggaatcagacagtcctcgagacacaagtagatccaaatccttctgatgaagttctctcccattaataaatatgccggtgtttccaccaccacagttcttgggcataggataattgaactctggaatataaggctgcaaggaaaaaaaacaacttagagattttatcgataggatagcatacaggaagaaatgaacaatatccaagacaagtgttcttacaggtatcatgccaaggcagggtcgccccataacaccccagaacccagcacgataatcatacctaagtaacagaacatcagatcaaaattttgtatactcanatattcaatacaagaaagaaagtacaccatagaatnttggtatattaatgtaggcgaactattaagtttcttttcaaga

SEQ ID NO: 64053 - DNA, 351 bp, Oryza sativa
agcttgacggcttagtgcgtggcaacgtatgatattacatgaagaggttaaggttggttagtcatgattccgagtcagtaactaactgtaccgtgctataccaatcggagaggttcactatatcggttcagggttttctatcaggggtcaccgaaatcccaaaatttcaaagaaatttagttgaatttgaacaaatattatccaaatttgtgaaaaaattcaaaaattcaaaaatttcggcccgaataatatcgtatcagggtcaccaaaattaccgaaatttccaaccctcggactaggtaatcacgcagattggatcgatccatgcaagtgcagccaattttgagccca

SEQ ID NO: 64054 - DNA, 445 bp, Oryza sativa
tggcgacttcggcctcgcgaggctcgtcgaccatggctctgttttcccacaccacggtgatcgccggcacgatggggtacatggatccggagtgcatgatcaccggtagggccaacactgagtccgacatatacagcttcggtatcgtcctcctcgagattgcctgcggccgaccgccggtaatggcaccggaacaccaagctgagaaaggacaagacatgatccaccttgttcaatgggtctgggatctgtacggcaaggggagaattcttgacgccgccgatcaccggctcgatggcgagttcaacggcggtgagatggagcgtgtcatgatcgtcgggctctggtgcgcgcaccctgacaggagcgtgaggccggtgatcaggcatgccgtcagcgtgctgcgaggtgaggcgccgccgccgagcctccctgcgaggatgcc

SEQ ID NO: 64055 - DNA, 325 bp, Oryza sativa
agcttagaaaacaatatggccaagctgattatatatataaatcaagcactggaacattgtatcaagcaactcgatctttacatggctctgaaccagcaagaagcctgaaatgaaggaaataaacagcttcaagactctaaccagtctgaaaatacatcgtttagcataagtacgtagtgatctatggcataagttttcaagaaatgcactgagcatttttctgtaaattttgtagtccggagaaaatctattggatttttatccataaatgaatgaagctgatacctgatcgagggaaagttaaaaacatcaatcatccagtcac

SEQ ID NO: 64056 - DNA, 375 bp, Oryza sativa
  unsure (1)..(375): unsure at all n locations
ntatgtttccacattaaagttcatagtttccttaacctctcatttatttgaatcatctcaaaataagttatatttgattttatatggattttacaagtttagatgttttcctgttaaaaagtaaaggcttttagtattatctttttacattttcagatttttaaactcatggggtccacctgtcggtctcaggataatatgcaaatgggcccctagagtttcaggaaatcaacccgcagtcctaggtccatatgtcattgagtgaaagcattacataatgaaccttatagttgtttaacttctcaaaatgaagtccctgtttcttctccattcgataagcagcagagcagccatgggcggcacctctgctcgtcg

SEQ ID NO: 64057 - DNA, 95 bp, Oryza sativa
ctaacagcggacggacgacaaataacattactcacactctattcgtaaataaagatgatgcctaacattgtatactcataaactgtatacatatc

SEQ ID NO: 64058 - DNA, 282 bp, Oryza sativa
ggtggctatcaaactggacaaatgtatgggatctgatacaaacgatatatacaggtctcacgacatcttatagagaaaaaataccctactcgctgccggagatgaattgcacgcatgtgttatcgattgtctgattggggaaatatctacaatgccccataaggcgccacggaccccccactatatcataggaaggaggagcagattacaaagaataatctatattccctacggaatatgaagatacccgtaaactactgtcccaaccgcctaagtgctcac

SEQ ID NO: 64059 - DNA, 436 bp, Oryza sativa
agcttggctttctcttcatgaacacactgtctattggtttggattgtagcctcgatgtccttgcgctcccggcgatcggctaacctctgcctggctttctccagtttgaattgatgctgctcgaggtaaacagctggagtaagagcgtccgttaattcctccggaagaaaggcttggatatctgcaaatcttgcccggattgagccacaattggtcaccaggttatctagtgatgctcctagccgatgggagatgtcttcgagtgttttcttcacatcatcagacaggagaactgttgctttactggtggtgtcttcttctgtttcatcgacgtaatctctgatgtcaaggagaacagatcggctaagacctgcaagagacaatatcatggatgattaaggatcaagatatgattggctgatctcaaattataaaa

SEQ ID NO: 64060 - DNA, 444 bp, Oryza sativa
  unsure (1)..(444): unsure at all n locations
ctttaagaaatcaaagacttggctagaactatcaagcactttatanatactccagtattgtacaaattgagcctccatttgctacatttacactcagtcagaatcaatcctttcatcatcagagttattattgctcggctgaaagtcgttgttgcggaattgctctacaacatcacttgcaatcttgtcagccgcactttgagcattactgataagatcaagagcagcttcttcacttgtcccgtctgcaaagccatcaatggtatcaatttcgattctcgggtacaaggatatggtcattgccaatgccatgctagctcccatacttccagctttcttgatgttcttgaagtacacatccggtgcaactcttagcttgcaaagatctcggttgcatcaagtgcactcggaccactgttattaagagacatagcttggacaagt

SEQ ID NO: 64061 - DNA, 352 bp, Oryza sativa
  unsure (1)..(352): unsure at all n locations
agcttgctaaaatacatacatgttgcatgcatgaagtggagagagagtantaacagatagtttcaggaattttgtgaaacacaccgaagacacatattgaaacatatcattatcacgtatgaaatattttattctaacggtttgaaacatatgtttttttttgacataatataatcatgtgatatcttattgtaaagatttaattgcaacgaatacaacggtgtgatcggatcgtagatcggataagtaatttaagaggaaaaaatatttataaagaggatgaaagaatgaaaagaaacagctaggcacatacattacagtgacatggttcgttcccacatgcgctcgttta

SEQ ID NO: 64062 - DNA, 458 bp, Oryza sativa
  unsure (1)..(458): unsure at all n locations
ggtagagatcgaaccggatcaatatagcatacgatatgttatacctcaatntttgaaagtagcctatatctccacaagtatgcttaatgtttaccactcttatgttgcatgactgtagttcgagactacagagttcaggcatccttccaagagtttccatgtcctgttcttgccagaactgcacattcacaactaaatagctgaggttcggtagaagcgacgagttcatccatgctggcagtctagttagttgcatgcatgctatggacaggtatcggaggtgctgggaggagacaaatcctgtttcccatgttacaccctttcccaagtaggatttaccatgaagttccaaaagctggatcttgtgaaaattgtgaagggactccaccagagctatttccatgctctgatcccacccatggatccttgtcttgagcaccctcagttcactaagctta

SEQ ID NO: 64063 - DNA, 373 bp, Oryza sativa
agcttaccaacctcaaacataatatcatttatgcatacaaacgagcaagaacttatcacattgttcaaaaaaggaaaaggaattctatatatacaacatattacgacttaactctagggagatcaaaaattcaagaaactaaaatagatgaggccaacaccagacatcaaggatagaataagatagaaaagaaactctaaccaaactatgaactggaccacataaatacagttttgaccagggaaatattgagtttgcagatgcccacgccccagggttccatcacaaactatctgccataatgtacaggctatcagttattgcacacacaaaacttatgatgtgcccagtaaccacatggtatacaccaact

SEQ ID NO: 64064 - DNA, 441 bp, Oryza sativa
  unsure (1)..(441): unsure at all n locations
tcgagccgccgtcttattgtgcccggaacgactngatgcattagctagcctaagaacaaggggatcaaggggtggagcatctggggcctcctgcacaagaagagcagcaccaccaacagcgtgggtgccactgccagtgcgttcgtcggcgaagcacgggcggcgccaccggagctacgggcaaggggttaccacggtcagatgctccggtgcaacatcaacgtcatcgcaagaagctcattcagtggaattggaagctcattcaatggcggcaggtatggggatgatgagggcagatgaagatatgcttgagaggaatttcagcgccaggtactcttcgttttcctcctgcacgtatcagattcacaatgatgattactcctacttcattgccaacaattcttgagctggagctggaagcaggcctcctcgttcctcacc

SEQ ID NO: 64065 - DNA, 437 bp, Oryza sativa
  unsure (1)..(437): unsure at all n locations
agcttagtatatggaaagggaaacatttatctgttggtttgaagttggncttgactaattctgtactttcaagtttagctatgtttatgatatctttctttgagataccgaaaggggtcttcaaaaaattgattattatagatcacagttttttggcaaggggatgatcataagaaaaagtacagactcactaaatgggatattatttgccaacctaaggatcaggggggccttgggattcataatctggaagtacaaaataaatgtcttttgagtaagtggttgtataagctaatatatgaggaaggggtttggcaggacttattgaagaagaagtatctttataataagtctataacccaagttaaccagaaacaaggtgatttccatttttggtcacggctcatgacagtanaaagtactttcttagatatggg

SEQ ID NO: 64066 - DNA, 350 bp, Oryza sativa
  unsure (1)..(350): unsure at all n locations
ctttgcanactacaaacaactctgaacttgacagcgtcctttgtaatatctcctccgtgctcgcacgtcgtaacgccccgattttcgttcgggattaaaaatcattaaataatacattttctagaaattaaataaaagttaaatcaatttaatcaaagtgaaatagtgagggaattaaaaatttcctttaaaaatcattggccgagaatattttgtaatattctttgtgccctaaatattctctggaattttcccgtgaattttcggagctcaagaagtaattataataatacaaagttcatttaatcaatttaaataaaaataaaagagaataatcttcccccttcccc

SEQ ID NO: 64067 - DNA, 302 bp, Oryza sativa
  unsure (1)..(302): unsure at all n locations
agcttaaatttctaacatgtaatacatattctgaagncatggatatgtacacttcaatcttcaaacttctaattaatttagttcacatgtcatgtttatataatacttcctccgtttcaggttataaaactttctagcattgcccacattcatattgatgttaatgaatctaggcacacatatatgtctagattcattaacatatatatgaatgtgagcaatgctagtaagtcttataaccagaaacagacgttctatgaaataactaagcatactatagatgatggtttgctctaattcac

SEQ ID NO: 64068 - DNA, 334 bp, Oryza sativa
  unsure (1)..(334): unsure at all n locations
agcttcctctatcttccaactctaggattatattcatcgcaagnctcagcaagaacgagtctggagtggagggaagacaacttcatctctcagctggtagagtccatctggtctgcagattttcattcacaaaattatgcactttaattatcccagaaatgcaacaccaagattgtatcatgaagagcaaacacacaagattgcaatgtaattaagcatcacataaaaaaaattagtccatgagataagatcaccctgctttcgtttcagcacgccccttgctagtaagcaaaaggaatgcttctcctaactttcacacggggaacttaatggg

SEQ ID NO: 64069 - DNA, 462 bp, Oryza sativa
  unsure (1)..(462): unsure at all n locations
cgtcgatatntcgcgccatataatgtttgttgatcttgtattcgcagacatgaaccgntttataagtttcaccccagggtctactatatcgcgggaccatatgtcatgtatccggaggtgtagttctttgtcgtttataagtgctactatcttccagaccagatcatccgtgttgctcatgatcctcatgttgttctcgtcgtcggagagctttataaggatttgaatgcctctaacctgcatctgtccctcttcaccgacagaaatacggtggccatactcctcaagtggctcatctggctgatgaaatggcttgagatcaagcaacgaagatatgcactggatcccttgcatgatcttgtccaagcggatgtcgattaccaaagtgttcacaattcctcgctgggcgccaactgatctcttctgctatgggctattggatccagcatctggaccaagttg

SEQ ID NO: 64070 - DNA, 387 bp, Oryza sativa
  unsure (1)..(387): unsure at all n locations
agctngccacttactattgggtagcccatgtctatttgatgtttattctgtgcacttcggccagtcgaacaaacacacatttattcacaaagagaataaggtggttcttgttccattatctcctgaagacataagctcttctgatgttgctcgcatgaaaagagatgatagtgagaaaagaaaattatgagagagccacaccaatagtaagggagagactcctaaaccatccagccacataaagccttctgaaaatacaaaactgccacgacaacattttttagttgtgagaaagagtgatttgagagaagtgaggaacaccatagccctcgtccttgtgctcttgcacaaggaagtcctattttcaactaacaaataaccattgtc

SEQ ID NO: 64071 - DNA, 481 bp, Oryza sativa
  unsure (1)..(481): unsure at all n locations
ntatacatgagaaagttntacgagagagattaaagtatattcctatcggatattaacccatactactgctcgcttaagaaaaatcaaacaaacatacgtgcagctataaagccaaaaaaagtactacattgtacattgaagccgtatataccggaaaatcatgtccatacgagtgaaaccgcttataccgaaaaatctacgtatgtacgcacaattaaaaaaaacagaaactttaggtactgtttatttaaaaataaacgaacgtacatacgcgtagacaaaaccaagaaaaataatgtacgtatgcgtagacaaaaaaacagatggttttttaaaatagtattttctatagtagaaaaacaaaacttattacttcacaaatatggtgaaaaaacgtacaataaagaatatatgatttganaataatatgtttcagctacgccggcattctttannaaagtgatctagcaatatatacagt

SEQ ID NO: 64072 - DNA, 438 bp, Oryza sativa
  unsure (1)..(438): unsure at all n locations
agcttcagtaatttggcatattttcgaacttacatgtttatttctaaataggagtggtcaaattaaaacaatgccaagtgaaaactgtcaggtattatgaaacaaaggaagtatatgatgttttggaatagtatattgccaaacctcaaaatcttataccagttgtatatatataataaaatattatgatttgagatgtgaaaatgacactaggtggatttatcatgataaatactttaaggtgggtactttttttaataattcttataaatatataattagaaaaaaaaggatcaaatatggcacgagagattgtgtgattgtctaaaagacaaggtaaaatatatacagaanaaatggctttcattaaaaagaatattttaagcggaatcattctactggagaatctataaaattgacattatttacctgacctga

SEQ ID NO: 64073 - DNA, 479 bp, Oryza sativa
  unsure (1)..(479): unsure at all n locations
tctcaagcgcttaccctgatggagtgcatgctaaagcttaatgagcnaggtctgcaaggggaacaaatcactcgacactttatcaagagccggttggcgactatcaaggagagatcccgcaccgcttttgagttcgatggcaaaaatgaccccaaccgtgaagatccagagtccctcgaattcaagatcatgaaggagcgaatcaaagctcttgaaaaagagaaggatgaactggccaagaaaagagactcggctctcaaagatgtcgaaggtaattgcagtttatatttcaagattaatcttgtcttcgcacccagatattgatgtattccttttatgcacatcgcangattaaatctcaagctcaattcgaagtcttagtcaacaagattaagaaacttgaaggagctagggatgaggtcgccaatgctgctacaccactcgtccaagctatgttcttcaataacaatggtccgagt

SEQ ID NO: 64074 - DNA, 355 bp, Oryza sativa
  unsure (1)..(355): unsure at all n locations
agcttccaaaaatgtagtccccctgaattgttcttctcattgccttaaaggtcaccttgaagctcagcaccttcttctccttactgaacaccaacaccgatgggttgacagtcatctcgacaccagtaggcggctggaggaatgccttgtacacggcgttggcctggccgacattggtgacagtgcgcatcgtggcctgaaatgtcctgnggttggggatggcgatggacgggaggtttaagtcagcaagtgatcctttcactgtggtgcaattgtcccctgagcctaatcctcccatgcagttgaaaaacttgaagtaatctgatggttcgatatcatagatgaggcctggatc

SEQ ID NO: 64075 - DNA, 472 bp, Oryza sativa
  unsure (1)..(472): unsure at all n locations
ctatgcttacagccggggcaactaattaatacatcattaatgtatcttatttactgtntcatataaagtacaattatattttatctatatcagttgaagcaaagcttgtaaatcaaagatagatgtactttgaaataagtttaatatatttggctacgtacaaagcaacgcagcaaatttaggtagtctattcgtttataagtttcttgaaaaaggcaattacatgataaactgatcaacatgagaatgtgcagtcagcactaatcagctctcgtgagaatggaagtcttggtgatacaccaggcttattgaattttgttgtctcagctcgtttgacaagcatgatgctcaccgaccagctagctggctagaagagctgcctgcaaccagcggtgcctactcagagtcatatctcttctcgaccggcgaacttgacgatgcgtctgttgaagaaataattatagtgacgatt

SEQ ID NO: 64076 - DNA, 438 bp, Oryza sativa
agcttgtgaaatggttcatggagccgttctttgatgaccttgtgtctgggtgctttgtgcggcttgggattggcaagtcaaaatcagggacccctgattacaggctatgcatagttagaaacgtggatgcgaatgaccctgaccggaagtacaagttggagggctacacgacgtgcaagtacctcaatgttgtgtgggacaatgaggctaatgctgctcggtggcagatgactcaagtatcagactcctttcccagtgaagaggagttcaagaagtggctacaagtggctgagaagaatggtgtgcgagtaccgactcggcaggatgtattggagaagaaagaagccattcaacaggccttacaacttgtgtattcagcacatactgtacagaagatgctaaaagagaagaaatcagctatcagacgtcctatcaatg

SEQ ID NO: 64077 - DNA, 471 bp, Oryza sativa
  unsure (1)..(471): unsure at all n locations
taaacgaagagtatgagtaataacgtgcagaggatgatattgttttaaggagcgggaagcgataattcacgcaaagagggaggagcgggagaggtctgaagcaaggcggatagatttaatggagaagatgttcaagaaaacaagatctgggcagcctgtgatgaaatacaggatccagcatctgttggagactgcattataaagctcaaacaagtaaatgttgctacaaaaatgctgtactgattgctataagcaaattttgtagatcaatgcagtgacctgtttgtttcaactggcttctgtaactctagcactctaccatgtaaatctttggtgattttcatttccatgctgatggtgcacgcactnttggtttctctctcatacgatgcaagatgattggataataaagaaacagagatgactggatttgcagtgatgataccaatgctaattcatgctatgagcata

SEQ ID NO: 64078 - DNA, 413 bp, Oryza sativa
  unsure (1)..(413): unsure at all n locations
agctttaaccaagctcttacaatatcttatcaatgcaagtggaatggtgatgtacaccgactcaaccaagcaccccaatagaggttggatatatcgatgcctcggcaaacacttgctgtacggctgcaatcaaatctgtggagctctgggtaagcttaaatatgtagcaaaggaatagcaaatgctcaaatcagagaacgcaaagttgaataattgttcaaagtcaagtaccgtgctggtcctatgctagaacgtactatagacgcgagcctagacacaaacggtaccacaaaatagcaccagaaacaactcaagcacactctgatgtatgaagttcagctcagacaaaacaatatctnctcttttctttctttcttctttcttcttttcttattttttcctttttcttttct

SEQ ID NO: 64079 - DNA, 311 bp, Oryza sativa
atgcgaaagttctttctttctcacaaaacaaatttgcagagaattggcgatttaaattcgccgaacccggcaaagcggggagaatcggatgtactttatttgtagatgttcgtggatatattataagcctaatttcgagtccgtatgaaaaagatatgactgttttaaggaaggtcactcgaatcaaggatctatttcctttctagtggcggcaggatacaaggcaactaacaaaagctatcggcaacagatcaaacacaaatagaaagtgatttggtgggtgactgtgactgtggtgacggtggtgatga

SEQ ID NO: 64080 - DNA, 428 bp, Oryza sativa
  unsure (1)..(428): unsure at all n locations
agcttgtggagagacatctctcctctcactattgtaacttgtatcagattgcatatatccctttccaattgcatatttgctttccaattgcatcttataaaacttgaaaacaacataaaatttgcaaaatagaaaataccaaaaagataggataggtttgagtcatgctaggttagaaaagctagttctctttgttgaaatgatgaatagttgctatgctttatatctcttatatatgggttcataggtaagtgctttctcaaaggctaaatatgagtagccaacaattatccaagaacctgaggtaaatgagctgcacttgctgatctaagtctaagttgttgcgaaatatgagatagtaaatatgaagtgctatgatcctgatactaagttgacgtgaatnccagatgtttggttttcacaatgat

SEQ ID NO: 64081 - DNA, 460 bp, Oryza sativa
tgcatatgaaccacatcacaatcaacagaatctgtatattatccaatggaaaatgaaaccctacaaacctgtgttacctttgctcttccggaatcgtttaaccactgaatatggtaaggatgtggatgtgtacgtgttgtcaagccaagcttagtgaccaaatcagaactcaccaaattattgcagctacctgcatcaatgatcacacgtgcacgatggttgttgatgacaaagaatatctgaaacaaattatggcgttgcaacctctcaggctactgtacctgcgtgctgagcacccgctgcacaatgatggtcctgtaatccgatgtgtcatcatgaccaaagacttcgccatcctcatactcaacttcttcttcctcctcttcctctttcacgtcggaggtggtgatgtagccatcttctgtaagcacataggcccgttgactatggcaatcttttt

SEQ ID NO: 64082 - DNA, 179 bp, Oryza sativa
  unsure (1)..(179): unsure at all n locations
agctntacaaccaacggttcgacgtggtgttgtaaccgccaacgccccaggaagcgaaagttccaccgacggctttttaatggcttaaggatattttgaaataaaagggaaattttggaaaagaaatgacattttaataacctcaagaaattccaattaaatattaaaatagcccattt

SEQ ID NO: 64083 - DNA, 432 bp, Oryza sativa
  unsure (1)..(432): unsure at all n locations
ttgatactcagcttttgttagcgcatcggggtttagcttttgcanatttaatatccttcaaggagggctggttagaaaaattatcgttgntgttacctccttgataatatgggcatggttggttccacccctgacctccttgtggatgatacccgttgttgttgttgcccatgtacatcgccttctcatgggttcccgggcagtcattcccagaatgacctgtgttgccgcagacctcacatgtggcgtgagagttcagggcttgacggtgccttgtggccatttctcgtggtcgtccaatcacttcatgaggaggtccagcttagcagcaagtaactccgtctccttgacggtgtgcatgcctcgctgaccggtctggagtctgttctcgctccaacccatattggagaccatcttctctattatatcaac

SEQ ID NO: 64084 - DNA, 252 bp, Oryza sativa
tcatgagcaatagtacttcatatagatcaaagtgaagagaagagtgctgcatatacgacataaagacatctggagagaacctgcctagatggatgcttgtggatacgaacacgagacactcgagcatatatccatatcatgcatgatgaaagcatatgcatacgagtgtgatgataccgatcaaatggagacagatgacactagcacctactgtgcggagtcccttcttacttatatgcatgcccacctcat

SEQ ID NO: 64085 - DNA, 377 bp, Oryza sativa
  unsure (1)..(377): unsure at all n locations
tactgataatctgagtgggctatgagagatccatgctatttcaataagaagctaaaattctttgaggtcattctcgaacataattatcagtggtaatgcaaaagttgcacagcatttaacggaatatcctgtacttgcaaaaatctaatctgtgccaggcgacctctgagcaatatattctgtctggccaagacatggngtataatattggtatccggatatctggccatcccagttgagccaacacagatgaattctggagaaacagaacttcatgaatacttgaaaaataatattatgccaaacgtaaacatgaaaatacggttgccatatcatgattaagtgtgcatgcattaacagtataaaattcactgcag

SEQ ID NO: 64086 - DNA, 413 bp, Oryza sativa
agcttgtgcaggttttcaacagtaaacatgagttttgtttagcaatgtccttaattcctaggccaccgaattttttgtcagtgcagacttcatcccaggataccaaacattttgaaccagagcacgaatcatcaccagtccaaaggaaggctcttcttcttttgtcaatcgccgcaaatactcctttcgggagctccatagccgccattgcgtaggtagggagagatgatagaattgcattaatgaggatgatcctgtctgcgtagttcagtaaggaggcctgccagcttgcaaggaacctgtccactcttgagatcacaggagcaaaggcatcgaaagttaacttggttgtggacagcagaagttccagatatgtctgcgggaagtttcaagtctgattccaacacattggc

SEQ ID NO: 64087 - DNA, 472 bp, Oryza sativa
  unsure (1)..(472): unsure at all n locations
tatatttaaatctaanacatcaagggcaaaaaggacattttcatccaaactatctgtgaaatgatggagaatgtaacggtaggggcatggaagggatcaaattgaaatttcaggggtatagaagggatcgggtaaattttatgggtatgaaagagattgagtgagttttcatgggtacacagggaatttactcttgtttcaatgaattccgaatgatggatgcagtgtcgatgatcgaagagacaccctcaagggctgagaagtacaagtttttcttctgtgacgcatgtttcatggaatgtaacacacctctctctgacctagtggggagggcaaaagaactgttgagtcgccagtggtcgcatggcatcaacagtgccacctgaaaaaaactgatagatgatntcgtatttacagtcaaacgaccatgcatactntntagtatatggtaaataagtgattgtgcatatga

SEQ ID NO: 64088 - DNA, 281 bp, Oryza sativa
agcctattacaaaatataggaatagccacaacgcttaataaatctgttgcattaaatggtacattgaatataatgtgaataaatggaatggcatggggtactatatgtgcttaagcaaacttagggaaactttaaaatgtctgactaaaaaaatatacaaaacgttatgaaagggaagtagtacgtactctcggcgcataatataaggtaatgttaggtttgaggacaaggagagatgggttaactccatctctacttttgaatgggatgattatggtttt

SEQ ID NO: 64089 - DNA, 441 bp, Oryza sativa
  unsure (1)..(441): unsure at all n locations
nggctcatacatcgtccaccccatcatcagttacctacctcgtattaattattgcattattaagtattatatactccctccgtattttaatgtatgacgacgttaacttttttatcaacgtttgattatttgtcttattcaaaaagttaggtattatcattaattttattgtcacttgatttatcatcaaatattctttaaatatggcataaatatttttgtatttgcataaaaatcttaaataagacgaatggtcaaacgctgtttaaaaagtcaacggtgtcatatattaaaatacgaagggagtatttactattattaaattccatgttaattagtatccttaatttactgctcctctataccatcgcgtacgtatgtgcgcatgagtgacatatatgtcatgctctatatatgcatgcgtacactactgtagaatga

SEQ ID NO: 64090 - DNA, 435 bp, Oryza sativa
  unsure (1)..(435): unsure at all n locations
agcttaacanatgatggggacctgcttactgtgatgctgctgtattgctgctgccatgctagctagtctaccgggtgcagtggtcattgcgctaagatcacgaagaagaaacaaagaggtgagcatatgattagtgagccaatgataatggtaagttatgccttttttttttgaaacacggtacaaacgctgaaacgtataaacacatgtacactcacctctaccaatgcacacgacccaacctacctttatggtaaggtggtcattttaaccgaagtatgatttcttttatactaaaaaaaaatgcttgtgcgttgtaccgataaaagctatttaatcttattattggtataccggttatctaagatgagaatcacttgtgggaattcgctcggatattttnttagaaatatttgagctacaattttgagtttg

SEQ ID NO: 64091 - DNA, 360 bp, Oryza sativa
  unsure (1)..(360): unsure at all n locations
tcattttcttcatgatcactgntgaatctgattatgtatcatcaataccaagttctccatgagtgcaccttcagtttgtgccaaatgccaatactactactgcatctgcattcagcattctgcattgacacaacctaatgaactaaactgctcatgctcttttctatattccttccataggttcacatcgatcgtttgaccgcataaaaaaacaccccgcaccaagtgagttcatccccatcatcttatctccgtaaaattcctgcgttccaaaggagacctacatttctatcgcgcattcctccttttcatatatttattctccactatgcacgtaccctaatggtcattgtggcaaca

SEQ ID NO: 64092 - DNA, 465 bp, Oryza sativa
  unsure (1)..(465): unsure at all n locations
cgactgcagcatgcaagcttcngccacaaatcgacgaagacacacttaagattcttttcatgattgcattgcgcctacagtacgttccattatgcatgcaaagctagctctggtgctaaaaaaacgaaatccacttcttgtgcgaaattacaaagcgttcaacctgttttgtttcaaaacaaattccacttcttctgcaaatttactaagtggtcaacctgttttgtttcaactcggtctatgtatatctgtgtcctgcgctgcagtttgaagagggagggatgcataagtagtttcacccaaattatgtaaagccccagtcaaacggtttagtatataaagaatatttcaagcgtgggaaatccctcttttgttgttgttgaggtagcttggggactaactatattagagctaccgtggcatttgcatacaaagctgttatatttcttttacaatgtaatatat

SEQ ID NO: 64093 - DNA, 453 bp, Oryza sativa
  unsure (1)..(453): unsure at all n locations
tgatgtctatgtcaaggtttgtgctggttgggtctatagtcatctaatctccatgacaacttgataactagtcaataccatgcccctgtttcattcttgacttatactaaaataatttggactgtttaataacagacactattgttagccagccggaatccattgataccagcttatcatcttaatgtcctcacaacattttttctagctcaatggtctttaaaagaagtggtttacattaaatatagtcttttatatattttccaactttcagttggttgtttaattggctttgtaaattgtgattgaacaataagtacatattgcacggttttgaggctggagatgtatccatgcaatccaaagatacagttagggatgcttcacggacacaagaaagaaattctttccttgattacatatcgaanactcttactagtaatttttctgatg

SEQ ID NO: 64094 - DNA, 442 bp, Oryza sativa
ctgcagcatcaagctgtcaattcatagcaacacacaatttattttctcagcactgcaaacatacctcttgactggccgttcctgtgctggggacctcgacatactcggtccattcccacgaagacaaggccggtacaaattcctggtcgtggcgaccggctacatcaccaaatggatcgaggcaacaccccacgggaaaaatcaaggccgacaatgccatcaaatcattaaaaggatattttgcaaatatggactgcctcaccgcatcatacccgataacggctcccagttcatacacgtcgacttccaggattactgcatccgactgggagcaaagtctgctctgcctcggttctcacccttaaacaacggacaagcgagagggcaatggcatatacaacaaggaacaagatctgtgttacgacagctgatatccatgaaa

SEQ ID NO: 64095 - DNA, 452 bp, Oryza sativa
gcttctctctctaatggcaaattcttaagtacaatcttaagattgtgttttggttaattggcaaaggtaaaagtggcaaatagttaaattccccatcttaaagtgggtattggagacttacataggaaaaattcagtaacattaataacaaatattaaaaagaacgaagagaagaacaaatattataatctaaagagaaaagagaagaggctgatattagtagagaaaaatgaagccctcatatatgtacccacactcgctgttataaacacacatcatctttgaatatatcttgagattaacgaagttatcacaaatgcatcacttatgagaataattagccatagatatgagcacccggctcaatctaaaatttgaatccggatagacaagtttcaccttcagtagcctattcagtaaagttacgctcacttctccgataatctatattt

SEQ ID NO: 64096 - DNA, 399 bp, Oryza sativa
  unsure (1)..(399): unsure at all n locations
agcttgaaacttgggatgaatgcttaattcttgtgagaaaaagatttgtgttttcatactatagacgtgctctccttgagaaatgggaacatctataacaaggtgacaaaactgttagggagtactttcatgattttaaaatttgtatcacttatagtggtttacaagaatctaatgagaacacaatgactagatttttcagagggcttaatttcaatattcaggctgggcttgttaatgtgacatataatcatataggccaattgttcatgcttgcttgcattgttgagcgcaaaattttggagaatccaacggagcaacaagatatgcttgtgcctcctatcactgatgttttgcaagaaggtcagaanaattctccaaatgagaagaaccatttgt

SEQ ID NO: 64097 - DNA, 472 bp, Oryza sativa
tggttattacgttgtggtttagatgaatgctaatattcttattaatagaggcttttatttgggcttaacaaaaaaattcatgacatgcttgattgtcaaagatatacatctctttctcatttgttacagcttgcttgcaatgctgaaagtaaaatataggaggacatgaataagcaacatgctatgtttttgtcttctattactaaccatttgcaggaagtgcataatcatgaaaaggaggagagagacatgaaagagccgctagtcccattgatcacactcaaagtcgaggcacctccattatctgaagagggcatcaaaggtaaacttaatggagctgaaattaataatagtgagtgtgttgttaatgaattgaattcgcccacttcttatgctatagcatagcaaccattagcggaaccaactgttggagtatccttgtcacaagatgaattactaacttgtctttgtg

SEQ ID NO: 64098 - DNA, 425 bp, Oryza sativa
atacactggtttgatcaatccaatgtttggagtttttgttcaccagatcatgatactagggtgattattcgggtttcaaaagagagcacaacgctaccctctttaatttcttatcctaaacaaactatcaatacgtaaagcaatatgatgtatggctccatgctaccgtccatcagattttaaatctttctttcatcacgtactaggaaataaatcgtgattgggttgatacatccaaatggatgtgaaggccaggtttatcccattgcgtaaaaaaaggatttaaattgtgatatccacaaacatgattacattcatccttgatgcaagctggaagctctactttccttaatataaacacattgtctatttggtcagaaggtgctcattattgccgtcaaatgttggtggtgttccatatttca

SEQ ID NO: 64099 - DNA, 439 bp, Oryza sativa
gacacaagaaactaagcttgtacaactactaataacgaaatgacagcatggacattctcaattagcaacctactacacgtacgttacacgacgtagcatcaagcaccactcatatatgtactaatacacccatgcgtgtcgtttcatcgtgacaccacactctctggcagtgtaaatccgcgagaagctcacaaaattctcacgcactgaatttaattaaatacataaacatcagcatggaaacgttctattttaaattggaatcgtatatacactcgtaaccacgtagaccatttaaagttgcttccccaagtctagacttactccctcataaaaactaacctatctttcaccatcttatgtgtcctgaaaataatttgtatgctttaagtaatcattacattagagtttataaaagtgagagaaatacattcgaact

SEQ ID NO: 64100 - DNA, 400 bp, Oryza sativa
agcttggcaagtagcaactgtactgaattatggaggttgcagaagtggtcgctgggacgatccttactgagaatggtgatatacgcttaagtggacatgaagtgatctgaattggccttccaaatggagggtttgctttctgtgcactcactctgtactgtgcttatcctttcatttcgttctgcttaaattgactgacctataaatatgaatatggtgttggattggtttgcaaagatcttttcaggtgtggaaccggatgcatcccatgtttgaaagcattcttgaggcatgtcttgtactctcacccttcataattaacatttaaaatgttctttctgtctatccggtgttgtttggcaccttttctgccatggaagagctcgtctgtcatgaactg

SEQ ID NO: 64101 - DNA, 465 bp, Oryza sativa
  unsure (1)..(465): unsure at all n locations
tcggtgaaagctcaacaagaatgatgaggacaatgattgttccatatgaaaagccaaggcggctagggctgagcaaatatgcccttaactacccattatatattttcagaatttctattgtatttttatagggcctgaattggattgcagagtttggcctagaatttaagcactaccagccctaggcatgtcttggcccctggacgaggataaatcatatcatatctacggtggattttcacccaccactttactctccattatatataatgatgattcttgccgcatcattgcctcctagattctccatttcttacctcctaataaaggccanagctcctcacctttcgccacttgattaattgaaatggctacatcgatcctacgtatattagctaactaattgagcactattcaacgttcaaaggcaggtcgtgttcttggactcgtcactgatggacaaag

SEQ ID NO: 64102 - DNA, 406 bp, Oryza sativa
agcttgtatgcattgtcattaaacttttggtttctactttgaaaggaccatcagctctaggctgctactttagattttctcaaattacggaacctatcctttctcaaatgccaccaaaccaaatcaccaggttcaaaagcaacatgtttctttcctttgctcccaacaaggttatacttaatattcatgcgctctatgttctccttagtggtctcatgccagtttaacatcaattcagcgcgatatttagcatcaaagttcactctctctgaagttgggaggggcaaaagatcaattggagcacggggtagaaggccataaacaatctcaaagggcacttctattagtagaatgtgtgaacgattataacaaactaacatgaggcaacattcttccacatttaata

SEQ ID NO: 64103 - DNA, 477 bp, Oryza sativa
  unsure (1)..(477): unsure at all n locations
ctcaagcttaaactcttcggcacatgtgtggacatatataaggggttgtgatggttattcttctcagaaggatacaagctttctttttggtccttgcaaccccccattcccctgtcttggatttggaaaagtaaagtttacatgaagataaaagttattgcatggctctttttcttggacaaaataaatactagagaccttctggatagaaaacacagtaagcctccaaatgtgcctcttacatgcgatctttgttctctaggagccagggaaactagagatcatctgtttttccagtgtccctttgcccgctcttgttggaattccattggatttgcttgggacacctcattggaatntcatcagatgattgctgctcaaagaagtggttttggagatggctgttttatggaaatttcctggttgcctcttggttgatatggaagctcataaatgattataactgtaacagtgtca

SEQ ID NO: 64104 - DNA, 252 bp, Oryza sativa
tcaaaacatggtgggtatttaacattaactgtctgctggataaaactatttaaaaaagcacttttcatatccatttgatacaatttaaaaccttttgtagcagcaaaagccaaccaaaagtctattggctcaattctagcaacaggagcagaaggttcatgaaaatccgaaccctttacctgggtaaaaccttgagcgacaagtctagctttatttctgacaatcaaaccatcctcattgtgtttatttttg

SEQ ID NO: 64105 - DNA, 318 bp, Oryza sativa
tgccgtgcgccttgtgaactaccaccgggaacgccagttcttccggatggatgactacacggatgaatccggcctccagaagacacgccaactcttcgcggatgaaggcttgacgttccagggcctgccgccgcactttctgcccgaacggccttgcgcccagccgcacggctagacggtgcgtaatcacctccctggggaccccggtcatatacgccggtctccatgcgaagacgtcagcgattgcccgcaagaaggagacgagcgcgtctttctatttgccgtccagaagagcaacgatccgcgtggtcatggatg

SEQ ID NO: 64106 - DNA, 417 bp, Oryza sativa
  unsure (1)..(417): unsure at all n locations
agctttatgtcaagatgaagcaatcaatttatctccaacaagtcaactctgggagtcatcaattttgtcttcgcttcagatcagtaggtcaagattaaatttacatgtctgggagtttggagtcatcaaccaatcaactcatatcagattcactgagttgaacaacagcatatactttcctccaagtgaagcatctacaacagtttgatggattattgtcactgacatcatcaccagcacctctgcttcatcggatctgacattccgccgttgctaatggatgattaagacttcgccaacttgctatttcgccttcacggttgaccaactatgcaaacgctgatgagcgtcttcgtcattatcatcngcaattacaccgctattgactggatcaccgacatcgtcatcttcatgatt

SEQ ID NO: 64107 - DNA, 461 bp, Oryza sativa
  unsure (1)..(461): unsure at all n locations
tccactaattaatacagcaggaaaataatgtcctgaaatcatattgcctaaggtctataatgtcctgaaagcaatttgcctatggactacaagtccagtactacataacctgaaagtccatggtatagaaaaatatgagcagagacttttgtacatatgcaaaatgtaggtgtcattcagagtcagagtangcatcgatctctattgacaaacaatatgcttacatgtcggcactactcagacagcacaattagtaaaagtctagcagcaaataacctgaaggtaactntcattaattagttagttgtctgaatatctctgaatattgattactcccttatgtaattagtcagataaagagagacacttattcgttcttagaatcttaattattcattggttaattgttcatcgacgatggtttttgacttgcaccagcngaattataagatagaaattga

SEQ ID NO: 64108 - DNA, 354 bp, Oryza sativa
agcttgccgtggacccgtggtacgtacgtacaaagtgagctaacggggccatcatgcatgaatgcaatcaccttagcactgtgctaagatatgggcgtcgccccatatatagcaagttgaatgtcctaatcttaagccatgacacaatcatatgacacaccccccaagttattaattcgtatccttgagggattccattacaaatctgacgcaaccaatgtgcaaatttaggcctctatcgcgtaccgcacacggtacagatgaagcaccacgctcgacaccaacataaattaaaactctgtactgtacatcatgtaatagcatattgatcacacttaataagcatgtattctc

SEQ ID NO: 64109 - DNA, 467 bp, Oryza sativa
  unsure (1)..(467): unsure at all n locations
tctgagggataaccggataacagcttatatccacaatatctcttgcagagcatgatcactggattaaaacaagttatgcaaatatactggtggatgcttttgtattaccatctcaaatgaaatcactccagaaatcccagcgatgaaaatctgcaaaagttaaaaaagttgagacatccgatgaaagctactaaagttcctagataatcaaacctatatgttttatattaacttcaattaacagcggatgtacgatatccatgtatcaaatatttggccagaaaagtaagaatttctatcaatcagaaaatgcaaatattttttcaccgcctctggaaatatagtcatccatatcatagatatgagaatggactggctctggcaagttaccttgtgtggtgaatcttgcacaacatcggatatcaatttaatctcttcagaagcttcttangagcaacatgctgcat

SEQ ID NO: 64110 - DNA, 387 bp, Oryza sativa
agcttacttatatgatggttactgggaagatattgtgtctatttatgcattctacaatgccaacttggggataaccaataaacctgtgccagattttatgtaaggtttacattttgcatggtgaaaacaagttacttttaaaagggtgcatttctgctgaattttcttcctatttttgagcaaacattattgtgtgcagcttctatgaccgttctgccgcaatatatacgcaacctcgatacttgcctccatcaaaagttcttgatgctgatgtgacagacagtgttattggtgaaggttgtgttattagagtaagtatccttttcagatgaattatcatagcgcttccttctatgatctgtggatagtattagatcataacatatt

SEQ ID NO: 64111 - DNA, 470 bp, Oryza sativa
  unsure (1)..(470): unsure at all n locations
gganacaacggtttgaggagatgatcaagcaaatagggttaccttcccaagcttaatgtttccactaggtggaactcaactgtttccaccagatagaactaatatgctagtcttggctatgttatatatgagagcttttagaactctaacccgtgtagacaaacaatatgtatttgagcatgtccttgcataatggaaaatggctgacaagctctgcagcatattgaaggtattttatcgagcaactaagatagttttaggatcaaagtatcctacaactaacttgttttaggatcaaagtatcctacaactaacttgtacttcaatcagctttcgcaggtgcaaaaagtgttggagagagaatcctccgatacaacctctgtcatttttttctttgggcatggcatgagggagaaaaattagaaagtattagattttgcatacctgcatatttgaatcctgttatcttg

SEQ ID NO: 64112 - DNA, 435 bp, Oryza sativa
agctttcacaacctcacaggggggaactttggaattatcaacagggccatgataacactgctgccgaagaaagactcgccatgctcggtgaatgacttcagacccattagtctgatccactctgtggcgaagcttatatccaaaactttggcaatgagactggcagcacggcttggtgatttggtctcgcatgcccaaagtgctttcatcaagaagagatgcatacaagataacttcctctatgtgcgcaacatggtccggtccttgcacatgcaacggaaaccatccctcttcttcaagttagacataacaaaggcatttgattcagtatcttgggaataccttgtcaaaatgctgcagtggagaggctttattcagcgctggagaaaatggatgtgcttctcctatcgactgcatcatccaaaaatttactca

SEQ ID NO: 64113 - DNA, 373 bp, Oryza sativa
  unsure (1)..(373): unsure at all n locations
cagcagcatgcatataagctcgccggtcttcatgatgaccggngctctattaaaaatctctcttagcatatcggcgcggcctaattgaatcaacatcatatatgcgacgaacctcagccatgatagcgtcacccatattggctatacacctccttggaggatgctgatggggatcatatcctgacctaataagcggccgatgtcaacaatcgatcggctgagtgctgacatctcataaaattcccaagcgaagcaatctctatattcttttaatagcctctatcaacttggatctgacatctgcagaacaaatactaactgaaatatgttgggcttggactatcccctggaccaatatcaaaccttttcaaaa

SEQ ID NO: 64114 - DNA, 329 bp, Oryza sativa
cgctaacgataagattgataaactaaagctatgatagatattctccccctttggcagcaagacaccaaaaatagaagacgatgagctgacgactcaagcgaatggcgcctgatgaggatcctcgggaggtggtggaggaggatagccatatccatggtcatatacaaagaagttgaagtctgaaggcaacccggcaaaaggatcctcaatctcttcatcctacggctcatcgggctcggcctcgaaacccggaggagaaggagggatatcaatgtggtggtcctcataataccgtgcctctatgaacttgacatcacgagccgtcttct

SEQ ID NO: 64115 - DNA, 418 bp, Oryza sativa
  unsure (1)..(418): unsure at all n locations
agcttgacattatggaccactgggtctactaccagggggtaccgccccaggtggaccactcggtcgggatgatccgagcggtcaaacttgattgctgtttctgaccatcgaagatattggggcgtgccgggctgaacaacgttaatctcccgctcagtcaacttttgctttcttttagattcataagccaaggggccgccaaagatgtggttaagctcattgcggtggtcttgaaaacctgccggggggtcgccatcttccttcttcttcgacgtgctttgttcttcgtcggagttcttccgtgtagtcttggtgtactgttctgcgaactgcttgtagacgaaacaatctttggccgcgctggttgagttaggatgaatgcggcattangagttcatgaatttgtcgaacgtgttga

SEQ ID NO: 64116 - DNA, 471 bp, Oryza sativa
tcctattaatatctggagatccattgaagagtctgcctattatttaagtatgaacatagattaaactaattgcaagagttatagagaatcctcccaaaaattcttataaatactatcaaatgaaaggaggtctctattagatcaaatctcataaaactttgtaaatgattcacacgatacaagtggactattcatgatcaaatataaatgatgaatctttatagatcatcttctttgacaaacctctttataacgcatataataaaattacactccatggcaccggaaaaaaacggaaaaaaaacctcgcttgattggccctcctgggcttccatctatttctcttctcttaactcttaaatctacaacaagcgggataagcatgatctgaccatgcgatagaatctcaccagaattacggcatgtcgcttttgaccgctcggccacactcccctactaagggatgtatgc

SEQ ID NO: 64117 - DNA, 436 bp, Oryza sativa
  unsure (1)..(436): unsure at all n locations
agcttaagacaatgtgaacgaagatgatcatgtgctctacattcaaaacaacgattcggttctcctcttttgctgttcctaacatttttcatagctcgagaaaatctgttagatagcaaaaccaaatcctcctcctcgaactgttcgagttgatcatcggatatggcattaaataaagcaagaacagaagacttcgatgaagaagcaccaacatccaaagaagttgaagaagaaaccaaagcactagacttagaatcacctttacgagaaagaatattcatctcatgagttttcagtttagtgtaaagcgaatccaaagtcaaagtagacatgttaacagactcctgaatagatgtaactttcatctcccagatagacatgtcaagaccattcataaagtgacgagaaatctcanattatggatcattcgcattat

SEQ ID NO: 64118 - DNA, 351 bp, Oryza sativa
tactaagctttgatatttcgccggttaagtacgcatggcaacacgtttatttcttattctgatcacggtgatcaagtaagtcttaactgattgcatgcgcgacaagatgagtgtccagctatataactgcgcgtgaagatatctgaattatggttcggaggagcattatgagcggatcacatatggttaccatgcatgcatggcacttatgaaaggcaccactatcattccctaaataggggcagtagcaaatttaccactactttgaatcggtattacaaaactgccactagaaaatcactaaaatgccacttgaactgtcttttcattgtgatccttgcaatactcaaa

SEQ ID NO: 64119 - DNA, 399 bp, Oryza sativa
agcttgtctctgcttaagacacggttttcttattattgtgtgcatggagtatgttgtatggaggagtgttacggagtaatcgaactattttgcaattggttgaattatcccatgagtagcaatgtcaacagggaaaaaaaatctaatctacaaatttcaaaaaagcaaagcgctaatgtctagcgctgcctccaaccgagagacccgactgtgtgcctctagggcatctttacttcttttttttttatggatgcagctgaccggcagggggtcgcctgccgtgcccccgtaagtagggggatcttttcactgctctctcttttttttttttgcagctggccggcagggggtcccctgccgtgccccgtataggggatctttacactgctctcttttttt

SEQ ID NO: 64120 - DNA, 457 bp, Oryza sativa
  unsure (1)..(457): unsure at all n locations
ttctaanatattcaaatacttatagcttaagtttgctgtatttaatgcttaactaatatagtaaagtcacccaatttcatatatcgctcaaaaagtaagcccgtaagctcataagaacgaaggctatcagtttggaaagcgtgtcacaaatattaaaattttcatccaacttttgttggagaaacgaaacttttattggagaaacgaacgtggcctaagttggatgaaaattttgatattcgtgacacgcttttcattccgctaagcggtttgctaataagaaactntctatatggaagttgctctaaaatattagataaatatatattgcacaattgtaataattaaaactcaatatatcgtacattaataccacattgttttacgtaacacatttaatcttcatcttcatattcacctacatgagctcttaataccacctagctgtggttggagg

SEQ ID NO: 64121 - DNA, 409 bp, Oryza sativa
tagctttatacgctcctacaatattctgtgtcccttctaaccaatcattatgatctctggtttattttaattgtgcccactactactgcgcaatcaatatcatcaccaaatgattctagccgggggccaaatctacaacagagaagctccaacaacctatctaaattatactctccaaacacccgtatacccaactccctatttaatttggctagtaaaactagatgatcattcctacaaactctctatagtaacagcggacccacatgtcagcttatactcctcttcttctctctccccttctttcttctctttccttcttttcccctatccttccttcccggtgccaccactcatggcgcgcggtgagcacaggcgacacgggaggccggaagcgaaatgcggcgtg

SEQ ID NO: 64122 - DNA, 255 bp, Oryza sativa
atacatacctatcatggtgcactctaccctggagatcttaacccctgtttacatatgactatcacacgctaaatataaatttatagtcaagttctctctacatgatctttccacgggataaaataaagatgacactcttggaatactctcgggtgagatgctacaatggcatatccgggcgctcgccgataaattctgtaaccataatatactatgagtaattctgcgccattgctgggaatcatatttttaata

SEQ ID NO: 64123 - DNA, 301 bp, Oryza sativa
  unsure (1)..(301): unsure at all n locations
nttngcttaacgcataggcggaattagctcgcgcaaattaatattcttgaatgacggctggttagaataattatcgttgatgatacctcctcgataatatgggcatggctggatacacccctgaccttcttgtggatgatacccgaagttgttgctgcacatgtacatcgtcttctcatgggtttccgggcggccattcccagaatgacctgtgttgccgcagacctcacatgtggcgtgagagtccagagctatgacggagccttcgggacattatttctggtctaccgatcacttcatg

SEQ ID NO: 64124 - DNA, 373 bp, Oryza sativa
agctcgactgtcctgtggggcttacgcccttatttgtcgaccaattcttcgtggcgaatccctttggtgaatgcggcgatgatgacgtcatcggtgatgtccgagatcttgttacgttgctcaaaaaatcgccggatgttatctcgaagggattcttcggacttctgaataacgttgtagaggtcgtattgtgtgccgggacgctcaaaggtgccttggaagttggcgatgatatggtcgcgtaattcagcccaagatccaatttgtccacggggcaatccatggagccaagatcgggcggaatctgctaagccactggtaaaaattcgcatgggcttgttgtttcttctgctgcgcgattgtagaccgttac

SEQ ID NO: 64125 - DNA, 319 bp, Oryza sativa
  unsure (1)..(319): unsure at all n locations
ttccccgcacgagagcaatagcgcacaatgatctgaactggacgaactctacgcttgcaagtgcncnttcggaaacgcatcctcccattccgttgagacaagcaccctgtccaatttgaccagggtgggaatttgttgctcgctactccaggtatacctcctcccgaacagatacagttctttgagctcaaggtcattaatcttgttgcggaaagcattcatgagccgcctgttcacccgcgagttgttcttgtacgccgctgccgctattaagttgaaatcacctgccacaagccanaccttcccacagattcctctg

SEQ ID NO: 64126 - DNA, 421 bp, Oryza sativa
agcttcttgcttaccatccacgtgtggatgataagattggttgtggacttgatgctataatggtgagtcactattatgacctgctaaattatattcacgaactgtatgttgttagaaataaaataaatattcactgcttaatggtaattgatagcaattctgttgcctcatctcacttctttctctttacatttagttgactctgtgatctgtatacgaacaccatgtacactaagagttaaaaagtacgagtgcatctaatctaccccccccccctcctcaatacccccctgagctataagcgttggcctacttattcccctgaactatgaatccatctaaataaccctcataattatcaaaattctctatataacccctctgagattgtttaatggtggttttctccacatggcaactg

SEQ ID NO: 64127 - DNA, 379 bp, Oryza sativa
tcacgccaacggagcggaggtcgtatatgttatgggggtgcgcaccaatccggtcaagacaattatattagctatgcctgatctattacaccatgtatgctcctccctcgatacgtactcatgcacccgtatcagctgaaactcgatctattattgagtatattaatgcaagtggcaccaccctctgattcgctctagctccgtccggcaagtgccatatagaagctccaaagcacacgcgtgatcacactgcggtgagatgagtatgatgaatagatgacaggccatgcactggctgaacataatctgaccaccatgatcgttgcaatacacccccgtacgactatacataacatcacatgatgaccgatcatcgggc

SEQ ID NO: 64128 - DNA, 283 bp, Oryza sativa
agcttacttacaggatggctactgtgaatatattgctgccatccacgcgaaccccattgccaaaccgtggactgccacaagacctgcgtccaattttatgggacgtatacattcttcatggtgaaaacagcatacgttcatgcgggtgcctacctgctgcattaccttgctagctctgagcagacactatagagagcatgattctatcacgcggctgccgcaatatatacgcacactctgtacttgccttcatcataccgtcttgatgctgatgtgacaaacg

SEQ ID NO: 64129 - DNA, 430 bp, Oryza sativa
  unsure (1)..(430): unsure at all n locations
tcaagctttagtttgtattgcagctacaaatttattgttgtcgatgatggccatgattattaggtctagaaaaagaaagaggtgttcaaggagagaaggtattatatatggcccaatggttgaaagggatagaaaaagaattgagtacctacaaacgaaaatttggtggaacgatacaacttgtatcaacatgcttagacttataagggcaagtttctttcgtttttgtaagctttttaaggatcgtggtttacttgaagataccattcacatgtgtattgaggaacaagtggctatgnttttgcatacagtggggcataaccttagaaatagattagttcgtactaattttgataggtctggagaaacagttagccgttatttcaacaaagtccttcttgcaatcggtgagctacgagatgaactaatc

SEQ ID NO: 64130 - DNA, 452 bp, Oryza sativa
ggtggcagagaaaaaccacaagacacattttccggccggttgaccaatcacgccaactgggcggaggtagtatatgttaagggggtgcccaggaatccggtcaagaaaatttttttagctatacctcatctatttcaccatgtatgcaccccctcgatacaaacttatgcacccgtatcagcttaaactcgatctaaaatagagtaaattaagcaagtggcaccaccctctgtttcgctctagctccgcccgccaagtgccatattaaagcttcaaagtacgcaggtgatcacctggcggtgagtaaagtatgatgaattgatgacaagtacatgcactggctgcacataagctgaccaccatgatcgttgcaatacaccccgttacactactacaaaacaacacatgaagaccgatcatggagctactggtttgctaataccgatacctat

SEQ ID NO: 64131 - DNA, 436 bp, Oryza sativa
agcttggggggtttcgttgacggtcgttatccaccagtttcgaccgtcaatattaccaattaataaagactagttatgcttgcaatgcataaattccaaataaaatatctactttgtcacgcccggaatttctatccaaaattccaaacgcttacatgtgtgttaaaccctcgtgcaggaatcaaccgaggcacacattaacaaaattgataatagagtacaaataattaactatttaatattcgcaaataataaattgcgaaccggtgccaggccggttcggccgaacccctggtggaccaaatcggccccacatttagctgttgggttccaacgactatgttggtggtggtcgtgcaaacttttgctcaaaattttattttattttggtcgaaaaattcatttgaagaatttgctcagatcaaatctaatgtgc

SEQ ID NO: 64132 - DNA, 462 bp, Oryza sativa
  unsure (1)..(462): unsure at all n locations
ntaactattctaatcagcatgataattgtaaaggaaatgaaattaaacaattatattccacatgagaggtactcagcttttagcaatgttttttttcctcgaaaatgcaagagaattgcgtttcatttcattaaggggaagaaaataaaggaaaaaaaaacaaagtatgagagaccaaagccctcctaccgtgaaaacacacacccatgccccggccaaccccggccatctagctgcctatgtttgccgaaccactaagaaacagcttttagcaatgtgatttgtgttcatctaatgcacaatctgtaaaccccagtgtaagaacaaatggacctgatcatcctcagtagtaaataagagactgaagatccctctgctagaataagtggcagcagctacacccatctgtggaacagtagaacacttagtagtgcaaactacaaaatacacaaagttgacatc

SEQ ID NO: 64133 - DNA, 419 bp, Oryza sativa
  unsure (1)..(419): unsure at all n locations
agcttgttatatttctggttatttatgtacaagtagcctctatatgttngtgcctagatagcgacgtcagccgctgccattgctgtaaggaataactagatattctcactatgtgcctacttccattctccttcgtcatattacataaaaaaacgatatgtatactttttcgtaaaatttcattttccacacattataaatagcactgtatatgaaaatgtaataggctattatttgatatagaggggaagattttgtttcattaacatggattaaactaatttactgattaggtgcgtacaaaattgttaaaactttatagcattccaaataaaactactagtaataaaaaaagtcattctaattattctattcattatctaacaaaaaatacaactactactagattatttctttat

SEQ ID NO: 64134 - DNA, 443 bp, Oryza sativa
  unsure (1)..(443): unsure at all n locations
agctggcgatgacgggaggtaaaacagacttctctgcgggctgagaggaanggagagaatgggctgaattcggcccaagactatgaaggaagattttattgcttttccaaataaattaaccaatgagatgatctttcaattgttaaaaatacttccaacgctcaaataattccatgaaaaatcttgaacatacttggacactctaagtatttaacaaaattgaaaccatctcatttcatgattaatttaatatgtgaataattactgaaatgttctttgcattattaaaattaataattgagctctgaaaaattcgagaaaattccagagagtataattaatcatggagaatttaataaaaattaaatcctgccatgctttatatttacgagattttatttcccacatttaacttcacttgtaaattaatgaacatttaatat

SEQ ID NO: 64135 - DNA, 450 bp, Oryza sativa
cgagctcatccttgtgcccgaaatatcttgctctgccctactattgttctacctccaagcgtgcccgcatccgattgcataccggatatctcgacgtcgctaggtttcttatgcacaccagcggtcgtcgactgcatcgtagccttggtgcccagaccggcgtggccttgcagagcacgcgcatggcgtagaatactcggcctaatcacgtaggcatacacttcccacatttgtctggcgcatcagaggcggataaaggagctctggttatgagcatcgctgcatcgagtggagtgaaagcatcgaggttgtcgattctggaatcgtcgcagcacgcgcagcgagcggtctggtccaatctcgtgcggcacagtaaaagggatttggctactgtagcgcccttttcgtcgtagcgcataagcgggatattaatacttaacaaccctaatt

SEQ ID NO: 64136 - DNA, 188 bp, Oryza sativa
aaacgaccaaggggcatacatcctcgttctgtcccaaaaggaaaagaaacccatcggagcaccacaaggaagacacacatgtgaatgcagccgacacaagacaaaaacacccattaagacacactgagagagaaaggcaccacaatgaaaggcgcaacaccagaggaacgggagaagaagatccgagc

SEQ ID NO: 64137 - DNA, 466 bp, Oryza sativa
tgatcaattatctgaaggcccaattttatctatcattgatcggctcgaggctcccacaattgaactcttatcacaacttgaagaatgtaatgctgagctatatatggaacacaagaaactggccgatctcccaaaatctattgaagaacaaaaaacaagactcaaatcggctattaagcatgttgctgaactgaccaagtccctgaaagttatccctggaaccgatgctcacgatgcccaagccatagaagaagtagagcagattatgcagaaagctatatcggttataccgcgatacttatcactgtaatcttagtgcaatatgacttataattcttgtaatcggctataacattctgactctttcacatcatcgcgcgacataaaaccttagaatttcctttgaagattgcacagaaactttatgaatctgagacgaatctgagaactttatgaatctgatata

SEQ ID NO: 64138 - DNA, 442 bp, Oryza sativa
  unsure (1)..(442): unsure at all n locations
agcttatgtggatgacgtagtcgtctagacctagcagattgatgattngattacagatctagaagaaacctttgcgagcatccgcgctttcaggatgaaactaaaccctgaaaagtgcatcttcggagtaccgtcagggaagctgcttatatttgtggtgtcccatagaggcatacaggccaacccggagaaaatcaacgccatcctcaacatgaaaccgccgagctcccagaaagatgtccaaaagctgactgggtgcatggcggcgctcagctggttcgtttcacgactcggcgagcggnggatgccattcttcaagctgttaaagaaagcagacaatatccagtagggacccgaagtacataaagcctttgaagacttgaagaaacttctcacctctccaccaagtttggcctcaccacattcgcaagagccgctattg

SEQ ID NO: 64139 - DNA, 431 bp, Oryza sativa
gtgtcgcattgtaccgccagctatgcgttcctttgaatagtgattgatcccttcggtcctggcatcttgagcacttgatacgcgtagtgagatgcggccatgaacttcgcaagtgcagttctcccgatgatggcgttatacgctgtatcgaattcagcgacatcaaaggtgatctgctctattcggaagttgtttgcttggccaaaagtcacaggcaatgtaattttgcccaatggtttggacgaggactagggagtaattccatggaagggttgatcggtgggtgtcaactcgcttcgtggaattcccatcacgtcttaagtgctggcgaagagaacgttgattgagctgccaccgtcgatgagaacccgcgcgaccttgatgttccgaatagtggattcgaccatgatcggatagcatcctgcgatgat

SEQ ID NO: 64140 - DNA, 438 bp, Oryza sativa
agcttgaaggcgatgctgcaatgaacaaatttttccgtgacatctacagagatgctgacgaagacatgcgacgagcaatgatgaaatcttttgtatgtctttctttagcacaattgatgaaatgtttataactagtgaccatgctgacagaagtgcgtttaagaagttcgaactttgtatacttatacatcaacgatgtgcttgtttgcaggatgaatctaacggtactgttctgtcgaccaattggaaagatgctggctcgaacaaggtatatggaagcccacctgatgggatggagcttaagatatgggagtactaaaatctgcgttcgtgcatgctgtaaaatcgctatcgtcgcgagtcatcacttggctggagattccgcgcatcattgtccacgctgatattgttggatgctcttcgttgcgtttcatattg

SEQ ID NO: 64141 - DNA, 325 bp, Oryza sativa
  unsure (1)..(325): unsure at all n locations
gcactgagatcatacacaatgccatcatggtcntagcaatgtataagtcgacctatgcagagacgcggcccccaaccgaatgggaggaacgcgcccggatacaaggatgcctcggagataccctaaactaaccgtattggcgtaaactcgtgggcatcactcccccagatgtatgggtaatggggtaagagtaacaccgggagctcgacattcacaaccaccgggtaagtgacacctacgaacaacataagcttgtatgtctctcgagagaaggatactgcttgtgggtacaaccgcaaaaccttatagaggagcattgtcacct

SEQ ID NO: 64142 - DNA, 58 bp, Oryza sativa
aaaaaaaaaaaaagcgaatgactgtgagcctgaaaccaacaaaaacaccaacacaaac

SEQ ID NO: 64143 - DNA, 411 bp, Oryza sativa
agcttatgttgggacttaatgctaaaatattttacttccaagtaaagaatatactctgatctagtgcaactgtcaaaacgttttcttcaagtgcaatggaactcatttatcgatgggaatgatccgaatgcaagtctgttagcattatcatagcctaatagtatcaatggttcgcacgattgaatgccattatgaattatcatataccactacatgaatatgcagtaaagtgagcttattagcttagcacttaaaaagtaaatcatccaaatttcaacattgtagatgactgatgcattgcattcagagcattgcttattctccacatgtgattatgcaacatgcagtgggctgatgtacctaacatgatatttgaattgcagtgctttcagagatgaatataccatgctg

SEQ ID NO: 64144 - DNA, 422 bp, Oryza sativa
  unsure (1)..(422): unsure at all n locations
gtgaaaacgatcctatgctcctanaacagtattattagttgcatatcaggctcccgatgtgtttacagagttgcatttntttttgagagcataaaagcactacaagttgagctctgataggccatagaaaaatcttgttaatatgtcacgtagaagattaatgaaaacctctccttcccgttccagctggctttggggatcttgtgaactgcatccacaagtttctgggaaaggaacagaggagtcaaatatatggatcacaatataatacagtaacaactgattaaagatttcattggggagaaatgtacctgggggtactggaacttcgctgcgatcacaccagtagaatgaaggaaaagatgtactgataccttagacatattgccctgactattattaacttaaatgacnaaacaaaa

SEQ ID NO: 64145 - DNA, 322 bp, Oryza sativa
  unsure (1)..(322): unsure at all n locations
agcttacttgtcttatagtttatgcgctttatctgtctttggttttatcgcttggtgttatgtctggttcaataatacagcttatccgagtgagttttatggacctactgggccagaagcttctcaagctcaagcatttacttttctagttagagatcagcgtcttggagctaatgtgggatctgcccaaggacccacaggtttaggtaaatatctaatgcgttccccaacgggagaggttattnttggaggggaaactatgcgtttttgggaccttcgtgctccatggttagaacctctaaagggccccaacggtttggac

SEQ ID NO: 64146 - DNA, 237 bp, Oryza sativa
cttagatagcacaatagaggcgctctgtctttcaaaaaagagcccttgtctatgcctcaattatgacaacctggaaactgaactgatcacattattgttttagctcagcatcatagacctcaaatgccatagcatacatctgcgatccgtggatccgaggaacttctaatatgacacaggaacctacctgcctgcatggcgtcatagtctgaaatgccttaccgatgaatgaccttg

SEQ ID NO: 64147 - DNA, 357 bp, Oryza sativa
ggatagaacagtagctaaagcattctttatgtaagagcaaaacgaaaaaaaaaaggtaaggagctacaataatataattaagtaaatcaccaaagagatgaagaatgagctgagacaatgcattagtatcttgatatatatgaaataaacagttcaattgtatatagatttacctaaagtgatacatatatataggaacggtggaaatacaaagcagattcattaccagattacacatatatatatgggtaaacaaagaatccttccagaattgtctaggctctatatttatagtctagaaaatgcatcttcagacagcttaatttcatccatatgcaacttccttggtatatatat

SEQ ID NO: 64148 - DNA, 448 bp, Oryza sativa
  unsure (1)..(448): unsure at all n locations
aggcatgcaagctttcgtcgcctgaattatgatatgatgctagcttgggaggttccctcttcttcaagccagctcactgttaaggttacaattttcttttctttacttgcttaaatagttntcttttgttcacaccttatataatttgttagcgttgcattaataaattttcccaggttacttcctcgtattaaaggctnttaagaatctttctacatattgaatttcatctcctttcccttgcaggttgaagtagagagcacagtcagtttagaggctttttcaagaatagcacctgcaattccaacaatcactgatgtggtaacatgttcaaatctatttgatgtactttcatcatcaagtggaggcccgcttacatttccagtatatgataagtaccttacaggattggacaggtcactttctctactggtctgtccattcaatt

SEQ ID NO: 64149 - DNA, 437 bp, Oryza sativa
tactaagctgctcctagcgaatttcatccatgcatcccgaagcagttctatagcacgcgttgcaacagctccaactccaacgagtgcactaccacaaggtgtcaatgcaccatttcagtcccatccacctgctgacgaaacagaggccagtatctgcgttgtacctttggatgttccaatacagcagctgataaatcaagtacaagatgaagaacccgagtgtaagaaagttattgtttgttacaactgtagtgaagaacggcattactcgagggactgtcctcaaccaaggcaaaatcggcccccacattttcgccaatttacaggaagcaaacatgccaatcgccaagtggtcactggagcaaatgcagtacctgttaagcctagtgctagtcaatagcaaccataatactcttatatccgtgttcaagtacttt

SEQ ID NO: 64150 - DNA, 444 bp, Oryza sativa
  unsure (1)..(444): unsure at all n locations
gcttaaaagtctgaaatgttacgaaggggccaggttatttatgtgtgtttaagtaattaaatcagcttgtccagcaaacttttggttttctaatgtgttcttttcaggttgagcatgtgagagctgaaaggaatcttcttgcagaggttgacagtgcctacattgttaagctttattgctcatttcaagacgaagagtttctataccttgttatggaataccttcctggtggtgacatgatgactctactaatgcgcaaggatacacttacagatgatgaatctagattttatgttgcggagacaattctagcaattgaatccatacacaagcacaattatattcataggtaattcattgataataaaaattgcatggcattcggtagcaaatntgccactccatctttgctatacattntcagggatatcaagcctgacaatt

SEQ ID NO: 64151 - DNA, 447 bp, Oryza sativa
  unsure (1)..(447): unsure at all n locations
ttatgttcggcgcagtactaatactggaacttatgagcatgaattgctctatcaatcaccatctactttagacatatcttctgaaacttttttcaaatccaaaagtccagtatcttcctacaaattagtgaattaggaggagctctttgtgccgaaaaagaaagagcagggcaatatttcaaacttgcattcgaactgcgaaatatttatacaaaggaggagagatcaagataatgcagcagggttggttatctaattggctagtcaaacatgaggtggttcatagatctttgggcttcgatcatcgaggaatagagactttgcaaataaaagcagaggattgggattccattgctgtcattttatatgtatatggntacaattatttacgttcccaatgtgcttatgacgttgcacccggtggatctttagctagcgtgtatcatt

SEQ ID NO: 64152 - DNA, 443 bp, Oryza sativa
  unsure (1)..(443): unsure at all n locations
agctgcagcttgctacttcaagaaatgctaaaaaccctattgttgttctaattngataagtagtctagtatattgacgtgcaatttttttacgtgttcgagagaaaaaaatctaataataagtagtactaaaataccaaattatattgagtatgtattgtgaaaaggaatttttatctattttcatttcaaataccctatctcaaatcctgaacccaccctgttgtttggtgcgtgtaaaccaagaccaaaagaacacaataagactaatctcgctgatttaagctatgattaggatgcgacgcaaacacgaaaaataaaagatgccacacaaacatatatatacgctcaaccaaatggtaaaataaggcacacttattggtcagataaaagacataaaatactaaataatgatgcaagggtggaaatgaaaataagcgtaat

SEQ ID NO: 64153 - DNA, 438 bp, Oryza sativa
  unsure (1)..(438): unsure at all n locations
ntctcgtgtcacgtacaccccagaaatcataaaaatcgctcatgtttatcgganggaggcctacccggtggggaggttgtctacgtanctggtgagcatcttgagcttggcgagaagagtcgcacagaagccgcgctccatatcctccaccatggcgtccgcgatgccactcagaagtggccttggcctttagaacctcttcttcaacttctcgatcacattggcgagcctcctccgacgatgataatccgccgtccgctagattctccttctgcgggataacaccaccgtcacctccaccggcgcggtctgtgatgcacaccaccatcgctgtaccctctatctgttctctccccatatatgcgcgcgcgcttctttcaactccccctacccatactctgtcatctttttattgttcgcgcgcccgagcacatcctc

SEQ ID NO: 64154 - DNA, 460 bp, Oryza sativa
  unsure (1)..(460): unsure at all n locations
actgaggcagcaagcttaacagtgccattcggaatggtgagttaagcgttctgctcttttttcatgctctggtaaaattttaagtcagattcactttgtaaaagcatatttgtccctatgaattacgtatgggaatatgaggtttttcaaatccctttaattacgtatggaaataacactgttagtcttgtttgtacttttgcaggcagaaaactttctctgaacaacatacttatggaactcagaaaatgctgcaatcatccagtaggttttactttctgttttgttgatcagatgcagaacttggtctcttttctcttagatgtaggaattgggtgtttttgcttttccgagtctctcattttgacagtgatttgtgtgcagtggttacagaanatttgtagcaaacgagaagcttanaattggctttaatgtatcagtttgttaaactccattctta

SEQ ID NO: 64155 - DNA, 438 bp, Oryza sativa
tcaaaccatttccccccaccctcgcgtcgcagccttcttgttcttcgcccccacaaaagtccgcgctcgcctctgcctttcgcacgaaagtggggattctgcgattttactagtagtatctcattggttgtaaaccaacgcgagacgccggcggtgagttggagttggtctacgagaaggaaccatcggctgctcgcatgtggcggcctcgaagaacaatccttttccggctctcggggacttgttaattcgccgcgatgtccgtcgctttcgcggcagcgaggccccctcggcggagcgaaaaagaaaaaagaacgaaaagcgacctacctggaatggcctgtcaattgtgtatccgtacaccagagtcccaaccaaaagctggctaggaacgggagaggcactgtacatagcaccgacgtggtgatgagacgtgaa

SEQ ID NO: 64156 - DNA, 389 bp, Oryza sativa
  unsure (1)..(389): unsure at all n locations
agctntcgtccaataaaagtcaatagatttgcttaagcaaattatgaagtcacaacccacaaagagatcaacattccctatgttttaaagcttttgctcatggaacgtgtcgtctatttcacaccattgttattattcctgtcgtgagctatatgtttttccaagatcccgtctgttcaaattatttttgtgagaatctatcacaattcacaacaaaggctggaagattgtacttaaatttgtaagtgcttgatgttttcttgcatttacttgtacttaaatttgtaagtgcttgatgttntcttgtatntacttgggagagttaagattagttaggacttaggaataacattggctgtcaagaattgacatccagtaacaacacttca

SEQ ID NO: 64157 - DNA, 390 bp, Oryza sativa
  unsure (1)..(390): unsure at all n locations
taaaaccgcaccatttatcaatttatgaagccgcgaagaacaagataattttcaaaccgtcgttcttcaaacgaacgtaccctaaaggtctaatcaagcgattagaatggttttcgtaagagaaaactgagattcaaatccgcaggatttttttaaaaaaaaacagnatatttatgtatgatcagaacgagggtagatccaggtagacaagtagtatatataaactagcaagtacgatccaggtttttcttatgttgcgcatagttgacgacccaatatattatatttgttttcccaacatggagtgagctttcctatcacttttaatattntatttctaaactagataagatcaaacatgtgtttttacttaatagataagaccaatca

SEQ ID NO: 64158 - DNA, 427 bp, Oryza sativa
  unsure (1)..(427): unsure at all n locations
agcttgccagtgagctctatagagtgctctttattgtttctccggcgtcngncgccggcgggggtgaggatagcaatggctgcagcagcctcatcgacccgctgctagtgagccgcacgagcagcatctgcggcgcggagaggaatgcggccggcggcggcggcggcggcgccaaggggaagcactgggccgccgccgataagggggagcggcgcgcggcgaaggagtgcggcggcgaggacggccgccggccgctgctgttcatgtcgtacagggtcaagggctcccttctgcacccgtacaggtacgtacatncgatcgagtgtacgatcgaaaaatcagcgacattgcaatgaaaatctttttatgcataaagaatattattagtactgagctggctagatacagaatctggacactatacttt

SEQ ID NO: 64159 - DNA, 403 bp, Oryza sativa
  unsure (1)..(403): unsure at all n locations
acacaagaaactcagcttattaagttggcgatctcagcgaagaaatagaattcattgctatctgtgggtagattctcggacggccgtggacgagactagggcggaggccatctgcagtgactgcgagctatgagcgccggtaatgccgtcaactcgtcgttgtcaacgttgttcaccttctcgccttagatgaacttagcgctagtccctgcagcaggtgttgacgatgatgttggtcggagcggaagacgacgctgccggcgccgacaacggaagcaagcagcgcacatgatggtcatatggtgttgagcagcatgctcaggcagacctaaactaacgcgggcatgctctcgcgcgtttgatgagagtatatgtggntcatcattttttttcaagctgagct

SEQ ID NO: 64160 - DNA, 416 bp, Oryza sativa
  unsure (1)..(416): unsure at all n locations
tgatcatgatcattttccggtgaatacaattaatttcaatgatattatngtgntgattccgccggagcaagccgaatctactaaggggaaggaagtggtcattggtgaaccaaggtccaagatgatagtgctaaagaagccggaggttggcgtttggaaagagaataagagtggagcttcaacttctaaagcccctatgaagaccaaggtgacttttaatatgcttttggagaaatatgaaaagcaaggtggtgagaaaattcgcaacaaagggaaaagaccaagatcacctcctaaggagcgatttggtcattcaccaagacggtcgcgttcaccttcgtatcattatccacaagatatgtcatggngttcctatccaatgccgccgtcgggttatccttatccttgcttcatgc

SEQ ID NO: 64161 - DNA, 440 bp, Oryza sativa
  unsure (1)..(440): unsure at all n locations
agcttctgtcgaaatcgaacatggtcgagttctcgctggacctgccgttcccttgtctgcagtacatcaagaatggtttcacgctagtcgattgatgaatgcactagtaggatcattattttccctttttttttcttttctctcgtcagcgtagctagccttctcattttctttctggtgtcgnttttgtttgacgatttgtgtcaagtaatccttttgctccaaagcttgtgcggtgcatttgctgcttacacggcattttgactatgcgtgtagtactcatatatattatgccttttgacttgcggccacggagtcagggccgtgcacgtggaggtaggctaaaccggaggccacggtgatcgttcagctgcatgtccatgcccacgaggttctcgcggtcaccaagccaatccaacgactcaacgagataagatctc

SEQ ID NO: 64162 - DNA, 434 bp, Oryza sativa
  unsure (1)..(434): unsure at all n locations
tctgcagattgttcagnaacatttgaggcttaacttagctattctgctggctcacatccagccaatattcacatcaggaaaaacaaaatggaaataggtaaacgctgatccatagcagaatcctaccggtgcagagatgctcgagtgtaatcaaacgagatttgatttctttattgatttatgttttcaggtttgttagctggggtgttctcaagtttgttaatcggctgatagacatatttacaagtacaatgcaggtgaccgaccgagcgtgacatcctaataatccccacataattatgtctcggcagctgttatgctgtctcaaatccggtgataattgcagtgagttcgacggaaaataacataatggcgcacgaggcacacttgatccactaacacaagtacataagactcgttggacaatcacctgt

SEQ ID NO: 64163 - DNA, 433 bp, Oryza sativa
  unsure (1)..(433): unsure at all n locations
agcttggctaacccactctagttattnttgttatatgcattcttggtttcaatgcgcacaaccctcgggtgaaatggaacgaacaaaaacaactagctcctaaaattaagcatcgtcttttctgtttggagcaaaccaatgctagtgttttattgcttcaagataaaactgaaattgtgcaatattttattctgaactttgccttctttcctttagaaggctgtcgttttatgtactgcacatatatatttactttagtccattggatatatgccagaaattgagatttgcccgaacaattacttcagttgtaaacttgtactcttaatactatgtgatcactagtactacctcanaacacattatcactttcttcatgagtgatcctggagtgtgcttgttggttaaaataaaaagcttggtactatccttg

SEQ ID NO: 64164 - DNA, 441 bp, Oryza sativa
taaatactcagcttggtctgaattcccttaatagtatgtattttacttttctccaacgatcaatcatcagctctgtatgtattactagtaggagtatctctgtactctctgaagaacgaacgatggagtatgtagtgtgtacaagtattatttctttcccctctgtttttggatgattgctggggaataatatctcgcttgtctcacatgtgagacacaagggggagagaaattcctgtgtctgtgtgtcaggtgcccggaaaactcgctagaaacgtctgtgctatgcacccagcagagcactgaaacagcacattttttctggcatccggagcgttgtcgttaccagggagtgttgggggcgatttttcttttcttcacagctatgacgacatcgcgtgatgaactggtgacagacaaagctttgttattggggggata

SEQ ID NO: 64165 - DNA, 219 bp, Oryza sativa
ctagaatgggtgtatttctaacaaaaatcagactgctgatgcaagatatacatttttctattgtacactgttgaatgtgagtaaataagaaagactgaaaccgcatcctgtcacctaaagcagactctattgagagctcaagaagaaatggttgaaaacatgggaggctgtacaataattgccacttatactagaacacgatggacaagcggatcttgc

SEQ ID NO: 64166 - DNA, 399 bp, Oryza sativa
  unsure (1)..(399): unsure at all n locations
tcagccaacaaatcaaaacaagaagtaatgatgttttgtttgtgtagntacatgattcagccaacaagtcaaaagtgagagcacttaaatgctttcttgggaagggctgattcacttcaaaaagttgcaaaaaggttggctgttggtggaggcaacaataaatgcatttgggggtggctgatgtggtgatgaagatgctgctggttgtggtggacgaaatttggtggggttggaggtggatttcgtggtgaatatggtggtgatggtggcagcgggatgaacataaatgaagtgatggtggaagtgtttgcggtgacgaaatcgtgagcagaactcgaaactctaaaagactaaactactagaaccagcaactcagccaatcgatgcaatccaaaactc

SEQ ID NO: 64167 - DNA, 415 bp, Oryza sativa
acctgtaggcatgcaagctttccgtcctgctccaagtaccgcgcgaccacgcactctttatctcgtacatggtgatttgtgtggcccagttgaacctgcgacgcccgccggcaatcggtattttctccttttggttgatgatatgagccgctacatgtggttaacactgatcaggagcaaggacgaggcagcctctaccatcaagcacttccaggcacgcgccgaggtggaaagtggtcgtaagctgcatgtcctgcgcaccgaccgcggcggcgagttcaattctatcgagttcggcgaatactgcgttgatcgtggcgtccatcgacaacttacggcgccctactccccgcagtagaatggagcggtggagcaccgcaaccagaccatcatcgccaccgcaaggagcatgatg

SEQ ID NO: 64168 - DNA, 420 bp, Oryza sativa
  unsure (1)..(420): unsure at all n locations
taactgacctactgtctgatacacacctcaaggcatttgcatgctggactggtcttggnggtgggaaaaagggggttcgggagctgataaactcngtcgttgatattttagcatttccctttgttgcagtgcagagttctccaaacatgccatcaacatcggcgtccatcaatagtggtttccttcttagcattgcatcacctggtggaagaatcggnactgagaataaggaaatgctgaaaactattgagaaaaacatggctcagtacattcaagttctactagaggtctgaccaatcgactctaatcttggtgttactagtgcatgatcataattttatctttattttattcgttcaggttagtggtcccgggtgtatacttcactgctntgatcatgttaacatggaagatctatca

SEQ ID NO: 64169 - DNA, 425 bp, Oryza sativa
  unsure (1)..(425): unsure at all n locations
catgcaagcttgtgaaaataattactgatagaaatcttgtnatctcttttacaagncaataatatccttcctgattgtgtttctggtcataacccttaacaaaggttgcaatgcaccacaaaacctaacaaaactaacatggtctacaatataaagtgggtacttatggaggcatatcatcagtgcaagttctttcctagcaacctcttgaacaaagacatatttccctacggtaaccctcccttttgcatctattcccatcttcaaattggatcgcgttagaccttttctagcatgcctagacttgcaagtttaatattgtctacaaaagttaaatccatatctactttagatccaagctgttgtgacaccattgcatctacctttcccgcccattaatttcttctaacaagactgccatgctg

SEQ ID NO: 64170 - DNA, 437 bp, Oryza sativa
  unsure (1)..(437): unsure at all n locations
actaagcttaacagtagcatgagcttcaaagaatcacccaatcttttttcactatgataacgagctgagccaactcattatcctaacgagccataatgagccgagctgagctggtacgatatccaactctaggggtggcccatgagtgacaacaatggctgaggtggcatgacataatggaacggtctatttgaaccagaaaaccaaatttagcaagtatacgcaaccgatttgcatgagagcacctagacattggagaccgcgctntagaaagggaagcggtaactgggatggttgtggatattatgagagattatcggggtgggagggaggggaggctggcttaacccatggcaatgactaaggtggtactcggcaatgtgcacatatagacaatagtatgacaaggatcgatgatgagtgtcttcctgtctact

SEQ ID NO: 64171 - DNA, 453 bp, Oryza sativa
  unsure (1)..(453): unsure at all n locations
agcatgcaagcttaacagtgccattcngaatggtgagttaagcgttctgttcttttttcatgctctggtaaaattttaagtcagattcactttgtaaaagcatatttgtccctatgaattacgtatgggaatatgaggtttttcaaatccctttaattacgtatggaaataacactgttagtcttgtttgtacttttgcaggcagaaaactttctctgaacaacatacttatggaactcagaaaatgctgcaatcatccagtaggttttactttctgttttgttgatcagatgcagaacttggtctcttttctcttagatgtaggaattgggtgtttttgcttttccgagtctctcattntgacagtgatttgtgtgcagtggttacagaanatttgtagcaaacgagaagcttaaaaatggctttaatgtatcagtttgttaaactccattc

SEQ ID NO: 64172 - DNA, 404 bp, Oryza sativa
  unsure (1)..(404): unsure at all n locations
actcagcttaaaccatttccccccaccctcgcgtcgcagccttcttgttcttcgcccccacaaaagtccgcgctcgcctctgcctttcgcacgaaagtggggattctgcgattttactagtagtatctcattggttgtaaaccaacgcgagacgccggcggtgagttggagttggtctacgagaaggaaccatcggctgctcgcatgtggcggcctcgaagaacaatccttttccggctctcggggacttgttaattcgccgcgatgtccgtcgctttcgcggcagcgaggccccctcggcggagcgaaaaagaaaaaagaacgaanagcgacctacctggaatggcctgtcaattgtgtatccgtacaccagagtcccaaccaaaagctggctatgaacggga

SEQ ID NO: 64173 - DNA, 444 bp, Oryza sativa
agcttgtactgttgatgggagtgaagagctgcgattatcactaatcactcgaccccctgtgctgaaagctgattcagatgagactgaggtgatgggaatagtaagaatatccttggccaactttgccacaattggatactttaattcattcatcctccaccactgaagtagattgaaactttttgcaggaatatcctcaacaggatcatctaagtacctctttaaatctgacttaggaagactagcagcattctttgatttcatatactcatgaaattggctagcagcagagaaatgactactagtagtgcctagagatgtactagtagattgagtggtggcatcattttcctttgatgtgctctggagttcactttcatatgatgcatgcaaagatttcaatgtggattcgacatttgcaagtttcttaagaagtacagtttc

SEQ ID NO: 64174 - DNA, 434 bp, Oryza sativa
tgaccagctcccggctacgctggagaagctgcgcggcgcctatgttctcgtcttcaacaccggccactggtggacccacaccggcaacctcagagcgtaagccactccgctccagagcgtctcctctctggctctctctctctccagcagggcagtgaagccgagtgtgttactgcaagtgggaccatctggaggcggacgggaagccggtcgagatgggaggcgaggaggcgttcaaccaggcacttgggacatgggcgagctgggtcgaccaaaacgtggactcggccaggaccagggtcttcttccgaagcatctccccagaacacaagaggtaaaagttaacttgcaccacccgcggcacccagccacaatggacacctctgatgactgatctaacacctgcaaatgcagcgaaaactggtgctacaacc

SEQ ID NO: 64175 - DNA, 424 bp, Oryza sativa
  unsure (1)..(424): unsure at all n locations
gcagctgcagcttttgatgggttgagtccagataaaggctgtcctttacgcaatagctcagaaatggcttactaatgatgccaaaatgtcggacaaacttgcgataataccctgcctaacctaggaagctgcacacatctttaacagatacaggaactggccattgccgaaccacctgaatcttttctggatctgttgaaactccatcagcactaataatgtgccctagataagacagttgagtctgtgcaaaagaacatttggataatttgactcgtaactgatgcttactcagagtctcaaacacctgacgcagatgattcttgtgctcctccaaagtgcgactgtataccaaaatgtcatcaacaaagaccaagacattntgacgcaattgatcagctaanactgtattcatcaccccctg

SEQ ID NO: 64176 - DNA, 445 bp, Oryza sativa
tgtggaactggatgaacatgtaggtaccaagcaacaatgcttccaaccaccaagagcgacgtctatagctttggtgttgtcttattggagttgatcacagggaagccgtctattctacgtgaaccagggcccattagcatcatccagtgggcacggcaacgtttggcacgaggtaacatcgaaggtgtggtggatgcacacatgcatggtgaccatgatgtgaatggtgtgtggaaggccgcaaacattgcccttaaatgcaccgcacagacatcgacacaacgacccactatgaccgatgtggtagctcagctgcaggagtgcctatagctcgaggataggcgatgtggcatggaagatacatataacaacttctatgccggcaacaacaatgatcccaactcaagttataacatgtacaacacggaccagtccactgatgtga

SEQ ID NO: 64177 - DNA, 428 bp, Oryza sativa
  unsure (1)..(428): unsure at all n locations
agcttgcccggggacgccatntgcggcattatgactgcgaggacgaagaatgcaacggcatgggcatggcttctatccgccattggaggtggcagcctcgatctttgctgctagtttttgctgcgaagagagcttgagctgacgttctatgatgaatgtacactgctatttattctgaagaagcagtacgtagagggaaaccatagtaaacttttgagggatatccgctcgttatttgtatgtcacttaaatagttataaaaaataaaatattaaacaaaatagtataatatgtgatagatcgttctataaacatgcaaaatcacatntaatttctacatgtttcgacgattntttttactataaatatacattaactagctataatttaacttattntttttaatatgagctatgaaggtaaaattt

SEQ ID NO: 64178 - DNA, 359 bp, Oryza sativa
  unsure (1)..(359): unsure at all n locations
tgtgggatggtccgtatcgagtggtcttgttttctctgccgggctccatatggctggccacgggcgactgcactgagctgcctaacaccgggaacatcgaacaccttcgtcgcttctacccctgaggggaggggggcgggtgtcaggtttcgggctcgggccaaccccgcacccccctcgggcgtgcatggttggccgggggctacaacatatgcatattcttatttctcttatatctgaatttctataacagcaggtncaatttcctataggctgtatctgtgctgcttattccttttgaagaattctgacttgaaatagggcactcctgctcaatcctgccctcgggggctcgggtc

SEQ ID NO: 64179 - DNA, 446 bp, Oryza sativa
catgcaagcttcatcatgtctgttcacaaagtagttattgctcttcatgaacgtaaatgatactatggccgtcactagaagcttacgaacaccaactagcacgctattgaactattcggccatgttggttgtcatgtaaccccaccggcggccatttctatcgtatgcacgagaccacttatctttatccaacaactcatcttcaagccatttacgaggaccttcgggaatacgctgtcttagtgcctcaacatccctctcaaatatccacttctcgtcaatctgacatatccttaggagctcttttgtctggtgcttgtccgcaccggccttgtggaaattagcactgaagtgcctcatgcaccatcggtggtgaaccggtggaatcctagaacaggagtcgtcatggcattcattataccaacatgtcgatctgagataataca

SEQ ID NO: 64180 - DNA, 438 bp, Oryza sativa
  unsure (1)..(438): unsure at all n locations
tgtgactcgcgaggacgcggtcagtggtaatttaacttttgttntttcgctccattattcaagcccccgaattaattgattggcagcgaccgtcccgtcgcgatcccgtcctcgcgggcacaacaccagacaccggatggatgcaccgggcgaagggggccgcgtggcgtggggagtctcccggtttgggcggcggttgcgtgtgtcgtggtcgtggtgctgcggccggagaatggagatcgccattcgcgaagctgcctcgaagctacaggcgttatacgagtagtagtttacacggtctagacctgttgggatttggatgcgtcgtcgacggttggggttggggaggagacgctgactgtgcctctgcaccgcagttggacctgacacggtggggacgggacgaacacttctccggngccccatgtcagtgactcg

SEQ ID NO: 64181 - DNA, 444 bp, Oryza sativa
  unsure (1)..(444): unsure at all n locations
agcttgaacacccctctntgatgtcctttgttaacaatggcttgcaaaatatctgcaccaatagcaaaaagcagaggagacagaggatctccctgcctaacaccccttttgcaagggaaaaactttcctgggaccccattaagaagaactgaagttgaagctgaactgaataagagctgaaccaactcaatccatttgggtgggaatcccattgaagtcataatctgaaggactgcagggtgctctatcatgtcaaaagccttttcaaaatctagttttaagagtacaatttatctcttagactgcttgcattgatgcagatattcaaaagcccagcctaaacaatcttgaattgtcttagttttgatgaaaccatattggttttggtggaccaactgaaccattttcccttgtagtctatttgtcatggcctttgagatgatt

SEQ ID NO: 64182 - DNA, 398 bp, Oryza sativa
  unsure (1)..(398): unsure at all n locations
catgcaagcttcggcttcatacaactgcattgtcttctatcatccgccttcaagacacattcctgcacggcttgcttgcgatagataccacgcctgctcctatcaacacacattatttcataccgatgcacttgtgtgccttgagcaacaactctatgtctccgtgcctttntgattntatcttccatgtactttgtcactacgttgccaaacactatgttgttatcggccatggacggaccaattttcttgtatcgatccctaaagtangcttgcgtgccgcgaaggatgaattcaacaatagcaaccaatggaagtacccgaactcctcgcattacccagttgtacacctctgccaaattggttgtcattatgccataccgagatccatcggtgtc

SEQ ID NO: 64183 - DNA, 436 bp, Oryza sativa
tcttcaattcagagaagttcagtatggcgaggcccttattcttgtgacaccttttatagggaaaagattctcattgtgccggtgtatgggaatcgtgccggttgctttcgtcttaacactctaaattaatcaccgttttcatccacccaaatgattaggcagtaattatcacttgctgtgagttgtgatcagtaaatgattctttgcctatactcctacttatatgctgtgattagtaacttagtatatcaatctggcacttgggcagtagaagaggtgctctatcaggtctgtcttatcagaattattcagctacactttataacatcaatatgtgccttcttttcaaaacacatcaatttgtcttctggtataattaagcatcacctgatcaccaatgtcctttgcatgcatgctccattgctcttatatgttc

SEQ ID NO: 64184 - DNA, 368 bp, Oryza sativa
  unsure (1)..(368): unsure at all n locations
agcttgaggctactgaaagatccatcatgtatctatcaacaaagataagcatagcaattcaggttgtcaacactatctcagacaagataagtaagctgagggatgaagagttatggccgcaaacatgtgagctcatccaagggtatgcagttatcccttatggcaactttgactttcatatgttagcagcacatagtaaagtaatatctgctgtctgtattctgcttttcttggcacatgattttctaaacctattatctacagttattagcatgtttagcttctgcatagctaattaacttctatctgtggttntttttttctaaaatattgtttagttccatcgactgtaattttaaggatgagtt

SEQ ID NO: 64185 - DNA, 429 bp, Oryza sativa
  unsure (1)..(429): unsure at all n locations
tattagttntgaacaatatcattgctctggttatttggtatgctgagaggaacttgctcattgaaaagaacttatgctgttcttgatataacttatgctgttcatcactgatctgctaaccgacatgcttacatagttacattgttctgtttaggatatagaaagtatagatcaactatgggttgctgatgacctgatttcttgttttcatttggtaaggaactccttttttgctgatatccttttggaaccatctgatgtgcctacccgcagcaacattttttagtcttcttatatatgtgtgccccgctaatccttttcatccttcagatcgagccctcgtattatgctagtgtacatgtgttgcaagccactgcctgacatacaaaggcatattatgtgtaatgcttggttgtcaacttgtaagtt

SEQ ID NO: 64186 - DNA, 294 bp, Oryza sativa
cacgagctgcactgaagcataggaccgctagctcattcgcgcgacagctaccgtcgaaaccaccaggcccgcttcagccccggactactgagatctctagagaaccagcagggcagtataacgacccccttggcctgaggcagggaaaatcccttgaccgcgcccccacccaccttataccggggatctggagatggaggtacactacgggacttcggaggggcaacttgggatgacattcaatgctaagacggcccgctaccggaatcggaatacctgctggggccgtttaga

SEQ ID NO: 64187 - DNA, 426 bp, Oryza sativa
taaacagaacagtcattagaacgaataactacaaaacctattaattcgttttctagatgcgaacattcgaggattagaccctccgctgatgtggtgcttatgtggctcctttgactaggtcttcgttccacgtgacacttacgtgcagtttgatttgaaaaatacatgggccacatgtcagttacattagaaaataattaaatgatgatgggcccacatatcaataatacaacagtgccttcctcctctcccctctcttctacaagtctctgcatagaactgacgcggtgacggtcgagacatcactgagctcgaatgccgctgggaggtctagggacctccgctcctgcctcgcaaccgtgggcctcctccactttcactcgttctctgcggattcaccgtcgacatctgaatgaggttgtgctc

SEQ ID NO: 64188 - DNA, 349 bp, Oryza sativa
catgcaagcttcgtcatcttctccgttcttcctagtccccgttgttttagttcccagaagaggaatgccattgataaacaatgcaaggattactatggacaaacactggcctttaccccccgaactatatatcacttgtcagcaatctcaagtctcaacgaccacactgatgcgaaaaaaaaaaagctcaaggatggttcattttgagacttacgtcggtgtatgcagtgtaatcgtaccagccatctgcatgaaacccaaaagttcaaacagtgtcacacgctccgaccttaccagctcttatgcacgagagagatataacaggaaagagatagagatagagaactga

SEQ ID NO: 64189 - DNA, 357 bp, Oryza sativa
aagaatcttcttacgactggaatggtgattttactggataataaaaactcaaattcattttttaatctgaaaccgcgatccggttggtgttggttacactatgacaaatgaacgttatgcattaaattcgattgttggtggctcgaaatgggaacaatctcatccaccataacaacgacagatatattttaaaaaaatcgtgcacaagtcaaatgggcatgaaaagaaagaatctacactgcaaatatttacagtgaggaaagtaagaaacttgtttttgcaaatatatttacattctatcatggaaagcacatcctgaaaaatccccttcaactatttttactatctgcatttcct

SEQ ID NO: 64190 - DNA, 395 bp, Oryza sativa
  unsure (1)..(395): unsure at all n locations
aggcatgcagctgatcgattcccctctgancaagatgattttancttttgtataagatcaatcacttggcgtccatccgatgcatcgactatggatatttcatatccccccttttctttacgcagtatttttcttactacacctgttgacgttgcattatagaccgtattgttactcttgctaccatcaggatagatctgtccccttcctcggtttccccccacatatatgggatattttaagaaatgaacgtctttcttcatagcacggtcgggggaaagaatgggaaagacgatttcactatatttcttaccgggaacagggcctatcacaagaatattttttttattgggacgataactctgaaaagagagatttcctatcttttctttcaa

SEQ ID NO: 64191 - DNA, 443 bp, Oryza sativa
  unsure (1)..(443): unsure at all n locations
tgatcaaccattaacaagtaatcctaatgtgggagggttttgttttggggttgcataaatagngcttcaggatccattacgcgttcaaggccttttgttcttcttcgcatccgttattttggcacaagtttttttggttctcaaaaagaaacagtttgaaaaggttcaattgtacgaaatgaatttctatgtcccgggatttcttaccatcaagttggtaaaaagccgcgatttattggcgattgctagaattctctatgatccattttggaaatctttcttttgtttagactattttttgtttgcgagatgtcttgtctgcaattccttatttctatcatctcatgcaaaacgaggagaatgcaaggcaagggcgagaacaataaaaggaacaaatccttttaggagggattgctggtcttcttaatcctctattgggcaca

SEQ ID NO: 64192 - DNA, 422 bp, Oryza sativa
  unsure (1)..(422): unsure at all n locations
agctntgattattctaaacgaccaccaatgaccattatataataattaaaaacgaaaattgatggatcaatttctatttaaacagttcgagctctgttcctccagccgcattgaataaccaaaatactactagtagtaaaatcattttgagcatccacacctaatcaataaacgagtgcaccaaccaaagaacagcgcactccacctggaaaacaacgcggggggtggctaaaaatcgcaatttcgcatagggctcctcccaagatccgattttgacgccgatttgatcacagaaatcccaaaaaaaaaaaaaaaacaggagatagatgggaggaggagaggaagaaatcaataaatcaatcaattaatcaataagtcgatggactcgcgcacctgngcggcgtcggcgagctcgtcgagct

SEQ ID NO: 64193 - DNA, 454 bp, Oryza sativa
  unsure (1)..(454): unsure at all n locations
tactaagcttgtattatgataggggcggctggaaattatcatccaaatgatttatcgtgaatattgtttcaatcattacatgttgtgagtgtatacatgaaacaagctaagtttaaatcctaggccagcaggataggaaaaacaccacagaaaaaacacagaaattaaagtttcagtttttccaatcctgcatgacttgaaaatgcatgaaataagaagagaatccgtttgattgcacaaaaagaaattaagccaaaagtaagttttacaagaggtctaatctctaatctcttactcgtattcctatagatcatagaaatgcaattatgtagaaaattttctatcttcttcctatgaatcaaaggttccatangaaaaaaaagatccttagaagaaattgaattctctaaagttgtttgccaatccatttcaaagggcccctatacacgcgtgt

SEQ ID NO: 64194 - DNA, 399 bp, Oryza sativa
tgcttgggagaggcaaaagagaatacttttattgtgagaagactaacaacaacaagcccaacaacaacaagtcgaatggttcttaccaagggagaaagatggagaatcttatgaaggcttttcaacaagtttgcgccgccttcgagccactaagtgatgtaaatggtgaaagtggagatgatgataaggaaaagaatgtctccgatgtttgcttcatggcgcgtggtgaatctgacacagagtatgaagacaatgaggtgagtgcttttgaggaagccattaatattttgagtgcaaaaaataagatgtgtgagaagatgtatagaaaacaggaatttatcattgaatctcttacatctgaaattgataggttaaaatctcttattccctatgatgatg

SEQ ID NO: 64195 - DNA, 443 bp, Oryza sativa
tggtgttcccactccagttctttatgcgcgggactcatttctgcatacattaacctttgagtatgtggatggcttatctgtgaaagatatactccttggatttgggtcaaacgggatcaatgaagaacaactcattgacatcgccacacaaataggaaatgcagttggcaaactacatgatggaggccttgttcacggtgatttgaccacttcaaatatgataatcaagaacaacacaaatcaactcgtgtgtagaacttcctttctgtcagttcatgcattttcttgagtcatttaattcaagacttacatccgagctattaatgtgccactcaatgtgttcatattccaagttcttattgattttggtctgagtttcatatcaactattcctgaggacaaagcagtggacttatatgtgcttgagagagcattgatttcta

SEQ ID NO: 64196 - DNA, 426 bp, Oryza sativa
  unsure (1)..(426): unsure at all n locations
agcttaaagccatgaatccctattatgcatatctggatctggnncctgcagaacaaacatatagaatgagtagtatctgatgtaaatacagtacttgagaaaaatttaagtattttaaaatgtttataaatatgtatttctcctcttgtcaattttgatttccccgagcggatgactccttatgtttaaacactctgcccgactagtcatagctcccgcacaccgggagtcagcctaggcacttcctaaacatgcatacgagtgacatgagttcatcattaatggaacaaagtttcacggatcagagtttactactcgggtacttttgcaattgttaagagcaaaaaataaattatcttatctctatgcttntgatttcttccaggtaatacttagcaccttgcattactcggtccatccaacgag

SEQ ID NO: 64197 - DNA, 430 bp, Oryza sativa
  unsure (1)..(430): unsure at all n locations
tcanacagtgccatctgtagactggcctggtagctgttgttgtacgagaattccgcatatggcaagcttttgtcccaagctccaccaaaatcaagagcacaagctctcaacatatcttccaagatttgattgactcgctcggtctgaccatcagtttgcgggtgataggccgtgctgaaatttaaacgggtccccagttcttcctgtagcttctgccagaattttgaggtgaactgactccctcggtcagatacaatctttttgggtactccatgtaggcacatgattctcgaaaggtaaagctccgccaaccttttgcccgtatatgtggtatgtactggtatgaagtgagcaaccttagtgagtcgatccacgactacccagatcgaatcgtgacccgatgatgtccggngtagtcctgttataaagt

SEQ ID NO: 64198 - DNA, 443 bp, Oryza sativa
  unsure (1)..(443): unsure at all n locations
agctngtatcaatgaggaaacctcgntatttctatatcataattnatgccgcttcatttctttcaggagcatcttagtagattatgccggacactgaattaccatgcactcaccattcgtgtgactgacaccaagtgcaagaagaacttccaggtttgttggatcagcttcttgtgcacgcatcattgctgcgattgcctgaaagcaaagtaatagcatctccttgtgttaaacataagcatggaactcatagatcataatgccatatcacatggtgcttaaaatttagctaaaaataaaccataatttcatgacagacaatagtatgggttcgtccgttcaaattccatatatatcaatttatgaagttcttgcaagggtatgcaaaaacttgatagagcataattcacgtaatttctattgagatccagcacactgcatgc

SEQ ID NO: 64199 - DNA, 440 bp, Oryza sativa
tgctagcttcgatcctctttcttcttaatgaatattcttatctaaaatatgagacgcactaccaagaagatatttgttatcttctcgtttcgatcacctcaataaatatgatccatataaccaataaaattagagatcacggtggagtattaagagaaaaaacagttcataggagagagtgactaataacataagaaataattatgtattatattttaaaatggagggagtagcactcatgtgactggataaatctgtggccagctaacaattgcatgtctgttctccggcagtaattgcatgacttgtctaggcataccttcttcttttgaacgacttgtacaagacagtgcccagttcatattgatagagcagaaataattacgaaattaaaatcctaaaagtccgtaaccaggaaaaggaaaacagtataccacccc

SEQ ID NO: 64200 - DNA, 389 bp, Oryza sativa
  unsure (1)..(389): unsure at all n locations
agcttggcaatctgatagntggtgcttgatcatatcttccttctgcaacgtgtttgtgcatgtaactactttcggtccatcatactccttaagatttatgattgcatttttatatttacaatgaatcacctctgctggagaacaaagaatattttgtggtaacatcataaagaaatgagttaaatatgttattagaagcacacgatgatgtatgaaaaacaacaaataggaagagattgaaaactaanagcaaaaggaagagggctaaacgtacagaggtaagtaaaaacagcaatcgatgatgatatgccatagagagaaacctgttatttagttgctcatgatccatgcatgtcttagaagataccgtatatctcaacagaaaatat

SEQ ID NO: 64201 - DNA, 380 bp, Oryza sativa
  unsure (1)..(380): unsure at all n locations
catccgatatataggcgctggcaccagcctgtccaacaagatcgccgccgagataagccttgcaagcattcagaatgtgcggcgcgcaacaagtgaagtgctccttgacaaaattctcgaaatgctagatcaaggaaaagaaagaactatcagtatacacatcttatttcttaaaggggtgactcttacagctgacttggttatatataagattaaacatactanactcttgtgagatccagtaattcacatgaagcattacaaactaaagctatagcattcttaattctgaacagcgtttagattttgggttcacaagattccaaacttctttgaactataccaatcattctgaaacatggatgtgtaaaaatgtattt

SEQ ID NO: 64202 - DNA, 437 bp, Oryza sativa
  unsure (1)..(437): unsure at all n locations
catgcaagctntaaagtaaatctagggttattttgtttattctttattccaaaacactcttcaaacttcaaagcttaaagttttacaaaccatttggaatgatacttatcgtctcgatccatccgtgagttgctttgtaacaactcaagtaggaaagcaagattttagttntattcatcaattctcttttcctctaatagtttcttttcactttctcaaacatttctatctcctcatttcatatcactttatcacatcttatacctttgctcttcaagcttgttaataatgaaatttggtaagcctggagtagtcatcggcttagagtcagcatcggcttcgaagtcctgagattagccgatgagagttgtcaagtcgtcagttgtaagattcttgctatattcggttaaggaaattgatctactaaaggaaactta

SEQ ID NO: 64203 - DNA, 440 bp, Oryza sativa
  unsure (1)..(440): unsure at all n locations
agctntagataggtttcgggccatcatggtgacgtaataccctacgtcatgtgttttggtggattgtatattgatacaagatgaggtgtagttatcgggtttttgaggggttaccatgccctccttatatagccgggagatagggtttacaagtcggttaagatctaatctagttggtttacaatgataagcatcaatcaagggatctgatatctagcttatcagatcagatccctatatatctgctaattgccttatggtagacttgcggtgcacgccgagcacctccgagcgctgccgtgcgccacgggtcttcatgtactgggtcaggccattcctggtgggccggcccatgcaccttgttgtgggtaccgggggttataccctccacagctagtccccaagcgccttgtatccattgagcaacaccatcttgagca

SEQ ID NO: 64204 - DNA, 444 bp, Oryza sativa
  unsure (1)..(444): unsure at all n locations
tcagnctttctcctaatcttcacaggtagtccaccctttattctcagcgttaccgagagcacgtgctccggcacgccgtcgtcggcgacgtccttgaccacgtcgacctcgaactcctcaagcacgtttgcaactatggacttcatctgcacgtacgccatctccttcccgaggcacatactcggccccgcgtggaacaccgtgaaccggaacgggctcgccggctggaacgcgccgtcgtcgccgagccaccgctccggcctgtactccaagcagtcctcgccccagatggcggcgagacgccccatggcgtacgcgctgtacgtcacggaccagccggcgcggaggagcgtgccgtctgggagcgtgtcgtccgccgcgcacgactgcgagtcgatcggcgccggcgggtacagacgcatcgactctgtgagcgcggcgtgg

SEQ ID NO: 64205 - DNA, 316 bp, Oryza sativa
ccccgccgtcgagaaccgcgtatctgcaccgcgagcaacggcgcggggagctcggcggcctccacgctgggcacgagccaggagaacgccgggacatcatgtctcttggccggtgacagagaccaggcgacgctgttgcccctgtcccaacggtagatggcgagcagcctccgacgacatcctcggaagagaggacgtacgtgagctttccgactaaggggaagaagaccgcgactgagtctacgagcgccgccgttgcccctgccgctttgcccacctgtcctagagggctacatcgaagatgccgtttacagcg

SEQ ID NO: 64206 - DNA, 360 bp, Oryza sativa
  unsure (1)..(360): unsure at all n locations
attgatccatttcgttcgtttatattaccaaaatagaggagaattagtgatgcttgcaatgcatatatttgttagaataataatattccaccagtattaagtctactaacctttttgcagaaaatgacaataaagtggaggagaattgacatcaactcaaacaataaatcaattggacgatgtcgacaatcagacttatgtatgaatgggccaagaacttataattggcacgatgaattgggccaaaattcagaagtctgcgtatgagagcaaaagaggaggctgcctgccgaaattgtgccaggtcggcccagcccatggttcggccgaacaattgggttctgncgaatgccccgcagc

SEQ ID NO: 64207 - DNA, 407 bp, Oryza sativa
  unsure (1)..(407): unsure at all n locations
aagctgcttcctctcttccacttcggtttgcatttctttgtcgccngaccccagggggggatggtgcttcgtcttggcggcattatatttgattctgtccatcatcgcttgcccttgttgccctgtcttgtaagcaacgaactcgtcccaatgatcccatagctttgggaatacattcaagttcggtgtcagccccttcaggatgtatttcttgtagagatctcccttgaagctctggaactgttctgccataatcttaagagaacactgtttactatgttttccgtacccgcatggagcgtgaacctttctagctagaggtccacaacatctctttctctgattccgggacaaagctgtcataatcaccgcgttcccttgatctgcgccactacaccttgctgaca

SEQ ID NO: 64208 - DNA, 440 bp, Oryza sativa
  unsure (1)..(440): unsure at all n locations
cttggttgtttacccatacactctgattgtactttntatttatcttcttgatttgattgcatatatttgaatgagcaatgatgtgagttttgacttatggtgaatttgtcgactggttctgtttctgttcactgttgatattgaaatcatctaaatttgtcgactgggtttgttctgttcactgttatgtgatgataggttatggttgttcagtcctagtttcaagtttgccaaatacatgtctttatacttttagggagttgctatgcatagaagcacaaatcttacatttccttgttggttagcacatcaatctatcaatcagtagttctagggctcgattccacttcaacgcatcactcggnttttataactgaaaaacacactcatatttttgccctttntcttattacatcataacctgnattttttttcttttg

SEQ ID NO: 64209 - DNA, 436 bp, Oryza sativa
  unsure (1)..(436): unsure at all n locations
agcttgcactcttcgctgatgcacggtcattgttgttcttcttgtcggncccagcacgcccctcccaaggctntgctgccatccagcgttccaaccagctccatccccattgtgggttgttagggtctacaaacattgggttgactgaccttgaagtgctcttccactgcaaaagacagaagtttcgaaacattttaagcatgtgtggttgagtgagtcaaagtacagattggcatctgtcattgagaagcacagatatctacctgatgtgaaaatgcatatgcgagcgccctctcccttcttactgcagcctcttgcctgcttataagactcgcctcaatttgttccttagactgagtgctgtcatcccactgctcccccatctgatatgattcacaaatagagtatgtntaatgctcccaatgatattttatga

SEQ ID NO: 64210 - DNA, 392 bp, Oryza sativa
  unsure (1)..(392): unsure at all n locations
ctcagctggctaccctgaattgngagattgtcaagaattgttctttcttgttaagcattgcagggtgggagagcaatcaaggcagatccagtgaggaatcgctgccgccttaccccggtggcgatgacgacgcccgcgacgacggggatgagggcggcgtatgtggcgcacgcctcccggcgggcctcgactgcgtatgcgatgaccgcggtgaataatggcgtggtggcgccgacggcctggttgaacgacacggggaggtaccggagcgagacgttcccggcgaccacggaggcgcagaacaccggcccgagcagcgccaccctggcgagctgccccctgtagcggcgcggtcgcgcatcccgcggcgcggtggcagacgctgcggcggc

SEQ ID NO: 64211 - DNA, 450 bp, Oryza sativa
  unsure (1)..(450): unsure at all n locations
agctntacacatcaganattaaaaggcattatgcacctagaaaaatcctagcaattacttatgcatgtttgctcgaggttggaacacatgcagaactccatgaaggaatgaaaaatgcatatctcctcccaattcccatgatcacattcagaagcattaaaaaatgcaaagttctaatatcaaccaggacaggtgactttcagctcggtggatgaaagacaaacagcgttcaaaaacttacaattgaagcatacgacttcttgggggcctcctcttgtggtacaagggcaagggcaggggcaggcggagtcggcatagccacagctacgttatttggcacttcatctataacttcaggaatcggcgtttcctccacaacaggcccctctgtgttgttcggtgggttataaacctcctcgccgttgagatcagcctcctgagcattgggtg

SEQ ID NO: 64212 - DNA, 407 bp, Oryza sativa
  unsure (1)..(407): unsure at all n locations
tctcctcgtgcttcatatcgtcaagcagtcaagcgaatattgatgtacttgaatcatacacttgagtttggaatttggtattctacttcatcttctatatgcttaagtagatattccgatgctgattttggtggttgtagaattgataggaaaagtactagtggaacatgtcattttcttggtacatcattaattgcatggtcttcaaggaaacaatctagtgttgctcaatcaactactgaatctgaatatgttgctgctgctagntcttgttcacagattttttggcttttatctactttgaaagattatggtcttacttttgaaaaagtacctctcttttgtgataatacaagtgctattaatattgctaagaatcatgttcaacactcacgcacacagcacat

SEQ ID NO: 64213 - DNA, 375 bp, Oryza sativa
  unsure (1)..(375): unsure at all n locations
acttccaagcgaagaatatactctgatctagtgcagctgcacaaatgttttcttcaagtgcaatggaacttatttatcgatgggaatgatccgaatgcaagtctgtaagcattatcatagcctaatagtatcaatggtttgcaggattgaaggcaattatgaattatcatataccactacatgaatatgcagtaaagtgagcttattatcttagcacttaaaaagtaaatcatccaatnttcaacattgttgatgactgatgcattgcattcagagcattgatattctccacatgtgattatgcaacactgagtggtctgatgtacctaacatgaaatatgaattgcagtgcttccagagataatataccatgct

SEQ ID NO: 64214 - DNA, 372 bp, Oryza sativa
  unsure (1)..(372): unsure at all n locations
agcttttgactccgtcaactgggcatatcttcttgatactctccaaaatttcggttttggtcaaaaatggcgcaactgggttgctaacttgttaggtacatcctcctccaggattttacttaatggtgcaccaggggaccatatttatcatgcacggngcctaagacagggtgaccctctatcacctatgcttttcattttagctatggaacccctacaacaaatcatgaaggaggcagaggaagcaaacattttatctaatctcttccaaagacaaagaagattccaatgttcactttatgctgatgatgttgccattntcgccaaacctacaaaaaaacgaattatcggctttgcggcgaatcttatttt

SEQ ID NO: 64215 - DNA, 442 bp, Oryza sativa
  unsure (1)..(442): unsure at all n locations
aactcagcttaatgaatctacctattgtggactggcgcttatgtatacttatctacaccaaaacaaaagggaatatatggggtattttacaaatgcgtcgctaaagttatatcaacctgatactgttgaccaaagaggtgtatttctatgaaatggactcttatacttgcatcgatcatatcctgacactgacggtaaagaaattagcggtaaacttcaataaacatgtaagagtattaaagatactggggattgtgtgataaaggtaacccataatacatgttacctcttaatttaatgatgtatgccatgcataanattaaatatgggagtcacctctactataaaacttgccctaaagaaattaagggaccgaggaactacataccttatctagtgcaaattatgccatcagatcattctgctctagcttttgcatgcg

SEQ ID NO: 64216 - DNA, 454 bp, Oryza sativa
  unsure (1)..(454): unsure at all n locations
acctgcggcatgcaagcttcttcttttctcttctctcaaatactattttagacgttatgacaattagagtgggctgtttctaataagtcggaaaaacttctcaatccataccaaccaaccatatatacaatttaaacaaaccacaatgatcaaagtcctaactgcaggaggtgaggtcgccttaacaattcacaaagccagctcagccggttcctcaataattgacaagtggtggttgttaaaagcctttgggtttggggtcatcgaacccacagagaagccatagttcccgggcccacatgacagcaacagggcgcatttactcgtacaaaaaaaatgcatgagcccagtccctgggcctggggcagccacactgcagcttcaatcctgcagctgctcctgcaccggcaagggctgccaattagaattntataatgtaatggaaatgaaatga

SEQ ID NO: 64217 - DNA, 434 bp, Oryza sativa
  unsure (1)..(434): unsure at all n locations
tcatgggctgcctcaatctatgatttcagatcgtgtctgttttcttcaccagaatttatggtctgaatggttcaaattgactgatactcagntgcgcatgagttcggcatatcatcctcaaactgatggacaaacggagcgcgtgaatcagtgcttggaaacctttcttcggtgctttgtccatgcttgcccgcgtaaatggtttcggtggttggcgttggcagaattttggtacaatacaactcctcactctgctctcggtaccactccttttgaagctttatatggtcatcctcctcgccacttcggtgtacgttatattgctgaatgtgcggtacctgacttgactgaatggtttgcagagcgtcagatcatcactaatctcttgcgtagcaccatcttcgtgcacacaaacgactaaatctcaagcggac

SEQ ID NO: 64218 - DNA, 441 bp, Oryza sativa
  unsure (1)..(441): unsure at all n locations
agctntntatatactctagaattattgtattctaattagttntaaaggtaatacactgtctaagaacatcagttcaaaaaactaatcctgtctcgatcgatcgaacacataatgtgaataacagcctactagctcctagcgcgtgcatccaactggtgcttcttctacccacgaccagaccattttctcccgatcatcctgtggcaacatatatacatacgtgtacagttattggatcactaggaggatgaaccaacaacttattagtaggatccattcccgtcttaaggtcttgacaaacaaagaaaaattgttatagtactcaacctgcgaaacagttgaaccgaaaccccgccaaaatataagaatagattanaataaattacacacgaaaccacgccaccggcggtgacggcagcgacgaacctcctcaccggaaac

SEQ ID NO: 64219 - DNA, 443 bp, Oryza sativa
  unsure (1)..(443): unsure at all n locations
agcttgtatagatttgattcatctcatctattaatcttggcattaaacaaacgatagcaaacccatagcaatggatggttagatttgattcctactacactactaccaaaaacccaggggggtttatggtaaattggtcctatgtctatacgagaattccatggatcgatcccctagagttttaaactgttccctagagctgctaaagcaacccaagggaagtaaaatatccctgggtgtaggacatagtatagacaggtgttctgctgccaagaaatggcaacaacgacgtctcctatcgaagggaaggattgagaagacggcaaaggagcacgagctctcgtagatggtggtggcgcaagaaatgcaatggcgatcatgcggtgaagctcgccacccaatgacgacgctganggcaccactcacccgcagttgagggagct

SEQ ID NO: 64220 - DNA, 380 bp, Oryza sativa
tctctgacctacagaggcttcgccgcttctacatcagtcaaagccgagggcgtcaaaggcaggagatatggtggcaccgctccagtttcgcccttcgaagccgaaggctctgctccttcttcggctaccatcatcccttcgcttccaacttccttccgctggacaactctctccatgatgatcttcttcggtggaatcagtggttttgctcggaggtccccacggatggcgcccgctgttgtcgaatggacaactgcgtcacgttgaaaagcatggttctctcacaatagttgaaagtaagaacaattgattacgtagaaaaatttttggatcccccatacaatgcctataggctattatactctataccaggtccccct

SEQ ID NO: 64221 - DNA, 438 bp, Oryza sativa
agcttcaaatctctggtgcttggtctctgtgttataggcttacccctggtggctattgctaacttacccatttcgatcgctgccattccaaattactatcatgctagctagtatctctattcagacaatcatatatatatttgagacatatatagctccaattaatcttataaaaaaactggctaatatggctattcgggtatcgcccctgtttgatttggctcatgatggtttgcgtattttgggggtggaatttcacgaatctgattcccgatgttgggtttgttttgagtatttgcgtctgagctccgcgttcatggggcgattaagggcaaatgctgcgtaccttgctctctggttcgttaacaaaatttctctctcctacacacgccaggtacaagtgattattcaaagaaaaaatgaaggaaataacatggt

SEQ ID NO: 64222 - DNA, 301 bp, Oryza sativa
  unsure (1)..(301): unsure at all n locations
taattaanacaaagcgaataggcgatcgattattaagtatagtataaaaaaagagagagagagaagacgaagtgtgtacgtacgagcgggtaggggaggtggaggtagtcaaggatgatggcgtactggagggcgtatgctgcgaggccggaggcggcggataggatgaggactgcggggagggggaggtggatgatggcnatgtcctactaccatcccagcnccttgcccatataagatgcggtggtcatgtagtagatcgccttctgcgagacacccatggacgccttgagcgccgacc

SEQ ID NO: 64223 - DNA, 427 bp, Oryza sativa
  unsure (1)..(427): unsure at all n locations
agctttacttgtccattgaaccatattccttaatcgaatgcgttaaatccgagcaggtgggtgggagcaaacaccatcgtgccctctattgggccacaaaacttgttctttctaatattaaatataataaaacaattacgtccatttgacatatgatttatcttcatgccacatgctccctccgttcttaaaaaaacactgatattttagcttgtaaataaagatatgttaagtataaactaaaaattgttataaaaacatattgttatcttttatagtaatatgaatagaaaacaatgataaggtggcactactgattaattggggattcaaatcctctgacttaagtcacatcggtcacatgcctttaagtcagtggcggagccacattcagtttaattaagtgatgcacangaacccctgaaag

SEQ ID NO: 64224 - DNA, 434 bp, Oryza sativa
  unsure (1)..(434): unsure at all n locations
tcgccgccatggcgccttccttgcttctaggccatacttctttatagccctacgtcaccctctacgctccatgtgtcccccgaccagccggcctcttccttgtcggggtggtcctcagtgagagggcacgccaagccagcgttgccctggccgtggccaggaggaaggtggtggaggaggaagagggcgcanaggggaagggaaggctctgagtggaggacgagaaggtgggttctccatggcaggatgcagcaaggtggtgtgtgggaacaccgggagactagggaagaagaagagggggttgccatagtgagagacggagccggagaggtagaggaggaaggcaagtttccgtggagcgggacgcgtcttgccactaagaaacctgcaaggtgaggcgttcggntacttgacccccttacattntcttgatc

SEQ ID NO: 64225 - DNA, 446 bp, Oryza sativa
agcttcggcttaaattgggttttgtcaccaatagcaagcttgtttttgaaaagccaagaagggacagaagaatcggcatctcaaaccattgtacattaacggttatgtcaatgggaagccgatgtctaaaatgatggttgatggtggggccgctgtgaatttgatgccatatactacgttcaggaagttgggcagaagtgctgaagatctcatcaagacaaatatggttctcaaagactttggtggcaatccatcggaaacaaaaggagttttgaatgtggaactaacaatcggcagcaaaaccgtccctacaacattctttgtcatcgatgggaagggttcctatagcttgttgcttggaagggattggattcatgccaattgttgtattccttcgaccatgcatcaatgcttgattcaatggcaaggcgacaagattgaaatcg

SEQ ID NO: 64226 - DNA, 435 bp, Oryza sativa
  unsure (1)..(435): unsure at all n locations
aacaatatcatagatgtatagntctggctatatgatacttttctcttagcacattacgcaaagtcttggtgaaatgtttttaagtagcacttttccgaacttcaggtggaacgtcaagaccacaatggagaggatgagattcgcttgatggtgggaagatcattttcagccgaaaatcttaagaaggtaacaatctgttgcgcggaaggtgatgcaagggccgccatgttgggaaatatgttccgtgcgaatgcaacatctctcaaggaaatgcatatcaaacactattagatgctgaacaacgcttgccttgtatctgttggatttgatttgccagtggagacctaaaaatttatggacaattactcatttgatcctgttttgaagtctaactaccaatgacactactttaggtttgctcatttgaatatcaaa

SEQ ID NO: 64227 - DNA, 444 bp, Oryza sativa
  unsure (1)..(444): unsure at all n locations
cttgaatttcacccgacgttcgtacttcatctttcatgaatgaactgcatggccggntcaggatgcgttatcagcccgccacttgaagtaactctgactgtgtctatccattgtacgaattgacatttccttacatcctcctatgtacatccattttgggatagttaagttaatgataggactgaggagtgatgacaagaatagttgtaattaccacgaaatcatcgtcgacaatgtttggacacacgaaacacctttgtcctcgagttcggtgccttacggaccttatgacctgacaacggtcaccacaacgacactccggacgctcacgccacgtggggagtcctaggggatttacgtgccattctaaagcctcagcagcaattcgacgttcatgcttatccttccgccttaggtagtccgatcttgtttcactacgtgggg

SEQ ID NO: 64228 - DNA, 388 bp, Oryza sativa
  unsure (1)..(388): unsure at all n locations
gcttggtttctaaaagaaattatggcttttatagtgtggnacgtgtaaggtgtatgtaatcatttggtatatagggtttatctttccttgagaagggaggagagaaaaaagaaatggtttattactatagactctactagataatggaatatttcattaaggatagtgaaagcattcgacctgtntatctaataagtgtggatgtaccgagccaaagcaatttcatgatcctagtattttgtcttagagtaataatctcatgttataataactggatatttgttgacaactagaataacaaaataattaaaccagaaatttcagtcagatcgacctgattgctgatagctccatttgcaagtattatggcattcccaancccatgact

SEQ ID NO: 64229 - DNA, 279 bp, Oryza sativa
gacagtaccggttcacggaaataccgaagaaatacatcctgaagaggtggacaaaggatgctatggattggatcccaaagcacttggaggagacctacctgaatgataaggaggcagcagcgtctaaaacttatcgcaacaccctaatgcacaagtctatacctgatttggctaggcttggaggtactagtgcacacacatatgagaagacagtggaagttttgacaaagccggtgggagaacttaagggcatgtctaatccgcaagaacaaacaacaa

SEQ ID NO: 64230 - DNA, 444 bp, Oryza sativa
agcttaggctgttcttcagagtgctactattatgcatagataaagtgcagagctgtagaacatctctttccgctgaagattattaagaacatcaaagtaaaatgtgaaactggattaataaaatggatactgaattaatgtcgatagtattgagagatgatgatgctagtctggaggtttcaaaatgttacagaagattaattcaatcaaaggacacatttgaacttcagaaaagatagctgaagagaacatttgcttttcattcctcaaagatcaatttatattttgaactcatgaaacagtaaaagctgaagtactcctataacacatttaacctgtcatgaccaaagtagcaactgagaagaattcagaaatcatggttggcaaagaaatagagcatcaattcaccaaatatacttgaacatttaacatttgcacaataac

SEQ ID NO: 64231 - DNA, 431 bp, Oryza sativa
cttggactgaccgatgctgatggccagggcacattgtccatgggagcggagcagcttaaggaatttagggagaaccagttgtcggcctcagcatgttctaacaagactcaggttccagcatgcaacatgaagctcaaatacgctccatatcttgagcttcctggcggcattgcgttgcaaggtgcaacgttggtcgctatcaagccctcacccgagggaagcaatggcggtcatactagccgcaaggaaacggatgcatttgtctccggagcatttgatggaccattcaagtttgctgtgaaggcgctgatgaagaggcgaacttaccttctggagatgaatggcttctagatatcttgtgctgttactgggtacctagcttgttggtccaggcagtcatctagttacttttaacttctggtctatgtaat

SEQ ID NO: 64232 - DNA, 381 bp, Oryza sativa
agcttcagtcaaaacaatgataaattcattttcctcgtagcggaaaacataatcactactgcggacgttgtcataaaaggcctgagagactctacgcagaatttcatcaccagtgttatggccccacgtatcgttgatctctttgaatttatcaacgtcaataatcagcactgacagcggtgtaccggtccggttggcatgggcaatttcgcgtttgaagatagtcggtaggaaacggcggttaagtaatttcgtcagtacatccataccgacttcgtggcgcgatacttcttcaaacaattcacgcagcaaggtaatatattgcgatacgggatttcttatctgtaataaaaatttcacccgcagacttctgttattcaa

SEQ ID NO: 64233 - DNA, 439 bp, Oryza sativa
  unsure (1)..(439): unsure at all n locations
agcttncggggcctgcacattcatacgtttgtgatgtcacatactcttttcatctaaaaaaatccaatcataagaataaatctcgacgagcactatgtccactgtgttcgaatttttccttagaaatttttttacaaagggattaaaagcaataaaggatcattttggacctttaccttatcaaattattggccatggacatcacattgagttgacctgtgaaaatttagcttcaaaccaaactctattaatgtagaagtaatattgaagttatcgatggattggtagggcacattttgtaaaaactcagagtgacctacgttatttntacttatatttctttcgtcccaaaatatattaatctagtatcaatattagcttgaacataacgtagtactgtaaatctaaacatgcgctatantccaaattaagattatct

SEQ ID NO: 64234 - DNA, 421 bp, Oryza sativa
  unsure (1)..(421): unsure at all n locations
agctntgtcgtttggtggagctttcatggttgctttatgataatccgaatccagcaggggacgggatattttcgatagctcatacgctatccggtattggtgagatgccacaaaaaaagaatgtgtcatctcaaaatctcaaccgaccggattaagcacgaacgtactcgatgcaatcgccattccaaacacggggcaggacactgttgccattgaggcgccggaaactaaaagatcccctaaataaagcaaaccaggattggacaccagaagccattatacgtgctgcgcaactgttctccttttaggagattccgcgaaagaaaatgaggccatcaatgtcatctctaacctttntttccctacacagaatgttctcctgaatcgtgaagggatagctaagtactacatcaatntaata

SEQ ID NO: 64235 - DNA, 429 bp, Oryza sativa
  unsure (1)..(429): unsure at all n locations
tctcgtccttgccttaccaggaacccggattgtccgacttcttccggcggtcccaactattggcatgcgaggtttccctgaaccgactagttacttatccagggtgtcccattccaccttgtggttgcactttgattatgttcgatgagtttcccacaggaatcggtccttatatgcgaataccggacagtgccacataggcacaacccccgcatcgcgagttttcacaattcattttattttcaaacacaccgacaccacatgtcgggttttgaaggcttcacaaacccatttcccaaggtttcgacaaacaacggtgtatgtgggatatttggtatacgcgctcagagagcacgaataccgaggtaccacaagggtggagcgacaaggaatcanggtagtacgacctacggaaattagtgcggctac

SEQ ID NO: 64236 - DNA, 253 bp, Oryza sativa
gcttgaagcatcattggcttattctattctcttactggtaaagtagtattacattagctcaccttatttagttctttcttcacgcgggttatgtttatggaaaagaaaaatccaaagtcccaatgcgctatgagatgaaactttgtcgttgagatagtcgagagaacttgttattatatgcaaagactggggcaatggtttaatttcctgtttcctgtttcatttcagaagagaggataactgttttggtgat

SEQ ID NO: 64237 - DNA, 428 bp, Oryza sativa
  unsure (1)..(428): unsure at all n locations
ttgccgctgttctgtcatcggctatattgaaaatgagtcttctgcaacgctnggggctcactaacagtaacacggagagtgtaatagatttggagtccatcactgtagcgcccaggaagctacagaagcttgctttgtctggaaggttagcaagagggaaactgccaggatggacctgcttccttacaagcctcaagcaggttcatttgatcgcgagcggaattgcgcaagattcactcttgcttctttcgtcgctgccagggcttctgcatcttagcctcaatgccgcctaccgtgagaaggagatgacctttgccgcaggtggctttcctgcactccagacactcaccttgcatgagttgagtaaccttagtcagatagagtttcagagaggatgccttgctgagctacatgaactggtgcttgac

SEQ ID NO: 64238 - DNA, 416 bp, Oryza sativa
tcctttagtagatcaatttccttaaccgaatatagcaagtatccgacaaccgacgacttgacaactctcatcggctaatctcaggacatcgaagccgatgctgactctaagccgatgactactccgggcttgccaaattccactgttaacacctggctgttgagtgcgcccgtcaaacgccattgtccacgtttcattgtcgatttggttgtctgacctattatcaggcatggtccaatcggctacaaaatcggcgagaacctgggacttgatggctgttcatggcacgaagtggatatcaaattgacttagctcgactacccattttgcaatgcggccgacaacgtctttgttcctcacgacttcgtcgagagggaaggaggagacaactgtgaccctgtgggcttggaagtaat

SEQ ID NO: 64239 - DNA, 308 bp, Oryza sativa
  unsure (1)..(308): unsure at all n locations
aggatgcagcttgatgacggagcagaacgcnatcattttatgttttgtcagcgaaaaagactgatattgggaaagactgaaaaaatgggcattgttgcaccgctcatagaaaatgtttcaccgcacataaaaaaaaatagagtaaagtctatcaccggtccttagacttgtaccagtgtgtcatcgaggcccctagactcgcaaatcgaccgttccagtccttaaatatattgaaaagtgaactcttagccctaatcttgccataactagttaagactcccactaggttgtcatgttccccccccctt

SEQ ID NO: 64240 - DNA, 448 bp, Oryza sativa
  unsure (1)..(448): unsure at all n locations
catgcagctttgctctggaacgtgtcgctatttcacactattgttattattcctgtcgcgagctatatgtttttccaagatcccgtctgttcaaattatttttgtgagaatctatcacaattcacaacaaaggctggaagattgtacttaaatttgtaagtgcttgatgttttcttgcatttacttgtacttaaatttgtaagcgcttgatgttttcttgtatttacttgggagagttaagattagttaggacttaggataacatttggctgtcaagaattgacatccagtaacaacacttcatcaaagtctagcacgatagaagaaaataggtaggaataaaaattcctcaacactgacgtccagtaacaattgacaaccagtcagtatcaaataggtgggagaaaaatattccacaacgtngacgtccatacatcacaactgtgag

SEQ ID NO: 64241 - DNA, 440 bp, Oryza sativa
cttctcggttcttggtctctgcccgaggcatcgaggccattccttatatgatacgagctatagagcggatgcgcctcccccagtaagcttagggatgtgcagtgcatctccggctgcatggccgccctaagtcggttcatatcgaggctgggagagaaggcgctacccctatttaagctcctcaaacgctccgggccgtttacctggacggaggaggctgagcgggcccttactcagttgaaggcgtacctcagttctccccggtcctagtcgccccgaagccagatgagccgttgctactttacctggcggcaaccccgcaggtggtcagcgcggcgttggtcgtggagcgcgacgaggacaaccctcactccgcgcatccccaccctgtgtcgactcgacccgggagagagcatggaggagaggcccccgagccgaac

SEQ ID NO: 64242 - DNA, 449 bp, Oryza sativa
  unsure (1)..(449): unsure at all n locations
catgcaagcttgcatgatttttcgaagaactntntttctcctttatctttctggacgatgcacgatgttgaagcgagcttgcaacaccccaaaagcacactcaatatctttctgtttcccttcttgttcccttgcaaacagcttgtgcttctctagttgaggagatcttatagactttacaaaggttgcccattccggataaattccatcagcaagataatatcccgtgttgtattatgtcccattgacagcaaattggatttggggagcttcaccttttattgcttcaataaacagaggggactgattgagcacattaatgtcattgttggacccaggaataccaaagaatgcatgccaaatatgaaggtcatatgaagctataacctcaacgataatagttggatacttttggtcacctcgggtatattgtcccttccatgcgtttg

SEQ ID NO: 64243 - DNA, 431 bp, Oryza sativa
tcgatccctttcttcctctgtggcgtttagcagtttatggatcgtatggctccacagttcctactatagtgtcgcttgggcgatggtggagctatattgtgcactttataaagtggtgttattatgtaacgcctgtgctagctttggtcctgatgttctccatgtgaactgtgtcaaccgtccattgttctgcaaatctgcagtatgtactgtgtgtgatagtatcaagctgaacttctgaacatgcatatgaaccctcttcacatgcacgggaaaagacattccgaacgccatcatttagcaataccacgctcttatcactcgatcattgttacggattatctagttgattgtaagggtgaatacttataaaaataaacttaaaaaaacagcttaacacaagttgtttaaagtaatttaagtagaataaa

SEQ ID NO: 64244 - DNA, 443 bp, Oryza sativa
  unsure (1)..(443): unsure at all n locations
agcttcacaagttacatggcactggtaagtgaatatatcatttaatattgnctgaacaacaaaatccatgatcatagtcagaagataggattactagcagcaagatttttgtgaggatatataatgcttctaagcaggcatcaaatatcctcttttcttttattaatattaatatgctatttccctcctgtttcgtgatgcctttggctgaagctgtagaaactgaaactgtgtcagctgatgcccaacaaaaaagacacttcagaatccttgtgtagttctgctattaggtactgctttttcagaatgtgtatcctaattaggtggtttgaacaaactatatttggcttgaggtagcttacgttctgaaacttgtttacatggatgatagcatatggagcangattcaaggatagatagtactggcctactgcgtattcata

SEQ ID NO: 64245 - DNA, 440 bp, Oryza sativa
  unsure (1)..(440): unsure at all n locations
tgaggaagaagactgaccctcttttctttgaaccgctggtcatttctttgtatgggttgtacatagacaaagtggatgagtcgatgtggagaatggacttggaaagcaccatggccctgatctcgatgacactatcctgtttgttcattgctgtgcaactgttccatgtcaagaaggttcctgaagcgcttcctgccatgtcaatcaccatgcttgtagttctctctttgggttacatgatacctcttgtgttgaactttgaggccctcttcaagaacagtaacaaacagacatttccactttcaggtggtggttggcttgaggtgaatgaagtcattgtgcgaatcattaccatggtaacctttctgatgcagntacgacttcttcaattggcatgctctgcacgttccatggatgtaagcaaagatcaatcatgggct

SEQ ID NO: 64246 - DNA, 399 bp, Oryza sativa
  unsure (1)..(399): unsure at all n locations
ggcttggtactaaagtgggtgacaaaagcttcgacttatattggtgacaacgngtgttcccgggcccatcgcctgcccggccggctgaacctcgtatgttgctactaccatcatctctcggggtgagagagccctagacgcacggcggcgagctttccatcgatggaaaggaaacaacagatcgagcaaatccgcggggagtttgactgtttgagcgatgaggagcgtgctgaactagtcctgcaattcatttatcgatcaggccgtctctatcaaatggtgattgcgagaggagacctagcgcatgacagcagattagccgttcgaaaagaanaaaaaaagagaagagactgtacactagtacaaaacctgcgctggtgattagcgggtgactgggcg

SEQ ID NO: 64247 - DNA, 405 bp, Oryza sativa
agcttaacaaatcaagaaactcgctgaactgtgatgaagcaattaactcagcaagtacatgatcgatcatagcgacagtaactagagcataccttttcttgcagcatatcccagatccttcaaataatttctccacagagccgaaagaggcaggctttccaattgaacagtgtcaccttctacaagaacgaagaaacttgatcacttgaacttgcactggtttctctattgggacaactgccgcgatgtcaagcaataatcggataggatgatatcaaccaccacacaagtggtgtcatctttcagcccagtttctttttagagcttgctgcataagtaaaagtaaaagcaaaactagatgcccaaaattgtaattgagtcaattatgccaagtaccataagctt

SEQ ID NO: 64248 - DNA, 285 bp, Oryza sativa
aataataaaacgcggggagtaactacaaagatcgaagaaatcaggcgcaaaatcaacacatataacacatggacacaaaactataatgacaaccgcggaggaaaggatgacgaaaaacacgaagtgcaacatatgtccacaccaaaggatggaaaacaaacgagaaaaaaggatacctccaaaaatatagcaaatgagaggggtgacctcgaacgcatcaaaactctgggagaacgctgctcccatcaaagaagccaatttctacatacaacagcacaaccagga

SEQ ID NO: 64249 - DNA, 415 bp, Oryza sativa
  unsure (1)..(415): unsure at all n locations
cctgcggcatgcaagcttctaccttacaatngttctgcaaactttacactgctgctatagctagtagatgttcagtgatgtctcagatgatgcttcaattgttgtctactgctgctgctgctgttcagtgatgttgtccttggtttgatcaagtgatcaattggatatataatctgatccgagatggttgacgcgtgaggagaggctccatcggttgccatgatcgagacgtttaggcgagcattcatatggatggataaggagaggttaaggttcacaatctgaaccccaaatttatgtaagcaatatccttgcatgacaaggactggccgaaacgggatcgagttatcacaagcgataaacctagctagtactatctccgtctcattagaagtgtagatgtgggtttacattt

SEQ ID NO: 64250 - DNA, 440 bp, Oryza sativa
  unsure (1)..(440): unsure at all n locations
tacagtacataccatgaaatgcttgatcggaggatttcttcttatgttgtgacctacagctctattattgctgcgttatgcaaggctcaagctatggacaaagccatggaggtacttaacaccatggttaagaatggtgtcatgcctgattgcatgacatataataatattctgcatggatattgctcttcanggcagccaaaaaaggctattggaacactcaaaaagatgcgcagtgatggcgtcgaaccaaatgttgttacttatagatcactgatgaattatctttgcaagaatggaagatgcaccgaagctagaaagattttcgattctatgaccaagaggggcctatagcctgatattgctacctatcgtaccctgcttcatgggtatgctaccaaaggagcccttggtgagatgcatgctctcttggatttgat

SEQ ID NO: 64251 - DNA, 442 bp, Oryza sativa
  unsure (1)..(442): unsure at all n locations
agcttagagcagggccttagtattagtccttctataaagaaccagggtaatggttcatgaggcgaagtantatcttcaagtgagaactgagaaacatcgtggtttttcttttttgcaccatttaagattctagtgaactatatgaacctctgttttttgagaatctacgttgcatgatttggcttgataacgataatttgttttggttgtgtagcattgaacattntagttgataagaatttttatcttcttacgagtgaaatattgccttctgttcaggcagacaagcttctctctcctgagttccagccttccgtggaacagctgattcgttaccttccagncgagccggcaaatttgatgttctcggcaacgttccctgtgactgtgaaggagttcaaggacaaatacctgcctaaaccttatgttattaaccttatgg

SEQ ID NO: 64252 - DNA, 431 bp, Oryza sativa
  unsure (1)..(431): unsure at all n locations
ntacctataccaaggtttcgaccctgcaaatgccttaatttataacaagctatcatgggaaggcccaaaggctgcagtcaaccaaagagatgcagatcttcttttcctctggagaagggtatttcctagtctattcttttgcagacttttagtttgttgtttgttatgttccttccaaaaatacttaccagtactagctattatctaatcccctttctatacaaccatatggttggagtgcacttgcatttgttttgatgtcacaaattattccagcctacagagatttttctaaactgaagttcattatgacgtgttgaaattacttggtagtgtacatcagctaaatatctttgtttctagtaaactgtgctgctgtctgctgctcgcaagnttcttttcattggagtattatcttagagagatttttt

SEQ ID NO: 64253 - DNA, 444 bp, Oryza sativa
  unsure (1)..(444): unsure at all n locations
agctntaatcattagcatatctgttgncttatattttataccaccntatatacacatgtacacatagacacgttaagaatgtgctgtcttttgcctttaaccgtattacacattaaaaaaggtattgaggcgctatgctcaaaacgtaaatatcaaggttgtttggttgacaccctcaatttaccacaaaagttttgacaaaatatggcaaaccacatattatgtggtaattttgtgaaaaaaatatatgataagtgggcctaatttcttaaaaaagtgaagtgtaacatagttgtagcaacaatcaaatactatgctaacttatcaaaagtggataacacaaatgtggtaaagtgtggctatcaactaaacaatccctaatttatcgcatttaatttgaaattttagtgtaaacattntatttgacctaagaagtaacacccg

SEQ ID NO: 64254 - DNA, 439 bp, Oryza sativa
  unsure (1)..(439): unsure at all n locations
tgccgcatgcaagcttataccgccgccttccctgctttttgctgcttttaatataccttcttcgntctgatctttctttttctctcctttcccttggggtgtgtagngactagtgatcactgatcagtactatgttactatgtaaaagagttctatggaagcttagctgatgttctctggaactagcgcttgttttacaactatcattttgaacctttggtcatctagttgttcattagtactacctccgttttttaatagatgacgccgntgactttttcttacatgtttgaccatttgtgttatttaaaaaatttacgtaattataatttattttgttatgagttggtttatcacccattattttaagtgtgatttatattttatacatttgcataaaaattttgaataagacgaatggtcaaacatgcgagaaaaa

SEQ ID NO: 64255 - DNA, 291 bp, Oryza sativa
  unsure (1)..(291): unsure at all n locations
ctcagcttcgtggttgccacctcgtctcttgctgtgtgttccttctgcgngccccatcgggtccgagaccccttggtgaggtggggcggagattcgcctaaactccgaatcctggcaggccggggggggcgaaaatgcgngacgggccggggcatttacctcaccagccccgactcatccgtgcatctattacgtgtcgttcgcctcacgtcacccttgcatcctttacgcgtcgtgtcgcctcacgtcatctttaatgcaatgagggatctgaatcggaacttatcatcc

SEQ ID NO: 64256 - DNA, 388 bp, Oryza sativa
agatgacccataaatatccatcagaatagaccagctaataaggtcagggcaaaggccatttcgcctcatttcattcattacagattttgcgcgttctccatttgtgccacaggccttcattagaatattatatgttgtaactgttggtctaaatggaaccactaacagagtactgctgttacttgtatgttcttcacagtatgagaagttgtcaccaaaacatcctttctgttcaggggatagagatatcttgactccatattctttccagtcatagaacaagcggaaagctctatcatactggcatgacttaacacaaccagtaaggataatattgaagcatggagcagtaggttgacaaccatcccttgtcatttcttcaagtatc

SEQ ID NO: 64257 - DNA, 432 bp, Oryza sativa
  unsure (1)..(432): unsure at all n locations
tatgcacgaccattctcgatccgtcgacgtctgtcatcttttatggacggactgtagtgcgtgagtttgtgattttttcaatgtctaagtttgcacgagtactgngtaatgatatattgctatcgctacttcgttggcatgctttctttgtttcccctgtcctccgttctgcaccataatcccatgttcttgtttaacaaaaatcaccagagagaaatcgtccaccataaatgtagtgagatgcgtggtcatggatgatgcagatcaaagtttcaggttcagtctggggaaaatcacttcgatataagctgagatttgatttccttttttgttcagcaaaaataacaagtgaaagcagaaaaaaaggatgctgtgttctaacaatagcatgacattgtagcgccgacaatgtgagcccgttagtaaatcact

SEQ ID NO: 64258 - DNA, 438 bp, Oryza sativa
  unsure (1)..(438): unsure at all n locations
agcttaggtttgcaagtatatataagatgttttggtcagacattgccagtgtcaatagcacaatcatgcatcttatacttctcccgtacacaaatacaacaaattaaacgaagggtttaaattttttccataattaccaggaatcccatggagtactacttccacccaactattcctcatttaggtgttgtttgaatcttctgaagatgaagatgaagattaactgtttcacgcaaaacgaggtggtaatagcgtgtgctcaattgagttttaattattataaacttgaaaaacggattaatctgatattttagaacaatttttatatagaaaattttcgcacgacgaaacgcacagtttaacagtttgaaaagtgtgccatgaaaatccaaaacttcatccagtgtttgcagtggaaacaaacggngccttaattgt

SEQ ID NO: 64259 - DNA, 175 bp, Oryza sativa
ttatgacaattaagctcaaaggtcacactgtgattaagtcagtgacaaacttattaaggtagagaaaatcccctgtgtacccttgaaagttctccctattcccttccggatcccctgatattcgctccatcccttacatacccctgatttcttgtctgataccttcaatgccatt

SEQ ID NO: 64260 - DNA, 320 bp, Oryza sativa
  unsure (1)..(320): unsure at all n locations
tttctctgaggagtcttctattgacccgacatgaagtttaggcgactaaccttcctcatacaatgttattgagcctcgtggacggggctcgttgtgtccaccagcactangaataatttaaagcgagggtccgcaagtgcatcagttatacggcgtatgaccagtatgggtaatgatagggtatcaaacatcttgcatggtgggacgctaaaacatgaattctggatgaggcttgatgccgatattaattatgcccttatgtattgcgagcaccgccggagcacaatatatattctcatcatgtgggaacctgtaggaat

SEQ ID NO: 64261 - DNA, 326 bp, Oryza sativa
agaagctacggaaagcagctggccagaaggtgatttcgcttttctcaacgaaacgacttcatggtcgtgaaataccagctatacgaggatatccccgcggattcatcgttcaacgccatgctgggaatcgaccatcgcaatgacacatacggcgggattttgcttgtgttggagaaccgcaataccaatacggactgaggaggtgagaagccgacgctaaacgtatattcctttgcggccacgaacggtgcaacgctttctgacgagggccatttgtggggacggcaaatttagcggaagctgagcccatccgataatggcaaagg

SEQ ID NO: 64262 - DNA, 441 bp, Oryza sativa
  unsure (1)..(441): unsure at all n locations
agcttagctagcactactttcagcgaagcacacattatgcatcgatcatatccatatcatatccctccatcgatcacaggctcacatctcgtctttaaccactctgttacttgcagcagcattgcgtgctcctgatttgacagggtaagaagcctccatcgcgatgccacacagcccattcgagtctgacgacacaccacgctgcattctgatgtaccctctctcgccccaatcctcgccccacgagttcttgacgatccagtacttggtgccgtctcgagttataccgtaaccgacagcggcaacaccatggtcgagatccgtgccgcattctccggtgaagacaccctagttngattattcccaagtgatatatatatgatggtattagtatctttgagtataattagacacacgcacactgaatatgtgtagatcatg

SEQ ID NO: 64263 - DNA, 208 bp, Oryza sativa
gctttatttggtcctggtgcttcatatggtaccggtggattttgtcttctggaaataaaaatcataccccgaatggaccttgacaaggtcacattactgaccaaacccagtcaaaccccaaatggcccagtagttaaaaagttcaccataaattcaaaatttgagaaatcctggtcgatttttacttgatttaacttgcttgcttgat

SEQ ID NO: 64264 - DNA, 285 bp, Oryza sativa
  unsure (1)..(285): unsure at all n locations
caaatagcactttatcatgattntaggacatattggagtgtattgggggcgttcgtggcaaaaacttacttcttgattcgcgcggcgaacgtttgtccattaatgccaatattgtactacacgggcgcgcactggtgcaacgctatggaccagctaaaaaagcgccaaaacacgcactttcgtcatattggaacgtattgcaggcggttgtgggcaatactcactaattgatacttgctgagaaccgcggtgaattattgccaataaatgcctatattggcttac

SEQ ID NO: 64265 - DNA, 450 bp, Oryza sativa
  unsure (1)..(450): unsure at all n locations
ctaagctacacacgcccattgctcaacttccaactttggtatgacttttttttagaatgngatgctactggagttggcattggacgtgtgttgatgcaaaatggtaagcctgttgcatattttatcgagaagttgcatggtcctgttttgaattattccacgtacgataaggaattgtatgctcttgtacgttctttagagacgtggcgtcattatttgtggcctaaagaatttgttattcactccgatcatgaatcgcttaaatatcttcgttctcaaaataatttgaatcgtagacatgctaaatgggttgaatttattgaatcttttccttatgttatcaaacaagagaaagggtaagataatgtgattgcaaatgctttgtgatgtgaccatggctaccacggatgcaaccattgctcacatcatggatgaacaagaagatatccg

SEQ ID NO: 64266 - DNA, 448 bp, Oryza sativa
catgcaagcttatggaacacagggaaaagatgattttttaaaataaaacaagtaaaatacacgaccggttcttaaacttagaccattgggatatcatctagatccatcaacttataaaatgcacatctaaattcataatcttgttttaatgtatcagtcaagatctagagtacaaatgattcggcccgaatactgacgtgatagtccacaataatgagaattttgtatttagacttattcgctatagtatatactctcaaatggactctgaccactcccaaagcgactgccaccacacccgtgggagacaagacgaagagacagtgattaggatggtggtaataatcggccacaagaggataatcacgcaagcctagtgcaacgtgattgtctctaagggggaagatgatgggcctcatatttctggagagtcacggcaacaataatg

SEQ ID NO: 64267 - DNA, 423 bp, Oryza sativa
acacataaaactcagcttactcttgatgcactattagtgtgccctgattgtttaattgcatatgatctgaactccacgttgaagacgtttttgtttcatgctcaaccatgataacagcatcccttcttgcaggggtgtatagaatagccatttgaagacatcatcttccatgatagaaccatcagtactagaaatgatttttcttacatccagacagagggtgttagtatcttgaacgagagtaacagcatcaaaagaatcactcccatcttcatcaaactcaggactctgctcaagttcccatgtattggctaacgacaactgatgcagcaatttatagatcatttcaagatcttctgcacctagaaatgcaatgctcaacataccgggcaacagataagctccttcttccaccccgagtct

SEQ ID NO: 64268 - DNA, 362 bp, Oryza sativa
  unsure (1)..(362): unsure at all n locations
cgagctgcaactgactaacacctgtctcgttattgtttttggaggcngaacctgaaacaatagtgctcttgtcacccaatcttgtaatccggcatatctgtagggaacttctccatcatatgctgccaaatctgaccccagcgaaattcactatctccctacattctaaagtatgaacgtctattgtgtaatagacaaagctcgcttctctgttatccaatggatcagaaacctgtcatcaatctaatgtgggatgacacacatgcacatctttcgccacactttttgttttgtcactggtctatcagtactgaaacctcatcactaaagcatgataccctttattttggaaactacacatt

SEQ ID NO: 64269 - DNA, 314 bp, Oryza sativa
  unsure (1)..(314): unsure at all n locations
cttggagacaacgactcggctgtcatgcctatcatgctttacaatcccgctaaaatgcctgcattttcaaaagagtgccttgagcaaaaggctaaatttattttcttcaataactaaaattcattgtttagttttgaattccggaatacacaccanaatctccttctattaattgcaaattttttatctgattgaccaatgcgaccacatatattcataatactacggtgccattgttactgtttcatttcccgcaacgccactggtacttgcccgagctctgatatgcatatcagctttccactctaaggaag

SEQ ID NO: 64270 - DNA, 434 bp, Oryza sativa
  unsure (1)..(434): unsure at all n locations
agctntgcaagccaaaatggctactgagtgtggggcaagagagaacagtttggatgcctgcacagaacaaaacgaacagcaacataagcaaggcctgagaatcatcagtctgcagcagctagatctcatccattatgttgtaggaaaggctagcgtatagatgtcaagtcaatttgctggaaaaaggccagcagctgccgacaatacttggatatgcattgctagcgagtccatcctattggcggcccgtgaaacgtgcacggcacttatgctggactgtcaaatggaatggacaaggtgggacatactcacgatttctcatgtgtgtaagagagaagaaatcataggatcacatggaggggacacaaaaggatatacaagagtagttctcattgactgggcagagttagagatatcagatattcagatgcaca

SEQ ID NO: 64271 - DNA, 431 bp, Oryza sativa
  unsure (1)..(431): unsure at all n locations
agcttggctggagtttcaggcctattgatttaaccctccgggacagcgtggaatcctacaaagcanttggcatccttgattgaggatccaaactgtgagaacttcagtgtctgttaaactctccatgattcatgtaatctgtgttgagatcaaccgggtcaataaagaatcgttattaaaaccaccagtgcatttccgttaaaacaaaacaaaacaaaaacaaaaaccacaagtgtatcggtgtatcctgattcctgaatcttgtccattgagcaatgcagatatatatagttgacagttgttggctcggtggtgaggacggcttangccctctntgtttaagcttangcttattggtttagacttttaagtcagcttataagtttagtggtggagtcatacatctacctcatataagctaaaaaagcttc

SEQ ID NO: 64272 - DNA, 366 bp, Oryza sativa
  unsure (1)..(366): unsure at all n locations
tgggcaatggacaaacctatttccctttttttcaaaatataccgcgttcttcaaatgaccattacagcttgaaactcaattatcccttcacctaatgaacattgaaaataattagaactaaccataataagatattattgctcaaagatgcagacaatatgggctactctactcttaaactctatcaggccatgtataagaagaccgaaatatgggcctcaaacacaaatttgcaactttaacggcaaaaattggatacacgagtaagagtaaatattgtcttcattcttcaatgatgcagtcagaaaacagaataggacaactgccagctagtgattattgaaatattgtntacctgactagtag

SEQ ID NO: 64273 - DNA, 361 bp, Oryza sativa
  unsure (1)..(361): unsure at all n locations
agcttctagacaaatacaattaatgtatttgtgacaaatagagagaggagaagaaaattgtagtccaccttatagctaatctattatatgtgttggctntaagattggctaatagtagaaagtgagctttgttattatccttgctctaagataggattagtagtaggtgatgatgcattaaactcctgctcttttatgattaagatgcatattcagatattctacctcgatcagctaaatggtgcataacatacggaagctattaatataaagttgctctaaaaatcaaataaactcctttcaaatttatagtaatgattatattntaattaatcattatcttacttaatcctttnttttc

SEQ ID NO: 64274 - DNA, 354 bp, Oryza sativa
  unsure (1)..(354): unsure at all n locations
tgtgaccagggcaatgtcaaaggaggatgatgtatatctcatctgggatgncgangatgatgatgaggatgacgacaatggtgatcacaaggaaggtgccaacaccgtagtgaataagaaagaagagcaaattgaggagcctgttagccacaaaacagaggatgataaacaaggagcggatacacctgatgtttcagaggacaagaagactactctggcagctgagaaagatggcaatggcgaatccaaggatgaagtagcagcaccaaagtcgagcaatgacatggggcgagaagagaaaatcgactcgtctaaggagagtgaattcttagcggcatcttctccatctgcaca

SEQ ID NO: 64275 - DNA, 420 bp, Oryza sativa
catgcaagcttcaagtctcctaccatcaatattcatataactcatgcattttcagcacgggcaagtgatttctactgcaaagtttagctcgtgattacaatatgaagccagcaaccggcatttcaccttccatcgttgtatctcaggataaataacatggcttgcactctatacagcaattagcagccttgaaatatcaactaccacatgtgctaataaatatggggcaggaccaaaaggagaattgtgaggtgatgaaatcgtttaatggccagcaagagatagatgaaaaacagatgaagcttaagcctagtatttcttatgaccatagataaatccgcaaacgcacggaatacatttgtagcacttcaccttcgggtgaccccaaaaggaaatcaaactcaggaatgtgtctaatct

SEQ ID NO: 64276 - DNA, 447 bp, Oryza sativa
  unsure (1)..(447): unsure at all n locations
ntatattntcatcagaaaaacatgtaaacttgtaaaatccttaacaaattgaaaacaactcgttttacagtaatacaaattactgttaactcatcgaatcatgaactttagtgttattgcataaaaacttgcactcacagtacaaatgtagcctctaaaattggtctaagataaatcatacataaagcatatacaaacttataaaatgcatacaaaattcatttcaactcattttagagcaaacttagtttctacagatctaccaacatgttctctaaaaacaaagtaaaataaaacatatacatactttacatcaaatgcctctaaaaattatctttaaaataactagttttgcataagctgaactttagaagtttatataaaattcatcttatatcctttttgagtaaactcaagttctgtagaatcatagaagtgtgcacttca

SEQ ID NO: 64277 - DNA, 462 bp, Oryza sativa
taagtcacctgagggcatgcaagcttgcaagccaaaatggctactgagtgtggtgctttagagaacagtttggatgcctgcacagaacaaaacgaacagcaacataagcaaggcctgagaatcatcagtctgcagcagctagatctcatccattatgttgtaggaaaggctagcgtatagatgtcaagtcaatttgctggaaaaaggccagcagctgccgacaatacttggatatgcattgctagcgagtccatcctattggcggcccgtgaaacgtgcacggcacttatgctggactgtcaaatggaatggacaaggtgggacatactcacgatttctcatgtgtgtaagagagaagaaatcatatgatcacatggaggggacacaaaaggatatacaagagtagttctcattgactgggccgagttagagatatcagatattcagatgcacataaaccta

SEQ ID NO: 64278 - DNA, 414 bp, Oryza sativa
tatcaaccgctaccaaaaatttaattttatagttgcttttaatgtttcttgttgtaatttatttttcatcactagcttttaagtcactaataacatcacatataaaattacctataaattatttcttgttccctaataagtgttacggcctatagtcagctgtaggaaaaaatgatgggactgaattcaaaatatacggaaagaaacaactacagttagaagaggatatctcaatgagctgaggccatatattcaactgaaaatttagttctccttttaacgtaaataccagttgacacgagaaataaacgcatttgtcatatcaaatggaacatatgcatgcataagccaatttcaattccaggaaactttagttaccaacttgatgtactataaaaaaacatttgtcaataa

SEQ ID NO: 64279 - DNA, 449 bp, Oryza sativa
  unsure (1)..(449): unsure at all n locations
tgnaagcttctcgntggatatatattgcttgctttaatattttattatatagaggcctcggagtattagccgatacatgctatatctatctaatcggctatgctatgagcgcttataatctcattgataatatatatttcgatctaagtgatttatactgtctcggcataacgatcgatctatcccaatcacttgacttaaatatatatcaacatagggattatgtaccattaatatctacagccgattgaatagatttagttctttcttatttattcatgactgccgatcgatgcaaagatgacatcggctcaaggataaatgatatgtcattggcgactgaccgatcggctatcgcttatggagttaagtgatattatcctcgtattggttctttgtgattgcaggatcaaatcaaccggcacgctcacaaacctcaaagacaagat

SEQ ID NO: 64280 - DNA, 449 bp, Oryza sativa
  unsure (1)..(449): unsure at all n locations
actaagcttcacaaatgcttatgctgcatcatggcgaatgacaggattgcatcaacatccatcggcagcttccaccgcgacaggtttaagtgttcagccgatacagcagcccaacatttcattcaaacaggagcaacaagagttacttggccacaagccaaatgtacaagagtgtcagttaattggtcaacatgatgcttctgtgaacacactgtagagaattatgagacgcctcacgacacaacgtgggagggcgattgtatttatatatccaatacaatagagattacaacaaactcttaaataagagttatatacggatacaatcgatacaaatctaatctaactctaatacccgcccgcagtcaaagtgtgaggaacatcacgaacgcaaagactggacctaaactcaatgaataactgaacctgcaagccttntgtcatgatat

SEQ ID NO: 64281 - DNA, 452 bp, Oryza sativa
  unsure (1)..(452): unsure at all n locations
aggcagcaagctaaggcttctggtaactgtatanaatgcatttctttgtgttcttttgggaaagattggtcgtaatgtgagaggtcaatgggtcatagctctgcatcactctagatcaagtttggtgaatctttatcggacattttacctgtcaagaagtgtgtaagaagaacaactaaaaaaggcaatcaccttctttgcactataactgataggcaagatagaactcatttaactgtagctgcaaaacatcagaactttaactcgtgtgtttntaaattccatggacaatggtctgcttgtactangatcttaaatagaaacgtctgattctacatatcttcacanaatgcttagtacttgctgctctcaagcacttaattatgttcaacccttcttttgccactgctgctggtttcacaccttccaattgttgcgatgatttccctatc

SEQ ID NO: 64282 - DNA, 372 bp, Oryza sativa
  unsure (1)..(372): unsure at all n locations
tggccactcctcggagacatgtcgcggagcttcttcngtgacatttcgtcgagcacgtcgcagacgaggatgcccgcgccagagatcgacccacccgacggtgccctttgcgccttcgagcatgatggtcttggctggtggtcaggtggtacatatggctctctcagctgagtgatggatcgggcacaacctgtccctcaccggatcctccacggacacctcctggcatgtccaactccgggcgatcgggacagtggacgacggagaagtgggagagggcaagcgggcggcggcggctcgttccagaatgcacctcgatgggatggccggtgctcgttctcgaactggcggtggtggcgttcttaccggcgg

SEQ ID NO: 64283 - DNA, 303 bp, Oryza sativa
tatcccgaaatcagtgttcttccccaatattacaaggatggactatgctaataattatatctttagggtatacatcatgatacctcacaataaaatatggaacatgggaggtatttttatttttatgcatctatgctgatcagcattgatctcttttgtgcttaaacgaatgaatccttattacttgaaatttagaactaaacaaagatgtaagctcatgttattgactgaatgtattatcccaactgccaaggttttgggcacgattgctggtttacagtttaaggctgttaagtacctttt

SEQ ID NO: 64284 - DNA, 347 bp, Oryza sativa
tgacatgtgggtaaagagtccccctctgcagaggtcatttaactgttcgaacacccgtgcccacggacatgggcggatgtaagggattcctatcgccaaattgtttgactactgcttggaaaagctgtgtaaaagggtcaatgttgaaaatctgaactgatggaacagctaggccgggtggcgttgaaaagaagtggcccgggggccgattgaaagctgctggccgggtgccaaccgtgatgcatcctaaagattgtacattgacatactccgacagagagaacactgctcatccggtcgttgaaaacactagttggttcaaaaagagtcaaaaaaatcaatgcaaa

SEQ ID NO: 64285 - DNA, 316 bp, Oryza sativa
  unsure (1)..(316): unsure at all n locations
agcttgatacttngaccgncngagatatgattctctgtggctggntctagtgcgctcgtggctgcgaaaaaaagatcaaaacaaacattactaaaaacaaagatgtgcctctcttctcagcgctagagagagcgaccaagactgaaaaacaaacatgaggatactggtgcacaccacaccattcccctctatgccaccaccttccaccaccggatgttgtactacttgccgatagggtttgtgatcggtggcaggctttgtggttaggctcgcgtctctacttcaaatagcctaggaccagcactcgtcactatac

SEQ ID NO: 64286 - DNA, 443 bp, Oryza sativa
  unsure (1)..(443): unsure at all n locations
agcttgtttgcatgttgtcatgtacagtttttctctttcttagccctttggctatttgtactttttctccttctatcaatataacgccagtcaattctgaccggctgttcgaaaaaaattgaccgcttcgtggcatcgatatcgatatgcttcgcccgcatgctagtagtaagcactagcatggattctagggcttagctcagttggttgatgggtatgggtgtatgcctagaccattcaaattcgaattatgttgaagacaaattggatgcctattttttaaagagtaaattgtattggatgtaacgaattacataagcttgtaaaacacacgttataatgtacggacatgttgatgcatgcgaatcanaaccaaataagcatgccatggttaatcttactaagtttgaatgtttattaggatgctacatgggtacacattt

SEQ ID NO: 64287 - DNA, 428 bp, Oryza sativa
catcaagcttgatagattgattcatctcatttattaatcttggcattaaacaaacgatagcgaacccatagcaatggatggttagatttgattcctactacactactaccaaaaacccagtggggtttatggtaaattggtcctatgtctatacgagaattccatggatcgatcccctagagttttaaactgttccctagagctgctaaagcaacccaagggaagtaaaatatccctgggtgtaggacatagtatagacaggtgttctgctgccaagaaatggcaacaacgacgtctcctatcgaagggaaggattgagaagacggcaaaggagcacgagctctcgtagatggtggtggcgcaagaaatgcaatggcgatcatgcggtgaagctcgccacccaatgacgacgctgagggcaccactca

SEQ ID NO: 64288 - DNA, 417 bp, Oryza sativa
gcgaagccgcccctgggtcttgggatgactatttcgcctctctgacctagagagccttcgccgcttctacatcagcaaagccgagggcgtcaaatgcaggagatattgtggcaccgctccatgttcgccctcggaggccgaaggctctgctccttcttcagctaccatctccccttcgcttccacctttctttcgctggacaactctctccatgatgatcttcttcggtggaatcagcggttttgctcggaggtccccacggatggcgccagctgttgtcgaatggacaactgcgtcacgttgaaaggcatggttctctcaacaatagttgaaagttaagaacaattgtattacgtaggaaaaattttttggatccccccattacaaggccctaagaggctatttatagctttatta

SEQ ID NO: 64289 - DNA, 389 bp, Oryza sativa
aaaagggggggtgatggtatagatatgcgaaatgtccaaaaatccccgcaaacgccatcaagagagcatctggagcgtccatgccaaaccccagaaccaatggtggagatcagggttcggggctaggcccaactagcccaggatttggcctgggcctcctcctcagcttactttatacatttctctggtagttgggctcaacttctggtgtttcgatggagtttaagagcccaactcttatgtggatataattccccttaattttgagctagatttccttctaactttggcggggtattacctgcatctaaatatacaccaacactcgtggaaaatggtagaattaagccctaccactatgctggatggtttattattcaagtattatg

SEQ ID NO: 64290 - DNA, 178 bp, Oryza sativa
aaccaccccctagcgcagccgggaatttttttttttttcctaaggcaccctgtaatttcaagcacccgaaatccttggactttttttacggaacacatccatattcctatataatattagcgccggtgacaaaatgtgtaacccccgggctctacctagaccccacatcttttccgcc

SEQ ID NO: 64291 - DNA, 367 bp, Oryza sativa
  unsure (1)..(367): unsure at all n locations
ttaagcacctgagctgcagcttatgtcctggatggcttttgctttctgccacttagtggaaggcgaaaagccccttcggggggccgagccataatgaatacactctggagagctcgatttaacttggtaaacccgcggccaaggacagctcagtaacagttctatgggcgtngcctccaaaagaacggagcgtgcaaggtttctcggccagaggacttggtctcagtgcaaggcaaaggacttgctgaaaactaccgtcagcaaacaaagtcgcttatgatccagggccgatggaaggccgcctaaggataaattacttaggatacggctgatttcccaaagtcaatcgacggaagttggacctcat

SEQ ID NO: 64292 - DNA, 436 bp, Oryza sativa
  unsure (1)..(436): unsure at all n locations
nttactgagtcatttaagttatagaagaattcctgaactttagaattcaaaataacaagttcctctttacccagaaaaaaagaaccacttagaatagccaaacagattatatttgtcgagaaatgcaaaatgatatggagatgaccctcattatctattttggccaattgtattatttccttgcgtattcctataggggggttttgtacatgtgtattcggtttctcttttatcatttcgtccaagataaaaaggtcttctaattccatgaatctttctagaactcttttctcttgaatagcagntaagagagtttgggattgcctggtattccaccaattcttaatccaaagttccagacatttgttaaaagagaaagagactccccaaggcaaaagtacgataaatacaagatataggaaagaaggcaatgctt

SEQ ID NO: 64293 - DNA, 350 bp, Oryza sativa
  unsure (1)..(350): unsure at all n locations
catgcaagcttatgaaattaaatgaaattatggtctattttcacccacanccgagcggaagatcggacgaaatcctagaaatattatatgacctaattcagtctatgactaaacgaataaagataatacacggctagaatccctagcaatcaaaaacgacattggatcgcgaatcgattacttataggggttaccccaaactgatctatcatactctagaagaactcatctatcggtgtagttatcaattacgtctaaagtactaccgcgaattgatttcttatagacatcaccaacaataatccgtaatggatattaaatcctgcaagtctaccacaataactaatcta

SEQ ID NO: 64294 - DNA, 476 bp, Oryza sativa
gcaagctggacagttttcataaggtgactgtggttcattataagcatgaattagtccaagcagggtcccacattgttttttcaatggaggatcaaagccactaagatcgttatctgagcagcaaagtgacagaagtcatgaacaacaagtaaccaagacaacgatacccgaggcaagtactaaattttaacatctaaaaaaatacttgctgcaaagggcaaagacagcagatagagtcattctctatgtacaattacaccaatcctgcaatctgacagttaatccacacttcgttaattctgacaatgcaataaataatatgccaacatgataccatacgaaaacgaaaccctaaaattataaagtttgttgtagttaagccagacaagcagctgcacggagcgatacaggaatttgccatgcagatggcggctgcacatgacttccacgaatcagcagtggtccctaacctactt

SEQ ID NO: 64295 - DNA, 406 bp, Oryza sativa
  unsure (1)..(406): unsure at all n locations
tattccacagcactaaatctcttcccgccaccccgtacctntgataatggtctaaaatcattgaagccacttgcgacgacggtgctcaataaggaaaatttggcgtgaataatattcaacaccagtgcagcatcatcattacatacttacagccgccgactaccgctttcgatatattgactcaattttccagcctggttaaaaatagcgaccagctcagtcgcaaatatagtgactaccctaactaagcaacaataaggaatacactatgactgttcaaacaagtaaaaatccgcaggtcgatattgctgaagataatgcattcttcccttcagaatattcgcttagccaatataccagtcctgtctctgatcttgatggcgtggactatccaaaaccttatcgc

SEQ ID NO: 64296 - DNA, 438 bp, Oryza sativa
  unsure (1)..(438): unsure at all n locations
gcttttgtagatgcctcggctntcccattatcttgtgcataatatggtgaagaatttaacaatttgattcccatactatcggcaaattgaacaaactcatcggatacgaaaattgaaccttgatcagttgtaatagtttgaggaatactaaatcgtcatattatatgctcttgaacaaattgtatcgcatccccagaatcaaccttcttcaaaggaatcgcctctacccatttggtgaaataatcggtcgccaccaatataaacttatgtcctttactcgatggtggattaatcatgccgatcatatcaatgccccaacctctgaacggccatggtttaatgataggattcatagacgacgccggcgctcgctggattgctctaaatttctgacaatcttgacaccctctgtaatatctgaaacaatcttccagcatt

SEQ ID NO: 64297 - DNA, 438 bp, Oryza sativa
  unsure (1)..(438): unsure at all n locations
agcttgtaacctgcatttgttatctntattgcttacatcaacctagatgcctttgcagtactatgatttcagtgcaggtttatttacaatagttctcttgctcatttacatcattatagatgccttgacactttgacagtaaatatatttctgaatatggtctgagtgcaggcctttgtcagtgagtatgctgtttcaagtaatggtgtaggtagaggaactcttcttgcctcactggctgaggctgctttcctcactggactggagaagaataggtgatcgatctattccccacatgcacacacaaatttcttcaccacatggttatattctctattgccagtggcatataaggaatttatcctataaattatattactatcgcaaagatcactctgttgactatngagatggctatntacttgttctttgcagtga

SEQ ID NO: 64298 - DNA, 348 bp, Oryza sativa
  unsure (1)..(348): unsure at all n locations
actcacaacgggagatgaactattcaaactcccactactcttcttcacncagctacactgtcctaatttttgtaacaaatcaacaaataatatatatctatagaacatacacaccgattttacttgcataactcgaaaatgccatggttcatccactgtataaaaacgtactgcgcttgtggctcgtttatatcaatatttgtgtgtgtataccgtatgtgtatcgttgcacgtactatgcggataacattgatttatacatgaccatagcttcttgtttggagaagagaacgtgcatatatactttgctaattntgctcgccgaacctcttacccattaggaacata

SEQ ID NO: 64299 - DNA, 451 bp, Oryza sativa
  unsure (1)..(451): unsure at all n locations
agcnntgggggttttgttgacggtcgttatcgatcagtttcacccatcgatattaccaaaataaaggagaactagttatgcttgcaatgcatatttgtgttcaaataaaaatattccactatcactaggattactaacctcttgcagagaatgaacacaaaatggaggagaattgtcacgcctagaaattcatgaactagaatttctaagcacaatgtgcattaaaacccctgtccaggactagccagggtacacaaacgacaattgttgacatacaaatctacgtcttacaaaaatataaaagattacaaatgcagcggaaaggataaatgagctagacttgaaagcttgactcctgcagcgaggcgactccactccataggcatccttgatggcagcgacgaaaccaacttcaacgggacagcttcaactgggaagatcttcagctctg

SEQ ID NO: 64300 - DNA, 439 bp, Oryza sativa
  unsure (1)..(439): unsure at all n locations
agcttatcgcaggggtggtgatcccctgtagttcactccaactccacccggtgaatntgatcaaatctctaccgtctatatataacaacggttgagatgaactataacaaattcccactagtcttttttaaataagctaacttgtcctaatttttgtaacaaatcaacaaataatatatatctagagaatatacaaactgattntacttgcataactcgaaaatgccatggttcatccactgtataaaaacgtactgggcttgtggctcgtttttagcaatatttgtgtgtgtatacggtatgtgtatgtttgcacgtactatgcggttaacattgttttatacatgaccatagcttcttgtttggagaagagaacgtgcatatatactctgttaattntgttggcagaaacatttacccattaggaacataaaaaaga

SEQ ID NO: 64301 - DNA, 448 bp, Oryza sativa
  unsure (1)..(448): unsure at all n locations
agcttgtgccttcaccgacaatgacccattatgatccttcgcctaaagtttattttccaaatcacaaacaagcacagaaagttaaaccaaatgaaactatcactcaggttcactgctggaagcaccacctaatacattgaggaagaaaaaaagggagaactataccagagaagtacggtcagcagtgcttaattgaacattttcttcactgtcttcaacatccatgccattcttcagtttgttgtccttgtgctatcagcgattcaatgcaaagtatatacaatggtcaagatactaacaatttgctatttcttcaacagacagcacaagaagcaaacagggaaacaactagtgcagaaagctatccgcgagattcttgttcatctgaagcggtctatataactatattacaagtgtaaagcanaactgagaaaactgaaacatagag

SEQ ID NO: 64302 - DNA, 469 bp, Oryza sativa
  unsure (1)..(469): unsure at all n locations
cctgcacgcatgcaagcttgctcctctgctgctgttcggccacttctacgccacgttcctgtacagtgtgccgaagagagcgctgctgccaatgccaacgccaacgagggtgggcgacggcggcgtcgacgacatgatgagaggccaccgctggtggaccacggcgcacggctggntgctcatggcgcgccgcggctcgccgtgcacattcttatgggaccctttcaccggccgccgtgccgggctgccccccgaccacgacggcaccgtcctcgccgccgaaggcagccatcgccggaggtgcctcctgtcatgctgcggtcccatggacccgaccagctgcaccgtgctcgttatcgacctcgcctacccggagctctggtattgccgccccggcgacaaccagtgggtgaagcttcatcaacattcgtaccagtaccgcaaccctgccaccgtgacgccatcatct

SEQ ID NO: 64303 - DNA, 466 bp, Oryza sativa
  unsure (1)..(466): unsure at all n locations
agcttgtaagctatacatccgcttggttgtttctcactatcctcgttgggggctgtagagccaccgaaaccaggttgagccgcaccactctccggagcaaaaccaaaaaaaaaaaagtgcgtagtatgttttgatccagtactgaaagacgaacatacaataggatttttttttcagttaatggtgtctctatacagtatggtttgtagtaaaaatgtactactactgagcaggaatttttttaccggtgttaggccctgtcatccgaaatttcgatacaaattagaaagtattaaatgtagactaatgataaaactaattccataattttagactaatttgcgagacgaatctattgagcctaattaatttatgattagcatatgtgatgctaaagtaacatgtgctaattatagggtaattagacttaaaaaatntatctagttctattacgagtagtctatag

SEQ ID NO: 64304 - DNA, 398 bp, Oryza sativa
  unsure (1)..(398): unsure at all n locations
tggtttctctttatggnccggctgcagtgtgtctgctctgtttgtttgtatttccaattcatgagatggcttatgtgatgtatatatttagtggttcgcgtactccagatctatagaatcatgaggtggcttatgagtaatttaaaaactacctttgatgatgccaatatttgtgagatatttatagctcaattaaatctccacatgattagctttagcttagttaggaatcactaagagagggcacttgactaatggaatgttagcaatgttctgcacaaatagagatagctgatgtttactatttatttatcttattattttaaattatgatgtagttcttatgtatgcaaatatttctctgatggtgatcctactagagctcactgatattattg

SEQ ID NO: 64305 - DNA, 445 bp, Oryza sativa
  unsure (1)..(445): unsure at all n locations
gcttcttctcgtgcttcacattcgtcagcggtcaagcgaattatgatgtatttgaatcatacacttgagtttggaatttggtattctacttcatcttctatatgcttaagtggatattctgatgctgattttggaggttgtagaattgataggaaaagtactaatggaacatgttattttcttggtacatcattgattgcatggtcttctaagaaacaatctaatgttgctcagtcaactgctaaatctgaatatgttgctgctgctagttgttgttcacagattctttggcttttatctactttgaaagattatggtcttacttttgagaaagtacctcttttttgtgataatactagtgctatcaatattgctaagaatcctgttcaacactcacgcacaaagcacattgatatttgtntttactttttgagggatcatgttg

SEQ ID NO: 64306 - DNA, 417 bp, Oryza sativa
cagcttacacctgtacttgtcaatgttaaatttgaaatctggcggaagcaatttgtgtgcgttcaagttgtttccttcttttcgttttggatgtaaggttgagtgcttcatttccacgaatattgctcaacttgcaagtgtgaaaatcatgaaaagagccggtagccactggcaagaacttaacattcaccacaggtaaacattgttcattccttttgttgtactatgaattattttttcccccgcgtactgttatctgagcctactagtatgatatgatacaagacagcttctcatttgcacttggaatattttgcttatactgtttcttttttgggatacgcaaaaggcttgcgtatcttttctattaagattggaagcagtatacattactttgaaagctgtcaaaagaactga

SEQ ID NO: 64307 - DNA, 455 bp, Oryza sativa
  unsure (1)..(455): unsure at all n locations
agcttcacatcccgtataatgcctaaaattatcattaatcattntcggccaataaaaccccactctcttaagcaaccaattcatcttatgggaaacttggaccgatcattatctaagcatttcagtaataccccatctatatttcggtgatataactccccatcaagcaaagtatatttaaatgcttgccgctgaatttcccgatcaaccctaagactaggatctttcgaatattctattaaacggattatccaatccttttccaactcctgtgcacaaatgtctgaatttacagtcatatcggcctctaaatcaaacatatcatgccccccagctctttgctgagatcgggtcagaccggccacactatgccggtcagaccgatcatggtcctcggcagaccaatcatgctgcgcccgtcctcttgttgcttcactacaaggtcttcctgctaa

SEQ ID NO: 64308 - DNA, 439 bp, Oryza sativa
  unsure (1)..(439): unsure at all n locations
agctntataataccttgtgggttgaggtttttcaagtctggnggattggcaaaacaacgtaaataaataacatgtttctctttcttcctctgggcttttcgccaaccctaccatacatttgccatgcaattatcctaacacctccgtgaccagttgaccacaagccaaattttggttaacaatccnattccctcaatggagctaacgtatgtccatgaccaaaatgtagtgaagagcagacaatgaacacaataatggaggcaaacaaaaattgtgtgaactcaatgttattattggatgtaccattcacgtaatataaacaccccgtgcaggggcggagccagatttagctctcacctanggctgggctagtataattctacacaagtgggttattaattcctaactctntagaacttagcagggtaatctacatggt

SEQ ID NO: 64309 - DNA, 440 bp, Oryza sativa
  unsure (1)..(440): unsure at all n locations
agcttggtttgaaggataaaataataatgtttataacaattaaatgcagattaggcgtagatatatgctaaatttgactccggatccaagtcaatttgccaatttcgagaggaattgagaattgtctttcttttcccttttgcgttacgaaagttgccatactggacatgaatgaaaaactttaaatgtctgctgcctataaatcatctgcttccttttgcaatcttaggcagagctacttatctagctccttctcactttgccaccttttctttgtcttaattatatctacccactcttcataaggaaatagagatgttttcccactctcagtaaatgtggattatctcgccctatgcattnttttgtcaaagaagaaccgtgatggtcatgtctgnattctggaatgttcctgttttagcatttcaatatttgggtta

SEQ ID NO: 64310 - DNA, 409 bp, Oryza sativa
  unsure (1)..(409): unsure at all n locations
agcttatcaatnntccccgtttaanaaattatcaatttcagcttgcatgcacaccaaaggcaaccaaacctttgtatttctgatactagtactacttagttatgcgtgattttttgagggtatggaaggtaaacaaagtgagtatattctggttgatacaatttagaagtgtttttacaccaattattagtaataacatcaaatactatcgaaagccaatgggcagtgagtaaattgattgctatgtgatatgaagtgaagtgttacaaactttaatttatggaagtacagatccctctcctcaagcatcgaagggggcagcctccaatcgtatggaaccgcgataatggcattagcttcaataccaaattctacacanccattgacccattcttttcacactgaagaa

SEQ ID NO: 64311 - DNA, 473 bp, Oryza sativa
  unsure (1)..(473): unsure at all n locations
agcttcggtcttcggacacagagacagacctgcagtacttcgtccaactntttaaaatatatattacatcgtttacttttaaatatatgtttctcattcgttttatttaaaaattatgaaattattttttttaaacacgctagaaactcaaacgctcatataaacgcgcacatactctacccatacgagtatctccgaagactggaccagcattcacgaagttaccacaggtgtctcgttattaataagcacgtcacctaccattaaaataataattagtcgtaaatacaaacacaagtgtcaagtctagtatttgaatctgggtagataggttccaccaatagcaacttaaccagtcgagctatgctcacttcacaaaattattttttattttattgttacttgttttatctttaaacatactttaaacatgaattatttactatatntaaataattntggataaaaataat

SEQ ID NO: 64312 - DNA, 413 bp, Oryza sativa
tgatttttttttaatgtttctgatccatacgcaggtccttctcatatcaaaccggtgctctacaaactaattatgatcacaactgtagagctcgcaatactttgcttaattgaattcctcattcaaatattgatcgtgtctctcatcttccaactacgtatgagatccggaagatgttatatgattttaccaaggaacttccaaaatcaagtaactacgcaaagatgtctttaaagaggattatatgaaatttgagatgaaacttctagaggctttagatgactactttgcgtgatttaacgaactcttgagcaatcttagatctgttgataaatcttatgacttgtctcgtatgtcttgaatatagcacacacaaaactctgtccggaacggaccctaaagcctctgttgat

SEQ ID NO: 64313 - DNA, 477 bp, Oryza sativa
ctgcacgcatgcaagcttgagggtcggcacatcataacggatgtggtagaagatggacgtcctattgccccggctgaagccaccaagaactatgtacgtcacagcggttgggttgtgcgggataacgtgcctgtcagtacggtgtactggcgaagaacaagggcacgtggagatcatgagagctttgtcccagattcggagaaagagatgctgtggaccacaatgctcgagacattcacccttcctgcgggtacagaggacaaagtgaaaaggtggactctgaagaaaatggcagaacagtttcagagcttcaagggagatctgtaccagaagtatatactgaagggccagacaccgaacttcgacacattcccaaagctaagggatcactgcgacgagttcgttgcatataagactggtgaacaatggtaggcgatgatggaaagaaacaaagaaaatgccgctaagaagaagtac

SEQ ID NO: 64314 - DNA, 466 bp, Oryza sativa
  unsure (1)..(466): unsure at all n locations
agcttcgcgttgctcgctcgctcgctggctctctgctgcggttgcctttctgctgctagatctaaacagcctcatgttttgggggtgcatgcatgcaatgcgaccagtgtcgatcactcactcgcttgctcacaagcaccagcgcatgcatgtggtgctgggttttcttttgctttgcagagaccgggggaccccagatcaaatgcattgctgctcctgcctgactgcaactttttttttttgggggaaagattaaccagatcagagatgagttgtaacggtgggagccgtgggacagacacgtattgtgttcatttggagtgctgctatacgtacgattatttttacgatgtttatacgatgaaacgttctctcttagcccatgagggctcttgactgccgcgtgcgcatgcgccgtgtgttcgcgccgttatcgtactaagatcgtaagaaanaatcgtatgta

SEQ ID NO: 64315 - DNA, 422 bp, Oryza sativa
caatggtcttatgcacatatcctagctgaaaaccatgagagactggctaagaatataatctctcggcgatcaggctcgtagtaccaaccggcgagacgaccgtcaccagcaaaggaaatgaccatcttaccaaccacgtgagatgtcccgaagctaaagcgcgctcgggcaccaagaaatcatgcccacattatcgaagtagttagttagttaccaccagaaagaatcatccatggcgtccattggcagcaggtacgtatactcgtacaagtagtatagtattaggtgtagctggcatagtgcgtgtatacgccgctaatatgatggcgcggctacttattggtgtacggtctgttcactttgatgccattttcaaccatacttaaatttagtaaagttgtcagaacaaaatggctatattt

SEQ ID NO: 64316 - DNA, 450 bp, Oryza sativa
  unsure (1)..(450): unsure at all n locations
agcttcactgttntcatgttcgtggccgtttttaaacaacttgatctctcgatcatcttctggagctggaccttacctagaatgctgaagccgccggcttcactggtaatagcatcgaacagaggaggtaaatctcgggcattcattaagttgcgtgatatcgtcacacttagagataaaactgctgtgagagtttctctattcacatattcgtcacgcggttttgcaagcacctgcaaaagtaagtctatcatcagtataacatgttgacaaaaacaaagcatatgcatgcttcttcttttttttttggttggtacctttagcatcccaaactttatacgttctttgaggttctgggcacattcatcatcgtcagagtgatgaatacacaaatgctccagaatttgcgctgcgattataccgcacttggtgaatttgtcttcaagcatg

SEQ ID NO: 64317 - DNA, 446 bp, Oryza sativa
  unsure (1)..(446): unsure at all n locations
gctatgatatatcccaattatactagcttgtgggaaaccaaaaaacataaatctgctaatggtgcattttattaaaacgcgcacgataggtgatgtgctgtgttgacttgataattaatcaagctgctggaattctcgcttgctggcttgcactggtagttgggaaaataggtccctagaatccgttgtaattgtgatcctacaacctagagaatgtgaataaggtttttgaaaaagcacggtgcgacattcgtccatcacggctcatcttcctctatgttgaatagctaaatgggtgaatatgttaaacatgcaatattaattattaaatatattagattttggagggatgcaacactttccagtactatgattctggataggcttatctctatattcatagattangaaatatgacatccctctaaaaatccttaattatggga

SEQ ID NO: 64318 - DNA, 437 bp, Oryza sativa
  unsure (1)..(437): unsure at all n locations
agcttatagntggcttatatcctactattatatcttgctcatagagcaagcttaatagtatagccaactactagctccaattcatcgatggccgagctaatagctcattcatacaatagttacatactacactattaataactggtcccacatgtcatacacacactgcatcttgaagttcgtactacagttggctacaaatctgtagcccactgctcttctctctccttatttatcttcttaaaatatgtttgcagctggcttatagcctgctattgtacatgctcttaaagctgaccctcaccatcaacttgaaaagaggatggaccaagcttatacacttgtttgatcaatccaatgtttggagaccagggttcatcagatcatgatactagggtgaatattcgggtttcaaaagagagcacaacgctaccctc

SEQ ID NO: 64319 - DNA, 350 bp, Oryza sativa
taataatgttttttctccacagaccgggcaatcacaacagcgggcagagcaggatgctgccattgctatattggaacagaaccgactagtccttgccatgaggctagctgaacatcaggggaagaagtatatagtcattgatgaggccctggcgtttgtaggcgaagttggtgaccagaagcgattcatctcaccggaagatgttcgtgcaactcataaccaatcaggggaggatgtaatggacagtgggagcaacggctcaagtattatggggaatgtgttatcttgtagtctatctttggccaagaactcatttccagtggacacaatcagtagtgctctgggtaacg

SEQ ID NO: 64320 - DNA, 403 bp, Oryza sativa
  unsure (1)..(403): unsure at all n locations
agcttgtactagttgggaatgggttttttgagagaaaagaagaatctacttcaaccgatatgcccttaggcacggccatacataacatagaaatcacacgtggaaggggtgggcaattagctagagcagcaggtgctgtagcgaaactgattgcaaaagaaggtaaatcggccactttaagattaccatctggggaggtccgtttggtatcccaaaactgcttancaacagtcggacaagtgggtaatgttggggtgaaccaaaaaagtttgggtagagccgggtctaagtgttggctaggtaaacgccccgtagtaagaggggtagttatgaaccctgtggaccacccccatggnggcggtgaagggaaagcccccattggtagaaaaaaacccacaacccc

SEQ ID NO: 64321 - DNA, 446 bp, Oryza sativa
agcttatgtgattcatataacaaatatattgttaatgtgaggaaacaataaatagtgtaacaaatcaattcacaaacttacaagagatattggcttcacaaagttgtcagccagattggactgcagttgaattgcttcctttgcagggaaggatgagctagatgatttagtgcttctatcaaggggcctttcaccaagaatctttccacgattttcagcagtcaacttgtcagaagacttggattgcacagtatcaggcttttgctggtcaatatatttctgctgatactcccataacttccttgcatagtagctacagccatctccttcattgaggaaattaaactgtgtatttgttttgcttttctctttgtaaaaatcctcaatatgtttcccacaacgagcaaccatagcggcacaaccctcaatcaataatctcaagctag

SEQ ID NO: 64322 - DNA, 465 bp, Oryza sativa
  unsure (1)..(465): unsure at all n locations
agcttncagtttttacagtgcaataaatatcttttccaaaatcttaatacatgatcaggacaacattgggtcattggcggcaacatgatttattaccgtacgatgggtgtcaagagattgcagtgttgctgttcttgttacagcagcggcatcaacatgatcagaaaaacaaaacagagggaacattgaggactgcacctgttgacgggcagaatacacgtccgagaggagagcaagtggaccaagtgccaataattaggaccagcaaagacattgcttacactcagagtctgaataatggataaacaagaagtacctggcattagccatcacggtgcagaacaccagacgtctggattgccaccaaaaaaacaatcgttgtttggatcgtttggtacaagattaagtcaaaagtcaaagagtttcagtaattcagtgcctgaatatttgggtggcgatgtttta

SEQ ID NO: 64323 - DNA, 323 bp, Oryza sativa
  unsure (1)..(323): unsure at all n locations
cttgcagatgtcaaccactgcaaacgatgatatcacatctttatctcatctaccncactggcaaacgacacacaagaagcttatcgagcacggtgcacatntgaaaatgaaacgaaatggttactatcgtcgatagcaaaccattaaacacatgttatagatcgatcgatcaccctgctgatggtgtccngatgatacacgcggtacggtcccaccctgagtgactgtacaactgatagaacattggtttatctttcagcgcacatggctcttcttgcagacagctgcttcctcctcgccgccgccgtcgcgcggcggcggcg

SEQ ID NO: 64324 - DNA, 448 bp, Oryza sativa
  unsure (1)..(448): unsure at all n locations
aacgatgtatcaagggctggtttctatatttctctgtcaggaattaaacttaaccaacttatgctggcaccacaatctactggttttctttccatatcaccagattctataatggtaatttgttattacatgctctttttcttgttcccacgcttttatatttaaatttctttacttanagtgatttggtaccatattatgttccctttgtttgtaaatttctttgttgcaatgcacttagcacaactggcaacaatgattgtttctgcaggcagacctcagtctatatagaggattttataaattaaaacatctcctacatttaacatttttaaacactaaaggtatntctccattacctcaaaacanagtcaaaaccaagtaatgaatataatagtaaaaaatagaaatnttacataatctatatcaaccattcgcctcttaacta

SEQ ID NO: 64325 - DNA, 441 bp, Oryza sativa
  unsure (1)..(441): unsure at all n locations
agcttgagctccggttgtcaccggccgtctcgtcggcgccggcgccgtcgccggcgtctcctcctcctcctccaggaggtggtgccggatgctgtccagcgcggccacctctctcgacgccggattaagcagcatctttgaattatcccgtgaatttgaatttgattttgttttgactcggactagcggaattgtggagggagtcgggttcgcgccagaatatatagtagagtgggagtgcgtcgtcttttgtcgtctcgcttctggtttcgttgaactttcctgcgttattatcccccacgtgatttaattaatggtttctaaattggtttgcgattggattgggtgcaacactgtagcctaaacgtcagcatctaactacatgaacaaatgatttatagcttntgagttaagtgttaattagttctagattttctcgta

SEQ ID NO: 64326 - DNA, 434 bp, Oryza sativa
  unsure (1)..(434): unsure at all n locations
agctttgtatttccccttgctcnntgtctgtgccttgtgcacaacattggcactggactgcccaccatcgcccttagacgcggcatctttttcccgagctttctcctcaacatcaagagacgctatcaacccctcaacggagtattcctgtctcttgtgtttgagtgcagtaccgaaacttctccaagatggaggtagttctgcaataatgcacccggccacaaatttgtcgggtaagacacacttaaggagttcgagttccttatccatggtttgtatctcatgagcctgttcgactacagaacggttgtcagccatcttgtagtcatgaaactgctccatgatatacagatcattgctagcatcagtagcacccgaattagtattcagtgcatcccacaactccttagcgtcngtcatatgcatatacacct

SEQ ID NO: 64327 - DNA, 437 bp, Oryza sativa
  unsure (1)..(437): unsure at all n locations
caagccgtccatcgaactttactccctaatgtgcttagcttcagcagnggcggtttccggtggaatggtagcgtgggcgccaacatgctaaggcaccgaaggtctcaaggaaggggttggcaagctcgaacatggtcgatgtcgaggcgctaaaggtttcagggaaggggttagtaagttcctctcctccgcaaatggcgaccaaccccttgacccatgcattttgatctatagctcgagttcagtcgatgagcttggcctccataggtaaggtgttagtgggagagaataagatgagaggaaagactttatttagcaactgacatgtgagtcactagtctaatacgaaagatttagtaagaatatctatccactttaagtgaaattatctgttagcatcaggtctattatgaaacatagataagaaaaaagatcta

SEQ ID NO: 64328 - DNA, 405 bp, Oryza sativa
  unsure (1)..(405): unsure at all n locations
agcttatgcactcggattattatctcttttaangacacgacggccgactgcacagggctcacgggctactgtggacattatggatatcccatatctacacggcgatggtatttggactgagtacaggataccaaatatacatagaatatcttatttgtgtctcgggtttgtttcttaacttgcacatcaaggaaataccttgagacttactcggctacgactgtatttaatctgtatctgcatatttcgttagggatatatattatcttttgtaacacggactccttcccatatataaggggggttcgggtgcctttatgggcatatgttgatatttccaaatcatacaatcaataatacactcggcggatccattcctcgacaggagtanggtactacttcttg

SEQ ID NO: 64329 - DNA, 484 bp, Oryza sativa
ctgcacgcatgcaagcttgagattagtgaagacaccttctatctcttccagcactatcaaaaacactgcaaaaaaaacgaagtcatttttctggtcacaaatgttcaaaatactagtttgaccataagtttctatgatactagtatctatatatacatatagataaatgcaatctttttaccaaacaactggtttttccttatctgttaatagctttttaatcactagattaacatctaaaaagtcatatactcatatatcaatatttcatatatcttgctgagaaacaaagaatgttctaactaagattaaaaatcatactttaatttgctgtcaatgattccattataaaatggtataaatgtatacaaaagcatacaaatgcatctaggttaatccaggaaataaaatacaacataaactaaaagttgcaacaaatgtataagttgcagtattcagaatgcaacattaggttatatgcaat

SEQ ID NO: 64330 - DNA, 467 bp, Oryza sativa
  unsure (1)..(467): unsure at all n locations
agcttgtgggtggggacgcatacagctgttgttcatactgttctggctacagtatcaatggtccatggatgatcgatgcattgntgcagctcactgtgcgttttgatcgtcactgacagaaagggcactgctcttggtagaccccatctgccaatgacactatatgcactagtaactggtttgcactttgtatatactgcgcgcaactttcatgaacattagatttcttatgtggtaaaaaagcgaggaagtgaatgggcagagcttgtgattggttagtttttacgttcgtagagattcagacgttaaatgattccgacctacttatttatactccctttatttgttaatactcctatatgatactatattatatactgatttaaacaatacatttgatgatttatctcatttaataattacctagatatgaaaaatataaaacatgtttaacgacttcaatgata

SEQ ID NO: 64331 - DNA, 464 bp, Oryza sativa
  unsure (1)..(464): unsure at all n locations
gcaagcttgctaagacanaccatgcagaagaactgtaacatcgggttctcctgatacaatgcatcatttctactttggcccgctttagttcgcacacaaaaattttacaccgcatcacatcgaatgtttgaacacatgtataaaatattaaatataggcttaaaaataactaattgcacagattgcgactaatttacgagacgaatcttttaagcctaattgctccatgatttaacaatgtgttgctacagtaaacatttactaatgatggattaattaggcttaataaattcgtcccgctgcttactggcagattctgtaattagtttttttattagtgcccgaatgccctatacgacaccctatataatatccgatgtggcacgccaaaactttacacccctcgatctaaacaccacctttgttgattgagacagagatgccatggtaaaatgctactccct

SEQ ID NO: 64332 - DNA, 456 bp, Oryza sativa
  unsure (1)..(456): unsure at all n locations
catgtgcttagtgagtattcttctcacgtatctcatttgcatatgtgcgacatatgttgcttaagtttcataaatggtggggctgagatagcttccaaatcgcgaatgctgtcgcgggtaaccatatctcaaaaccatgccgaggctctgaatagttcaacgatgtttaggtcggtttagttcaattagccaagtttttgtgtgctgctatggcacacttgtgtttgggaattccgtcccattttggcgataattgactaaccaaagctatgcaccatgaacatttctaagtgcgggtggactgatgtagtagacttccatctatcgcttgcttttagctgcaagtgtgagcatgaattgggttcaaccaaatatttcaaaattaaactcatattcacaacgaacgagtttgcttcttcgattcttttctgctttattctttctatngttggtcgg

SEQ ID NO: 64333 - DNA, 294 bp, Oryza sativa
  unsure (1)..(294): unsure at all n locations
gttggcacagctaatgcagaaaacagaaaccgtgcnattcctagccagatgaaccacatttttgcatctctgacaaaaaaatctttgtgggatatgattggtacccacaccgggattggaatgcagaggttgttctggcttgcacacaaagggatcacccttctctgtttccttggctgggtgcttatgctgaataaggcgatactgctgctttgttgctcctcgtgcagccatgggtttggcttgatcccacaaagcttcttccccattccctgcagcgaatcaccttccggt

SEQ ID NO: 64334 - DNA, 453 bp, Oryza sativa
  unsure (1)..(453): unsure at all n locations
agnctctcaaaaaatgatctaaattcctgtatctcaaacgagctgaggcctcaattcaatttatcataccgagaaacattctagattagcaagaacaatctggcatttatattattatggctgtatatagatagcaaatttgaattcagaaaatagagcaacacggacataattatggtgttgtacaacatagcgttttctttcgcacaacaaggtcgtggagccaagcctcccgtagtgatgaacaaaaccgaactagagctggacaacgacataccatggattcaacaggaactttttcaacttttataatagtaaaaaaaagatatagagatagtactaccgaataattattcctgaaggcacaggcgaacatgcacatatatatattatgacacgactgaaggattatactgttgccaaatgtagttatatgcatatcattatccaaat

SEQ ID NO: 64335 - DNA, 453 bp, Oryza sativa
  unsure (1)..(453): unsure at all n locations
agcttatacttgcatgaatgccaccaaactgtacctcgtatggggttaaattntcgtttgtctccaagcaaatattatattttgggccactaagcaccaaagttgagtgatatatatagctgtcctaagcttggatttcatcctaatctaatgccctaccttttttaattatttgtcggattgttgaaacggattatttactcaagctctaaaaatacattttctataaaaactttcttctgtaattatattgctaagaacatctattttatattatttattaagtttatttattatgatatttaatttatctctacaattaaataaataatgatagcaacaatccgctcaaccatgtctcgatttgggtagaaatgcggtgggttttcattctgcttaatgccctttgcgggacatttaatgctgtgtttagatctaaagtttggatctaaa

SEQ ID NO: 64336 - DNA, 453 bp, Oryza sativa
  unsure (1)..(453): unsure at all n locations
agctatgccgngactcgtctcatgtgttgtgacgaggctcatgtgttgggcagtcgcggagtgcgggtaaagtgtacatccactgcagtgtgagtaaaccaaatctattcgaatagccgtgctcgcggttattaagcaccgggacatgtattacacttggctagactctaaattcttaacttgtgtcggatgggatattgcatgatgatttctatgctgatggagccactttctgagaggcgggaatgtggatgtcctcagaaaaccatgacgattcaatggcgggaagctatccttgggatcacaatggatggtggacagaaccgtcattgtttaatatgaacactggtactaaaatttgatcagtctgtgctaggtcttaagcttgtgaaaagaatacaaaacttgctttgcgcanaagaaccatagccatcctttgaatacccctgtcat

SEQ ID NO: 64337 - DNA, 429 bp, Oryza sativa
  unsure (1)..(429): unsure at all n locations
agcttgagtgtgtgtgagatttgagctgttagtacctagtagttgataggagcgtgtatattcttgtgtatgtttcttgtttgctgctaaccatggcaggattgcgcaaggggaaacaagatggtcatgctcaacgtcaacatctacaccttcgacgagatatgacgacttcttcacgtgatgcatatgaggtacatgactataattttgcacaagttgcatgtaagttaccagtctatgatggaaagtatgattccgctgcatacattaattgggagctagcagtagaaaaacaatttgatgagtatgatttttctaatgctcaaatgattaaggctgctagtaataagtgtaccggttctgcatctttntggtggcatactgtggngaataagcttgaaacttgnngatgaatgcaaatactgatga

SEQ ID NO: 64338 - DNA, 464 bp, Oryza sativa
  unsure (1)..(464): unsure at all n locations
agcttgcattatacacctaaattcccgttgtttgctgagtactaaagtactcacccttactctatataaatatatatagtttcccccgccttgaagtgaagatgaagtgaagtgaagattanggtttcgtcctggttcccagccgtcgcctgtggtgttgggtgttagtccattggttccgctgctgctgctgttgttggtgtttcctcgtccgtgtcgtcggttgcattctcgggctgttctgagctgcaacctaagttaaggtaaataagtcctctatttattttaaggatttgcaatgattcatatttgtcaccgtgggtaccagcactacgtcctgtgactggtaccgagatcgcagtttcgtaggaagcggttcgcgccgttattcctacgacacgctcctatcangtgccgttgtacggcggtgccggattggagtgtgacataactattatgggtgc

SEQ ID NO: 64339 - DNA, 405 bp, Oryza sativa
  unsure (1)..(405): unsure at all n locations
gctgtcgctgctatactaaaggtcggtgagccagacagtaagctgccagtatgtttatntgacacattgaaaaaccttcccagttttcaagagatccacaaactttttattgtgctcatttggtggccaaccctcacattgctagagctttcgatggacttctatttgaaaacaagctacattcggttgctatgttcatcggtgagaagtttcctggatcaatgtacggttgttggatgagttgaatagttttttttggttttatctgttgctagttggcctatgttgctactccctccatctacttttgatagtcatattttcaaatctaaaaattttagttttgataggcatatttcaatccaacaacctatcatattaatgactttctcggaaaggctaata

SEQ ID NO: 64340 - DNA, 464 bp, Oryza sativa
  unsure (1)..(464): unsure at all n locations
agctttaccatatgaccacataactgcatatgtgtgttacagaaatcttactctattactgaaacatgtgtgattgttagaacatttcacaaagttgactttcaattgtagcaatcaagcattgaaagctctgtcaaaaggcctagaactaactgtgtggattcaattntaccacctgataaagccaaacaagttagattcaaactattatgctcttttagttctagtattaatgctgatcaagcctgctcatccacttttgattctttaaaatttttaacacaggggcctcagagaaagggagtactagagaatacttcatctaaatcagtatatggtttccactgtttatgataaaataaatattcataggctcatgaatgacaatgctccgagttttgcgaatgacaatattgtgtttctcacaatgataggatcaaagggtggtgttcttgttctcattg

SEQ ID NO: 64341 - DNA, 248 bp, Oryza sativa
ttcaccctctctttgaaggcccgcgggaagattctcacctctccccggggagggcgtagttggacgatgcctgtatatgtttcaaaatgattctaaacattcaaaataaatttctgacgagatggacacccccaggagcccaatttatgcctacggcgacggtacttcttaaacccaaacccttattgttctagccaggacatagccgactgctccaacccaacccctttttttttcgcgcacatcac

SEQ ID NO: 64342 - DNA, 456 bp, Oryza sativa
  unsure (1)..(456): unsure at all n locations
cattgcagcttaaggctagtattggttggtcggtctatagttntacagaacttcttgagctgttaaaggacctgttgccagaggggaacaatttaccgcagacgacatatgaagcgaagcaagtattatgtccgttgggcctggaggtcagaagaattcatgcatgtccgaacgactgcattttgtattacaaggaatacgctgacttggatgtctgccctgtctgtgaggcatcaagatacaaacgagcaaagagtgaaagtgaaggaagtaagtctaagaggggaggcccagcaaaggtggtgtggtatctcccaattgcagagcgcatgaagagaatgtttgcgaataaggaacaagctaagctagtgcgctggcatgccgaagaacggaaagtcgatagtatgctgaggcactcagcagattcagtacaggggaggacaatcgatatgatta

SEQ ID NO: 64343 - DNA, 449 bp, Oryza sativa
  unsure (1)..(449): unsure at all n locations
agcttgcactgganaatcatagatttattatgtttcccaagtatgaaggttgtaggactagggctaagtgtgactggcaaacctgtccatgggtttgtttgctatcaaagaacagcaggacagatagctggcaaatagccagccttgttgatgagcacaattgcccacctaggaaggataatcacctggtcacatataagaggattgctatgaagtatgaaaagatgatcacagataacccatcttggagtatacaaagcatgcagtccactgtttcaaagcaaatgtttgcaaatgttagtgtctcccaatgcaagagagccaaagcatatgttatgaagaagatatatgagtccacaaggggtgaatactctaaaatatttgactacctattggagttgctaaggagtaaccctgngagcatagttgtagtgaagttagatactgac

SEQ ID NO: 64344 - DNA, 450 bp, Oryza sativa
  unsure (1)..(450): unsure at all n locations
agctnttatcataccatagtggcttggtgggtgcactagaggttataatatctttttaatcctttctcttgttaggtgccggttgtgatgcaatatcaaaggtcttaagtatttttggacctgacctacctcgttctagaaggggttattgcactctacatcattgatgttacttaagatcatatatgccatctttcagttgctcaagctgtggtgttaggtaaagctatactgagctttgcatcatatccgcatgcttccacaatatcccacctactttagtttttgggttttgcacggtccttctcatgggtagaaccttcactagacctaactcatcctatgtagtatgaatgtcaaaacatctttaacccttttcttctcttttgctttgtaaagtagatttattgaacagtttatgtgactttcaagagaaaaaagttacctggg

SEQ ID NO: 64345 - DNA, 371 bp, Oryza sativa
  unsure (1)..(371): unsure at all n locations
agcataggttctactctgctctgttctttatagacgtgtacagagagtgctgcaacaagttggagcatattcttgttggtcattggggggcatgtaagacgtggtaaataagcctcttgacattattattcattgcccactgaagatgctagtgctaattaaacatcctttttataaaaaaatgcgtacatgtttangataagatgagtggagatatctatatataagctgggagaagatgccatgccattggttcagagtggacaatcgtcaaacctcacaacagagcaggcccattggtatggctctaatctaatctctaattttttctttcttattatgaaacaaaagggctcanatttcttgttgac

SEQ ID NO: 64346 - DNA, 416 bp, Oryza sativa
  unsure (1)..(416): unsure at all n locations
agcttgcaccttctatggtttaggggtatatgtgattnttcatgggtgcccttatgaaagggacatttacatgggtacgcagtgtcatttgtacatatgggccggtaatgggctgataagctgggcctggtctatggcgaacgggcctaaaaggccgggggcagcctgttggtcctccttgatgccgaactcgtcatggcgaagtctttgtagttcgctcgagatgcctttactttctgagtaccgatgcggctttccagccttcgccatcttcgcttatggctttcgccataaggcttcgcctgaatgggtttgatgtctttggcttgaatccttgctggtactatggtttcggtagatctggccgaagggcttcatggcatgccttcaacaaagtttgtctagccgatgatcct

SEQ ID NO: 64347 - DNA, 447 bp, Oryza sativa
  unsure (1)..(447): unsure at all n locations
agcttgctcctcagcgaactgtcatccattcatcccgaagcagtcctatagcccgcgttgcaacagctccaactccagcgagtgcattaccacaaggtgtcaatgcccaatttcagccccagccatcagttgacaagaccgaggccagtatcggcattgtacctttggatgttccagcacaacagccaagaaatcaagtacaagataaagaacccaagccaatgggaatgagaaaagcatcaacgaaacctcaccagagctaatccaaattgtggttaaccaaaccaacatgttggcaacagcctttcaactattacagaattggaacaacccagcagggacaaccaacgttcaagtacctacagtccagcaacagtgcaagttatcagaatntctcaaaactgagcctccaacctttgccattgncgtcgatcctatggaagccag

SEQ ID NO: 64348 - DNA, 433 bp, Oryza sativa
  unsure (1)..(433): unsure at all n locations
agcttatgtgcgttcttggcatattgttctgcaaattgcttgtagacgaagcaatctttggccacatggttggagttgggatgatgcggacactgggagttcattatcttgtcgaaggtgttgacgcgggaacgttgtcgggaagatggagtagttgtcgccacaagttcttcgggcttacgcttgcgatccttgcgattgttacttcccctctctcctgcggccggcatgtctttcttcggtttccaagtggtgcccgactgtttggacgcaataatagcatcttcggctttggcatactcgttggctttttcaaatatctgcttaaccgtcttgggagatttgcgtctgaacttgccgactaggtcctcgtggtgaatgcctttagtanaggcagcaatgatgacctcgtcngtgatgtcggagatcttgt

SEQ ID NO: 64349 - DNA, 469 bp, Oryza sativa
  unsure (1)..(469): unsure at all n locations
agcttatcatggatatggatcatacttatctatgttggtntgtacacatttaaacttatttccatagatatgccatggagaattaccatagttggccaggcaagaaacttgcaactactatgtgcacctcagttatacacctacaaatatgccaccagacacgctgaaatgactgcagcgcctgcatcactgatttccccccttatatcagattcgatacggtacttgggcttcgatcttaatttctttctagctagctgaaccacagatatttaaaaagaaacgatggagctggtagctagcgatagatactctgaagtctgaacttacagtgctttggatcaggagtgccgtcaactgcacgagaacatatgcaaatcgagtgtgtcgtgctggcctgcagctacctatctgatcaataattaatatgtgcatgcatatctcatgttaatatactctctggggatcg

SEQ ID NO: 64350 - DNA, 443 bp, Oryza sativa
  unsure (1)..(443): unsure at all n locations
ctgcacgcatgcaagcttgagattgagcggaacgagcagaatgtgatgtggtttgttaacgagcttgataaccaacatacgctcgaacttgcgaatcctgaccatgatgcttgtttaggagttcatcgtgtgatgactgattctaagaaagcccaagcgatcgagcttcgcatgagtggccttaggccctttaaatcatggaggttatggagaataaccacgatgagtcggaagaggttacttttgtgatgaaggacctttataatttctttactcggtacgagatgaagaatatcaagggtcgtgatgctgaagatgtgttgaaatatctaacaaggaagcaagaagaagatccagaatttttcttctaatacaccacagatgaggaacggcgtcttacgaatgtgttntgagcagatgttgaatctcgtttagactatgct

SEQ ID NO: 64351 - DNA, 400 bp, Oryza sativa
  unsure (1)..(400): unsure at all n locations
gcttcgatctatgcttcgatctgcatgttccaagtcatggtgaagctcttgcccagcggcaatgccagcccttccacctncaccatcacgctcttcttgtgtccctccacgtcgcggtgcccgtgcagctccgcctcggcacctgcaaagtacggcctcgacgttgcaatggcggtggcgttcgcgccatcgacatggacggcgaggtccctgcctgttccctccagtccgagcacggacagcttctcgatgaggagccccttctgcaagctgtagctgcctagcttcacctccgacctcaccgtcaccgccttgccgcgcaccgtcgcgtagaagcggacgtacgtcgcctgcccctccgcgagcaccatcttcggccgctcgtcgtcgtcgacgtaca

SEQ ID NO: 64352 - DNA, 464 bp, Oryza sativa
agcttaattaatccattattatcaaatgttttctgtagcactatattgtcttatcatggagcaattaggcttaaaagattcgtctcgcaatttacacgcatttgtgtaattagttttttttgtctatatttaatacttcatgtatatgtccaaatattcgatatggcagggtgaaaagtttttgcatgggaactaaacagggtctaactaacaaacaagtgcgtgcagagtgcaaccctcgatctttgtgtaagcgaaaccagtactatactcattattttaccttggtcaacagtaatgatgattaattagtggcttagatgttgcctcgttttcgtcagttagcaataaatcactttgtatactgatcaattgaagaatgttctcatgtatactaacatttctttagccatctttagcaatcatgggttaatgtaacatatacaaatctcacgtattccatt

SEQ ID NO: 64353 - DNA, 454 bp, Oryza sativa
  unsure (1)..(454): unsure at all n locations
agcttggtttactttatttacttaccttttactntgattntctaaccttattcaaattaatccaaaaacttgtgctattaaatggataaatgtcttaactccctcctttcacttgtctttagatgccgcgctacaagcctgagtacttgtttggtgttgagggatttgtccaggagttgcgtacgatgtcctttgccataggatttgggactgcccctttctatgcccagattcctcatgatcatcacgaaaagaagtgccgagtcaaagtcaccttgaacagtaatagtgaggatatcccctcagtgatgttcgaagctggaggaagaaactgcatccatgcatgtcacgaggtggcaaggatcgccatangagagcttcacgatcgctacagtgatcagttggccgacactgagtatcgctaccatcctcgtcaaccacagggaagtgaccg

SEQ ID NO: 64354 - DNA, 446 bp, Oryza sativa
  unsure (1)..(446): unsure at all n locations
agctntaacaaaaataacgaatattaaatgtggatgtactgttaactatttcgtttacaacttgtaggagtcgaattttacattgaatgtttgtgaagtgatatatttcatattaacctatattattattattattattattatttaaaaaaattaatgactatttaagtgctatataagaaatgagtggacgtcttcttgaaacatgaaaatccatctccatatgatgtagcaggtggcatcatacacttgatataattaatcagctaaagggtcttgcatagataaaggctaaaagtaaagggtaggtactgtccatgaagtgcccattgtatacataagcagtagtagacgcacatatggagcgtttgaaggtactaaattttacttcctatcacatcagatgtttgtacactaattaaaagtattaaacgtagattagtgat

SEQ ID NO: 64355 - DNA, 449 bp, Oryza sativa
  unsure (1)..(449): unsure at all n locations
agctngacacttcactaccggttctctcttaccatangattctcgctaaaccctccttaaaacatacttcttccgtttcaaaatgtttgacgccattgattctttagcatatgtttgaccgttngtcttattcaaaaaatttaagtaattattaatccttttcctatcatttgattcattgttaaatatatttttatgtaggcatataattttacatattttacaaaagtttttgaataagacaaacgattaaacatgtgctaaaaagtcaacggtgtcaaatattttgaaatggagggagtatatactatatctatgaaaaaaaggttgaagctttggcctggtttagttggtaaaattctttgctcctgcgtgtcacatcagatatacggatacatatttgaaatattaaatgtagtctaataacaaaataaattacaaatttccgt

SEQ ID NO: 64356 - DNA, 411 bp, Oryza sativa
  unsure (1)..(411): unsure at all n locations
agcttctcgggtntttggtctctgctctatgcatcgaggccaaccccgagaagatacgagctatagagcggatgcgccccccagcaagcttagggatgtgcaatgcgtcaccggttgcatggccgccctaagtcggttcatatcgaggctgggagagaaggcgctacccttatttaagctcctcaaacgctccgggccgtttacttggacggaggaagctgaacgtgccctcactcagttgaaggcgtatctcagttctcccccagttctggtcgccccggagccaaatgaacccttgctactctacttagcggcgaccccgcaagtggttagtgcggcgttggttgtggagcgcgatgaggacaatcctcattccgcgcacccncaccctgtgctggcttggcccgggag

SEQ ID NO: 64357 - DNA, 434 bp, Oryza sativa
agcttgtcggaatgtttgctgcttcactatatagttttaaggaaccaatgtccagagctcacgtgttataggtgcagtaaagtcggatgaaatcatgaatatctgtttcggtctagacacttttcttttaagaatggtcaccgggggcgaaatgcccacctgaatatgttacttcaaacaatcttacacagggcaggcttagcttatgcaagcgtaggtggccctggaggataatatggaagaatacacgggatatacaaagaagagaatacaaacgtatcacaacctcctccacctaacacaaagaggcacaatagatagaagacagaagctttgacgtttgccacctgcaaaatcacccaacaaaattccaaatcaagcaaatgctagaacccttgttcgacatcattcacttcacatgcagtctggaaaca

SEQ ID NO: 64358 - DNA, 439 bp, Oryza sativa
  unsure (1)..(439): unsure at all n locations
cttttctgattaacatacatattntatctcggttntcattagcatatttttaaactgttaaaaacattntattaaaaacttgttatataggattttctttaaaatatcagataaatctaatcttatatacttatatagttcatccccactaagtatagttattggtatttctctcttctcacattaaggcacattactccaattatttctagtctttagatgatagatctattattcaaattgtctcttctttcctctctcataacaccatacaatctcaattatttatagtctcaaaattcataaaaattcataagtatcaatttgttttaatttaataatcatatatgcatcatatgtgtacatattatgtaacttaatttcccatagcaacgtggcgggatattcatatagtattttatataggtacatattctca

SEQ ID NO: 64359 - DNA, 454 bp, Oryza sativa
  unsure (1)..(454): unsure at all n locations
agcttcagctacctgaaactagntctgtccatcatgtgttccatgtttctctttngaaaccagccaagggctttacgcaaccagctnttcttcaactgccctctgaagtggtttcctggcagcttcctcttgctattcttgatcagagactagtcaagaaaggtaattctgttattactcangtgctaattcactggtctcatactgtgccagaacaagcaacttgtgaagatctggaggatttgaagacacgttttcctaatgctttggcttgnggacaagccaaaattcaaggggaggggattgtcaggtgcctacctgacatggctgttccagctgaagaggaggagaaggaaggagaacctgaagctgatgaagaacctactgatgatcaagactcttagggcataaggcgccaagatgaggaggaggacattcagaccaatactcaagt

SEQ ID NO: 64360 - DNA, 464 bp, Oryza sativa
agcttatatacgaaagatgttaaaaaaatctcataatccattcttttaataaaaattagcaaatacttaattaaatcacatgctaatcgctgctccgttttacgtgccgaggagcgagggttccgttttacgaagccacatgatgaacaagctgaacaagcttggttttggttgtcaggaaaggtgctcctcatgatgctgagctcgcatgaatttcgggcgtgtcaccagcttgccttctttttctttaattgtgttccttttcgtctgataaatcgagaaaggtagcctacaaaagttgcgaattgtaagcgacttatttgctctcttgctgataaaatgatggtatgttcatgagtagaattcgatgacagaggatgaactacacaaagatacttctcataagaaactaatttcgctctcttgactcttgtgaatgacatggcacacaaagctataatata

SEQ ID NO: 64361 - DNA, 468 bp, Oryza sativa
  unsure (1)..(468): unsure at all n locations
agcttgtgcctgtntggagagatcatcataaattattaaagtattccgttcgcgggacataaaatactcagccagggctgctcccgtataaggagcgaggtattgtaatgtagcacgggaatccgccatttcagctactacaatagtgtattccatggccccctcttcatggaaagtagttactacttgagctacggaggatgctctttgaccgatagctacataaacacatattacatcttgccctttttgattgagaattgtatctgtagctactgctgttttgccggtttgtctgtccccaataattaactctcgctgaccgcgcccaatatgaatcatcgaatcgatagcaataagccccgtttgaaggggttcatatacagaacgcctggaaattatacccggagcaggagattcaattaagcgagattccgaagctacaatttcgcctcttccatcaataag

SEQ ID NO: 64362 - DNA, 427 bp, Oryza sativa
  unsure (1)..(427): unsure at all n locations
agcttcaaaattacttcattatataagtgtggtcatgccacaatttctattgaatttattttggtgattacatacaaatcggaggtgcctaaaaggtttgcaacttcatcctncaatgtttttttttgtcatactacatttgcacctatgtttggcacacttttttttgtctccaaaatttagttgtaagttgatgagagagaaaatgtgtgtggggaagaaagaatatatagaaatttagttcatttgctaaacaaggttttataaaatagttgagaaggaaaactctagtgaaagttaatcttaaataatagaaaacaaactaacatgaaaattaatagaagtaaaacacattaaaattagtttaaaaccttacaactagtttttaagaattatctggtgtaatattttatgatttttgtatgat

SEQ ID NO: 64363 - DNA, 380 bp, Oryza sativa
atcttttcctattttgaatatgcaatctctaaatcctggaacatgggactcaatttctcacttcagtccaatatcatacatcccctgtcaagaagggatcgaatcgtaactctagccacaataaaaattgaacgacgagatgttcttcagtttcatcattagatttgccgattttcttctcctttcgttccacactgtaagatatatggcttctccattcctcatttagatttactaacatacatatatatacaactacacatacatttatctatgcattaatctattcaaaactaaaaatgtcttataatttaaaacaaaagagagtatatgaaatcaagctccagtaaactataactctattctttgaatgaagctta

SEQ ID NO: 64364 - DNA, 437 bp, Oryza sativa
acccttctgtgccttcttatctgtgacaactgctactgccatatgctctttcgcgacgacctccaccaccactcactctcccggaatgatccccaccgccacgagagttgtagtgtgggtaccttggccacgctcaccactcgtttcataatatgccgcaccaggaaaagaagaggaaggagaatgaatgagtgaatgacatgtggcttccatgttatttttctcctccctagtaaaccatgctgactagacaaccttatatgcgccatgtcggctcaaaactattggcatttgagttagtgggcaatttgtttggttttaaaagtttaggatatctgatgtctggtattataatctcgggggtaaatttgactaccacaatttacgagggtaaattggacttttttctacatatttgcacgtcatatttgatcaca

SEQ ID NO: 64365 - DNA, 398 bp, Oryza sativa
  unsure (1)..(398): unsure at all n locations
agctntacagnccatcttttcatttatatttatacttattagctaaaatataaatttttaactttaaatttaaagttgatttaaaggtatttttatcgtagtttattttccagactttgcttttagatcgttaagaacacatctataaaagttgtattcacaaattaatttttgttacaaatatgtcgtttcttttttttcctccaatgtaccaaacgatgggtctattagtttatatgtcttttgactgttgtcgcatttccgtgaaattttcctcggaaaggcatctggtatggttggacccacgcctttatatcctatctcccaatcgaatgtgcatgcaacttatggctcttgcgtctatacgtgttctgctcagctgctctccatgctctgca

SEQ ID NO: 64366 - DNA, 326 bp, Oryza sativa
gccttataaaattgatgctttaacttctaagctatacctttcaagtcctaagtgcgcgaaatcaataccaggatgcataacagcataaggcaaaatagagtatggcttagtcttcttgtttatcgatgggtcacagaatactgggcaaacctggaattgagcctagcgtagcaagatacgtgtcctatatttttttttcttataccacagtactgaaaccatatggttgttcatatcttaaccaatcttctaatgccatttataacagcctaacagcaactggtcctttaatttattagcatgacaaataacgggaaaaaaggatg

SEQ ID NO: 64367 - DNA, 448 bp, Oryza sativa
  unsure (1)..(448): unsure at all n locations
agcttttcgctggggtacttgagcatgttctccttctcttcctcctccacatcatgcaaaaccatatctgtagctgatacatagccagctttcttcattctcatgtcaaggtcttctaagaaagcatatatcttttctttctcaggatgcacacaatcaccagctgagaaagtgtggactttattctgtacttcaatccaactgaatccaggcaccttcttcacaccccgctcttccatcataactctcattttcctcgcatctcgccatttcccagaagatgcatatatatttgaaagcaagacatacatgccagcattttcaggctccaactcaaatattntctcagctgcacctcctgccaagtcaagattgcggtggatccgacttgcaccgagcaatgcaccccacatggtagaatctggctcaaatggcatgttcttcataa

SEQ ID NO: 64368 - DNA, 346 bp, Oryza sativa
acgctggcagccaccaagaatgactacggttcttgttaccaacccagccacctaagaaaacaagcacatcttatatgcaaaaaataaaaagtaacacgatatcatcttgctaggaagctgtttgagaataagaggttcataaagcatcaattaactgtcggcaacaatgaacaaagatgcgtcttaaccacaaatatttcagcaatcttaacaacatagcaaacagtttaccacaaggcatcatgaaagtaagtgagcaagttgtatttgggtgcatggagtcatgcacaaataaaaaagttcgagacaaacatataggtgtaccacttaaagttactcttaactc

SEQ ID NO: 64369 - DNA, 415 bp, Oryza sativa
  unsure (1)..(415): unsure at all n locations
agatgagaccatactcacaatnttgggagtctcatgtatgggttcatatggaccagtgaaaggttcgcctgttataaatggatgacatgaagcctgaaataagatttaataacaatcaagtccttccgcatgcatatggattccttggaatgaaaaatatgcaagaatacagaataaattgtgttcataggtgcaagctatccaattttattggtactgttagatgaaagattcaccagcttaacctgagcataaaaatagttaaatatgaaaatgaaaaaatgctccttatacttttacagaaatgtgaatgcaatataaccatactacgtcgcacatacctgcaatggcgaccatcgctcattgggatcaaatttcagaagcccctttatgaaatcaaccagtatcacccgct

SEQ ID NO: 64370 - DNA, 423 bp, Oryza sativa
ggtgagggctaagatggccatggaggacaatgaatcatgggctttatgaactctaagatggctggccatggatgaagattgaagctgctattggtctatgaatcaaggtaaagagaatcccttcatcttaagtagagatatgcaccatgttgctggctttagtttcaaaagaagttcaccgagggaggtccgtttatgcttgtccatcttctgctttggattggaagcgagaacggcgaattacaaaagaatttgcagcaaaaatctctcgatatctttgcctgcgccgcagccaccgaaatctcttccttgccgggccggcccaactgagctcgatccgcccccccccccctcccccacaatatcttctaaagacatcattccccgggttgattgagattttcggtccaaccttaaccacag

SEQ ID NO: 64371 - DNA, 434 bp, Oryza sativa
  unsure (1)..(434): unsure at all n locations
taagctggcgcacacgataaagtgcgagagcttataagaacacacgcagaaccccctacctggcgcgtcagatgacggagcttggggctcctcaccgggagaccgcgcaggtccccctttgccggttcggccgggggccctgggtgaagttctaagctcctggtctgtgtgtggaaagttcgcgagaatggaaaaagcacaagacacgggcgatgtatacaggttcgggccgctgagaagtgtaataccctactcctgtgttttggtggatctgtgtatggagaagctacaaagtgctagccagcccccgatcgttctgggatcngtttttttttcttttctaagtgggcaaggtcctcctttatatctcaaggggataccacatgccccatctctctttttttgggggacttattctatcttttcataacaga

SEQ ID NO: 64372 - DNA, 418 bp, Oryza sativa
taagaaaacaacagtctgataaaggccgagtatagttccaaattatttcttcaaacttccaacttttccatcatatcgttccaatttcaaccaaacttctaattttggcgtgaactaaacacacccaaagtaaaggataaagcatctcatacagggaggggaggggaaggaaaggaattacataattaaggggtgtagaacttgctgaatcttttgcaaatggttaaaacaccgactgcaacgttgcaacctgtgtacaatacacaccagcgaagtcagcaacagtccagttcatcttgacatagacagagcaataggttataggatgctacaaacgctgcagttttttaaaacaatggtttctaactgaagtgcagggacaggacccacttgtcacctcacatccagtgtctctttg

SEQ ID NO: 64373 - DNA, 373 bp, Oryza sativa
  unsure (1)..(373): unsure at all n locations
actaagctnnggggctggagcgacagcaagaaacagctccttctcgtttattaacttattgctcacggaagccttgacaagcatctctaccaccctgagaaaaattttacttggcaacaaaggtaccaaattaaatttgctaacctgtttaattcaactgacaagattgtacttgatctgggctctgctttgctctacctccaccatgactgcgaaaaatgcattgtgcatggagacatcaagcctgcaaatgtaatgcttgatgtgtcacacaatgctaagcttggtgacttccggttacaaggcttgttgagcatgggggagagccacaaacaacacaagttgtttcaaggacccctggatacattgaccc

SEQ ID NO: 64374 - DNA, 434 bp, Oryza sativa
agcttaacgaaccctgatactttctttctattctcaagttcaacagccttgtcaagaacagcctccaacccctgcaaaatgatttttttggatcagatagaactaatagaatacatataaattagtgtgaaatgtcctgatagtaacattaaacaataagcaaagcaatttcactaccttaatatcagctcctcctgcaagactctgaagctcttcaacagatgctggagatgcttctgtagctcgattcaaggatagcgcatctccaagagtaattttttcatcagcttggttaccagtggatacttcaccattctctgattcctctgtgctagatgatggttcttctttcattgcagagctggcaggtggtacagaaacctgacaaaaaaggcaaggcacacacctcgttccttcagtaaatcatctccctt

SEQ ID NO: 64375 - DNA, 455 bp, Oryza sativa
  unsure (1)..(455): unsure at all n locations
ngtcagagttagtgacggtggctgctttgatcttgtactgctccgtacttgaggctcaagaggccggcgaagtaccgtttcctgtttgcatatggaaatagcagttgcagtaggaaagggtaaaatttaactgtgcttctaaaaggactttttgcatgtcacagtttttctgtcttccatgatctagtctacgaatgttcagaacttcctccgtttcacaatgtaagttattctagcatttcccacattcatattgatgatagatagatctatctagatttattaacatcaatataaatatgggaaatgctagaatgatttacattgtgaaacggatggagtaatatcttattgctgatcggctgcaggcgcgcttgtgtgaaatgtaactccgtctggtacgagaaaaaacgtgacagcaaaacaacttgactgacanaggcaacataagaccc

SEQ ID NO: 64376 - DNA, 385 bp, Oryza sativa
  unsure (1)..(385): unsure at all n locations
aaaaaaaaagagaagttagaccataacaccggtnagtaaagtgagaatcacggaggtttgagtgctatttgactgggcacttttgctcttctaacaattaaaggactccctttggttaaaaatataagttttttttattttatttcattatcacataaaagctttggcccacaattatatcatttatgtgatatagaagcataattaaccatataattaagtagtacttttgaatacaaaattaataaattcaatttcgtgtcatagaaaatatacccaaacaaagtaatggtcgatcaaaatctcactcttacaaaacaaaactatatcttatattttgaaacggtggagatgaataaaaaaaattgagttccacgaagagaaa

SEQ ID NO: 64377 - DNA, 455 bp, Oryza sativa
  unsure (1)..(455): unsure at all n locations
taaaataataatngacttaagataaaactagaaattaataactctcaacggagggatcgagcaattaattaaggatgtatctgttgtttaggtcccttcatagggagtgacatctttgttcactgtaatttttggcgatttttcatgtcatttttggcaaagaacctctagtggtcctgcaatggctagtcctagctagctggtagctcgggccaacaaccgagtgcaccaaacacaatgttttattcttggtaagctaatatcattgggtgcgatactatatggatgtagtaaccatgaacttcgcctgatcaccacaaaacaaagtggatggcatgtatatatagctntatatacaatttggtgcacgcatgattgtttcatccggctgccactactgacttaattgcagctttgttgttaaggaaacggatcaactattcgaccatatatat

SEQ ID NO: 64378 - DNA, 426 bp, Oryza sativa
agcttattgaacaaaccaatgattataatgttaccagccactgaagttaccccataccaacataggtgacagcttaaacaactaacttacatgaccagaaacacatgctacacatctacggtgaagcatatcctatcgcaattgcctcagggaaaaacaattgctggatgtgtctaaaatgtaaggtccttgggatcctcaattatcttggaaagagtttgcagaaaagcggcaagatcagctccgtaaataacccgatgatcagcagtaacattgacctaagatgtattggtcaggtgagaaattaagccaaaaaaaaacttcataattggcttgtgagaaagaaagtgtggcacagctatgattaaatttacctgcatttggttcttgatcccaatactaccatcttttgtaccaacaagtgtt

SEQ ID NO: 64379 - DNA, 373 bp, Oryza sativa
tgccaatttcacagcaaacacacaaagctaccagcgcattcactacaaaccatccctctcacttggccattctcgtgctaggggctcgacatactcggtccattctcacgaggacagggcggctacagattcctgttcgtggcgatcgacaaattcaccaaatggatcgaggcaacacccacaggagaaatcaaggccgacaacgccatcaagttcattaaggggatattttgccgatatggattgcctcaccgtatcataacggataacggctcccaattcatcagcgccgattttcaagattattgcatcggactaggagtcaagaaatgcttcgcctcggtttctcaccctcagagtaacggacaggtcg

SEQ ID NO: 64380 - DNA, 427 bp, Oryza sativa
tgatcgggcctaattcttttccttccgattgtgccaactcctgacaaccttcctacgtgacgaaacgctagaactccaatatgatcggcatatgacatgtaattgacgcacaactcgatagcctcctcggttgtgtaaccttcaatgatgctcccctcgggtttagctctggtacgaacgtaggacttcagaactcccatgtatctttcgaatggccatatttcccttagaaaagccgggccacatagttttgtttgcttcaccagatgaacagggagatgaaccatgatatcaaagaaagacagtgggaaaaacatctctaggtgacaaagggtattcacaatatcaggctcgaacccatctagatcttctggatctataaccttccgtctgattgcattgagaaggcgcacagatgttggatcat

SEQ ID NO: 64381 - DNA, 364 bp, Oryza sativa
  unsure (1)..(364): unsure at all n locations
agcttcatagagatggacttctacactctttatattntgaatcatttgagacatgtgaatcttgtttacttggcaaaatgacaaaggcacctttcacgggtcaaagtgaaaggacaagtgaactattggtactagtacatactgatgtatgtggaccaatgagctcaactgccagatgtggttttgggtactttattacctttaccgatgactttagtagatatggttatgtctacttaatgaggcataagtctgagtcctttgaaaagttcaaggaatttcagaatgaggtacaaaatcatttgcgcaagacaatcaagtatttacgatctgatcatggtggagagtacttgagccttgaatt

SEQ ID NO: 64382 - DNA, 385 bp, Oryza sativa
  unsure (1)..(385): unsure at all n locations
gacacaaaaactcagcttgatattgtgaataaagaaatatccaaagtattgtgcttactccatgcgcacactgctttaacaaatgtgcttaagtccctagaagacacatggtttcaccacacctggaaatatatggcatatgtggtgttaaatccgcgttaatgaactcataaaggatgtaccaaccacctagaaaatgaccacaatatataatcagcctaagccataatattggtcaataaaaatgcacacttacgtggcgaaaagcaatgatattgtatctaatcaattgcttaaaaacccaaacagcaccttgacttatatataaaaaagtcagcgggacagctatattaagctntactgtttgacaccttttaagatgcat

SEQ ID NO: 64383 - DNA, 432 bp, Oryza sativa
  unsure (1)..(432): unsure at all n locations
acctgaggcatgcaagcttgatgggccggataggcttcttctgttcttgtcgnggccaactggacatggcgaagncgttcttcttcgaactggatgccaccggcgaactggtcatggcgaactcgtccttattcggcaggtactcacgtgacccttcgcctcgcatcatccttgcgtcatagccttcgccacgggtttcggcagatttggtcgaagggcctcatgacatccctcaacaagcccctcactggcaaaggtgagagtggagcttccggccagaccctgcaaccatgtggtatggatgtggctcgcccttttttncgatgctcctgtcgaaacccacactgttcctgccaataaaaattcttactttaccaccggaagggaacaatttgggtttccttgaaggcctttacgggctgctcgatgatg

SEQ ID NO: 64384 - DNA, 438 bp, Oryza sativa
tgctcctcaacgaattgtcatccatgcatcccgaagcagtcctatagcccgcgttgcaacagctccaactccagcgagtgcattaccacaaggtgtcaatgctcaatttcagccccagccatcagttgacaagacagaggccagtatcggcattgtacctttggatgttccagcacagcagccaagaaatctagtacaggatgaagaacccaagcgtaagaaagttatttacaacggtagtacctgttaaggaagcagacgtgccaatcgccaagtggtcactggagcaaatgcagtacctgttaagcctagcgcttgtcagaagcaaccataataactctatatcaggaatcatatacttatgttttatagctggttccccgtcactcatgttattacagagaaacattcatattttgaatgagcttgataagttta

SEQ ID NO: 64385 - DNA, 424 bp, Oryza sativa
  unsure (1)..(424): unsure at all n locations
cctgagctgcagctgcttttgcgcataataatatggttactttgtgacaggagatgatgctgtatgggcccctaacgtctctagcggtctaagcgcctaatgcaacaaggacggatcgagagcgactcctacccgactagacccaacgcggtggccaacaaccgggtncgtctggtggattcccacttcaaatacatattggcgttcatcattccattgggcgacctgcatgcccaggccaataaattgggatccgcttaacaattgcacgtaacttcgacccgccatcttattcaagctttgtctagttntaagttttctcctcaaacttttaacttttgcatcacatcaaaatctttctacgcacattagctttcaactttttcattacatcgcttcacatttcacacaaacttctaatttt

SEQ ID NO: 64386 - DNA, 367 bp, Oryza sativa
tttggagggacatgaaaatcagttatctttggatgatggtgactttagtagagaagctccgaagcgagcagctaggcataaatcaaggtctactgtattgactaaagatggaaacgaagatgttggtggaggtgatgaggacagtgagtatgacgtgccaagtgaggacgagggtggaaatttgactgctgatatacttccaccgctgaaaaagagaagcagaggaagacctaaggtgaataggtataaatcgggtggtgaggttgccagcctgaaaagaagaatagaagtatggattgagaagaagaacacaaccaatgagtgtgagtccgttgaagaaaaaaaccaagtcattgatcatgatgat

SEQ ID NO: 64387 - DNA, 420 bp, Oryza sativa
agcttagatgcaccttctactcgttgccttatgtatgcagccgtgttttgatatatatggtgcagtgactttgtgagcagctcagtttaatagaaccaaggtacgttctcttctccttttgttttaatatatttgcagattttcagaattcttcagtagcttaatttgattttctttacaatcttataggtaagatggttgatctcgatcattgtttcaaattgattgcctacaactctttgaaatagaaggtaagttaaccagacattcatctactatatatgtttgtgtatgtcatatacttgatgaaatgcttgatggacttagcccgtcgatatgcattattggttaagtactcaaaactgcacactgctgtcacttaattttagatttctcattacgttcagttatattagattc

SEQ ID NO: 64388 - DNA, 459 bp, Oryza sativa
cttgagttccactgcaattgccctctgcattgcccttctacttttccatgtagagcagtcaatctggattactttatcaatgtgtagttctggccaagctcctcgagatgtaagctcatctgctacagctctaaggactgctgatgctccaaaaccacgccagccatcaaaatatataactcttgtgtccctctgatttttaacaaaatgttcaagtatcccttgcacagcccaatcaaaagtatcccaatttacattctgccataataatagaaattagactgtgtaagattgactttatattacagaggacaccaacaactatcttgctctacaatgtcccctgcactcaacaggagttgctgaagcaggcgtactagctaacacggtacaaaacaaagctaatgagagatatgcactcatctaagttttttgtaaatcatttaccggagaatcatg

SEQ ID NO: 64389 - DNA, 438 bp, Oryza sativa
  unsure (1)..(438): unsure at all n locations
agctngggctatcccatactagcacatgtggttgcactgtatacgaaatgaactgacattgagtgaagtccttaggtccgtttgggcacactctccccctatcggtacacaactaatcaccatatgtgcaccacttgaggcccaaacctaaaatccatgtttttccaccattttatttatcaaaatcacaagtattaaagttctgtccagattaattaaaaatttattttcatgtttgtaatgagcccataatgacaaggaagacaattctaagcatggctaagctttatatagtaacctagtgtcaccaaaagtcatatataaagtggtatagtcatattgttcctaaggttaggagtgagggatatggatatatgtggcgtcaaggtgaatgcaaacaatatgagtttgtccaacaagtttaacanaatttaattt

SEQ ID NO: 64390 - DNA, 382 bp, Oryza sativa
cgctctgaaagtggcaaggcaaagagctaaggtatgattatatgtagagaacatcagaactgagagatttgaattcctggcaaaagaatatattctgggataaaccaatgccctgactttattgttccacaaatcttcccaaaacaaacaagaatttccatcttgcacagtacaggccgagatgcctctaataatttccacaaattgcaaaacatccctccaccaaaaagatcctttaggagtaacagcatgaggaggttctgcagtgtagtaagtattccaaatcaaactgacctagggaacaggatatctattatagaacttatgcagattcttcaagagaagggcattattttgcaatctaaggtctattacacccaaa

SEQ ID NO: 64391 - DNA, 344 bp, Oryza sativa
  unsure (1)..(344): unsure at all n locations
agctngcctctctctcaagaaaaagttaatctccggctaaatttattaaaatttgcaaggccgtgtggagcaaggcacaaagccgtcactcttcacatgctttcatcaaaacaccaagattacatcacctgcttcatggcgtcgcctgccgtttacggtgtgcacccttgtcatcggtttccatgatcatctcatatattctctcatctactggctgcttgatttcgattatattgagttgcttcctcttgtttgatttttgcattgatcgatcggtggtccctgcagtgattgccacaatcatcttccttgtggcgttcgcggcgttgctggtcaaagtgtac

SEQ ID NO: 64392 - DNA, 449 bp, Oryza sativa
  unsure (1)..(449): unsure at all n locations
tgatccttcatatccactgtattaggggacgtgactatttctccgatgtccaatcggatntctgacgttggacacaacgccagtccatagatcagcgtaaggcggtccatctcgttctttgaatttccctttttaaaaaaaatagaaatatattctttgatattaatagagtgacaaagtttgctatgtgacactagcatttgctgaaagataatgaaaaatgtggctttgttacatatgagtgacgctcttattatgtccatgtacattataaattagacactccaggcagtaggcaccagaatatgatagactacaacaaggtgacgagaaanacagcatgagaatgtccttttagctccctctacctctggtctccatcttcttttgggtttttcttttgatttctgtcattctcccggatgatgtattctcaaatatcactctct

SEQ ID NO: 64393 - DNA, 402 bp, Oryza sativa
  unsure (1)..(402): unsure at all n locations
agcttgtatatgttaagtgtatactanacttgattagtatagaagtacagatgaattgtagtttcctaaagctaatttcctactacatattcttatagaggtggatctcctgtgtgtatccactaccttattaattattatcctaacccttgtttagactatggtgaattaattataggctgattaaggagatacagaaaaacatatctttatgtcaccactttccctgtggaaatataactacaatactcttgggaatatttatgtgtgaaatgctatagcggtatccatacgattgcggatttatctgagcccgaagtagaagacgacctccccgacattaacctagaagtggaacaagtccttgtcgaggaagtcgcaaatgaggaaattgatgatgct

SEQ ID NO: 64394 - DNA, 452 bp, Oryza sativa
  unsure (1)..(452): unsure at all n locations
tgttgatggncattatcgatcagtttcgaccatctatattacctaaatagaggacaactagtgatgctcgcaatgcataaatatgttagaataataatattccactagtattaggtctactaaccttttgcatagaataacaataaagtggaggagaatcgatatcaactcaaatggtaaatcaatcggacgatgtcgagaattagacttatgcatgaatgggccaagaactcagaattgacatgatgaattgggccaaaattcacaaatctacaaagtgaagcaatagaggaggtcgccagccgaagatgggctggtttgggccagcccatggttcggctgaacccggtggttctgccgaacccccatcttcaccatngaggctaaaagtctgcatggactgtcaagattgcaccccaatgacggttggagggtaatttggacaatttccc

SEQ ID NO: 64395 - DNA, 406 bp, Oryza sativa
  unsure (1)..(406): unsure at all n locations
agcttgagattagctcaaatctggatgcttacacattctgcaatcattttactgggaatcttggcagtattaattaaatccagactagaccactggtattaagaatgttttgtattatctgcaaaacaattntaagtcacatgctcatatttctaaagttcaatgatatcagaactttatagacatttggacacttattttgtgagatgtgtggatacttataaagattattaagttaactaagattaagctatgtccacacataggggagcaataaccctagaaaggctctcaaataatctcttactgcatagncgacgatgcagttagattttaaagcatgttatgattaatcataacaatatttcccacaactaagagtggtaaatagcgctcataaaccact

SEQ ID NO: 64396 - DNA, 444 bp, Oryza sativa
  unsure (1)..(444): unsure at all n locations
ntcttgacgcctactctagctaccaccaaattagtatggtgaaagatgacgaggagaagacaacattcatcatgccattcggtgtattctgctatgtcaagatgccatttggactcataaccgcaggaaatactattcaacgcacggtccaaggggcacttaacgatcaacttgggaacaatgtcgaggcctatgtcgacgacattgttgtcaagaccaagacaagcgactcattgattgacgatttccgagaaacgttcgacaacctctgatgatatcgcctcatgctcaatccagagaagtgcacgttcggagtaccatcgggcaagatgctcgggttcctcgtttctggaagagggatctatgcaaatcccgagaagacaaggcaatcgaaacatgaagtcgctcccnagactcagggaattcagaagctactggatgcat

SEQ ID NO: 64397 - DNA, 432 bp, Oryza sativa
agcttgaccgactgccgctagaccaacttatatttatttattagatcgccccaaagaacaccctcacaaccaatacaaagccaactcctatagtgtgcttgcaccaatcgatcgagaggcttcggctaggggataccaaaacgacgtattcaagaaaaaaagcgatggtaaaccaccgccgccatccgtcggggctcaaaggagccaggactgggctttctcccggcaaccaccctttagggatgagacatcacgacaacacccttcagaaggggaaattcatcttttgctgtccggccatggccaggctgggttttcacccgctgcttaccacccgtgaatccactggtgacgcaccaatgctcccaccacccctcaacctctggcgacatgtgtgatcccttcaccggcgcgccctactggctatccttc

SEQ ID NO: 64398 - DNA, 360 bp, Oryza sativa
tggtctaaaattcccgaacaattagccttttatgattatattggtaataatccggcaaaggggggattattcatagcaggctcaatggacaatggggatggaataactgttggatggttaggacatcctatctttagagataaagaagggcgcgaactttttgtacgccgtatgcctactttttttgaaacatttccggttgttttggtagatgaagagggaattgtgagagcggacgttccttttataagagcagaatccaaatatagtgttgaacaagtatgcgtaacggtggagttctatggtggcgaacttaatggagtaagttattctgatcctgctactgtaaaaaaatatgcg

SEQ ID NO: 64399 - DNA, 413 bp, Oryza sativa
  unsure (1)..(413): unsure at all n locations
agcttctagatgtagatgcacaaataattaattagttattgatcgatgttaatttctcctatctcatgctatacaaatattgatgaattgaaattacagcggcgaggatggggaacaatgaatggtacttcagccgcaaggacatgaaatacccgacggggatgcgaaccaaccgagccaccaaagagggatattggaaggccaccggcaaggacagggagatcttcaagcctgccatttacgaaggaagcagcaagaacaataagcagcttgtcgggatgaagaagacgctggtgttctacatggggagggctccaaagggcaccangaccaactgggtgatgcacgagttccgtccccacgccaacctccacaaccactacccaaaccttcgtctcaatcccaacgaatgg

SEQ ID NO: 64400 - DNA, 443 bp, Oryza sativa
  unsure (1)..(443): unsure at all n locations
ntcactgtcttctggagtgatgctntggtaagtaacaattgtgtttatgcatacatatgaaatttcagatatgcaatatgttagatgctaaatgttgaccaacatattgtttagagctaattaattgctcatgtggtttattcttttttctttctcatttgcctttcagtgtggaattgtggtacaacacaattttggttctcctcactggttatatgaagaatgcagagattgctcttgatgctctttcaatatggtaatatattccactttcaattgttgcataatggtttagacaataaaagatggggcatttgcaaatttgccaccggttttttcaatattgcaaggatgccactcgaatgacagttctaatggcatttttgcaattttctagtggcaagtttgcaataacgaatcaaagtagtggtaaatttgcaatt

SEQ ID NO: 64401 - DNA, 473 bp, Oryza sativa
acccgtgatccttaagtcacctgcggcatgcaagcttctgcctggcctccttgggaagcttccctttcttggtcctcttggagaacacctgccggagatcgcccaacgagccaccgtacttcctcagaagctggtgcttcagctgcttgtcactagggtcttgctcttcctctgatgatcccgtgccttcacaattactctctgttaaaaacagcagctcaaaaaggttaattgttcaacatgatgttctatcaaaataattaaaaattacatgactgcgtgcgtcacagcaggtaaacctcatatgaagggaggtgtgggagatcgaatagattatgcatagagtataatggtagtactgtgtattactcaatcggtcagccccaccaggccaccagtcagtcaattaattctttgtgtttactaggtaggagtgtatcgaagtaagcaacagtgcaaccctgaaggcctga

SEQ ID NO: 64402 - DNA, 459 bp, Oryza sativa
tctgaaggagaatagcagctgtaccagtacatctgtggatatctatgctgagactctctacagctcttgccagaattgcctggaatccttgttgaccttgtttcgacaagcgactgccgacgattttgctgagcaatccttagaccttaaagagccagtttttcgacaaattgctctagaagcagataatctcctttggttaactgagattttggccgacaggaatgctgctggtgagtttgcagtcatgtggtctaaccagggtgagttggctgagcttcactccaagttaccaaccaagtcgcgccatcttgtcagctgcgtcacagcaaggctctttgtggcaattgtgaaaggagacatgctcccttcaaaggacacaaggaagcttctcttggatgtcttgctgcagcctcttatggatgactaccacttgttacagcatggctgcaggtcatt

SEQ ID NO: 64403 - DNA, 437 bp, Oryza sativa
tcaatcactcagaggttatcagaatcagttcttctttgttcatccaaacctacaaagctccagcatattttggaccatatagcttcatagcaagcacatattttgcaagtatggcgttgcttaggtctgcaatttctttagtttgctttattttcaaacattacataactcattcatttcaggccccagtggtaaaaggtcgtcaatgggcaaaggtgcaataatcggaatagcggttgctggttttctccttcttgttggccttatcctagtagcaatgtatgctctaaggcagaaaaaaatagctaaggaggcagtagaacgaactactaatccttttggtaatgtgttatttcatcattcagtatccatccaatagggaagtgttaagcatgattgctaatctgtgctagtgaatgctctggtgccacagcatc

SEQ ID NO: 64404 - DNA, 121 bp, Oryza sativa
ttttgctaaacctggcggcctcttgaattgactagcttgacacattttcctagcattcgatggatagatgataagcaacctggagtgagccaagtgctgagaagtacggcctccagcattc

SEQ ID NO: 64405 - DNA, 453 bp, Oryza sativa
  unsure (1)..(453): unsure at all n locations
tcgaccncacatgtcagcagctgttagggataagaatatattttggattaaaaataaatgaattatgaacagtagcttttcacaatttctcggattaattcgaaattgaatctttaaactagcataacccactcattttaactccgatttgagttaaatatgaacctaaattcatctaaattcataagctttccaatggtatataaatcactatttaacaaaatatatttataattattaaatgattaatatcaattgattagattatggtcaacttaaaaatatgatagtaaataaaattggtattatacagtagagtagatgtaataatatttgtttctagcatgttttgtcacagtagcaaccatgtaaattaagtacagtgatgtctcanatgaacggatgtataggaagacactagcactatttaatggtcaattaaatccatgactt

SEQ ID NO: 64406 - DNA, 275 bp, Oryza sativa
ttcctttctgtatctgtggatatgtctcttgtatttaagggtggtagaaatgaggtggattcaattttgtgtcataaagtataattggtccaatctctttgactcaactggatttggtcatatgtgaatgcgaacttgggttccttggttaacatgaaccacatgtgtggaatgtctatctaggaaagttaactttcaatccttatggagatggaacggatatactatgattcaatccgcctcggattccgataatagtgaccgagtgaggatct

SEQ ID NO: 64407 - DNA, 392 bp, Oryza sativa
  unsure (1)..(392): unsure at all n locations
agcttaattcatgacatgactgctatttttgctggaagtgtaacaagaaagcatattcttacaatccaccatccaaataaaaagtgaccattaaatacaacggaggacatagatatttatttgaattatttaaacgcatgcacacatgccatgagaacctcatcactctctggtcataaggaacgcatctctagcaaccaaagatgacaaacatgcatataattagcctcattggtggtccatgaagctctcccagccccatatatatatatagctcctttgctatcatgtacgtagtatataacatgagcatcanggtaaggaaagtcatctcaaatccacaccagttaccctcaatagaaacggtgctaatggcccagaacaagaccatg

SEQ ID NO: 64408 - DNA, 450 bp, Oryza sativa
  unsure (1)..(450): unsure at all n locations
tcttgccatctccaccatgaaaagcatcaggaggattttttgcataggagaggaggaagctgagctgctgtgcctgtgcctgcctttaatggtttggaggagagagggaaagcttggaatctcagggagggaggttgcaacagaggaaagccactatgattattgtattaactcccatgcacacacatatataatcttctttaagctcttgctctttgtactggtgtatattactacctccgtttcagtntacaagacgttttgactttagtcaaagtcaaactgctttaagtttaactaagttcgtataaaaaataattacattttcaacccaagaaaaatttattatgaaaatatattcaattattgatttaatgaaactaaattggtattataaattatacctatattgtctttaactcaattaaatttgaagtacttgattttgac

SEQ ID NO: 64409 - DNA, 439 bp, Oryza sativa
  unsure (1)..(439): unsure at all n locations
agcttggttcagttggttgtatcttgctttataatttgntcagctccaaggataattcaagtctgccgacagattcattctattaaatttgcttactgttcttctattgaactaattatatgtttgttgtgtaaagcacagtgtatacaatttacactgcaagacgtgaattaaaccaaaagctatgagggattattgatgaaatttaatacaaaatttttaaatatgcttagggaatattcatcaccttaaatcctaaaaaattgtagttttgcagcatgatttttggaaggcgttgttcagaacagttatagatttaaaagttcaaagccatcagatttattaaatgcaaatgtaaacagtttgatacttgcccagatcatttaagccagaatctctcatgaatgagaacaccttgtgttcaaattatcattatctg

SEQ ID NO: 64410 - DNA, 426 bp, Oryza sativa
tcaggctgcctatgaggcaagtgttgcatctcccaatgctgcctgtccggcgtgagtttttctcaggcgtggccctcaggacacgaaccaaacaacccctgagtaactgcagcatttttgtgggagcagaaaaaaaatctcggcgagattcatcagaactatggtcatccgccagtagtgatcatgtccttgtacgctctagctaaaattcattcatttggctcgcaagaaaagaaaataaaatcattcatttggcttgaacactagtgtcaggctgtctgcaatctgcatgttactgttcccctagagtttagcatcggagtttggctgatttagaacggacttagaaacagggcgccaaataaaagagagagagagagagagagaggagagaaacaggattttactgaacaagaatgcatcatg

SEQ ID NO: 64411 - DNA, 426 bp, Oryza sativa
  unsure (1)..(426): unsure at all n locations
agctntgaagaatagtgtgcagntcctgtatctctgtcatcgctgcaactgtaagccttgaggtgacaaaattggagattccaatagagaggatttgttgaacggtggctaaaacgtctgttgagtgcgagaaaagggattcaaactttgatgcgagttccatgctgccagtccagcgatcatgccagaaggaggttcgcgttccatccccaatatgcacagaagttaagctataaagctccggaagcaatttctgaaagacactccaatgttgacccaaaggaagagttttcattatagactctccatggaattctttccaaatccagttagcccaggtcgactcattcgagaacaggttgaataatcttttcagaagaagagcctcattttgtgattttaggcatttgattccaagcccacctt

SEQ ID NO: 64412 - DNA, 451 bp, Oryza sativa
tattgcattagtatgtacgaagctgagtactatttgtcttggtggactccattgggtctgtctcaactcaatcatatgtatgtccctcctatagttgtgttaactggctaactgctcgatgcccttcatgaaagaaagagaagatagatgtgaagaaaataattctttccataaaaatattttttttacgttttgagtagagacaatctgtttgtattgttaatcagtgctgcttaagtttttatggcatagagaaaatattctcttttgaaatgagtgaggttgattattaagaaatgtatcgctaaatatacatacgaccgtgacaatcttttaaggaagcccgcgcgtgtgcgcgggcattttatttattggtctatgaaatagtgctaaaagaagccatatctcacatttctacgtcgtgagatagatcatagactctagtatactt

SEQ ID NO: 64413 - DNA, 416 bp, Oryza sativa
agcttttcatgaaaccgagcttgttccggttgatgggagtcgttctgcggaagaagtgtgaaagggtatcattaacatcaggccggatcacatccggcctggtgtgctaatgcctgcaatgaatgatagtcgcgtcttatcatgccaccattataaaattatcgctgttttgcggtacgctatcgccaggttatgccagaatcataaaaaagcaagttgggagtcgtcagggtgcagcacgagacaaaaatggaaaaccagagctggttgaaaaaactcgcacgccgcctggggcctggtcatgtcgttaatctctgctttatcgtggtattgcttttttccaccttgctcacctggcgtgaagtggtggtgctggaagaatgctatatcttcagccagcgtaatcatctggaaaa

SEQ ID NO: 64414 - DNA, 438 bp, Oryza sativa
  unsure (1)..(438): unsure at all n locations
agctnggacgagacattcaccaagcaagtttgtttgtaatttatttttcatacagttgaaatgataattactgttctggaattgaagtgaatcaaagatatcctaaggaagcagaaatgtacaaaaaatgtaatatattgcctttctgtacaataaaggcaataaggcatacttctccctgtcatagtaatagtattcaagatttccactagtttcggatggagttggagtttctctattttgtttgttcacctactgtttattttataaatcataggttcttaaacggatggcttcttacgctaaaagcagtgcagagcttttaacaaatcttataatccaaggtcaatcaggccaatatacatgggaggtaatcctttcttgtgccatttcttgatttctcttttctcatttagtcctgactaggtatgccttttg

SEQ ID NO: 64415 - DNA, 313 bp, Oryza sativa
  unsure (1)..(313): unsure at all n locations
ntacttagtaaatgctgatggtttatcttcggtatatgttccgcttcatgggtcttggatagtaaagcaaagtgtgggaaagaaagcctgtttggttggtcaagcactaaagaacaattatttccgtggaagccattatttggaggtaaaccctcagcctgacatggatctccattagattctcatttcattccggcatcaaaattcaaatgcatggtgtggcaatgccatacttactggcttcaataagcaagttatactaagcattatgtctcacttacaaatagcgcagaataacaattgaatgaaattt

SEQ ID NO: 64416 - DNA, 424 bp, Oryza sativa
  unsure (1)..(424): unsure at all n locations
agcttgtaatagagatgattgttatgtggtatgcatgcgacaacacctagaaatgcaaaggaagttctccgcatgtatgaaataatagcacgaccctgggtagcgcccaccacgccctagaatactggccgacggtagatagtcgatggtggctatcagtggatggcgtatgtattgaccacgccctgaactgtggcaggtgcacatcaagaagctagctgtttgaactgagtgccatgccccgccactgtgctcgtgtgtcctccccagttggatgccgccgatcacgtggaggtcgagcatcaccatcacaatgaaatacacagcaatcgcacagtgaagagccacagcagcagaatatcaacggtgaggtcacacatgcccagatcatgaacatacccttgcccanagtgcaactcttggc

SEQ ID NO: 64417 - DNA, 446 bp, Oryza sativa
  unsure (1)..(446): unsure at all n locations
ngacatgtgccatgatatgtntaaggaatgttatcagtgttntagtttgtggcatcattaatgaaaagttgatttggggttatttcttaaatccaaagcaaaccactgatttcttattagcgtgatgctacttctgtttttgacactgtttagccttttatggtagttgccataattggataactntaaaaagtaaagtacttactgactacaattggtacaataattgactnttccagtgtggtaaactattcttattttcttttctcatgccttatgtttattgaagttcagatctaagaaattagagtaatttattggtggaattgaaaatatgatggttttctatttgcagaattttcctgattataggtttgagaagttattgactgagtttgagagaaccatgtcaatggaactaggtaaatgcatggaagtttctttat

SEQ ID NO: 64418 - DNA, 418 bp, Oryza sativa
  unsure (1)..(418): unsure at all n locations
agcttgcattctttgcggngagaaccattgccgtaaagattgcagcatgtacaatgtagggcaagatgccacaggcgctgatgtttgtcgcgttccaaaggggaagttgaagaagaaaaataatccttagttcgctattatccttggtggactccctactttgaagatcgttatcgttcaatttatgtttagtgcatcagtaattttaatttgaactttcttgcacttttattacccgaatctatttgtaatggccttgtaattttcattttgaactgcactgcacttttaatatcgtcatgtatttgtattggaattgtaatttaaatttcgaactgcactgcactcgtaatatcataatatatgtgtcgngggcttgtaatcttaaattgaaatgtactgaactgttcttatctgt

SEQ ID NO: 64419 - DNA, 444 bp, Oryza sativa
  unsure (1)..(444): unsure at all n locations
tagcaaaaacttttaagagatcaaaaaacttcgcaagaatcatcaagcacagcataaatacaccagtattgtacaaattgagcctccatgtattacattcaaactcagtcagaatcagtcctttcatcatcagagtcttcattactcggttggaggtcgttgttgcgaaattgctctacaacatcactcgcaattntgtcagctgcattttgcgcactgctgataagatcaagggcagcttcttcacttgtcccgtctgcaaatccatcaatggtgtcgacttcaattctcgggtacaaggattttgtcatcgccaaggccatgccagctcccatacttccagctttcttgatattcttgaaatatacttccggagcaacactcagcttgtcaaatatttcggttgcgtcgagtgcactcggaccaccattattgaggaacatg

SEQ ID NO: 64420 - DNA, 431 bp, Oryza sativa
agcttcttattgtctttcttgaagtggggtgcaattcttgatgtgggggcaatccgcaatgaagtgcccgggctctttgcacacatagcacaaccttgcggagtgtcttccacttgacttgttggaggaatgcttggacgaacttcccttgaagaagccgctttgcttcatgaacttgtcgaacttcttgacgaagagagccatctcttcatcatcgatctccgccttgctcttgcttttgcgactctgttcttcttcttccttcgccttcaatgccaagttttccttcttgatgcttgtggttaaggtttggttgatgtattggatgacctccttggactcttgctcgagcatgtcatgggcaaggatacgtccgagcaagtcatgaggtgtgagggtcttgtagtccggacgctcacgaatgatggtca

SEQ ID NO: 64421 - DNA, 432 bp, Oryza sativa
  unsure (1)..(432): unsure at all n locations
tgcacttacaaccaaaccacacccacatccatactacattcaatggctgaacaacagtggtaaggcaaaggtcgcctatgctttggtatgcaaagatgctttgatttcacttcacgatatgcagcactctttgcccccctgctgttgctaacattttgcaggagtactctgatgtgtttcccaaggaagtaccaccggggctgccactggtgcgtggaattgagcatcaaatcgacttgatcctaggtgcttccctaccaaaccgtgcgccataccgaaccaacccagaggaaactaagggattcagcgtcaagttcaggaattacttgataaagggtatgtacgcgagtctcttagtccaagtgcggttccggtaattntggtaccaaagagagatggatcatggtgtacgtgtgtgttgatgcgaaaaca

SEQ ID NO: 64422 - DNA, 430 bp, Oryza sativa
  unsure (1)..(430): unsure at all n locations
agcttccttagtccttacacaacgtataatcttctacatatatatggttcactatttctttcatgatttttttttctgaaaacttttttattacatatatatgagagaggaatcactcacacaaaagataatagcacaaaaataatttatgcagcatgtgaaaaatgatcataaaaagaacaacacaagaagtttcatattttttttgaattttctagtggggtcaatccattgtcaacatttacatgtatctaagggtattttaggtattttcaaagtatttggttaaatggtatattatattgtagaaacaactgataaactcattggcatactacagaaaagggccaaaggctatgttaaatattntagattctctctaaaattaatagaagagctccgttagaaaaaatgagaggattacagtctc

SEQ ID NO: 64423 - DNA, 457 bp, Oryza sativa
  unsure (1)..(457): unsure at all n locations
tgtgtcagtttcatgaattgtctgttctattaattaattcttctctgtttggacttcagagagattataagtagtaactacgttgaggtgtttaattntttagagctgcatgttattatattgaaaaaatttactataggacacatatatttatgattttttgttcttaaacaccataaaaacgtgaaacagctcgaggacacaacaaaattgttaatttgttagaggatacggtaactattattttattattttcaagtaaaacacagagaaataattagaaaatataagtttttcccttggttaacaagataaatcaatcaagacaccaagacaatatgtgtttatgcactaagatcataagcaaatgttctatcgcataaacatatacatatatgatgatttttaaaaggggtatttgcgagtttgcaaaaaaaaagttttctatattttgcaa

SEQ ID NO: 64424 - DNA, 446 bp, Oryza sativa
  unsure (1)..(446): unsure at all n locations
cgaccggatccttaagtcacctgcngcatgcaagcttcaatacaagtaacataagcatagtatctactcacatgttattctaagagcatcaccctaagcaacaattcagcaaaggaaaattgataagatttaagacgatctgatcagctaaattgcggtacttaaaattggcagcaagcagcataagtagagcagctaagtaatgttcaacagagacatgcaaaaataagttatttcaagcttccatagaataaataccaaaacaagacgcctgcattgatcatatacgatccccccgtgccgtggaatggaaccagcctgtgagtgttttgcaatcttcgcatcaagtgcaccaagtcaaaaattggagagtcgacacaacggaaatatacaatgcgactcttcactgttctgaactgatcagcccaatggatagctcaacccat

SEQ ID NO: 64425 - DNA, 474 bp, Oryza sativa
  unsure (1)..(474): unsure at all n locations
nttccgagacaagcaaggggttgtcacacaggaggagatcaagaacaaggcggcgcagctcctagaagacaaggagatcaaagaaagagcggtgacactgaagaccacggcccgtgcaagcatccaagagggagggtcctcgcaccagaactttctcgagcttgtcaatttgctgagagaacaatgatctttcaggatgcagaaaaaatcactgcagtcttggtgcagtcaaaataggattaatcggtcaataaaataaaccgaatgcacaccataataaagattccgttgtttgatgtacactgttgtttatgagcctatcgttcaacatagaaagtagtattggattatgagctgtttagtaccatcatcagaatgggctagcgaccactggaagcataaaattgactctattaagcggggttcccaatccctccgaagtggcaggagaanatcacaaggggcaaatgcgag

SEQ ID NO: 64426 - DNA, 411 bp, Oryza sativa
  unsure (1)..(411): unsure at all n locations
catccccccccccccccagagggnaatgatcagcaaacanccggaaccnaacaaccgagagcaacccgcgagagacacataatttccaaccanaaccaaaccgagaggagcaacacaaacaagccacaaactgccaaaccaaaaggcaaccacgccgcggcacagacccaccaacaaagacaacggagccgcaccaccacgcaacaagacaacagacagaacacacacaagagcggcgacgacaaggacgaaccaacgcgagacgcaccgtccgacgccaaccaccaaccccacgacaaagaaagccacgaacaaaggaaaagggagacaccgaaaacaaacaaccccacagcacaacacgaagagctgaatcggacacgcgacaacagccacccgcaacgaaaccacgcc

SEQ ID NO: 64427 - DNA, 450 bp, Oryza sativa
  unsure (1)..(450): unsure at all n locations
ntatatctatcctatcgctctctggcttagattatctttcttccttaactcagatctaaatggcttcctttggatcgacattaacttaggcgtaggtcaaagcacgggcatggaaaagggattatatggcgtgctgggctggatgaaagaagcaactacgcctacaatgagaatagcgggactcccactagctgacagagaactcccagccaaaatgaaactggacttccagcaatagcagcaatgtcactagaacctttcctactggagaataactagaagtttctggggcccttaaggtggaaaaaaatgattaaaaatcaaccatgcttactaaacaactcaatcatgcactccgtatgctccattcgaggtgtaatacctgaatcttcactcatcgagaacaagtatctttgacccagattaacatatccttcacaaatacaagct

SEQ ID NO: 64428 - DNA, 411 bp, Oryza sativa
  unsure (1)..(411): unsure at all n locations
agctttcgaatacaacgaacggttttatatgttntattaaagtcaacggtgtcaaacatttagggaaggagggagtattatgttatttagttttaccacggttggtacggagcgatgtggcgcttattgatgaaaatgaggtgtccgtcactgaaactaaggacaaatcgtcataagctagtttaacattgtatcgtgatgaatgttattttgtttcatcataaatatcttttttttcattgaaaacactatcatatctttttttttcattgaaacacaatagtctgaatttgcaagaattttaaaattacataatatgtttggagttctatagtaatgtgtaaatcattaagtttaatgaagtaaacaagggaataacatctttttaataaatcaaggagtgagtttttt

SEQ ID NO: 64429 - DNA, 364 bp, Oryza sativa
taataaaaacacacatggattaaaaagagaaaaatatgttcaagatgtgatagaggtgtcttgggcaccgaccacagggagggtgggagggatgtgccccaatcaccgcccataggggatcgcaccccgggggccgatgtgccccgagccgagcacagcccactgtaggggtgaaaacggtatggaaacttacctagcgtaccgataccgtttccgcaaaactaatataataataataattttaccgctggttacacgtttcataatttagtttttttttatttctgtaagcgtggcattgaagttgacactaaatagatgaattgattaatatgaaaatttctagaccgtttccggtcgtttt

SEQ ID NO: 64430 - DNA, 345 bp, Oryza sativa
agcttcgtgcatcaaagagcaagaaggtctttttttattcgtcattccgcgaaggtcaagaagtgttttcccatagctgacctaaacccaatctgtcccagaagagtagtttcgttagcttctaaatcgtgtgttgcttgcttgtgtgtacgggtatggtttgcatcattggtggggatgcgaccatactacgtagtttgcttaagcaacttgaaccacaaaaatctactccccacaaatcagtaggcaagtggtttaaggtcttatctttagcaacccctctcttcgacctctctttcgttattgtagcggatggtcagtattagagagaagagcaaccaccac

SEQ ID NO: 64431 - DNA, 434 bp, Oryza sativa
  unsure (1)..(434): unsure at all n locations
gacctataaaactcagcttctaacggataattgttttaacaagaacattcttatttagcatttcttaatttcagcttctcaatcgtctagctagtatttcatacattcaattgtcttctcgaataataattgtaaactatttttccaacatggaccaaaatggtcattgttgtggatggaaatcgtctcacaagaggcaaaactacattattttcaagtagcatattaaaaaggaaagtatcagtgttgttgtgatagagtcatagntgtataactctatctactatgatttaaatcttgatttaaatcttgatgctcacgaatattacatgtacatatgcagatagactttcaacaggcttttaataaaaacaatgatgtgctagctactagctagctagtttctatttctctaagcatatggtaaagacaca

SEQ ID NO: 64432 - DNA, 429 bp, Oryza sativa
  unsure (1)..(429): unsure at all n locations
agctntaggcaacttattcttctgcaaatactacacaaaatatgaatgtccaggaacaatctctacaactttataaggaccttcccagctcggtgaccacttgccaaatttgctactcctagttccaatgggcaaaatcgttttccataccaactcacctatctgaaacgatttttctctcaccttcttattataagccctagctactcttaatttttctttctcaatatgtctcaaggccttcaatctttcctctgggacgtcatctatcctgtccatcattaaattcctataatctacagccgacaaaccattttgtctggctattctaagagcttgtaaattaacctccacagttaacacggcctcctgcccatagactagctcatacggtgttacttgagtcgcaccatgcttagatatccgatg

SEQ ID NO: 64433 - DNA, 441 bp, Oryza sativa
  unsure (1)..(441): unsure at all n locations
nttcacactttcgtgggttgtttcttcgattggatcttgaatttcctggttctttgaaaagaattcgaagtgataatggtggtaagtttaaaaatgcttcttttgaacaattttgcaacgaaagagagatggctagaacgatgttggatgagtataaaactcctagaaaattttgggctgaggcgataaacactgcttattatatttcaaatcgagttttcttgagatcaaaacttggaaaaacttcttacgaactttgatttggacatgaacccaaagtttcacatttgcgtgtttttggttgcaagtgctttgtcttgaaatctggaaatttggataagtttgaggcacgttctaccgatggattggttcttggttaccccgcacatactcgtggctatcgtgtacttattttggggactaacaaaatcgtggagactt

SEQ ID NO: 64434 - DNA, 415 bp, Oryza sativa
  unsure (1)..(415): unsure at all n locations
agcttgcacgtacaccttgtatagcctgttgtaaaacttcatcatccagcatttttgatcatttggatcttaatttctcgctgaatcttgtctcggtcttaccgctgaccaaaattaacctacaagaaagctaactctaatcacttttcaaatgatatcctaaccgtataagacttttctcctacctaagcatggctccagtcctcaccacacacaatcaaccaaaataactatttctgtgcacagatatcacaatttgacacatattagtcacacgcactaacaccaacattcatatatatttccaaaccaattatgttaatcaactcatttgcaaagttaattgttcatcacanaataccaattccattaatcaattcatttgcaaagccgattattcataaaaaaatattaa

SEQ ID NO: 64435 - DNA, 442 bp, Oryza sativa
  unsure (1)..(442): unsure at all n locations
nggacttctcttcatgcacaagctgtcgattgtgctagattgtagcttcaatatctttgcgctcccggcgatcgactaatctctgcctggccttctccagcttgaattggtgttgctcaaggtagacggctggagtaagggcatcggctagttcatctgggagtagagcttggatatctgtgaaccttgctcggatcgagccacagttggtcaccaagttgtctagtgatgcttctagccgatgagagatatccttaagcgttctcttcacatcatcggacagaggagctatggctttactagtggtgtcttcctctgtttcatcgagacaatccttgatgtcgaaggaaaacagatcggcgaagacctgcaagagataatattatggatggttaaggatcaaaacatgactagccgatctcaaatttgtgtcaacaaaaac

SEQ ID NO: 64436 - DNA, 426 bp, Oryza sativa
agcttgtagtatcaggtaaggaaacacattgcctttatggcctgtagtagcactcattctcagcttaattatctcaatacttatgtactccctccattttttaatgtatgacaccgctgactttttgagatatgtttgacaattcttcttattaaaaagaatatttagttattattaattttattgtgacttgatttatcatcaaatgttttttaagcatgatttaaatattttatatttgcactaaatgtttgaataagatgaatggtcaaacattgataaaaaaagtcaacatcgtcatacattaaaaaagcggaggtactatctaggtaaggatagaagcactgatcaccgagatagaaaggggattaggggaagacaacatgcagccttatccaatggcagagctagaaagattttaaactt

SEQ ID NO: 64437 - DNA, 453 bp, Oryza sativa
  unsure (1)..(453): unsure at all n locations
ntctcccacactcgcatcacctccaggtcagcacgggttgtctgcacctgctgagcagcccaaaaaccccggccggcagtttgctaggacagcagcagtggcttcttcggtagttagcgcgggcggattaaatttgtgataaatgtatagctagtcctactatagctatgggatttagatctagaggtgtaaagttacgacgtgtttgggtgtttggacaataataaaaaaaactaattacagaattcgtcggtaaaccaagagacgaatttattaagtataattaatctgtaattagcaaatgtttactgtaacactatattgtcaaatcatgaagcaatctatctatctatctattatatactaaaagtctattaaacttcctattaacactctcataccgccaagtggcaccctataaacgctctcaagttgtcaagtggcactctaata

SEQ ID NO: 64438 - DNA, 401 bp, Oryza sativa
agcttcacaccgttgcaccaagtcgcaagtatctttgatggtgggtggccggaaaaaaccttgtcgaaaggcctttccgaccaaggtgcgcccgccggcgtgtggtctgcatatttcttcatggatgtcgagtaacaatgctttgccgtcctcggaagagacgcatttgcagagaactccattcggggctttcttgtagagatcattatcgatcatacaataggtttttgcctgatgggatagtttctctgcctctgtgccgtcgtcaggtaatttgtttgcacccaagaagtcaataagcagtgtgcgccagccttcggtcatctcgatgtcggccacgacgttcttgacctctgtagcccctgagctgttgtcggcattagatgtgatactttcgtcat

SEQ ID NO: 64439 - DNA, 456 bp, Oryza sativa
  unsure (1)..(456): unsure at all n locations
tcctattcctgtcattgnggatcaaaattttccaattgtgcatattaatagtgttcataattaatggaatatttgaatatttgttggtaacctcaaatgcctcgggtgttgcaagtcctccctctccagtgaatgattttatcctcatctccatggatgagaacgcctgaggaacttcctctcttctatctcttctgaaggaaatagctgttccatagtatgtcgatgcaaagggaagcctatgataaacaagagcatcttgacatgggtgacaaactccccgccggtgctgagatgcttggcatggaatccagccccacaattttgcgcgacgtagcaaatcatctccacacataccaacgagatgagttgcgtgataggttcagatatgttgtcattagaaactgtccaaaggagtcaaggatcctaccaaacaaccggttcagatatgagtta

SEQ ID NO: 64440 - DNA, 353 bp, Oryza sativa
  unsure (1)..(353): unsure at all n locations
tgccctagaggtanaccatattcgagaacaggtgcgtgttttgtttagagatgatcgatcgagatgctcaccaggatgctcctgctcgcgagattgatggagatcggcgcacgtggcgggcgaagtttcctcgcgggccgacggggaagagagatactctagggggagaggcacaatatttttcggcacagatgaatttgacacgntttgggctggtggccgaggcttgtaagttgtaacaccacacggtttcatcaaattttgcggcttgaaaagaaaaatctaaacatccaataagctttgctcactacagattacatttttgcataaggcccatggggataggcatactc

SEQ ID NO: 64441 - DNA, 447 bp, Oryza sativa
tcatatttattctttatttgagcacctgattaattatttatacatagagttaaaaataacaggggtgttctggtaagcctcttcattgcttcaaatggattctctcgtacatcatgtgagcctgctgattggatcaatagtattcagcggcgtgtttttttaaccaggtgcgtacaacgatccttgctattttggaaattggatcatgcgactcattcccctttgagatatatagcttggtgctttcaactataaagaaaccagtcaatactagtaatcggctagtcgttcgcttattaatttactgcataaattttgaatccaattttttgatttgaaatctattcttgcgctggtagtatgtattcaggtcttagtgagatttggacacaaacatttggctaatgcacgtcttattgagtggattttagagaacccttaggttta

SEQ ID NO: 64442 - DNA, 431 bp, Oryza sativa
agcttaacatgcaaagatgctacatcatttttctctaacaagatgccacatcatcatccactaattaacaagatgccacatcatcatccactaacaatgaccatatttaaatatcatgcaaatatgttatatctttatagtctttataatttaagagcttttcaaatacaaatatgttaaattatcatccaacataattcacataatgtttcaatgaatatctttattatgttttgtgatatcctatatacttatatagttcatcctatatacttagttagtgcttaaatgattaatctatggtccaaattatctttctccttttttttctctaaataagtcatatcacatcaattggttttagccttgagatgaataatctacggtccaaactatatccctacttttcttttccataaagtcataccacc

SEQ ID NO: 64443 - DNA, 384 bp, Oryza sativa
  unsure (1)..(384): unsure at all n locations
tgctggctgttgtcgcggcagtccgggagaaatataagtacttagtaatgagtactaactggtccaaacacgtacgggtaagcacgttcattaatcgatctgtaccagctggtaagttcattattcagatcgaaagtgtaactgtcggcgtaagatattgaacaaggatcaaagtatacttcagtgctccaggctcaatatattacgcctttcanattgtgataaatttttggtaataagtacatacatatgcagagcatatactattatattgatcacggtgtcttggtaccatccagcaagtcctctgctcccagccagatatattgaatacacggttgaggaaacatggtaatgttttgttattttccgtgactatttctg

SEQ ID NO: 64444 - DNA, 408 bp, Oryza sativa
  unsure (1)..(408): unsure at all n locations
tgaggcaaataatgaggtgaaataagatcgnggctctatttcccaatcattttagaattatccatgcctccaacaatatatttttatgcttatgtgaagaacacaatcaggtgtaagtgtgtattatgtacagagtatatggagttatactctcgctgaaaaacacatatatgtaccattaccatggaatggacatgcttgtgagaagagggagatgttgagcattttgatgactttgcccgatattacttatgaacttcaaaagtggattttctcaataatgcaataaacaaactcttttttttttctgaggcctggagtcctggacccatattgatgatttaaacaagatttcacctggtttttcccgtcgatttctccagtattgcagtttcgaataattagcat

SEQ ID NO: 64445 - DNA, 418 bp, Oryza sativa
  unsure (1)..(418): unsure at all n locations
agctttagaacattctgaagtgtgactcttgttgttattttaatnatnaccncaagcaatatagcattggatccatgatgttgtggctacactgctagggtggcggtgatcatcttatcttatgcttgtaatttccttttaccatttgttcttacttgctgccatccagaatgaggacatgcctcactgcttaagggtgatcgcttggctgacttggccagttataatattttttacacccgatgaattatatatttctgttgaacaatctggaaaactgaattagccgaataaaaaatagaaacagaacctgattaactgaataatactttggtcaattcggtccatttattcagctctactagaacaaactgatagtaattacacactgtccactcatgtaaaataaaatgcccac

SEQ ID NO: 64446 - DNA, 429 bp, Oryza sativa
agcttggcatacaattgatgtttccgcatctttcccaacaccaaacggagatggtgctgatggtcttcctctgattgtgagtatatcagaatgtcatcgatgaaaaccacaacgaacttatccaagtattccatgaacactttgttcattaagttcatgaagaacgcaggagcattggttaagccgaacgacatcaccgtgaattcatacagtccatatcgcgtagtgaatgcggtcttcggaatatcttcttcacgaatacgtaattggtgatatccggaacgaagatcaatcttggagaatacagtggcacctttaagctgatcgaacagatcatcgatccggggaagagggtacttgtttatgatggtgacttcattgagagctctgtagtcgacgcacatcctcttcgtcttgtctttcttctct

SEQ ID NO: 64447 - DNA, 439 bp, Oryza sativa
  unsure (1)..(439): unsure at all n locations
tgtacgttcactcaagtgcaatgtattcgctcctcattattctgtgtgttcacttctatatgaagaagtctttgcagctatatttaatatttaagctgggcatcagcctctgtttcatatttctgtacaaatttcctgcaaaatcactaacagtgaatcatatagttcaagttattaatgtangtactgttttgagtggtatattttcctgagcgacttcatattgcattcatagcgcacaaggacagactctattttcttccatgtatttattgtaaaaaaacaaggcgtaatttgtagaaataatacataattgatgtgctttacattcatttattgaatgggtngcagatacggaatgagaaagctcgatgatgcctgagcaacatgaggaaaaaacctcgggttcttttactaaaaagttcangtgtggatctat

SEQ ID NO: 64448 - DNA, 421 bp, Oryza sativa
  unsure (1)..(421): unsure at all n locations
agcttgataagtccctttcgtgtatattttacctgccaaaagcatttgtgagataatactttaaaaaggataaatggtaagtatttatgtttacttactgtgccatcatctccagtgtcaatagcatcaacgccagtctcctcaattatgctttttatcgtctttccaccagaaccaattattaaattcaccttgtttggcttgaccttgaagaacaatgtcattcaacatttttagaacactacagttgtaagaaaagacgcatcataattcataagcacttatgaagaaaagacaaaccttcatgacatggattaagggagcgtatggagagagtacttttgctggtggaggtgaacattntgacatttcatcttatgaagaacatgaaatgcaaagtcagatgaaagacatgaaaata

SEQ ID NO: 64449 - DNA, 463 bp, Oryza sativa
  unsure (1)..(463): unsure at all n locations
cctataaaactacgctgntatgatcgtgtacgtgcactcatggccaccccatacagcatcatgaggatctgcgctgtggtaaccatcanggtggaagtaacgtcgcattggtggaccggtatgtttccatgatggatccaggtttctccaatattctggtgctgcctgcacgggcaaaggaaacagaaattatgaacatcatgattaatcatataattacaaaaagtgtagaatggttatattttggtattactcatctggagtataattgtacatttcatttgcaaagcagatttagttcttactaaaaaaactaaaacaaatgtgttggcttattaagccttttttctggtaatgcctaacaatatatcgtcaaattacaaattttgagcagataactgcatgctgcacatggtggagagttgaattntaaattatggccatgatacatcacagaatttat

SEQ ID NO: 64450 - DNA, 423 bp, Oryza sativa
  unsure (1)..(423): unsure at all n locations
agcttgtgtttcttgtactgccacacgtattgtggaaaccctaactttcatggaacattggagccaatgccacttgttcgtccacggtgttcttcgtttcccaacgctttcgtgaggatgccatcctcgcgtctttgtgagcagacctcttgggagacctgtctctcagcattcagttcgacctgtgtatagttaggacgcattagacgaagaatacgatacaacataatgaaccttattctatgtgttcaacttacgattntctggtacaccgcttgatcttcgggatttgagaacgaaagagttccgtcactattcttcttcccccttacccttgcccagttccttgcccgctggaacgggatatcagcaagcactagcggggtgttagattctgctgcagcttcatccttcttgtcccat

SEQ ID NO: 64451 - DNA, 441 bp, Oryza sativa
  unsure (1)..(441): unsure at all n locations
tgacatccttgtacgtacgcaccanaacatcggcctcctaacctacccggttgaattaattttccatacaatgtgctatcttgtggctactagtgctagcaggcagatgacgacaaggtgtacacgtgattcctagttgcagatcttgtgctacctttttctttttgttttcttcttcgatatgggatgagtttggtttgttggattttggttgatccagacttgtttggtttgctatacttgagtaggagactggcttgaacagtttctaagggagcacttggcctaagaaaaaaaatggattccatttgtggtgagctatagctagaggccctagcccaccaaactaatgacatgataagtgattactccctccgtcctagaatatagcaatctaggatcggatgggacgcatcatagtaatacgaatctggacagggg

SEQ ID NO: 64452 - DNA, 422 bp, Oryza sativa
ttaagtcacctgcggcatgcaagcttctcgggttcttggtctctacccgaggcatttatgccaaccccgagaagatacaagctatagaacggatgcgcccccccagcaagcttagggatgtgcaatgcgtcaccggttgcatggccgccctaagtcggttcatatcgaggctgggagagaaggcgctacccttatttaagctcctcaaacgctccgggctgtttacctggacggaggaagctgaacgtgccctcactcagttgaaggcgtatcttagctctcccccagttttggtcgccccggagccaggtgaacccttgctactctacttagcggcgaccccgcaggtagttagtgcggcgttagttgtggagcgcgatgaggacaaccctcattccgcgcattcccaccctgtgttggct

SEQ ID NO: 64453 - DNA, 458 bp, Oryza sativa
  unsure (1)..(458): unsure at all n locations
cttattcccttgatcaaagggttcgaacactgcttcatacgttggtttcaaattnttttttctcccacgctgcatgaatcttanagcacatctgatggtccaaattcgaatgttttgaaagaaaaaataaattattagataatatttttattttagtgtacatattcaggtataaaattatttacaatatcttctattcataacctaaagtccataacaaatcagtctataagtttggaattgatatttccaagtatataacgtgttatgggtgctgttccacttaacgtttcttttaggagagctttatgaggtcagaatctaacttattggcacgaattatgtgcttctattgttcatatccagttgaataactcttctgattgttttagatggagttatcatcagaatggtcaagtttcttgtaggtcaatgtacttagctctaattaataatgg

SEQ ID NO: 64454 - DNA, 389 bp, Oryza sativa
  unsure (1)..(389): unsure at all n locations
agcttctcgtgctccggctgccctccccttttctatccctctccaacgcttgcactgactgcaggaagtaaaaccagcataaacatggcaattatgatgagtttattatctactacgagtaagaatataacgtgaataaaaatgctgctgtgattaacacctctgcttcccagtcagttttgcagaccatgtacatgaggatggccgtctgcattgccgtcccacacaacatgccagcccaaatgccctgcaagttccgtagaattttcgaaaacgaaaattaaatatatatgctcgactgcatgattcatttatgtagtagtagtgagacgattntgaactgaactgaattttaccttcacaccccatctgaagaggtagccaaatat

SEQ ID NO: 64455 - DNA, 372 bp, Oryza sativa
gcttattgctgcacgaggtgaacttcgcagaccatgttcatgcatagtacagttcatccactctctttaacatgcttcctggatattactgactcgtctgtttgttgcttctgtaaatatattacacaaaggcgcaccggagtggcttcgtcatcttcatgagattgccatggttatttttacagaataacacctgtacagaccaatagcgaggctagccttacctcgagtcgtgttgggttaaatcggaaaagctaagctttgaaagcctttgatgtaaataaaggatggcctctggacataaaaaggagagagtgtgcttgctcttaacaaagaagctgtatatttgtacgtttttcccctcttcacgcc

SEQ ID NO: 64456 - DNA, 389 bp, Oryza sativa
  unsure (1)..(389): unsure at all n locations
tcaagctgccttcgaatgtgtgagcgtgccatttgatttgatcatgtnatcaacaagaaatagagacaaagaattcttggttaaatctattaatgatagccgatcggctatgtgccgatgacatatcatttatctttgagccgatgtcatttatgaatcgatcggcggttataaatagatagtaaggaactaaatctattcgatcggctgtagatattaacgatatatagctcttatattaatatatacttaaatcaagtgattaagatagatcggtcaccatgccgagacagtataaatcacttagatcgaaatatatattaataacacgcatatatatgtttatagcatagccgatcagatagatctagcatgtatcggctaatact

SEQ ID NO: 64457 - DNA, 193 bp, Oryza sativa
tgtgaatttgtcttgtattagcaaccatctgccagaagtgcgtattcatgcatcagcgcatatagacatgacagaaccgcctttaccattgatcacactcgaagacaatgctcctacgtaatatgtagagccatccaagaaacttttggcgctgatctctgtgccgcgaccgcgctgaccgtgagaatacaac

SEQ ID NO: 64458 - DNA, 420 bp, Oryza sativa
  unsure (1)..(420): unsure at all n locations
agcttagcctattctacaatgtctcaattgggttatatgatgttagctctaggtataggttcttatcaagctgctttattccatttgatcactcatgcttattcgaaagctttattattcttgggatccggatctgttattcattcaatggaacctcttgttggatattcaccaaataaaagtcagaatatggttcttatgggtggtttaagaaaatacattccaattacaagaacttgttttttatggggtaccctttctctttgtggtattccacctcttgcttgcttctggtccaaagatgaaatccttagtaatagttggttatattcacccttttttggaataatagcttcttttactgcangattaactgcgttttatatgtttcggatatatttacttacttttgatgggtat

SEQ ID NO: 64459 - DNA, 376 bp, Oryza sativa
tatcattgttgaataatttgggaaacgatttgcattcttctattttcattggatcttgaataccaaaacctgtccaatttcatatattgcagaactttttttctgattacattggtagagaaaggtatgcacattggtgcatatgggatccttgtgaactgttatgtgattgtgtacctatgaacatgtgcaatgtgataagtgggtttgctttgtgtgtgtacctttggaggctgagatgggtgcataatgaagtcaggctgaccatattgggtgctatttgttctcttttatcagcacagctcagaggacttagtcctacatgctattcatgggataataactactccctgactatgtaataattatgctcata

SEQ ID NO: 64460 - DNA, 435 bp, Oryza sativa
  unsure (1)..(435): unsure at all n locations
agcttggggggattatagcgggatgttgttttctctacgcatgtaacgtggcgcggtgcgaccggacgggggagctgtatccatcctagttcgggacacgtggagcctgcacactggttgcaacctcgttgctggcccactgctgtgttgttgccctcagggaagaaaatttggtaagattggagtcctacacttatccgaaagacactgacagcagaccgagagcatctttaacagtctctttatctcactnttaaattaaattttagcaactttaaataaaaaaaaaaaagggacaattgcaaatttaccactatnttgaatcattattgtaaaactaccactagaaaaattgcaaaaataccattagaactgtcattcgagtagcatccttgcaatattaaaaaaaccgatggcatatttacaaatgcccat

SEQ ID NO: 64461 - DNA, 452 bp, Oryza sativa
  unsure (1)..(452): unsure at all n locations
tgcaatatgcattgagagaaagaaatcattgagtctctataaggtactgatcatgcacatgaagatggtatttcaaatagcgtggtaatatatcatcaatctagtatgtacattcaaattcaaaatctaaatgatttgatgctatttttttaattaagaacaggcacaaaataagactcgtaaaggatcagcaggtgtcgtcccctcaatgatgcttctgaatacatttcaagaaatgcatgcaccatatactcaggttctttntggtctatttctacttcagatttaatatggagtgcacacacaccccgcttattttcacatcagtttcttaggatgcacttttgatgactgaagatatgcatgaagaaaggctccatgctgctgaaacttttggcaatgctgttgtaagctcttgaacttgcagttaaaatgcgttaatggtcaacatg

SEQ ID NO: 64462 - DNA, 394 bp, Oryza sativa
  unsure (1)..(394): unsure at all n locations
agcttagagcctctggcgctcctatatattttcatttctcatcaccaagngagtaaacttgaacgccatctgagctgtcaactttatgacggacgcgaggctcatgactactaaccaagaagtgtgtaaccttgcattcttatgtcaatgggtgaaatccaaagctgtagaacgagaaaggatcgtccgtcaaattctttgccgggatagcaagaggcaagcattcaccagttgcaaagtttgctatcttgattggatgagagtgagtgtataaccaaacaagcccattggaggaaccacacaggaaatcatctggcccaatcactggcacattccatattgactgcgaccacgcttcattgatgaggatagattcgctcgggtacagcccaca

SEQ ID NO: 64463 - DNA, 447 bp, Oryza sativa
tgacagcttcctcaaatgtcatgtcctcgcgccattcagtacgaagtattgggattgccatatggttcccaaacccagtggcaatgtggttttcctcaaagtgtgtaccaatcatgttaacctggagaagcaagaaaatataaataagcagttgataatctgacagtagttcaatggaaagatactattcttttggctaaagagtataccatgccaagatatttctcttcaccctttggaccctttttcaccccaccaattacaagggagttccagaggggatcaaacttgttgcgcctgttgtacatcactctcgtcaggtagctatggacctccttgggacccaaggagtttccatcatcccacatatgatcggacaggctgaaaggtggatggacaaacatatcacatcgattggtcataataatgagaaggaaaacaagggtc

SEQ ID NO: 64464 - DNA, 391 bp, Oryza sativa
  unsure (1)..(391): unsure at all n locations
agctntcaacattccaataatattattgttatgttaaattaccagttttaaacaagctcatgacctcaactgtcggtaaatcaacaaacatccgatggcatgactgcccagtaaaccagcttgacagacaaaagttgctgaaccagaagggctgtgttgtttggatcactggcctaagtggttcaggtatgcatctaagaactctgaaaattctcaccggccttcattgtcatatctgaaaactctgaacctaagatatctgaagaaacttcaaaatcaacttcaggaaaaagcacccttgcatgtgcactgagccgtgagctgcactcaagagggcatctgacctatgttcttgacggcgacaatctccggcacgggctgaacaaagatc

SEQ ID NO: 64465 - DNA, 344 bp, Oryza sativa
tctcgccgatcagtgcgatgggttccgtcttcggcatttacgaactcgtctttccacccgggcagacggttccggtcggcagcctcgacttcatcaccaacaacttcggcaagaattctctcctcgactcggaatcagaccagtcgggagagaaccggctttccgtcccggttggattcccgaacgcggctgatagccacttcaagaccatctcaaccgagtcggcttcaaaccactcggccgagatcgcatcttctccaacgataccagatcaagatgatggggcttacccaccggtcctgatgaagctccccgacgatttagcgggcggtctcaccacgaca

SEQ ID NO: 64466 - DNA, 399 bp, Oryza sativa
  unsure (1)..(399): unsure at all n locations
agcttgcattctggtagaaatggctagctactgattaattaatgaattgaagtgaaatccaccggtcgatcgatcgagccatgtgtcaatgtaccaaaagggtcgatccatccaaccaccggccggttaagaccaagatgagagtttatctggatgatccgggagtaacatgggattatatcagctagtaacatgtacattagttgctagtatcatggcctgctcttacttactgtagccttgtgactaatgagcaagacaacaagtagtgataacaattcatcaggattagtgagataattaattcactagtatgcctgagtatccttgtgataattaactcacttgatcgcctgttantgagataagcgacaggctaactgcttggaatttcctctg

SEQ ID NO: 64467 - DNA, 449 bp, Oryza sativa
ttagacaaagtaattgtatgtgctatctggggtgaaatgaggggaagggtaaactttttcacgtgctgataaattaacagtgttaacatgcatatagtagtcataatctcataatctgaccacaccgatcatacttgtaaaatcacgctgttgtttttcttttatcttgcaaaatcgatcacgttgttatttgcaaccgtacgtgaatcatagcattgaattctctgatctgaatttcatcggccggctgcgagcctgtgagaacacgcctttgttcttgttcttgatgacttgatcgatgcatatatgtcaaagaaaccatgagggcagtcccaacctatagtatccataagtagtgtctatgaagccatcttaataagacatcacgatagaaactacactctacaacccatggtttcttaaagtgggccattaataaatacatcatc

SEQ ID NO: 64468 - DNA, 438 bp, Oryza sativa
agcttataaggaggaacttggattgatccatgactagccatccgataagaccacaatgcttcggctaaacgagtatgccattgccgaggataatcagaaatcttccttttaatcaacttgatcaaacttttgttagatgcctcggcttgcccattaacttgtgcataatacggtgaagaattcaacaactttatacccatactatcggcaaactgaacaaacttatcagacacaaagattgaaccttgatcaatcgtaatagtctgaggagtaccaaatcggtagattatatgttcttggacaaactgtattgcatccccagaatcagccttcttcaaaggaatcgcctctacccatttgatgaaataatcagttgccaccaatataaacttatgtcctttactcgatggtggagtaatcatgccgatcatatcaatt

SEQ ID NO: 64469 - DNA, 455 bp, Oryza sativa
  unsure (1)..(455): unsure at all n locations
tagcaagtgtgagttctggttgcccgaagtcaaaatcttgtggcatgtgatatctgctaagggagttgctggggaccccgaaacagtgaccgccgtcaccgattggaagcaacccaagacagttactcaagtccgcagtttcttatgtttggcaggatactaccggagattcatcgagaacttctccaaaatcgctcgacccatgacacagttgttgaagaaagaagagaaatttgtgtggagcccgcaatgcgagaaggcgttccagactctcaaagaaaagctgtgttcctcgccggtgttaatcttgccggatactcgcaaggatttcatggtgtactgtgatgcttcacgccaaggatattggtgcgtgctcatgcaggatgggcatgtggtggcctatgcctcacgcccagtacnggctcatgaaggccactattctacccatgaattgg

SEQ ID NO: 64470 - DNA, 438 bp, Oryza sativa
  unsure (1)..(438): unsure at all n locations
agctnggaatctaaagacctgcggcgagtggtgttttccacatcanacacagattgtcaaatcaaatcgtgcctatgtgtgtggctttcacattattacaaactcttgatcactactatcaagtgatatactatttagaacccgctttaccgaactatcaacactattattatattcttatatacacataaacaaactaccaccccaggcataaccaacatatccatttacagtgactctgaaagcatttcgagcctttgacaaacttcttcctggaaaggacatataaaccaacatcttagcagtaggtcggaagcccagctagttggaacaaaaaataaggtttgcaccaanactggaactaatatccaattcccaacatgcaagtattgactaaactagtgtgatagacaatctaaaatagccttcatcatgata

SEQ ID NO: 64471 - DNA, 428 bp, Oryza sativa
tagctatacaaatcatatcctaactatagtagggtggaaatatgtgtcttcttaagcccgacggagaggatggggcgaatactgatacgtgttttgcagtggttctcagctctgataagcataagcgatatgagtaagctagcacttgattgcaccatacacttacagtggaaccaaatacaagctgtactacaatatattgacaacttgctctactgaaattatcctgagcacgtgggatatgctgactgccgatttggaataggtacgaaacaatagatggatactatgacgtggtttatggaacctatgaacctacatatttaagctggtatttttaatgtaatgcttttagcattaatccctgcatacggcgagataaagtttaacattatacattaatgtactaggttaacacatttctgcat

SEQ ID NO: 64472 - DNA, 378 bp, Oryza sativa
  unsure (1)..(378): unsure at all n locations
ccctgagaacgggatcctttgtggagaggaagaggtttcacatttctgtgactgttgggttggctgagttataccggctgcgttgttttggaaggggtgggaacccctcctttacacgcaaaatgaagcaacaaatgggntatagtggtgctaccgccgcggctaaatttgagccgtgtttatgagacacacttcgggatgtgggagtagtgtgcgtcttttgtgtaataaaaaatgatacctccataaaaaaataaattaactctctacgttaatgtctagatttacgaccaaagttgatttatcttgacacagagggagtatattatattctaacaacaatgagaaaaccactatatnttgaaatacgaacaaatc

SEQ ID NO: 64473 - DNA, 457 bp, Oryza sativa
tctacaaagtcaatctaacctcgtaacccagagatcatttaatacagttaaatggaatagctcctatgggcaataggagagaaatcaaggtttaaaattatttccccaaaaaaaagtgaatgtgataatttttagaagaactctacaactcgtacaacatgcaagaacaaggttggaacttgacattgaagaatcgtcagctccatatcggttatgtatacatgaaaaacattctaacagcagaagccttgctgggatagtggaccttattttcatgggcattattcatcatgataacaaatctgatcagctaaaatattcaaaattgaaaaaaaaaatattttcttgtcttccctaacctcattgttagttttaggcaaatgaagtattgacaatgtaaatcttcctactcaaaggaacccttatagttctctgtatgcgttgttacaatatgtgt

SEQ ID NO: 64474 - DNA, 425 bp, Oryza sativa
agcttcttgccgatatccatgaaggcgaatgcgtttcccactccgcctcgcgcaccttggttggcaaagcctttctactaagtttctattggccgacagctctcaatgatgcggtcgacctgctccggcgatgcagagcgtgtcaattccacgccaagcaaatccatcagccggcccaagccctgcagatcataccactatcatggccatttgctgtctgggggctcgatatcctgggaccgtttaggcggaccccgggcgggtttgagtatctgtatgtcgcgattgacaagttcactaattggcccgaggcttatccggtcagcaagatcgataagcactccgcacttaaattcattaacggcatcacggcccgggttggagtgcctaaccgtattattacagataatggcacccaatcacta

SEQ ID NO: 64475 - DNA, 454 bp, Oryza sativa
tcgcaggcatgaataaaattggcgatatgcactatggagtttgtattcatatgatgcaagctaatcccgtagaagttcagaattccccgaaagaatcttgaggttggaagggagaaaccgccatagaagaaatgagcaaaaaccacgatttcgtgtgtatcgggggtcgggaatgcttcgccaaatgctggtcgccacccgatgatctccttcgctgggagaacgccgtgcgccaccatctccttcagattatcttcagtcacatcggagggcgcccactgactctcgaagctttctttttcttctgccatgaatgtgaactggagggtttgatttggtccgagatatggctggagaggagtggggaatctgagcggtggaagcggtgagaaatttcgtgaagtttttgaggatggattggggcggattgatgaaccctagctccatcggcgcg

SEQ ID NO: 64476 - DNA, 425 bp, Oryza sativa
agcttgcacatggagtcttactgtttattttacccaaaacatggggtctcatgaaacaaatcacaaaacctgatgttttaaatatgcatgccccaaaacctagggttttgtgaaattcactcaaattttttcaaggcgtggttgtttattattcgctgccaaattctttaagtgtttgagcttatagtgttctcttgcaaaagtttgtagcaaaactattttttgcagcaaaccaaataaatgttaatccctaataatattttactcactccatctcaaaatataacaacctaattttaggatgaagcctattaagattcatagtacttggtgtataattgagtgctaagctgctatatatttaaacggagtgagtaactatcatatttcgagtttacgttgcaaacataattaccatattgccc

SEQ ID NO: 64477 - DNA, 121 bp, Oryza sativa
ctccgcagcacacaatgcctgcggacagcagcaaaccacaaccggcaagaaaaacccctgtctgaccggcagcagaagccaaagccctccggcggctcgcggagaacgcattggcgcacca

SEQ ID NO: 64478 - DNA, 434 bp, Oryza sativa
ggccgttcgccttgggaacgacgaccgggttcgtcattactccggatggatgacttctcggatgaatccggcctccagaagtcgcgccacctcctcgcggatgaaagcttgacgttccggggcctgccgccgcactttctgccggaccggccttgcgcccggccgtacggcgagacggtgcttaatcacctccctggggaccccgggcatgtccgccggtctccaggcgaagacgtcggcgtttgcccgtaggaaggagacgagcgcgtcttcctatttgtcgtccagaagaccaccgattcgtgtggtcttggacgggccatcgcccaaggcaacctgcttgatcgggacctcgtcgcacgtgatcatccgctgcctctgggcggctgggacggaggtgctgagcctctcgtcaccacccgcgggcttggatg

SEQ ID NO: 64479 - DNA, 65 bp, Oryza sativa
atcccttcacctcttcaaatgcatattctagttacaaaacctggcataagggggcattctaggct

SEQ ID NO: 64480 - DNA, 427 bp, Oryza sativa
agctttgagactgttctggtttgtatttttgtttgctatcgcttgatcagagcaatcaattatatgcttgtctgatggtggtaacaagtaaccttcatgtattgatgcttgacgtcaccataggagttattgaatattatctgatggggatattgaaacaatgattcaatgccctctccattattatacaccaacttgtggtccttccgtcctttaattagcttcggacatggccacatgcacatatcgatcgctgcacagtcctcatcagtcatcaggtaggagtataatagttgttgcatctgctaaaaaatggtaaggctccatttaaagtcgaggaattttcgagaatttctacaggagttgaacaagtcctaaataagcacggtgaatgacgagacagactttgttttaagccaagactggt

SEQ ID NO: 64481 - DNA, 411 bp, Oryza sativa
ggacctataaaactcagctgcgctcagcttcagggcctgagctacgactacgtcgaggaggacttcaagaacaagagcgatgtcctcctcagctccaacccggtacacaagaaggtccccgtgctcatccacaaaggcaagcccatctgcgagtcgcaggtcatcgtgcagtacatcgacgaggtgttccccgacgccggcgtcaccctcctccccgccgatccccacgatcgcgccgtcgctcgcttctgggctgcctacattgacgaaaaggttcgtcagatcaccatgcacttttattgattacttgatttctctcttatgtttgtgaattaagctgattgatcgatctgcgtgtgttctgtgcgttgcagctgttcagtgcgtggattctggtgttcagaagcaaga

SEQ ID NO: 64482 - DNA, 431 bp, Oryza sativa
  unsure (1)..(431): unsure at all n locations
agcttaatctcaactttgtccaaaacatcttatattatggaatcggagggaatactgagttagaaactcattacattaaaaaatggaggtgattttcaaactaagtacccccgccatcctaaaatataaggccgaactaccactaacacaaataattaaaaaacattagcaccttctcatttggattactataataaacacaatgcatgcacctaatgggattatagatctcgaggatagaggatntaaaaaaatgaatttagaggtgagggaggtgctagttaattaattacatacatgcatgctttgtatgatgaatcatcgaaaanaaagtaattgtgtgttgtgttttgggatagaaggagtattatagtgttataaatttgttaagttattcttaaactgaatatatatcgcactagattataagg

SEQ ID NO: 64483 - DNA, 431 bp, Oryza sativa
tcgccctgagacagaatggttttggagaacacatcgtttgccatacattgtcaaatgaggtaactactacacaacatgatatttaagacttctcaagcaaaggatgtgatatataagaagtcaactcttgaatcctgaatgtgccaaaatgttatgagtgctttgcaatggtcgttaagaagtgacaacagtgagctaaaacctattttggccagttttgaataaaaaaagttaaaactgtttttctcttaaataaacagacagtaaacatgttgattaagaaaaaaaaagccagaaggaatgccaaaagagtgggatgaccattgcttaacattcaaatgggaactaaacggcaatgacaaagtcaaaacagacacctctttcttgtccactagtggagagaatatttaatggtcagtaagatcgatcgc

SEQ ID NO: 64484 - DNA, 432 bp, Oryza sativa
agcttcggaagctaaaatatctcttctctggtaaaatcggaattgggggtcagcaaagtatagcagagagaagtctagagctttgtactggagcatgctgcgcatgctacgtacctcgtctcgtgggagacttcaacaggcgtgatgcttgcaactacaattgctgcatccagccccgtgttctcatgatggacttagataatgatttccctatgctaccacgagggagcaggaaactaaaaagcctgcatacactccgacacgtgcacttggcgtggggaaacactgttatacaagagatagagagactcacccagctgcgtaagttaggcgtggtgggcatcaacaagaagaatggtccatccttctattcagccatctccaagctcagccagctagagtcattgtcggtgtgtgcacgttggtgtcaag

SEQ ID NO: 64485 - DNA, 458 bp, Oryza sativa
tggaaggttttcaacttcaagaaaatctggtgcactcatctaaccaagcatttggatttgcagccaatagatcacagtttggtatgcaatatagtacttcaattggggctgcagccaacacttcttctcatggatcagcttctccatgtcatacaagacataatgagaaagaagtagttgaggttgaagaggcaagtgatagcagtgaagaaggaagaagagggacacgcatcaattggactgaagatgacaatatacgactaatgagttcttggttgaacaattcagttgatcccatcaaaggcaatgacaagaaatcagaacaatattggaaggctgtagctagagagttcaacagcaatatgcctagcaatgggaacaaaaggaaccccaagcaatgcagaacacattgtgacaatgtcaagagagatgtcactaagttctgtggagtttattct

SEQ ID NO: 64486 - DNA, 359 bp, Oryza sativa
  unsure (1)..(359): unsure at all n locations
ccatgaagcacaacaagcgttagcatagcagtcaccctaaacattgatattcttctttgcgtatacaatcgtacctgtggccagaagtctccatactgtaaccagactaccgtatctatcaccaaacagaagagcaggtaatacctaagattcggccacaatagactcttgtattacctcagggaccgtttgngtgccaaaagaatgctatcaaacttcggacatgcttactttgacagtcatcgatggttcaccatacaagatcacttgggcagttgatatcatggagcttgctactggaccacggctcgtgcagcaagaacacatcattctcactaatttgaagctccttcccctct

SEQ ID NO: 64487 - DNA, 417 bp, Oryza sativa
  unsure (1)..(417): unsure at all n locations
tggcagcgggcgacagcgggaggagcggngccccgaccgcccccgccgacaaggaggaggtggtcggagcggaggcagactgcggccgtccccgcgctctccctgcggcggcgtctctccaccgctcggatccggtggcggcgcccctctccggccctcccccgcatggatccagtggcggcgcccctctcccgccctcccctgtgcgacaacaacgacgacggcaacggcgagatgcgacagcaactagggtttcgattttttttcggatttttattttcgcgtgcgggcaacataagcacccgcacgcgaaaatccaattttcgtgtgcgggtgcatcacctgcacaaagaaacctgatttttgcagacactttcgggcaaatgtgcgccacctccgcacgtaaaaattattttt

SEQ ID NO: 64488 - DNA, 419 bp, Oryza sativa
agcttggtccgaggcgtgaagtctctatatatcttgaacaacaaatgcatatactccctccatcctaaaatgtttgacgccgctgatttttttttaaattattgaccgttcgttttattcaaaaaatttaagtaattattaattcttttattatcatttgatttattgttaaatatacttttacgtatacatatagttttacacatttcagaaaagtttttgaataaaacgaacggtcaaatatgtttaaaaaagttaacggcgtcaaacatttaggaaatgagggaatatatatcttaaagacgaacagccagtgacaggccggcctgtcacactcaagctggtactaagaatatatgatgggtagtgaactggtccatcgtgcttgtagattctgcgtgtagtataaatgtgtaatg

SEQ ID NO: 64489 - DNA, 422 bp, Oryza sativa
  unsure (1)..(422): unsure at all n locations
cctctgatgacggcaacaatcttgagcgtcgtcacgacattctcattctccacacacgcgtccataatagaatcttggtccgatttcccaaacaagcaacggcgacgtgagcgtccccatggaattgatgcttaggagaatcttcctcctatgacagtggccattattaggaacttagtggcatcttggaccatcatgtggctagggttcaccttttcgtatcggaaattatacccgcttatcaacggtttatagaaacccgataaaaaccaacaactctcggtcaacacggtatgaaaaccagctaaaactgaccggttntgaaaacataacagtgtgcacgtgtattccgtgtaacagacataacaaaatacgtctaatgtctagtttcacgtaaaaccgttttgatctatcttcttgat

SEQ ID NO: 64490 - DNA, 438 bp, Oryza sativa
  unsure (1)..(438): unsure at all n locations
agctntccccagccccttttcatcaatggactcctgacgtctacgaaggagtgtggttcgttcgacaaattcctacctctatatctatctctgaggtgtttgggttttgcaaaactccatagatatgcagaagagaaatgctatccccactccgaccaagacagaacttttaccaaaagtttattgtgatctttttgttcaaataacaattaaggtgaagcagggtcaggaacaacgaatctctttatgataaacagatccattttgcaagctcgttattacgggtagttcctacaaagaatcggactaatgacgtatacaatgcttgaattatcgacgtagatgctacatagtgggttctcatccttcagagactacgagtgtaataggagcatccgttgacaaaaggatcaccctaagatgatcatctcatggcta

SEQ ID NO: 64491 - DNA, 436 bp, Oryza sativa
agcttgagcataaggtttagccaatggattatatcttatgcaggccctaattctcagttaaggaatgggtccatctacagttagcaagggcacacactatcacaagcagatatgatgcgtagcactaaactaatacatcgattgcatatgtgtacatgagatgagttagtgtttgcacctgaacatcattgcaagtaaatcggaagtgtattagtgctaggaatcaaaactagccccattacagatttttgcccgttagcagcatgtaaagttaaaacgtaatttagtcaagatcaaatggtgaaaagaacacaaactggatcttgacgtggaaagactatgagaacctacctccttgaggactagtgaatcttaaagaccacgaaacaacttctgttcaagcttttttgttttctcactgtccgcaagctccaat

SEQ ID NO: 64492 - DNA, 371 bp, Oryza sativa
ctgactattattcatgggcgggggcctgtagttcattgatgggggaacttaatcaagtccaatttctcgttcaagagtgctcctgaactccctttgaacatcctatatgcggaaaaaagagacacgttacatatgtatcaaggaatcacatcagacaagtcacaaaccaacctgtagctctctaatggttggctggaaagcacgcaaagtcttccccacattcctggctacctgcatacaagccagccagtgagacctaacagttccgaatgatagaaaggttggcaggaaatacatgctcattttcattcaccagtaaataaagccgaacaacatcatgacatatttaaagtgaagaaactacaacataa

SEQ ID NO: 64493 - DNA, 408 bp, Oryza sativa
  unsure (1)..(408): unsure at all n locations
agcttgaccagtcttgcttaatttgcaatgaatttctgtcctggggattctcatgtacatcttgaattgagcccggtagtttgtcaatgcaagacattaagaagtcgtaaatttatgtgcaagtggggaggtcaacgctttcatctacttcttccgttccataatataagggattctgagattttacttgcaacgtttgaccactcgtcttattcaaatttttttgaaattattatttattttatttgtgacttactttattatgtatagtactttaaacacaacttttcgttttttatatttaattttttntaataagacgagtggttaaacgttgcaagcaaaaactcaaaatcatgcatatatgctcccgtatatagtcccatgcatgcatgcctttttttatac

SEQ ID NO: 64494 - DNA, 465 bp, Oryza sativa
  unsure (1)..(465): unsure at all n locations
tgaggtggacagcatctcagcggggtttgatgcccccatatgtagcctcctcgcttccaccctctacaggttgaggttcacttatgatttgtggatgaaaaatttcacaaaagagcaggagcaggcacttcagctcctcacctccctccgaaatctagaattctatgagtgccaccgtctgcagtcccttcccgaagggttgcatctcctttcttctatctgcacattaggcatcgtcggatgtcctgaaatcagatcgttgcccgaggagggcatcccagcttcactgaaaaaactactagcaatgcgttgcagcgtcgacctgaaggatcaactcaagagattagaagaatcaaaccaagaattacaagtattctacatctgatcacccaaggtaagacgtgatgtcccaactccttttgtttttactctttcatctgcagntgttcatatttaaactctttt

SEQ ID NO: 64495 - DNA, 365 bp, Oryza sativa
gcacctgcttatccaaaatatttatggtaaataaccctcactgagagtcgttaaaaaaaccagctcgctagatggccgaacacgaaaacaaagaacacctctttcaattattctatcacaacaaacccttagcctgcttagtccaaaaagtttcacagggcaatcgagaccaatgcaccgaatgttacttattgctaagtggactcagcgcttgcaagatactcaatctctgcaacacatgttctacaacacatactatctatcgccaactacgctcacccactaataagcgtcgctacgctcgcactttggcaacgcatgcttaatgtgtcgccaagaatgtattgctagaggggggtacctgc

SEQ ID NO: 64496 - DNA, 433 bp, Oryza sativa
agcttaactaccccaaatatgaccgctctactcatagaccaacgactgttacaaatagaaccagttggaaaagaagtatgaaatatgtcactaaaccaatcaaacacacatgattcagctgccgggtactggcagtacttaggctccagttggccagtatatagagtatgacttaagaacctacggggtacatcggatgtaatggaacaagtgataagcaggatccatcctcctacgatcaaattacccaatctctacagatagcgagatgtagaacgaaataaatgggaaaaaagttattgccgacactgattcatctcatcatagtttcgatcaaacacttgcaaacaagcacgagtgccccaatgcagccgaattacacggaggagaagggggcgagagtgacaattccagtgtaccagcgacgctacca

SEQ ID NO: 64497 - DNA, 448 bp, Oryza sativa
  unsure (1)..(448): unsure at all n locations
tggatgatgacaaacttgtgaggaataccaagctcacaagtcacaggtcaaaccggggagtgacgcgatctccaactccaacccgtcgtcctctcgcgccggcaccgtgaaggcgtgaagcgagggcagcgggtgtgtggactgtggagtgggaagtgtgtggtggtttctcgtcgcgtcgcgctcgatcggaggctgtgcagcggggttgcacgccgtggacgatgatacttttggttgggcctattgatgatattgtcgagagaattggcccgtggagagcaggacggtgttcggaccgcggttctcatggcccatatgcattatgatgacatcgtgtactatactactgctgttgactttgatggtgactttttgtattgacttccaccgaggaaacatgtactatccccgtctcaatcaagccaccactactnatttttcattg

SEQ ID NO: 64498 - DNA, 419 bp, Oryza sativa
agcttgacattacggaccactggtgtcttgtactcaggggtaccgccccgggtggaccactcggtcaggatgatccgagcggtcaaacttgattgcaatctctgaccaacgaagatactggggcgtgtcgggctgaacagcattgatctcccgttcagtcaacttctgcttccgtttagactcataagccagggggccgccgaagatatggttgagctccttgcggtgatcttgaaaacctgccggggtgtcgccgtcgtccttcttccttgacgtgctttgttcttcgtcagagttctttcgtgcagtcttggtgtattgatccgcaaattgcttgtagacgaaacaatctttggccacgtggttggagttatgatggtgcgggcattgggaggtcatgatcttgtcgaacgtgttga

SEQ ID NO: 64499 - DNA, 430 bp, Oryza sativa
  unsure (1)..(430): unsure at all n locations
tggagtaaatcttggtcgagttcggaacaccgaacggtgctgagacctagtccttccctgactggattgaatccgagtcaaggagagagatcttgccgaagtcgttggtgatgaagtcgaggctgccgaaccgaaacgcctgcccgggagagaagacgaggtcgtcgatgccggagacggaacccatcgcactaatcggcgaagaacttgacgctacccctacctggcgcgccaactgtcaaaacaagatttcggcaatacttaaagggggtggctatcaagctagaaaagtggatgggtttgaagacaaggaattntatacaggttcaggccttcttattcaagaagtaataccctactcctgtccgaggatgattccgccgagtatatattgatcgtatgatctggggaaaaagaagtgttccgagag

SEQ ID NO: 64500 - DNA, 426 bp, Oryza sativa
  unsure (1)..(426): unsure at all n locations
agctttaacaatntatggactagttggggtactggcgctnttatttgcgaacccttttgtttaatcctaaaaaagaaaacgagtcctttagattagatactttcttctttttttagtaaattggtatttgcttctgcaattccaattatatcaatactttactcctaatttattactcctagagttttctatttatggggacagacaataccccaccccaggaatagctgatttgaggatgatcaatttaaaggatatgttcgccgtcttgcttcccgccctttgtttagggcaatggaaagtatttttccttttattttaagaattttgggaacatttcaacaaaggaggtctttcacaggtcaaacgagatctaagacttaatctaaaagaaattactaaattgaatctatttctataaaaaaa

SEQ ID NO: 64501 - DNA, 441 bp, Oryza sativa
  unsure (1)..(441): unsure at all n locations
acctataaaactcagctttaataatatggccgngatctgtcattacgcgcgactatctccactatagaaagaaaaataagaaaggatcaaattntctagtatttactagaaaagggggctttctacatagggatcgtcaaaacaacgattttgccctatcagctgtatgaagaaaggacacttcacgagaatcaaaatacgaagaaagaaagtatggcctatactactctatggatagagttctcaaattgatagagaaagcaccgtaaagatcaattagtgaccgactgggtcgatacaactaanaaaaactgcttacttatcccatgatatggggcaaaatttaggaatccgcttatgtaatagagccgatccactaagggattaagcagcggtgtagtatcagatcccacagatagtaagttcttttttcttgcttat

SEQ ID NO: 64502 - DNA, 354 bp, Oryza sativa
  unsure (1)..(354): unsure at all n locations
agcttaatatcccgcggaaaaattttgatgtcggaagagcgaagccgccatagaagaaatgggagaagaccacagcctcgtgtgtatcgggggtcggaaaagcctcaccgcacgctggccgccacccgatgatttccttggcagggagaacgccgtgcgccaccatctncttcaggttctcctccgtcacgtcggatggcgcccattggccttcaaagttttccttctcttccgccatttgatttttccgaatgcgttgatttgattcnagggatggctaaggagaggtgagggattgaggcagtggatcacgggaaggattttgatgaacttttcaaggtggattcgagtgga

SEQ ID NO: 64503 - DNA, 302 bp, Oryza sativa
ttgagcatatatatgttttaaataaccaaagtcttatatgtgaaagccatactgcttaattgttcactaaaaatacttcatgaaaccttttctttttcttgtaatataaccaaagggtgatatgtgaaagcaacactgctaaattggtcactagaaaagtacttcatgtgacagccttctttataatctacaaaaagaagaacataaagtaacatatttcgtagagcatcaaaggcattcaactaaatggaaccaacggagtaccttgcaaagaagagcgaaacttttttactaacaaaaag

SEQ ID NO: 64504 - DNA, 401 bp, Oryza sativa
agcttgcattaaccacctaagttcccatggcttgctgagtacgtaagtactcacccttgctctctatataaatatagttctgccagctctgaagatgaagttgaagcaaagattagggtttcgtcctagttcccagccgtcccctgtggtgttgagtgttagtccgttgtttccgctgctgctgccgctgttggtgttgcctcgtccgtgtcgtcggttgtaatctcgggctgtcctgagttgcaacctaagttaaggtaaataagtcctctatttattctaaggattgcaatgattcatatttgtcactgtgggtaccggcgctatgtcctgagactggtactgagatcgcggtttcgtaggaagcggttcgcgccgtttttcctacgacacgctctaat

SEQ ID NO: 64505 - DNA, 435 bp, Oryza sativa
tggagttgtggttgagctcaaggtcactttacctgcctcatattccctaatccaactgtattagttaggcaatcacctcgaaaggcaaccacgagcactgatcttgacctgctctttctctctctctcacccctagcttggatatcatcactattggcacatgttttttttttcaaggaggatacgcaccgcaatagctagcttttagagtgagacgacagctgagtaggtggctagctcatggagggtggccaacacctatgagctcatgataggctcgagggaagatgggagagatggagtttgacaaagatgaataggcgttaacatatgtttcctattttaaatctttcttgggttgactagacaccacataagcatggtgataccaccttagtttggaaccagcggtaaagtgaatggttttgatagttg

SEQ ID NO: 64506 - DNA, 376 bp, Oryza sativa
  unsure (1)..(376): unsure at all n locations
agcttgtcagcggntcggcaatgttcaattggtgcccgccgccgcgttgaactctataatcaaaccatggccgttccgaggttgggctttggattttattggtcaaatttatccttcgtcatcaaaggggcataggttcgtggtagttgctacggattacttcaccaagtaggccgaagctgtgccgctgaagaatatgacttatacggaggtaattgcctttaatttgaagcatattattcatagattcggtatcccgcaaacattaactacggatcaaggtgtttcttttatgtctaaggaagtaaagagttttaccgaatcttatggtattaaattggtgagttcttcttcttactacgctcangctaatgga

SEQ ID NO: 64507 - DNA, 421 bp, Oryza sativa
taactatgagcgattcctttcctgctagttcatgcgcacaatacataattttagcaatatatattttttcacactctcaactaaatgatccaacagaaaaatgtagatcaatcacaatcatatatgcgaaatcttagtattaaatattatgatcaccggaggtgcccatgcataaataaataatatgatgaatacatcattaattgccctcaattgactgatatgtcaatttcgttacttttttggaacgagacagaaaccgcgatgttatgagatagagatccgacatgactcatgagtgtcatcagcaacaagatattcgactaaatttcaccgtaataatgatcattattacctaaactaatatatgaaaaatttcatatatataacccactaaactttaaatgggaagtcattccac

SEQ ID NO: 64508 - DNA, 361 bp, Oryza sativa
  unsure (1)..(361): unsure at all n locations
cgatgtagcactttccgctacngagtattccaagggtatcgaatccaacggaacgtgtgtgattatcttctcatcatggtcatccaaggacacaaagctaatatgggcagagggcagagaggaattcctaatgagaaacagtgtctaaggaaagcttaactntaatcctaatgtaatacttcaggcactngcaacccgctgttcctagatgtggctctactacgtacccggacagggaggacttaagtgctcttganggggtgcaccacctctacacccacctcatacgtactgtgngatacgcagcaaccactggagaattaatacctacacaccgcgtctacataaataataactactc

SEQ ID NO: 64509 - DNA, 372 bp, Oryza sativa
  unsure (1)..(372): unsure at all n locations
agctaaaacactcgctactggtgcttgacacaataatgtcatgttctgttgttattattgcangtagtgaccagttattagatggcagtgcacaatttactttgtgagccctgngaattatgggattaattattatatcacccacgaccggtgcttgtcgcgttggtcattaangctactggtgggcgtatatttacaccgccgattagtgtaatattcaaacgatgatcggctagttcggtttacataataatattaggtgctatgtacacatgaacgccacacaatatctgctcgtgtcatgatgtcgaattcactcacatgcggctatataacggtttatgctatttttatttaaagaatatggatatg

SEQ ID NO: 64510 - DNA, 210 bp, Oryza sativa
ttttatttgtattttggaagacgcggactgctataaattgtgtttgtgactcggctggtctggacggagattaataccattctactttaattcgggtaacgaattttgggcggacaagtggtttataccggcttgatcgttgatatccaatggaacactagacccttgatttctatctgtcttcttttggaggcgatggccatgagtcta

SEQ ID NO: 64511 - DNA, 391 bp, Oryza sativa
  unsure (1)..(391): unsure at all n locations
atatattaagataatatattggattgtaattgcattataagttataacttacatatatctacaatataagctgtagatatcttncatataaatttgaattgntatatttagtccgatgaccttngctttgtgaanatagcgtgttaaaattttcaagggtacatatttgtactttacgtataagtacaatgntattatacaataacagtacatagggtgtgtagtataagtacaatgntttatacataacagacatanggtgtgttagtagtgtaaagttttgaactatcggnacacatntgagtattaacattactaataacaaacanatatatatttcgctgtaactatgggacgaattatagcccantaatcatcatagcaatgtact

SEQ ID NO: 64512 - DNA, 293 bp, Oryza sativa
ctattcctgactccaagccaccgacagtagcgtgggtctgtgtacctaacgtccacgcaccacgtgttgagtaacttcgcccacaaccacccaactatattcttaccgtatgcactgtgacaccgtgaaatataccaattagtcgttttctacacacctctagcaattgctagccaacactaaccctagcgttgccttcggtttattcagcacattaaatcctaccactatcacatacttagcagctactttactacaaacctatcatatataagcgactgaagcatccatac

SEQ ID NO: 64513 - DNA, 193 bp, Oryza sativa
  unsure (1)..(193): unsure at all n locations
tcggacaagttctattaccatcttctgaaatgtatgtaccccatactaccactttttctctgaaaaaaataccaccactntcttggactttcgttttcttgacacctggtcncactaanactcttctgatggagaatattaccctttatcatctacgtggcatacttttacnaatcttcccctggtctacatg

SEQ ID NO: 64514 - DNA, 358 bp, Oryza sativa
ctctatataaatatatatatagttcctccgcccggaagttgaagatgaagtaaagtgaaggttatggtttcgtccttggtcccaacacgtccctgtggtgttgtgtgtaatacagtggttcgctgctgcgctgttgttgttgttcctcttcgcgtcttagttgcatctcggctgtctgactgcacctagttaaggaaaaagtcttattatttatgatgcatgatatattgtaccggggtacagccttgtctagatggtctgtatccgttctagagcgttccccgtttctataacctctataggcatatacgcggcaatggggtaattcatatattagacccaaaattgtggatgtatg

SEQ ID NO: 64515 - DNA, 291 bp, Oryza sativa
  unsure (1)..(291): unsure at all n locations
cactaatccggctgtggacaagtctacctgcttttaaatatatagtctcgcctgagtgaaatgaagaagtgaaaataggttcgtctggttccaccgtcgctgtgggttggtataatccgtggtccctgctgtgtgtggtgttctcgtcgatcgcngtgatttcggctgctgactgcacctaagtagtaataatcttattatttagatgcatgatctattgtaccgtggtccaccttgtctagatgtactgaatccgttctagagcgatccgccgttctatatcctctgtca

SEQ ID NO: 64516 - DNA, 310 bp, Oryza sativa
gctctctgtcgtgtgccatcttatggtggattcgacatgtgtgcagtcgcgaaagatcgcaagagatctggtcgcctacgttcgtcgccgggagccatctatggcacgataggcatcatcatggcgaggaatctctggcgagcgttagacttctgccgtctcctactcatctgatctctggtagtgataccgtttgcctcatataatcgatcgatattttgagtcttaccaaccctacaacgttgaaagagctgggcccattgtcctacctcatctaccagtaactatacacaacaaatggtcatgtctc

SEQ ID NO: 64517 - DNA, 201 bp, Oryza sativa
  unsure (1)..(201): unsure at all n locations
tgtactggtcgtctcgccgtgatatatccagtggcagagtggctctctggtgtgaagaattantactgtggtcgtgtnttgggagtggtgtntattggtaatctatcgagcgatcggtgtnaatctagctatgtttctgcaatggatcatatncatggttgtgcgctctgtgcggccggatgatcgcattatatattcatc

SEQ ID NO: 64518 - DNA, 289 bp, Oryza sativa
  unsure (1)..(289): unsure at all n locations
atgattagtgtaatacacgcaacattctcattctcattctcattctcattctcccatccagaaatattctattgcactcacccacctcacccactgatatatatcatcattccattcaactacacacctaatcgcaggaaattgtactccctccgtcctatttaagtacatcatgagtttcgtatcaactttgatcgccgcttattaattatngttatgatcagattatattataatatatatataatagacttatattgacttatattttaaaaataacaatcaacat

SEQ ID NO: 64519 - DNA, 301 bp, Oryza sativa
caatatgtatactgcatacctgtacgctgctaacctggtcaattgatctattccattgtactgtatcatatcatgattcatagaaaaccaagcacacagataatacaaacttatggtcacgtagaattacttggagattatactcgcgcctttgatcaaactgagaacacaaaatgttttgacagtacatctctctatgtaaatccaaacatgaattctggttggtggaagtgatcaatagtcaccacatatcgatgtgttcgagagggataggaaagcatgtggaagaattgggaatgga

SEQ ID NO: 64520 - DNA, 357 bp, Oryza sativa
gaagtgtgcttttatgaccatttatgttagctgatattattgggcattttcaggcggtggtcaatccttatgagttattactcggatttatacccatatgcatatattccaggtgtggtggaccatgtgtttcttggacttagccatatgtaaacgagggcgctgcgatgccatactttgaattcttattacaccacagcttttatactgttgcttggaattcaaatgaccacttagtacctatatattacaacagctgattactcgacatgtttgggatacacgattctttatgatcatccttgtatacattcaaacctcgtgtgatttatctgcattgctgtgtaatacacatgc

SEQ ID NO: 64521 - DNA, 281 bp, Oryza sativa
  unsure (1)..(281): unsure at all n locations
catggcattggctttgatgtgatggtgtccacagtgaaactctgtcacaacagcatctcttaactcttcccaaacatgaacgccaactctctgtttccaggctttataccactgcgatgcttttcctaacaagttcagtgatgcatctgacaccttaatacctgctgggatctgatacatagcataggatgtctcacaattgtctacccacacactagcatctggcccatcaanaattcggaaatccattgttggcatatttcttctgaaatggtgctcat

SEQ ID NO: 64522 - DNA, 273 bp, Oryza sativa
  unsure (1)..(273): unsure at all n locations
ttcttgagaatccctaccaaacattatatntgtctggatctcattagaaactnttgccactaccatttccttctctggagtgaccgaagtcgagccattctgcagacatgcttcctgaagaatatcaggctctctatttctttcatcctgtgaggagtaactctcattttcctggtacttaactggaggttntggtcttggtggtctcccaaaatttgcaaataaaactgatgccctggctgaagttttgttgtctccattgcattggcggga

SEQ ID NO: 64523 - DNA, 190 bp, Oryza sativa
agctctttaatgttgccagtggcctcatgtaacatactcataacaatccacatctcatgggaagcttgaatatgatagacacgatcataatacatactagtaatcccactcttatgaatattgcgagctttgccattctgttcacattcaatatttaaagcatcaatattaatttgttcatgaatcacat

SEQ ID NO: 64524 - DNA, 103 bp, Oryza sativa
  unsure (1)..(103): unsure at all n locations
cgtgccacctatctatagagacacaatnttcttcatgagacttatttntattatcaacataatgtggcatacactatactctaatggctcaagaaatccgtaa

SEQ ID NO: 64525 - DNA, 249 bp, Oryza sativa
  unsure (1)..(249): unsure at all n locations
actctaaagctccaccaccaaccacncatcgtagatgcgtggacaccactacaccgatactagtagtcgaccagcctnncgctgcctncatgcgtcagtgccacaccatcgcgctgacgtcgttgcaagcactcatcttaggggtaaatgtccatccncgagcatctggacggtatcgggtgaggtcacaacaacattccgcgttgcctntcagcaacaacacatncacgggatgtacatctgcacctt

SEQ ID NO: 64526 - DNA, 119 bp, Oryza sativa
  unsure (1)..(119): unsure at all n locations
gtgcagtgtgtgaagtcctcatctctgaagaaggggctttcatggaatgatacagtgatcactaccaacaagcatanctagccagtgatgactggtgagtgatgatgattgangatgat

SEQ ID NO: 64527 - DNA, 155 bp, Oryza sativa
tatctcgtagctttcaacgcatcatgtctcatatcagaattcatttctagtgtatagaaaacgtcagaacaagacagtgttgttctgaaaccgaacttgagcctatggcttgtatggagtaaactcatctaagaagtgactctctgtcacctcta

SEQ ID NO: 64528 - DNA, 397 bp, Oryza sativa
tagcacgagctcagctgtatactaatgttgctggagagatttttagagtgatgagacgtgcagcatatatatactatgcgagaaggagactgtaatccttataccttgtagtacaaatagacagtgttgttatcaaagatgctagatttgaaggaactgtgagtgattgcatgactcgatacagtcgagggtacaatgaagaccgtaatatagtggttaaggcttttgcagctgaggagtggacacctctgcaactgaaaataccaggtggtgacaacacggtgtggcgacccgggttactgttgaagtgatgttatcctagctttcatgatcgatgtgcatatacgcaatgatgctatgtttattacagtggcttaatgggcattcaataagaata

SEQ ID NO: 64529 - DNA, 240 bp, Oryza sativa
  unsure (1)..(240): unsure at all n locations
ttcatgcatatagaagaattatgcgatatatgttttgtgagactcgtcttcacataacccatttgtatgtgtgcaacacaagctgaattatcttcataaataatggctggagttggcgtgatatttagtccacatgtattcttgtcatgttgtataaccctcctcaaccacatgcattccttgctcacttaaataatcctataatctacgagtgatntgttgatgtcgcgaccatcgtct

SEQ ID NO: 64530 - DNA, 175 bp, Oryza sativa
gcgcttacatcattggcatcgcatgattaaacatcaacacgcgcacttcccttcgttatcgatgccgacagggggctgctatggggtgtaaagtttcgtttcggtcgtgtcagacgacatgcatggggggcaatggctgccaacggaatctattataattcgatactatgtcaac

SEQ ID NO: 64531 - DNA, 346 bp, Oryza sativa
  unsure (1)..(346): unsure at all n locations
tgtcatcatcatactgaantatnggaaagcatgtaccatcagcttcattaattgtgttgaaaataaccccagattaatagctntattcaccactttgtgaagcagctcaacacccaacagaaacaacatatgagacaaatgatctccttgtcttgacccctctattgcaaccgaatggcttaatatgaactccatttatgagcactgtagatngagctgaagataaaccatcttaacccattcaagccatttcaatgggaaacccatgagttgcatgatagagatgatagcataatgctctattgtatatatgcttctatactccacttcatatatgatctctctt

SEQ ID NO: 64532 - DNA, 334 bp, Oryza sativa
acgtggtacgtcatgatcgcttctcaatgacggtcacattggcaaaaccgacattacgcatcaagataaccgtcataccgcgcctatatatgaggagctcactcatctctctcgacacactcaagcatgctcaaagtcctcttcatactttagtattagtatcttagtggtaagtggagtagaatagaatagtgttcggagtcctcggagtcttcggaagagtttcggatggctctacagctcttgtatctctctatatacttgcatataatgaatactctcttattatcttggacttattactatgagatgtctacttattctgtgcgacaat

SEQ ID NO: 64533 - DNA, 160 bp, Oryza sativa
cacccactccaccttgatctcttggccggcatatataatcctatgttgtttaccgatatttctttttctatccatcactgctctataataagctcgatcggtagttatccaatctttgaagtacacctcgatgtatttcaaaaaaagattacatgaacat

SEQ ID NO: 64534 - DNA, 447 bp, Oryza sativa
  unsure (1)..(447): unsure at all n locations
atatactgtacacgtactatgggcttcttctatcccagatccatggcgcaagcccagtacggataatattntacaatngggacttgngagagtatatttaccacttcaataatattttacagcctgaaagtattacaatatgagatatgatctggaggacgggcctaccgtaaaaatatttacggtgtagcaggaggcctacccagatttgtaaattactcttattaactattttccgtcataaatagtatttatgttaattttcctcgttacactatcactatntaagcaatacttctgctaccatccatctatagtatttgtattatttttctgtgacatctacctctgttacattgtattttgatgaccagttattggcacacagcctgctgttaccaattgccacaatgaatggttcaagaagaaaattcctactcactctgt

SEQ ID NO: 64535 - DNA, 300 bp, Oryza sativa
  unsure (1)..(300): unsure at all n locations
gagaagaatatcagcaacaggaattggggagtctatatcacactctggcacaaggctagattganggatggtgcattctctaatcaatcatgactgntctgttctccaatagctttctctatgtgagttaaaccattaccaactatggattatggaagatgggttagtggaatgcatggcttgatctgttctccaatanacttctctatgtgatgtaaaccattaccaagtatggattatggaggatgggtcatgtggaatgcatgctatgctttgcatggagttaatctgaatggtgtg

SEQ ID NO: 64536 - DNA, 268 bp, Oryza sativa
  unsure (1)..(268): unsure at all n locations
tagcaatgcttatttggtaantnnactctattgtcctcatnccacanagggacacctatattccacaatagttntaagaatttctggttgtaagtacacatcattattngttaccaggtgctntgagccttgaataataatcgacatcatgatgtacttccgcttcaagcataaccaagggggaagggtgtagatacacatggtcacaggccatatgctatgaccgctactcatctctccaaatggattcatgccatccatacttaaa

SEQ ID NO: 64537 - DNA, 346 bp, Oryza sativa
  unsure (1)..(346): unsure at all n locations
gcatttcttanagacagtaagagaccattaagattaagccaacaacggcggataattgtgtgcgctgatatttgatgagctgatcgacacnatcgatangactntgaatatcacgtatcatagtactatgatctgtggaagtaattattgtatcacacacatntaattgacgatgtagctagccgcagatcagtccatgcatgacaacataattgagactgatcagtatgttgtgacatgagcggttcctttctggcanaccgtgacacaagggctcagttgatacaactgagaggagacacacacagacacagtacctaaacattcacacatgcacacacatgta

SEQ ID NO: 64538 - DNA, 298 bp, Oryza sativa
  unsure (1)..(298): unsure at all n locations
gttctaaggccctatttgtgatcccgcccgtttgcttcacgattatgaagtatatcgctgagtggaaacgatgtgaccaccatgaccgagtgaccttggaagtagtgagataatttcctgacggtaattagaacaccatataacagcttctgaactcgaggatatctcgtcttggagtcgcgcanaacctcgctgacatagtagagtggtcgctggactttctgaacatggccttcttcttcacgctcgataaccagaactgtgctcacgacttgagaagttgcnatacgtacagtaa

SEQ ID NO: 64539 - DNA, 283 bp, Oryza sativa
  unsure (1)..(283): unsure at all n locations
gcacgcattctggcattcagcacctcaagagtctttaaaatgtccatgtngagatgtatacagctggtgccatacaatcaaacattgaagctgcgcatcgcaacatcaatcacgaaattgctaagcacccgagtaatctcaagaccaatattactattagtagttatatatactnntgggaggtaatgaatgatggcaatngtgatgaagaggatagtgcacatctcactgacaacaatggtggcaagaatcacgatgaggacaacanagtcatcagtgcact

SEQ ID NO: 64540 - DNA, 203 bp, Oryza sativa
aatttcatgttcacagcttatatgaattctcgctcatccgctatatacttatcatgcgagcaccagcgtttaagcaccaatactgtcttaaataatacactcgcctgcactctccatactgtgtatcattaacatctgcgactgaacatccaacgctgagaactattgctcgcacacacttgctctgcttatattgcctgtga

SEQ ID NO: 64541 - DNA, 362 bp, Oryza sativa
  unsure (1)..(362): unsure at all n locations
ctgatgctcatagattccgtaagtatagaatcctgagcagccccggagtacgatgaacctatacaaacatacttgcgctgtcaaaatatatcaattacttgctctgntaaacatgattgccttttccaaatgaattgctgagaacaactccattgtatgcctgtgctattggatcacctcttatcaatgttcaagggaacagctntgccttctagagaaggatcccatgttctgacgaacgagacctctgcctggttntcatcctgatatatgattcggaactctgtcccttntattctgcgtaacaacgttcaatgtcagctacatctgggctctctctagcacaaaaagtgtattcatat

SEQ ID NO: 64542 - DNA, 206 bp, Oryza sativa
  unsure (1)..(206): unsure at all n locations
taaattacaacggacaatgcaattatcgacacaaatcaaatgagtcactggagatatntntttcatggaaatgtgtatgtatnntactcacgataaaaaagatacanaactgtcttcttataataccaataatggtatcacagatatanaactaagcagagtactctcatttgtcanagatatgaatcaatgtccacatattagta

SEQ ID NO: 64543 - DNA, 468 bp, Oryza sativa
atgagatagatgttagtacatatatatgcaggtaagtcgctttcaacaatcgttgatcaccacggttctattactcatgtcattgtcaggtaggacttttcaaattcttagcgcataattgagaataaatattaagtatacgagagggatatgtaatctgactcaactaatattgaatgtatgtgaaacaatcatgaatgataatgaaatatgagtggtctatatatatcgggtttcttgatacatctttgccccacaatatgggattccttgatataattacaatattaatgttcgtgtactgggcccatggttgtgtttggaattaccttaaagatataactatcgcgactgtgcttgtagtatatactaataagtgagtgtctactatatgaaagctctgtgaatacttatttaaacaattacacttgacaataggtataccctttattatctatgttacaatac

SEQ ID NO: 64544 - DNA, 145 bp, Oryza sativa
tccttctctgcttacgcactagacaaaacctaatatctatcggcgcacaaaatagccggaatgcgcgtgcgtgcaatccccgcccgcaagcccgccgggcaacagcccccgtggttagtacatcctcttctcacttcttgcgcgc

SEQ ID NO: 64545 - DNA, 63 bp, Oryza sativa
cattcccctaggtttgcctgcgtcaatcacctgctccgagtcgcatgtataaggagtaaagcg

SEQ ID NO: 64546 - DNA, 73 bp, Oryza sativa
ttatctgttatcgatcaattcatacacataggtgtgtactatactattaatatatggtcacactgtcatacac

SEQ ID NO: 64547 - DNA, 246 bp, Oryza sativa
gctctcctccgcgggaaaaaagaagaaaagggcgcgctactctccgtctctggcgctgtgttccggactcgcgagccgccactcgcgatgtccgtctccttcacccacctgcgcgcctgggcgtcatttccgtttcctctctcgcacttctcaaaatctatcggctcgctctcggtccgcccttcttgcgctttctcctctcgggcgggctgctgacagtactgcgcctctcgtcgcggaactccg

SEQ ID NO: 64548 - DNA, 187 bp, Oryza sativa
ctgcgccgcacagaagactgcgtcacgccttctgcggtggaggatagacggcgtggaggaagacctcactcggagactgaccacgccttgtcgcacactggacgtggctacgccggcgtacagacggtgtgcacttgtcggctccccggtggtcgctaatgcgctccgcagcccttccttttgtcgc

SEQ ID NO: 64549 - DNA, 366 bp, Oryza sativa
  unsure (1)..(366): unsure at all n locations
cgtcagttcggcaaattgatcttgcttaatttggttggcctaggatcactaggaagaatatatgatgtctgcttggttctttgtttggttccaatataacgaagctttcagatctataagctcggttctgttgatgggtgcaatattccaaattgatgtgtacaaaaattttgtggcaagaacttgtgatttgtcggttgtttgatctattatgcaattacaaaatatattgttcgcagacacaatcttcgatattgtctgtgaagcaaaagattttggtgagtcactggtgtctattgactcgcangcttaacgagctagctcgagctaccaaccgagccgatccgagctatgattttatcacgt

SEQ ID NO: 64550 - DNA, 218 bp, Oryza sativa
  unsure (1)..(218): unsure at all n locations
tatagatgcccatacgtactcagcctacacaaaacaattcgtgtatgcaatgcctatatacttcatctagcttaagcaagtgagtcaatccatacccattgttaatcacacagcagcagtacatgcgcttaacgcaacgtctgattgatatggactcctgcatgactggatggngttccaagactgagtctttcatgtatgtcctagttcactttact

SEQ ID NO: 64551 - DNA, 275 bp, Oryza sativa
  unsure (1)..(275): unsure at all n locations
tcaatgagtgaatacgattcanatgattccataagtgttttgtgcgcattactgtctctgctccaaacactctaccacattttttgcattntgctttacgttgtgctcttcacaccataacttgttcttggcttgtcagtgtcttaatgaaatatccaaacttcaggacacttttctgacttttctaccggtcaactctcctggaatctcatctcttatcggaatacaacggtctgacttcactcacctcatggctgggtgcatattatacatgc

SEQ ID NO: 64552 - DNA, 244 bp, Oryza sativa
  unsure (1)..(244): unsure at all n locations
cagctggtattataagcgatgtgatcaacacttaaagacctatgcgtagccctgcncgctttgatgggaagtgagtacgatgagaccgttctttgggggtggcgaggttattcttcttggaaactacaagtgaacgcgtgccgcttatgatttttgagctcttcagctgctgatatatgtgatccatgaacttgactgtgtgaacccaaaaatgatgccactggcagagtttgtgcttcagatt

SEQ ID NO: 64553 - DNA, 288 bp, Oryza sativa
cacatttcctgatagttaataaattccaccatcttgatgtgtagatcaacgcactcaagtgaaacattttgttgtacattattgtagtacgcataatatcgcacctgccaaggaaaaaaattaagagttgatagaaacatgatatgcctatcgatccaagaagatgggcaatgccaagacgcgcacaatataacataatgggtggttactcacttatttaataaagaaaaattctacctgacgtatagcttctcacacatggaagcatttataagtcataacaacatc

SEQ ID NO: 64554 - DNA, 235 bp, Oryza sativa
  unsure (1)..(235): unsure at all n locations
ctagtaatgccgttaggaaatatcaacaaagctttctacccgtcgtgccggngaagaataanntgataagagttattacatgcnntataatttatattttacctttgatatatttactgtctttganagcaaccttgtttgtttctctttatgtgaaatanggtagacaagactggtctgatttgcgaccaattcaatcagagtccttgtgggcgagtcaacctcatgacgtctc

SEQ ID NO: 64555 - DNA, 122 bp, Oryza sativa
  unsure (1)..(122): unsure at all n locations
gcatatttatattataataagtgatattccactatcactaggattctaacatcttaaatacnaaatatgggagaatctgcagcataacggacgatcaatcaatcggacgctgtcgataatca

SEQ ID NO: 64556 - DNA, 348 bp, Oryza sativa
  unsure (1)..(348): unsure at all n locations
ctgatactattctaattctattccaccagctagatactactanacanaacttgagagtaatgagagagttcttgcttgangtgtgtgagtatagtgagaaggtgaggngtntatatagcctcccaatgacngntgggaacggtggaatggtcggaaatatccttcaaccgtcattgtgagctaatccacaccgtccanaagaaacctgacacccagcggcgatgaaaggggttcggccagcccatggattggctggcgcgcttctctgttgttcttctctgcagaacttgtgaatttggccattnntgtcatgtaattcttgagtcttgcccattcatacacaagtct

SEQ ID NO: 64557 - DNA, 202 bp, Oryza sativa
caaatatataactagtaatgcttgcaacgcatatatctgttagaataataatattccactagtattatgtatactaaccttttgcagacaatggcaataaagtggaggagaatcgacatcaactcagacgataaatcaatcagacgttgtcgataaccatacttatgtatgaatgggccacatactcataattgacacgatg

SEQ ID NO: 64558 - DNA, 103 bp, Oryza sativa
gtatagatcatcttcgatcatctttcatttattcattggggtagtgctgcaatttttgtgcatgattgaccatgtacagtacaatatttgtggcatatgcagc

SEQ ID NO: 64559 - DNA, 458 bp, Oryza sativa
  unsure (1)..(458): unsure at all n locations
tgttctttcttcttctatntcttctcccttccttctttgttatctatctatatctatatccttcctctntgntccncctgtataatctcttgccagccactggctntgttactntcatgaccaccattaatacaatggtaacaaggtagagtctctctaccttntgcgtcanaaaaaaaatacaatgagcagaagaagataagatcaatcatactatcaacacaatacatgcagtcactttcaatcaaacaagaaaaattcagaacctgaatatgcgccaatggacgancatagttcttatggaaacacctctnctgtggccgatggtgcagcttgcatctcaacagcatacaagtcacagcatcctgagcaacctgggcgtaccatatcacatgcacgtgacaacaactctccatctgccagcatactgactaaacgtcgcgccctgccgcacacgc

SEQ ID NO: 64560 - DNA, 295 bp, Oryza sativa
  unsure (1)..(295): unsure at all n locations
tacccacaaccatacatcttaatttgttcaaacgtgtaaaaatttagagaattgacaaaatttgtatcatatgtgtgggttacatatccangcatagctaacaagtatntgtaaactgagagggtgaaatgtctataagaataatgatatataatgaagacgaacatgttctatagtccccatatggtgtagcacaatgtaatgaatntatcatgttctcagaaagatgtgagctganggaaatatgttggtgaattataaacttgttttgatctgatgtaaggtttacgtacac

SEQ ID NO: 64561 - DNA, 195 bp, Oryza sativa
  unsure (1)..(195): unsure at all n locations
gcgttctacatggttcactgcagcactactncagctcggttctggtcataattcagagatgatccagtcaagatgcatgccgtgacatagtgctacatcaaccagtgagattgtgatggatgcagtgagagaatcctctgctagcatgactacagctcatcctctattcactctgcgtggttcaagggaaacact

SEQ ID NO: 64562 - DNA, 286 bp, Oryza sativa
tcgaaatatgccacgtgctcagtcgaatgatcatccagtgagttctttcttccaagatgcttatggaaacttcttcatgaattaactcctaccaccttgattttataaattattccggaaatatgtatggtgtattgaatcactggttaccactatccttttattaacaagcaaatatgtgagcatgaagtccaaaatagtcatactgatattaaccatttacattcatttataagtggagctaccatagtagcagtcttaatactaatttggtgggtcggctatc

SEQ ID NO: 64563 - DNA, 294 bp, Oryza sativa
  unsure (1)..(294): unsure at all n locations
atatggntcttcagcgtctcatatcattagttactcttgctcgtggatgacacacttctcactaatatttacgattctgtccacatattgtaactgcaatgcacacatcaatgtgctgtagcaacacataagggtgggtttaatactaatgatatattacagtcgatttcctagcattatggatgccgtatttggaagataattcatcaaccctgtgcagctctgngccaaaacaatgtactttngagtattgatccannattgttttaagaaaaaagtattgatcattttttt

SEQ ID NO: 64564 - DNA, 388 bp, Oryza sativa
  unsure (1)..(388): unsure at all n locations
gcttcggatgtgcatcgactacaccgaccttaacaaggcatgttctattgatccttacccactgcctcgcatagatcagattgtcgactccactgcngtgtgcgaccttctgtgttttctagatgcatactctggttaccatcagattcgcatggctagggaggatgaggaanatactgcgttcattacccccatatgaacctattgttatacgacaatgcccttcgggttaaagaatgcatgtcctacttgtcaacgtactactcgaatgtctttgggaaccaattaggacgtaatggtgaggcttatgtcgatgactnggttgtaagacgcgcaccaggatatgtactctagatctacggtactttgagagtctcgtccgccgata

SEQ ID NO: 64565 - DNA, 234 bp, Oryza sativa
ctttgagagatttgatataaaataaggcatttgttcatttagaaacaaatggctttgttcaagacactcataacgtccaaaagacctatgtgacggatccaaagaattcagacttactatattgagcgatttttatgatcatcctagaattcgaccacagctgttatgtaaccatacaacttaatatcttctattaactgcccttctttatagtcatgactgccagacactctt

SEQ ID NO: 64566 - DNA, 285 bp, Oryza sativa
cttcccgatttctttactgatcgttgttctctcgctgtcttatggcatttggttgtccagtgaacgcttctgagctgaggcgcttcacgaacttaccctaagtgtatacttctctctctcctttttttcgcggtatccttccgacatgcttacctggccctttgtcccgtgggattctcttagtgggatctctgggacctgcaggtgatacgtatattgcagatttaagaggctgtgcttggctggattccaatattattcggagatgtgtgatttactggagat

SEQ ID NO: 64567 - DNA, 364 bp, Oryza sativa
tgtatctgctgaatgcacttgtgctctcacacttggcatcttttgtgtgaacaaacactattatcgttaaatgtcttgatctctaaggcgagcacctcaagacacatctacatatcgtaaatgaattactgttgggttccatcaagcaataaatcacttcaggttgggcacctaacgaaaccgtgacatattcgaccttgtacaaacccactgcaccccatgctgtgttaaatcataccactcatcacgcgatctacattgatgatactaataacaacaccggaatctcatctataatctcctcattacattataaaactttcttcatcttgaaaaaaacactttatgtctaattctacacacc

SEQ ID NO: 64568 - DNA, 305 bp, Oryza sativa
  unsure (1)..(305): unsure at all n locations
agctctgaatntntatgtagtacaagtagctatacactagcttcttcttcagtgtcgccttctgaataaaggcagaatctagtactgagaagcacacaattgtcgagtcgaggcattcagctactagtcgcggagtcaccacatgaccncgctagcttacctctagctatagcttcagtcgccaagtccaaacgagcgtgtacgtgccgcgaagtcgtgtgcaaccatcgcacgttctcactaacgtggacatggatgggctgtcatcgtctcagtattttatctcaactgcgtgggggtcttat

SEQ ID NO: 64569 - DNA, 235 bp, Oryza sativa
  unsure (1)..(235): unsure at all n locations
gattttaagtgtaagtcccaatttaacttgagaccatgtatgctccattcattaacaaaatacaagctgncttcaacatgccagagaaaactacatttcttcaatttccaagacaatatattgtactccctgcgtttaatttacttgccttctagcaatctacattaaactagagacgtgtcaaatacattgtactttattaattacacctaatcatctttcgaagcaacattga

SEQ ID NO: 64570 - DNA, 268 bp, Oryza sativa
  unsure (1)..(268): unsure at all n locations
cgagtccatccattcatgcttcgcttcacaatggcctctgcaaaccaatgagctacacaccacatgcatgcctgtgtaccacgtacgtacacgccatcggactcgaagccagcctananagaagcttgctatgctctactagtctagtactgcactgacgcatgcagctctctaaccacacatcgatcaagcgatgactagtagtaacagtgatcaatggagagaactggaagatcagaatntagaacgagatcgatcatgcatcatg

SEQ ID NO: 64571 - DNA, 441 bp, Oryza sativa
  unsure (1)..(441): unsure at all n locations
ggattaaaactctgatacgagatagataggcacattcttctatcagtgaccatggatatggaacagttgtttatgtcttctgtccatgtgactatgtatacttgcagattttccatttaacacaagtcatctgatatgaggatggcctgatacatactgggaacaaattgataatactttcccgattatatagaggttgacacatattccttaatgatggtattgtcaaccagcggcatgcttttattactattgtctatgacctgagctaaaagtgctagtntcaccgctgccccaagttatgtagaagacatattatgcttccaatatgatatgagtgttgcatgtagagcacctgtctaaaatangcacctcnaatgactgtgatactgagtgtgcacacgtacactgatataaggtacctgtggccactgcagcaca

SEQ ID NO: 64572 - DNA, 307 bp, Oryza sativa
cttgaatgatctgccgcacttagcacgagctcgctgcaacatctcccaaacaaatacgattatggagataagcacaaagaccacagatggtccgagagttacatcacaaattgaagagcaagatcccaaatacaacaccctttaccacctcttcaaaaaaataaagaaactacaccacctacagagctggacacagcccacaaagaaaggaacacagcagcaagcaacgactctacttctgcactcatgtgttcttccaccgtctgatttcttctactgagaagaagaaaaaaccgccatggaataa

SEQ ID NO: 64573 - DNA, 295 bp, Oryza sativa
tatatttgtctggatctcattagagacttttgcactaccatatacttctctggagtgaccagaatcgagccattctgcagacttgcttaccgaagaaattcatgctctctatttctttcatgctgtgaagagtaactctcattttactggtacttaactggaggttttggtcttggtggtctccgcaaatctgcagataaaactgcatgccctggctgaagtctgttgttctcatagcttgcggggatgtggaatgccgggtgcatttagatcttgaaaatatttctgtaaatca

SEQ ID NO: 64574 - DNA, 343 bp, Oryza sativa
ttttgggctagctggacattattgtacgtcggtggcatagtagcctcgcgctgaaatccgggaggatctacctgggactctcttactcactcgggggacttgtctgactcacttacacctccgcgtcgcgcggtcactgtggcacgcgcgctgacgctgcatgcgcgcctcacacgcactgactccttgcctcagactcaccttctatgtgtgatgtggtggaagacaaggatgatatactgtgggtgaccgacgcgttttaacacccctgcacgcttaagcattgggagaatactatgcgcgttttttttcctggaatatctactccctgcccccggggctg

SEQ ID NO: 64575 - DNA, 350 bp, Oryza sativa
  unsure (1)..(350): unsure at all n locations
tttgccctctctctctttgtaccatgngncnaagaagaggcactaganacctccagaaattcccatatngttatcannnatgtgattntttagtgcatatgtaactntttgatccaatggctattatttatctaaactctntattcaatggttgatatgtnnttgatgatgtggcgtgttctcgtgtaagagagcttggtactttcactatataagataagataagaattggaagtgactgcatntaatatacagctatggcttatattaccataaatgcaattgtattttgtataccaatatatttgatcaattgcagtataatatgggactcgcgtgantactaacat

SEQ ID NO: 64576 - DNA, 132 bp, Oryza sativa
ctcgagcgttcctagtttacccatggccattggcatctgacccatgtagttcgccacattcccagaagaccctgatgaaccgatagatccatccatagtatctgccagagattgctgcagtgctttcatacc

SEQ ID NO: 64577 - DNA, 295 bp, Oryza sativa
cttagcactcgctgcactctgtgtactctatactgttgagcagttttttatctccctccaagacaattttcaacttttgggctagctatacattattgacgtcggtggcatagagctcgcgctgaatccggaggatctacctgggactcgcctcactcactccgggagagctgacgtgactcacttacacctccgcgtcgcgcggttcactgtggcacgcgcgctcatcgctgcatgccgcgctcacacgtacttgctccctgtccgtcagactcaacttctttgtgtgatggtg

SEQ ID NO: 64578 - DNA, 76 bp, Oryza sativa
  unsure (1)..(76): unsure at all n locations
ctgcagcttgtgtactctancactgctggagcagttattctatcatcacacttttatagatcaaatattatcaaac

SEQ ID NO: 64579 - DNA, 184 bp, Oryza sativa
gctcacccggttccaccctttcccatgcgcgcatctggccacccatcacatgcgcgtgtcgccgccctcacaccacacttatacgggcttcgcgcgttgccacccgcgtcgcgcgtgactatctgacactcatccagcttcgtgcctcgcgtcccctcgtcgcacgtccgcatcgccacgtcgc

SEQ ID NO: 64580 - DNA, 106 bp, Oryza sativa
aagggagaaattttttttctcttacgtggacagttattatcaatacattttttttctctagcccagccggaaaacaatgtcaatcgtgaactgttttctctcccca

SEQ ID NO: 64581 - DNA, 323 bp, Oryza sativa
tcaaaatatgagatatgctagaatgaaggttgaaacccacagagaactgaactgctcttcatatgaacttcgcgaaatggcaatccatataaagatggtgaatagactcattgttcatacaaaaagaacatgtcaagctaacattccaattccgcttcggcaaattatccttagtcaacacaacttctttaagcaagtacacagtgaaaacttaatcttaagtggcatcttaagcttgcaaatgcacttattactttcaacatatgcattattacttaatagcaatgtatattgaccttaccgagaacataccattctaatga

SEQ ID NO: 64582 - DNA, 354 bp, Oryza sativa
  unsure (1)..(354): unsure at all n locations
atgtgcgcttctcttaccatggtgaaaaggaggagctactgggctaaatgaacaaatagaacaataatattcagtagctcacaacagtacttaattaacaaggtacatagtaatgggcataaaatagtaaggaatacacaacgcagtataacccattgaactgtaagacatacagcttactcacgcgtgtaaataaaacaaacaaatatcttacgctatcaangataaaccaatttcacatcaacaattttaatgctaatatcacaataagtatatcattacatgccaaacattatttctgcacgcacattaatgggaaacccaaagtgcttatcaagactatcactccacata

SEQ ID NO: 64583 - DNA, 348 bp, Oryza sativa
agaatatctctattcttggtccactacttgatgagtcaaattatcagccgagagcgtttagctttttataacacagccccgctttgtgcatacaacaaatagttacaaaatgtgggctgaaagagaatattgtagagtgtgcattaccgaacaaaggttatctttctgaaactcttgacaaagactgcgctgatgagacgttctgccttgaaaggtagcattacgacactcgacatactctacgtttagatcctcacttccaagatataacactgcctgcctatgattttttcgaagatatataagatgatgaaattcgttatgcgtgtacttatccaagggctttga

SEQ ID NO: 64584 - DNA, 291 bp, Oryza sativa
cactgaccagatcaatcctgcatggacgccgtacgtgccctgtcatattaacataaatgcaaaaacgttaactagtgaggcttgaagcatatttgaatgggatttgcatgttgcctgttgctgacgaaaagtgggtattttatacctgataaccacggctatccttgatagacataacaaataacagatactgcaatggaaagataaggatcatgcgctatcagcatatgtgcatacaaaccatacaatataagtacgaaaggatatacagtcgaacgttataagaaagta

SEQ ID NO: 64585 - DNA, 292 bp, Oryza sativa
  unsure (1)..(292): unsure at all n locations
catcatgcaagccttgngcttggcacacgacgcanggctaagttcactctatgttcctcaatntgtcaccgagttcgaaattcatccctgnaaccgaaaaccggatataatgtattctccaacttacaaaactgtgcaaacaacgtcccttggtggattatcccctcggtttgctgacgtggacatggctcttttactangtattcatccccatgacattggcgtggcgctcacgtggcaagttggtggtaaataatgaaaactaaaaagtaacatatatgcggacccacaa

SEQ ID NO: 64586 - DNA, 270 bp, Oryza sativa
agatggaacaggaactaatgtattagctgatattggtggtgcagatcaaggcagatacattacttatgccattagaaaagtataacgtggaatggcctgatagcatgtacggaataataatccacatggtccctttttgaaagattccaaatgatgtttagcattttgaccttagtcattcaaatctgggcaacacactaataacacagtagttccaagtcacttataaggattaatttgatgtgttctctattattagtggagcggata

SEQ ID NO: 64587 - DNA, 143 bp, Oryza sativa
  unsure (1)..(143): unsure at all n locations
catgacagagcacaaggaggctctatggagcacatatgtgtcaaccacanagcctgatacttctgttactaataggcttattgatgcnggcgtatcaccgaggattganngaatcatgtcggttgtcaacaatgagatattgc

SEQ ID NO: 64588 - DNA, 205 bp, Oryza sativa
  unsure (1)..(205): unsure at all n locations
cttcatgacagtcatgccaagctccgcgaactcatagaacatgattgtgtcaagggcanagtacagagcctncatatagatcgttccataagtggtatcatggcgcatnttggtacgaagaaacgtggtcattacgaagaagcgcggtagagtaactgtgatgatgtaanantcagattggtgtccggaatcttcatctcaatat

SEQ ID NO: 64589 - DNA, 201 bp, Oryza sativa
  unsure (1)..(201): unsure at all n locations
cttctatatataatagtttcgactatacatatcatntagttggaaaaacatgctaacaaaactgaanaacgtgctaacanaactgaggtataatctactccatatgtntacgaganaagaacacgcctgagtctgtgatggttctgttggagatagaanaacttcgagttcagatnnagtaaaaacacgtttgtctccctg

SEQ ID NO: 64590 - DNA, 235 bp, Oryza sativa
ataaagtgaatatatgaaaaccatttatatccctcgagaggatatcccctcgtgtgcttaaaaacatcataacgggtatgaaaaattctggaaaatgttgacaatattcatattacatatctatacagcttcacataatcttaagtccaaatgtgagtcacacgtcgagatatataaagacaaattcaacctctacattgttgttttttcagaaattttcacaactatttatatc

SEQ ID NO: 64591 - DNA, 335 bp, Oryza sativa
  unsure (1)..(335): unsure at all n locations
ctatcgatcatggatagatcaccgtctcatagtctntctcttcttctctgcttcttcctnctcttcgctcagctggtgcgagcacggatgctangtangcaacatagacgcttcactccatggatcacggaaatagaagaacaagaaagtgcattattggtgctattgcatcctgacaaccataccattgactggaaaatttacaaggtgatgctattgctgccacctgcgaatctctgtgtttcgttagagagcactactctatccatcgatcgataatgcgatatatgctgcactacagtgactgtcttgactaatcacgaaggatagcgtct

SEQ ID NO: 64592 - DNA, 340 bp, Oryza sativa
  unsure (1)..(340): unsure at all n locations
atatacattngcagcaatattntgcacacttttttgtctncacantttagttgtaagttgatgagagagaatattngtgtggggaagaaagaatatatagaaatttattcatttgctaagaaggtttatacatagtgagaggaaactctatgaattatcttaatataaaacatatacattgaaatacagagtaaaccataaatagttaaacttagaatagaatagaatatttgcgatatttatgatttgataataagaatgcttatgttgatgtgaacattgaatattatatatgatactgctttgagatatattgctacgttttgcttgaatgacacat

SEQ ID NO: 64593 - DNA, 217 bp, Oryza sativa
aaaggatatatgcggctggcggtaaaaacacttccctacatgaaatagcggactccacttctgacaaaactccagccaaatgaactggacttcccaatatctcaatgcactaaaccttctactgaaatacagaagttctgtgcctaagtggaaaaatgataaaatcaactgctactaacaactaatctgcctcgttgctcattcagtgatactgatc

SEQ ID NO: 64594 - DNA, 255 bp, Oryza sativa
  unsure (1)..(255): unsure at all n locations
tgtgagcgtgcanagatggaaagtatttcttcatccaagaagtacattggaacgcatacaaccacccatacggcgttagtctatctcgttgtgctaatggtagcctatatgatagtggttctatgattctgtaaccatgccggtcaataagatccaaatgttcctatgatcttctccctcttctggaatggttattttcatgcttagatggagtacatatgcgtgatatatgcatgacttgtcagaacttgtgcg

SEQ ID NO: 64595 - DNA, 181 bp, Oryza sativa
  unsure (1)..(181): unsure at all n locations
catatatngtattgggcttattgaaatgccatggttntggggtcatgcgacatctgagaaaggagaaattgctcanatgtacttatccggatggagcatcccatctcttggtgaagacttgacctggaacaaatcgagcaacccagatgtngctggtattacactgcctttcctatacctg

SEQ ID NO: 64596 - DNA, 243 bp, Oryza sativa
  unsure (1)..(243): unsure at all n locations
agatcgtgtcgtataccttcactctggcacanactagacacatgcatttgttgactggtcannatcgagagaccacgatgatcgcgccggatcgaanggaacattggccacacgtcgaatgtattggtcangcatctanaaatggacaccgtcacagtagggctacccanaaatagccaccgcctcacgtataaatccaccccgcgtgagccttcctttccatcatcaagtcacccaccaagc

SEQ ID NO: 64597 - DNA, 255 bp, Oryza sativa
  unsure (1)..(255): unsure at all n locations
tctatctgatcaataataaagcttatcactactgtcacactatcacaagtgcccatccctctaatcacatgcattgatccgcccatggaaatacatgaatcaagattagatctcatgtgctgnntgtgtggatatatatngctatatgcatcgtcggtacgtgacaacatcgacgcttgtctgtcaccgtccaccgacgacacacatgcatgcacgcacgcacgcncatcgatcgatcgatcgagcaagcgtacg

SEQ ID NO: 64598 - DNA, 81 bp, Oryza sativa
ataacatatacatcctgagcgtggtctacatcactagcacacatgatcccatcaacgcaagctcaagaattttatcaagct

SEQ ID NO: 64599 - DNA, 134 bp, Oryza sativa
  unsure (1)..(134): unsure at all n locations
gtctgagtaaggcgccacactatcctgtgaatcttgtgtgtnttttagctttgtacaagtttcttatctatagggaaagctgcagttgattgacagcatatgctatattacgctgttatggaactttatctgta

SEQ ID NO: 64600 - DNA, 345 bp, Oryza sativa
  unsure (1)..(345): unsure at all n locations
cagatctatcatgacatcatcatatcttcangtgatgctctatggaggttcttttcttcctacgtngcctcggtctcttcttaaattgacctccttcatctgtgatggtctcatgatcaaagcttctctgcgcccccggagaaaaaccatgctggagctatagcactgttgagatccatctgctacttttgtgtgatgatattgacgttatgagttaccagcacagatacagttccactgtgcaagacgatgtctcttgagctactaatacttagttgtgacctctgtcgacaatcagcatcattgattgcctaagtgactgtttttcgatgtccttctaagaca

SEQ ID NO: 64601 - DNA, 312 bp, Oryza sativa
  unsure (1)..(312): unsure at all n locations
ccatcaatgtgtcatttatgcactcatattctcctgctaatngacttgataccaacaaggaatcacccataatctcaatagcatcggcttcaacctctttaaagcattgcaaccnctngagaaccgcttcatactcgtcttganntgtagtgcataaggcttaatagtataggcaaactcanaacttgcccctcgagaggaaattataaccaagccgataccacaaccatgagtacaaactgacccatcaaagaacaatgtccaaggcacaatntcaactgagccgattgagtcatcacgatgatccacaat

SEQ ID NO: 64602 - DNA, 379 bp, Oryza sativa
  unsure (1)..(379): unsure at all n locations
aagcagagacgctctgcaaattaatgacataatatgtttgggctgtgttagttcagtgcaaagttgtgatttggtgtaatggagatgattgactgcatgttatgtgtgatgacacgtgatgtgatgaaaacgactgaagttggatcaaactttgatctaacacagccttggtagaagactaggagaagcaggctgcaccaatcccatgaccatggcactggttanggctgcttgggagttctggcactnagagatattttaaactccactgcagagctcctcaacatcagattttactcaattaagngctgcattgtaattaaaataactaaaccaaaccggtccctctcttaatctacagtacttatattagctccac

SEQ ID NO: 64603 - DNA, 315 bp, Oryza sativa
  unsure (1)..(315): unsure at all n locations
actgtcaacatcaagtttcttcttgtcnngtgcagtctggggctatcatcataataatggagtgtgantntntatcaatntaatntgcttactcggtttatcattgccttgtttgattctatctacttagtctgcgaggactgaagagttntaatagcttctttgtgtttatgctcaacacagcttgatataagcttttaagagatcaaagacttggctagaactatcaagcacagcatanatacaccagtattgtacaaattaagcctccatttgctacatttacactcagtcagaatcagtcctttcatcatc

SEQ ID NO: 64604 - DNA, 298 bp, Oryza sativa
  unsure (1)..(298): unsure at all n locations
cgtactccatacaagcatgaatgaactgtatggtcggttcaaggtgcgttatcggcccgccacttgtaataactctgactgtgtcaatccattgtacgaattgacattttcttacatcctcctatgtacatccattttgggatagttaagttaatgatagtactgaggagtgatgaanagaatagttgtaattaccacgaaatcatcgtcgacaatgtttggacacacgatacacctttgtcctcgagttcggtgccttacggaccttatgacctgacaacggtcaccacaacgacac

SEQ ID NO: 64605 - DNA, 430 bp, Oryza sativa
accgctgcactactgcctgctccagatgccccttaccaccaccttaatctttatcccacaaaagaacctacttgttgtccaaacaactgcctgtaagtatgtctaaaatataagtccttcctatattcaggtccatatataaggcaactattttcatgaggtaaacacatatacatttataaaaaataaattgtatcatacacccactgccaatacgtatactgaattatcacatggtaatggtcaggctagaactctctcttgatgactatatgatatgagtatatatagtatcactaatcgttatcacatataaaaaggtagagaatttagatctcataagtattgcatctctttcggagtaacactattatatttgcgaaatagaaatctgacactaatactatgactttggaattttcttctatta

SEQ ID NO: 64606 - DNA, 202 bp, Oryza sativa
ttcttcgtggcgaatccctttggtgaatgcagcaatgatgacgtcatcggtgatgtcggagatctttgtacgttgctcataatatcgccggatgtaatctcgaagagattctccggacttctgaataacgttgtatatgtcgtattgtgtgccgggtcgctcaaatgtgccttggaagttggcgatgaagtggtcgcgtaat

SEQ ID NO: 64607 - DNA, 320 bp, Oryza sativa
  unsure (1)..(320): unsure at all n locations
gcatgatccttctttatggccttgaacttgacaatctccttctcactataagcatggagctnctcanacatactcacaagctcatcatatgagacatcatcacaatcatcatcactctcactatcactaagagatgttaccttagaggagccctttgcatgagacanagtggagcgaagagtngatggagcctcttgatggcaacaacggccatcttcttcttcttggagctggcattatcactatcnttcttctcggacncggatgaaagcggagctctctcattngagtcccattccccgatgaaggcctcaatcttc

SEQ ID NO: 64608 - DNA, 141 bp, Oryza sativa
ctacccgaagtgtttgttgatcaattacagtaatatctggactgaagtgttaacatatgcgaagatatgtcttgctgtgccgaaattatttatgtctggatacgattatttaactaaatacaggtcggaatctctcagtgt

SEQ ID NO: 64609 - DNA, 108 bp, Oryza sativa
tcacacatatcccaaacaaccctttgagcatgttgatcctatctaaagctattggttcttttcaactattgcatttattttcgaatgtcattgtgtggatttaaccta

SEQ ID NO: 64610 - DNA, 288 bp, Oryza sativa
tgacgatctctagacagatggatcttatatgaatcgtatgatgaagtaccacatgagtggatatatatgaaaggaatccaaatctgccgaatcgctcatgttatgatcttctacatcctatgtctccgcgttccgtcatctggcttatgttcttcatgtagcattcagatcgaatgactctatgaaattacgtcgatacttctacatattattgggtaacgtatgagacatccctattttcccccggtggtcttaattaccactgcttagctttcaattcgcctctga

SEQ ID NO: 64611 - DNA, 289 bp, Oryza sativa
  unsure (1)..(289): unsure at all n locations
gggatagtgtatgaaaatgactttgtcttatactnactgacatttattagtatgttcgtaagaactgtaattcaatgcatgcatgtcctnccngtcagagcgaagttaatagtatagccaactactagctccaacttatttatagacaatctaatagctcattatacaatagtacatactacactattaatatctgatgccacctgtcatacacatactgcattttggagtccgtgctatatctgactacanatctatagaccgctgctcttctctctctttatttatc

SEQ ID NO: 64612 - DNA, 517 bp, Oryza sativa
  unsure (1)..(517): unsure at all n locations
atattatctatnactnnntatattattatacgtataagntataacacattaactcctaacgcttaacatgcanagataccacatcatcatccactaacaattattatagttagacatcatgtanacatgctatattattcataaanttatagtttattaaatttttagagctctagagatgcangcatgttatatctatattccacanaatccacanaatatntcaatatatatctcccttattttntataatattctatggacatatatgtcattctcacttagctagtgcatttctttctttctcattngctctaccacatcatngttttagtgctaatggtatctatggcccaatattctatatttctttctcataagctataactcatattttagttttaatgatatatacgccaacatctcctatttattctcgaaacataactatttacataatatatcatatctataataatatatacactactagatttgattacttgacatattatat

SEQ ID NO: 64613 - DNA, 139 bp, Oryza sativa
tacgcttcgatgatcgatcatatcaatgcatctgccgatccgatgaatgctcagacaccaatgaaaccggcttgattcatgtgtcattggcgccgcatacgcggtggcgtgctcaccagcaaaagtgaaatctcgtcgt

SEQ ID NO: 64614 - DNA, 139 bp, Oryza sativa
  unsure (1)..(139): unsure at all n locations
actactctgtctgccaaattgaatcatgtattcattctanaaannatcgacaaatggataagagccgagaagtcttatattatgaaccttcgattctataaatcaaattcttctacattgaatgtatagctgcagcaat

SEQ ID NO: 64615 - DNA, 193 bp, Oryza sativa
  unsure (1)..(193): unsure at all n locations
cacatataatagattatctattaaggtggctaccaatttcttctcatctctctatctctcacttatacattaaattgtatttgtcttaaaagtttgtgttaagctagcatgtgtatgagatccaatacccttaactgtttattatanntctctctcccatatacttatagtangcttatagctaactattata

SEQ ID NO: 64616 - DNA, 193 bp, Oryza sativa
atctgttgggtttcaagtgcaatctacactgcgttacttgccaagtttgacgtactgtttgtaacggagagttttgtctcgtgttaatatacaacaataactctatcctgtcctgctatataagatcagaaacacacatatataatgatactgcattgtgcaacgatatgatctctgaacaactgaatgaagt

SEQ ID NO: 64617 - DNA, 229 bp, Oryza sativa
  unsure (1)..(229): unsure at all n locations
tcacaatataattctcatgatgtatatttttcacaatgaannnattgattngcgaattaacttcagcaaagaactgcataaatactcaccaaaacggaatcgtcatggcggatataatatatttccgtgaaaatactcgagttggtttatttattcgttggagttttttttattcacaggtcagagaacacgtgcactatatagcattgaaaggctttgacagcaattc

SEQ ID NO: 64618 - DNA, 479 bp, Oryza sativa
  unsure (1)..(479): unsure at all n locations
aagcatgatccttctttagggccttgaacttgacaatctccttctcactataagcatggagctcctcanacatactcacaagctcatcataggaaacatcatcacaatcatcatcactctcactatcactaagagatgttaccttagaggagccctttgcatgagacaagtggacnaagagtgatggagcctcttgatggcacaacggcatcttttcttcttggagctgatatcactatcttttctcgacccgataagcggactctctatttagtccatcccgagaagcctatctcttgcttcttctgactcttatgactgacctcatctttctaatactgctcatatatcttgaggcactgaacaagatcctctaccactaagactcagtgagagagctgtggctcattcttctatgagtgagcttctttcttctctcaaatatgactcacaaagcaattctcagctatgatatactg

SEQ ID NO: 64619 - DNA, 211 bp, Oryza sativa
  unsure (1)..(211): unsure at all n locations
tattgaatgacacacaatgtgtgacaaggacgcgttnagtggattatcattggagtggagtatatgtggacctgtgtagcatgactactccatctaataaagaacagagaggatatagatgatgtataacaaattaattatagacgtgaagcggtgttgngtacttcataaattcacttcagacttcgctcttataagtatttatatgagt

SEQ ID NO: 64620 - DNA, 453 bp, Oryza sativa
  unsure (1)..(453): unsure at all n locations
gcttggaagganatctagcttactccagtatgaacctttctatctttcaaantctcttctttagagtatcttgaacattcattctgttctccacactttttgtgccagggagaaaatatgttggtcgttactcacaaatctattttgcgcgcactcatctgcaccgcgctaggtcttcctcctgagaggcaagttggaccttctctatggctacagtttggagtcttatgtacacttggattggaaaaattcgttgaaaatattacgaagtgcttcacaatattacccaacttacaagattgcaaacatttcctttntcttctcnttttttgaaatagccaattaatcatgcaggtttcgttccattgatgtgaacaatggtggcatgtgcgtcttcactgtacacatgcgaggagaagctatgcttcaagcccttaacatgacagcacacat

SEQ ID NO: 64621 - DNA, 260 bp, Oryza sativa
aatagatatgctgatatattggtcatattttacgataaacatcgtagtgtcaaacatcgatattaatcaacaaatcgattgacggccatacgaacttttctcgcacaaacactaatttataataaatactttatactcttttaatagttatatatttaaaaataaaagatgattatggatgaataaccttgataaaatatacacttttaaaaacaataaggttattcttgctagccaatgtgacgctgtagccttttttt

SEQ ID NO: 64622 - DNA, 381 bp, Oryza sativa
tggcttcattctcagtttgctacatgtattcttgttctacaacgaagccacataacatatgttagatgtgattggatgaatctgctcgaaaatggtcctagcagacactatctcacaggcgcgcaatttcagtagaagacactatctcaacagcgcccaatttcaagcattactgatgcctcgcaatcctatgcttgagtgataattatatggctatattaattgatggaacgacagaaagcatgcttgagtactgagaggacaataataaagctttggtctaagtggtggcggatcacttgatataacgttatgatgaatgagttgtctcgcgagctatggctatcttatatagatgcccctttaattagtaaattatat

SEQ ID NO: 64623 - DNA, 468 bp, Oryza sativa
  unsure (1)..(468): unsure at all n locations
atcttcacactctgtataacttgctntgcacagcttcgatgactggtactcattggcaaaaccaaagtttccgaagacctaaaaagaatacccagttaaacacattgaagatatattatccattntgcataggttgtaagcaacaaacgagttttattcctaaatggaatgcttcatatgtaagaatctcaccagagataccctatataatctgaaagaaaaaattcgttcgtgttcaaaacaaagcatccaagcacaaaaggcatggaaagaaatccaacttgttgctacacaaaagatgtactaccactacacaatgaactatcaaacttgatttatggctattagtaattaataatagaattttatgacagaatatgaagaatcaagtgtgtcttatgtgaagaactgaagaccatagcantctcagtcgatataatggtgatacatatacttcaatccatattc

SEQ ID NO: 64624 - DNA, 164 bp, Oryza sativa
  unsure (1)..(164): unsure at all n locations
gcacataacagatataccaacagccatgtgtgtctggtagcttctcactactgtcttttcagaaagaagctcaaaaacagaaacattctgttgtgaaaaaggcanaaccanaacccctctctgataacaaagaaaagaaaacatatctttgatctatactaata

SEQ ID NO: 64625 - DNA, 387 bp, Oryza sativa
  unsure (1)..(387): unsure at all n locations
gcttctcgggttctgggtctctgcccgagtatcttgtcaaccncganaagatacgagctatagagcggatgcgccccctcagcaggcttatggatgtgcaatgcgtcaccggttgcatggccgccctaagtcggttcatatcgaggctgggagagaaggcgctacccttatttaagctcctcaaacgctctggaccgtttacctggacggaagaagcttgacatgcctcgctcagttgaggcgtatctcagctcttccccagttctgagcgccccggagccaaatgaacccttgctactctacttatcggcgaccccgcaagtgagtagtgcggcgttggttgtggagcgcgatgaggacaatacctcattcgcgcatccccaccct

SEQ ID NO: 64626 - DNA, 221 bp, Oryza sativa
gctcacggcctgcatctagtgtgggggcacgtatatcatttcggtggctatgctggcaacataccaagtgccagcccacccctgcggtatttatcgcgacgaattcaagtcgtactgagagtcctgtgcgttcacagatgctaccacatctcatggtcagaatagtactaaaagacgctttaccagatgcataatgtcttggagaccgttcttctctactc

SEQ ID NO: 64627 - DNA, 363 bp, Oryza sativa
  unsure (1)..(363): unsure at all n locations
tatcagtttattatctaatgacggttaagtctcactttgattcccaaaacttgatatctcngcatctgtttcggattttgttatcaataattgaaggctgactcctgattcccgaaaacttgatacttagcattgttcggagattgtctaataagttgtatgcctcacctcagaattggtatcagctagactgtggacacatactcccagaattcattgctgttttattctctgaccgtgtatatgctatgcttctgtaaccaattgttctcagagaggtgtgttatgatgtgacttggactcaactatttaagtttcagcatagaatattcacactacaggtgtccagttcggtggctcatg

SEQ ID NO: 64628 - DNA, 272 bp, Oryza sativa
tatcaactgcgcagggaggcaacaacagctcaatctgattctgcgctatctggtttcgcacctgaaattgcttggaacatatggctggagatcgatcgacgaagtccgcgagatcgacaagaccaaacggtgatcaagaacagagtacgttaaccatgcaaattaaatcaccgcgtgtgccgtggaggaaagtcaagaaaccaaagaatttattaccatatgggataattacgttggctgagacccacataaaagacgaggggctcgtgtgc

SEQ ID NO: 64629 - DNA, 331 bp, Oryza sativa
  unsure (1)..(331): unsure at all n locations
aactatcaagcacagcataaatacaccagtattgtacaaattgagcctccatttgttacatttacactcagtcagaatcagtcctttcaccatcagagttattatcgctcggctgaaggtcgttgttgcggaattgctctacaacatcgcttgcaatcttgtcagctgcactttgagcattactgataagatcaagagcagcttcttcacttgtcccgtctgcanagccatcaatggtatcaatttcaatcctcgggtacaaagatntggtcatcgccaatgccatactagctcccatacttncagctttcttgatattcttgaaatatac

SEQ ID NO: 64630 - DNA, 330 bp, Oryza sativa
  unsure (1)..(330): unsure at all n locations
ttcttcttggcagcatattagttagtttctatccatatcccttagcttcgggaatgtgttgaagttctgtgtctaccccttcaagatgtatttctggtagacatcttccttgaagctctgaaactgctctgccattttctttagagtccaccttctcactatgttctctgtaccctcacgaaaggagaatgtctcaagcatcgtggtccacagcatctctttctctgaatctgggacanagctcttatagatctcgcgtgctcttgttctgcgccagtacaccgtattgacaggcaccttattcctcactaaccaaccgctgtgtctacg

SEQ ID NO: 64631 - DNA, 422 bp, Oryza sativa
  unsure (1)..(422): unsure at all n locations
atcggactatcaacgctacatgagtaaactactatctgctccactgtatatgcatgagctataactcatatgtgcatttgtgctatgcgctttatgttcaatctctacctgtngtcctctgttaattctaacaacccagcactcctgcctttatcttcatcaattttatgttgcgctatcagcataaatcattgcgatgcctctgtcagagctcataagtcgtataatcgacgatgtagtacctctcatctattataaaacgacaacagacattggacccgctattcctctccataggaccttcgtatccgccacactggtagcattgtggccgcgcactgatatttatcatgatacgcgactggtatccagttcccagaaccgcatgacctccgatgtactggcgatcttcgcgtgcggat

SEQ ID NO: 64632 - DNA, 477 bp, Oryza sativa
  unsure (1)..(477): unsure at all n locations
gcttgaagacacatcatggatagtagaatggagctgtgtggttgtattttcagttacgacaagatcatcttaagcttgccaaggtgtcaaagattttgacaatatagcagtttttattgacaaattttggtagactgatacactataagaaacgtttaggggtctttccgactagctttacaaggtggtgggttttggagctagccggtctggattcgaagcctcgcttattctatttatntgatattaggctatttcttaataattgcggtctctgatacactaatacactatgagtatatgactaacaaacaaacaggtacatatgccacttagcaatcctcaagccaaaaccgagtgctaaagggtaaacacacacatacacaaacaaacaaataataattctgtagctcanacaagtaagtctgtgaacaccagatctgacagatatacttgcataaaacataacatgcatgt

SEQ ID NO: 64633 - DNA, 499 bp, Oryza sativa
  unsure (1)..(499): unsure at all n locations
gcttccgggttcaaacgacgacacaatgccttgaaattcctctctgacaagcagcgcggccagcagatccatgaaggtctctctctctttaccatccatgtcactntgcttacttgtactgtcttggacataatctagcacatcctcgtctgaaacatagcccgcagcaaactcattntttaccccttcatcttcctcgtcctcgacatatgccttgtatgtgaagcgaaagagtacttcctcttttgacccgttcccaagtaagccccatcctccatataaagatacaattatgtctgtaagtactgtgtctttaagtgatcctaactcaacctggcaaatagaatatactcagaaacacgttccacttcaacaaaggacacccaagaatacagacaaaatacacttcactcatcactgatatagtatgtttgcttgacctagcaaactggctgtaaacagtacactaaactacaaattttccacgtatatcacatac

SEQ ID NO: 64634 - DNA, 143 bp, Oryza sativa
gaagtcttattctaccacgcaatcgagagcttgagacgccgtcattggaagctcgctcttcaccacgctgacgatgactgtcatggcgttcatgctcatgatagacattatgtctatcagagacctgccctgatctgggatta

SEQ ID NO: 64635 - DNA, 426 bp, Oryza sativa
  unsure (1)..(426): unsure at all n locations
agcttcagcgttccattgcacagtggcactgacaggcatcccttgttctgtactgcagtgcagtttaacctgtgtgacacagtgaanagaaatgtaaattctttggttactgcttgatcagaaacaacttataaagagatggaaataataggggagcatactggtacgtagttgaactgcagctgcagcggatgcagtttcctgcggtgaattcataagtgccattccggaggagcatcagaatgtgatcagctgangtatcgctgattgatgaacggcacactgaagacaccagttttccagaagttagtactatgtctaagaactcgtttcatatgacattcttaccgaagaaagtgaatagtagtaaacatcaagatccatctaagatagtactataatagtatattttgaaaccttgtgagt

SEQ ID NO: 64636 - DNA, 270 bp, Oryza sativa
tgtgtctgccaggtttcgtcaacaaaagtcggttttatcgatcgtcctgacacgacttggtacctgggacgattggtttatacacctttgtatacccgcagacgacgtagcggctattttgtcccgtactgattttcttgcttgagtgagaattcttttatatcgagattttatggcaaaaagagaatatccggaatgcaccgggaaagctttctcgtatcctgttgaagaatacctattttatgtctggctacaaccataatatgtctt

SEQ ID NO: 64637 - DNA, 375 bp, Oryza sativa
  unsure (1)..(375): unsure at all n locations
gatccttaagcacctgagctgcagcttatcaatatttcaaaataanatcctttgttatttgtgaanactgtctagnctctctctgtcttgctgcttcatttatcgccaaaatctgacctttaaaatgagggttttctttctgtctttttgtttgtagatggccggcagcgtcacccgtcgtggtttggacatgactggcttcgtcttggagctgcggggcatgtgcgtggtcctggggtatccacatggagtggactaccangccaggccgctttcggagcaggaaggtgacgatgcacagccccacgctggttgggaggtcactgcagtgatcctctctggctcttccgagcggacttcgctggcagtcaccgc

SEQ ID NO: 64638 - DNA, 241 bp, Oryza sativa
  unsure (1)..(241): unsure at all n locations
cttttgtaactcagctnctgcaaacagtgctttcgattctggggctacacattcanttatatctatgaagtctgncggaaatcattggatggatgtagaagatcttatacgttcttcggtggtagtacaccaagtaatcaagcacttctctttgtacgtagcccctctgtctgaatagaaattcatgatgtaccatntctggncaatcttattctggtagaatcgaaagaccttgatgtca

SEQ ID NO: 64639 - DNA, 436 bp, Oryza sativa
  unsure (1)..(436): unsure at all n locations
accttaagcgaccgagcatgcactntcgaaacctgcatggagacctgttttttatcttacatcctcatgcactccaggcgtgcatgtttctatcagtgagaggagttctggctcttccgcgaaagagaagtctcacacacatattaaattatggttcaagttaagttctctctcacacacactcatggcagtcctaccaatggcgacaccgatgtatggcacgcctctttgtcctacctcaacggtgtccaccgtagcgcacctgcctcactcagtggtgaaccatctatgcacggatactgtctccgctcggctatctaatctcgtaggtctatacccatacgagaagtgcggttgtacagaggtcgcttcatgcttaacttcatggctcggtccttactcgaccggggacggtactagccttattcagatacca

SEQ ID NO: 64640 - DNA, 459 bp, Oryza sativa
  unsure (1)..(459): unsure at all n locations
ctacccagaacaacttgcaattgttagtagaaagatctcacatttgtggtggcaaggagagaaaaattgttatgttcaacgcttcaattattaccaggaaattggtggcaaacaactntgatcttggcagcaccaacaacgggtacttatgacatttggctatacttccataagtgtttaatattaacaatnttttctcacaacttttttcaagtcaattatgtccacagtattctacctccagggctaaactgcctccagaaagacactccatgtttacgaggttctccagaatgtatgtctcgctcttccttaaccatagtagttggtatataagaatttgaaatgtttatactattcatacttttgcacatcttaactgcagaatattcctttgcggtagactgtggtagtaacagatctatcagaagctcagataatactatgtatgaattggat

SEQ ID NO: 64641 - DNA, 452 bp, Oryza sativa
  unsure (1)..(452): unsure at all n locations
gtcgtggagatcagatagatatgcatgggtcgttggtgaccgaggaagtatagaagaaactcaacgctcgcggggcagcatgaacacgcaagacagcaagagaatgagatcgttggtgaaggttctgggttcacgtgtcgccggcgtcgcacgaagtcacgtgccgtggtatggagaaatgcactacgacgaattattgagccgtggggagagatgccgtgagatcgtacantatgatgtagttgtgttngctgtcacactgataccgtcatcattatttttgtgtagacacgctttgattatctcgctgacacttttacttgttgctcactcatttttattataaaagtctattattttgtatgtaactgacatatgatttattttttatataagtaatgtgctgcctttcatgttattagacgaagacctactctctgactttctgtttt

SEQ ID NO: 64642 - DNA, 367 bp, Oryza sativa
  unsure (1)..(367): unsure at all n locations
agctngagacattgactctggaggacgagagataacattccacatatgagcatgaaagtttctcttttcagaacccccaggattcatgctcacataaagaatccccagagtcctgttctgtggtcgtaagaaataccaacaaagtcttcatactcggctaactcctggagatactcctcggcggttgggacgatgtcttcatcttcatacactatagattattataaggggcaagggtgagtacttaacgtactcagcaagccaggggaaagaatgacatgtcggtttaacaaagaggctaggcttttatttgcgaaagctgctnttttggcaaagtgatttattttacaaaactcctaatgagtga

SEQ ID NO: 64643 - DNA, 279 bp, Oryza sativa
  unsure (1)..(279): unsure at all n locations
acctcttcactactaacatgggctatattgtattgtctatcttgnngattggctaatgatagtgctactggccatattgctcatgtngcatcatctagcatatctacctcttgtgatgatcttgtggatatgcctagctctagctctagctctcgtgtttctatttgtgatgtctcactctgttgtgagaacaatgagcttaaggagcangtggccaagctcaacaagagtntggagaggtgtttcaagggtaagaacactctcgacaagattttgagt

SEQ ID NO: 64644 - DNA, 379 bp, Oryza sativa
  unsure (1)..(379): unsure at all n locations
gagataaggtgcaatcattgtcacaccataatctcgacaagtgttcactgcgactnttattagctaacatatgactaactaaaatttggcttctatgaaccttcctgagcaaacactcccgacttccagcgaggagattcttaatctctctaacggcaaaggcaagctccgagcgctcaacttctttggcttggatcatttgtaacgctaccaagcagtccgtttccacctgtactgtgagcagccgtcactgaagcgccaaggcaataccctctctgcacgcgaccaactctgcttctaatgcactatgacagctgttcaggggtttgcaagaagcaaaaatcacccttccctcccagtccctcatgactatgccaat

SEQ ID NO: 64645 - DNA, 215 bp, Oryza sativa
  unsure (1)..(215): unsure at all n locations
aatacttacatagcaagataccgcttgcaaatttttcttctgaaaaaggcaatatgatatgcccaatttttatctatgtattcagtacccatagattcccttgtacgttcttactgctatgttctgttcagaactggcgtggaaaattcatcgaaatattgagtatcttcaatatacccacatagcgggaggaatctttacganactactggtat

SEQ ID NO: 64646 - DNA, 356 bp, Oryza sativa
ctagtgtgcagagtagagagttcttgtatataatccatggaatccccggagattgctttccttctatcctttcgtaccacgtggggtcacgtactaagcaagccaaaggcgagaagagtaataatcacaagagaaaagcgccgatgcgaactgaagaagaagtacgtaagatggctattatcagcaccgaatggcctttcgcagggataactattcctagacgtcaaagacgaaataccttccgaggtgcacgacatgtgacccagcaccttctaagccatggtggcagagtatctgatagtgaagggtcagatcaagtctcctcggatgatgaagatgagtctccccgacatctc

SEQ ID NO: 64647 - DNA, 167 bp, Oryza sativa
  unsure (1)..(167): unsure at all n locations
aagtccctagaagacacatggntccaccacacctcggaatatatggcatatgtggtatataatccgagtaaataaactcataaaggatgtaccaaccgcctgaagaatgaccacaatatataatcagcctaagccataatattggtcaataaatatacacacttacg

SEQ ID NO: 64648 - DNA, 394 bp, Oryza sativa
  unsure (1)..(394): unsure at all n locations
gacgtcgtcatcgatcgtccatgatatacgttgttgtctctgtcggtcatccacgaagttcgntcgtgccatagccggtcgctggcatggntcgtgggtaatttgtttcaatctttntatatcctgacatgtatcagctctcccttttttttcanggttagtgtaaacaatttcccttggtaatcaagacctcaagatgggagcggatcctcctaataagttgctcgtncatcctcctagcgatcaaattcaagatcacacaatcacggcagaattgctcatccaaatgctgagagcatgtctactgcacatatcaaccaaatgaaaggtatatgccacaaatgaagtcatatcggagaactaagcatcacttgtggagtttgatatttacaag

SEQ ID NO: 64649 - DNA, 391 bp, Oryza sativa
  unsure (1)..(391): unsure at all n locations
tggcagttattgatacaatgatntacaggacacgttaattatattcataaagtaaatgtactggacatatgactaatgtaattaacctccataacaatttattataagtcattattgctgacaatatgtactgatgaatctccatgaaactcatgaagtataatattattaatatttatggacactctatatatataaacatgagtggcatactcgggtactaatgcatacattgcactgtcagattactacaattgatatataatgactggttattggctgttatgtccaaatttagatatatatattatttatctctagtgcagttactatctcatggcatttagtgcagcaacacatacatcagtgagnagttaaagtaattatgtta

SEQ ID NO: 64650 - DNA, 369 bp, Oryza sativa
  unsure (1)..(369): unsure at all n locations
agcttcccatggtgacacaccatatgtcatgtaaccattgcatcaccatcatggaccaagctatgactntgtaagaaccttatatcctccttgagcttattaaggtgctggtcaacttccagtttcatcaaatctaagtactccgtgtaattaatctctacatttgcatccaacaagtgctggcgcagccgtgacattacagntgcaaacgcctcatagttgctcccgatatcacagctgcgatggtaggacaacaaccatggtggcggcacttccaaatcgttgaacttttcagcctcgctgttaaactcactaatggaagaagaagacgttctgtcaatcaatggcccgctgaataaagacagatca

SEQ ID NO: 64651 - DNA, 131 bp, Oryza sativa
cacaagatcaaaatatcacgcactctagaactcacaggagtcctctctcgtgaatttggacatatcttggcttttgccttaggggaaaccctagatcgatggtgaggcagcagagattgacattccccgat

SEQ ID NO: 64652 - DNA, 397 bp, Oryza sativa
  unsure (1)..(397): unsure at all n locations
ttattcgttctttgagcaaaaagataaagatcggatagattcgaaccgcaattgcaaaggtaatcactactatgccagcccaaatcatgatcttcaccaacttggatttggttctctcgcgaaaatcgcgagttgcagagatgagaaccatgtaaagcaagatcccgaataagaaaacagaaaccgaggaaaccacacgagtgaagactagtagagnctcgtcttttgtcattctttgctcctttttcactcaatgattcattcgaatttcccgaccaanaattctatatgtctattcatagggcctcgttgctaagtgctacaagatctagtgcactggaactcgtggttatggacccgaatcctttagtatggaacattgtcttttccaagtaaa

SEQ ID NO: 64653 - DNA, 388 bp, Oryza sativa
  unsure (1)..(388): unsure at all n locations
agctnttcatgaaaccgagctagttccgagggaggtgtttctttctgccgaagaagtgtgaaaaggtatcattaacatcaagccggatcacatcccgcctggtgtgctaatgcctgcaatgaatgatagtcgcgtcttatcatgccaccattataaaattatcgctggtttgccgtacgctatcgccacgttatgccagaatcataaaaaagcaagttgggagtcgtcagggtgcagcacgagacanaaatggaaaatcatagcttgttgaaaaaactcgcaccgccgctggggcctggtcatgtcgctaatctctgctntatcgacgtaatgctcttttccaccttgctcacctcgcgtgaagtggtggtgctggacgatgcctata

SEQ ID NO: 64654 - DNA, 410 bp, Oryza sativa
  unsure (1)..(410): unsure at all n locations
atctctgagtcacctgcggctgcagcttcgatagcaccttgccttcggtgtcacgaagatttatatcatatgatttctcactttgcatcggtctcgtcagaaaacggacctgatgaaaagatccttgtcgggtgacccaaatactcctctgaattgatcgatgaaactctatcatcctgattgaccattgcaccacataaaaacgatggatttcaatcgctaaatgtanggtgctgaagtgctttgctcctgaatcctgatctagtaattccaacgagaatcatctacagtcatgtccatgtattaacagtgactgacctatatacgggaccagtcttacatccgtgaactagtaactccagactaaatttgatattgtcgtcgtcacgtcatatagcactttttttttt

SEQ ID NO: 64655 - DNA, 511 bp, Oryza sativa
  unsure (1)..(511): unsure at all n locations
agcttaatacacaagtatgaaggatctcatatccaattttatcttatcttaactaaaatcttatgcaaatataaaagaatatttgtaaaatatccttaatggtagaacaaattataacacaaaactaataactatgtatttttcataataaaacgcaagatcaaagttatgtcacaactcaaaaatcaacattgttatacgttaaaaaccgaagacagtattatagatgtatgcgatatatcgaggcgaagtatgattgattttttnttctaaattcatcattgcacatggttaattctgatattcacgatattacacacccgtgagctctttttcaatacgagcatgataatgtaagagaattacttattctctgtgcccacgtacttncttagtgtaaaananantactccatccattctaacatataacactttatgtggataagagatatgaagtaatatgaatcaatatattactatattctataacggatggagtatatattttt

SEQ ID NO: 64656 - DNA, 330 bp, Oryza sativa
  unsure (1)..(330): unsure at all n locations
agcttgtctatgtcaatataaccttcgcagtcgatattaacattcttatgccaagctacgaacgacgatgatgatgcctttcanagtccagcggacctatcattctacgacactaacaattaaattatagaccgaatggacaatgtgtggtccaattcttgccctgaactagatgaagactcaactgagagtgaatccgccatacctagtccacctgtagccaacctagaggactngactgaccttcgcaagaccacaaaggcgtctattatcgctgagtacgctgatatgaatatgtgacagtcatatcgtaaaaagaaagactcaata

SEQ ID NO: 64657 - DNA, 217 bp, Oryza sativa
  unsure (1)..(217): unsure at all n locations
actgcccatcgacacactcactctggagtcccacgaattttatctancacatcacaagaatattcagtacaagaccatctcacacagtagcataacatcataagaatgcatggcacgtgcacttgcgccacaacagtcgattaccacaggccaataaggaacaccatgacaggaacagcaggaggaagctgtaaaccttgcggaactcgaacatgag

SEQ ID NO: 64658 - DNA, 461 bp, Oryza sativa
  unsure (1)..(461): unsure at all n locations
tatgacaagcctcgtgttatgttcgaggacagcacatactcttgacagacgaggttcagatgctgcgacaaccttggtgatgtatggtgtggtgaacttcttggattcctagaaagataaaatcattcagattcagattcagagtgattgagcgagactttagtaggttaaccacacaatgagatgaaaaggctgctgggtgtgtgcatagctacctgccaatagtgatctgcanattcttgtgccttggccattgatggttggatggtgtctctgccaactctatangcttgggtactcctggtagctattgccgatgcgtatacatcggtgctttttttcagagagttgagatgtgctctggcagcacgaaccgatctctttagcattatgaaaaaagaatgcaagtcagagtggttanaagtgaattgtgtgatcagttaacaaacatgatcatgaac

SEQ ID NO: 64659 - DNA, 289 bp, Oryza sativa
actctctcgtgatgttgctgtgtgaagggcactcccatgatgtctgctcctcgcgactcgtcactgctctcaggggagcctatttctacacacggcacaccgactgtgtcgatgagccgcgcacagatggtgtcgcggtggtgtagagctacgccatcgtctcctcagctgctattgatgatttcctacagcctatgagcacaacaggcactacttaaagtgcatggtcgttaaaactatgaagatagatctactcaattattcactgcacataatgaattttgcggca

SEQ ID NO: 64660 - DNA, 375 bp, Oryza sativa
  unsure (1)..(375): unsure at all n locations
agcttctatcttccgcctgttctgtttagatgccattanactgtagaaccttctctctctgtgttttttccttggtaatgggtgaaccagactggattgatactctagctggtaattgacagccatactagccagtcaacagaagatgactcctttgtggatgagaagttgggaatacattcaccataaaaaagatcaaagttgaaaggaaaatgttgaaaagagaacatgaagcatagaagctgacgaggttcttgtcctacttcttgttgagagaaagatggcgcttcaatgnatggtctatccaactattcaacctagcaccactagatagttattntattttcttttcttttctgaaaccaaataaaatgt

SEQ ID NO: 64661 - DNA, 267 bp, Oryza sativa
  unsure (1)..(267): unsure at all n locations
aattggctcatggtggtgatagagatacctcataacctacgatgcggcagatggctaaccgctcgtgcaacgcantgagtngctctggctcatatgtgtcagaccaagaatcatactcacttgactcanagcccagctgctcgagatagtaatngcaattttcttggatggcatncttatccatcatgtcgaggagagctaggatatcttctgctgattcttgntcttgttngatgtcnacaacgtcagatgcaatcttgcatcatg

SEQ ID NO: 64662 - DNA, 394 bp, Oryza sativa
  unsure (1)..(394): unsure at all n locations
tactctactggtgagctctcattggcgagagaagttcatcaatgaggatcttgtatggctggcaccgcataacaactggctcaccaagcttcggcctaagtgagccgttcttgctaactagttgtgagtccttctctgcataatcttcttcatagtctgcagaccctccactttcataaaatgggtaatacaagacttgaactcacaaggagcatctctcatagtgcgagaactccaacagttacactactntggactggatcctgcacaatggaaaggcattttccacataaagtggattaaaataagagttggctgatctaatatgtgaattatgcgtgtgaaattctatactcgacgataaattatctaattctgttaagtcagaatttat

SEQ ID NO: 64663 - DNA, 174 bp, Oryza sativa
  unsure (1)..(174): unsure at all n locations
aacactagcggtagcgatcagtggaacgtacagtagtcagagtagtgatcagcacgtctcagtatatatatttatatataagtatatatagctagggcttatttctaccacacaccattgcatttgactangatgaataataattggttagccgatatattaacaatattacta

SEQ ID NO: 64664 - DNA, 412 bp, Oryza sativa
  unsure (1)..(412): unsure at all n locations
agctcgcacgcaatcggattatacaagttcgggccgctatggagcgtaacaccctactcctgtgtttgggattatggatgagntttacaaagatttcttcactctaaaaagcgcactcgcttcctccctcctggagatatgagtttttctccctctctcccctttttctttctttntnttcttgtctcagagggcagggtcctccttttatatctcaaggggataccacatagcgccgctctacctaccctctatcggagggggatcccaattcacttttcctgggctttaaaccgagccttctccccgaagctaagcaacaaccgattctcgagtggaaccaggcgccgccccccgcctgacacggaggacaaccctgtcattccctcataaatgaacgatgacctgtgac

SEQ ID NO: 64665 - DNA, 147 bp, Oryza sativa
  unsure (1)..(147): unsure at all n locations
tctgataactgtaagttctattgtgggttgacagctgcgcaanggaattntttctgatcacacaagttcatttttctttttcagttcctcgtggagtacttctnggctgcngtgatctgatattntcatctcacatgatgtttactc

SEQ ID NO: 64666 - DNA, 319 bp, Oryza sativa
  unsure (1)..(319): unsure at all n locations
attatattcacagaaatcagaaaccacttacagatttagctggatccttactggagataaatgtgagctntcagaattatgcgttcttatctaccgtatgaaattnttacacaagatgtgttcttagagcaatccaaaagccacaatgccctgcttatagtgaaaggggacaaggcacaagcagtgttgtcatctgagtgcttaaattcctttgcaacaaaaacatattggaatatgcaggacataaagataccatttaatttgatgccaaagagcaaaacaaacatcgtttttcttgctataaagatgacaacgcacc

SEQ ID NO: 64667 - DNA, 449 bp, Oryza sativa
  unsure (1)..(449): unsure at all n locations
ctcgaccgngatccttaagtcacctgcagctgcagcttgtagagaagagggctgctctgttcctgtatatgtataacatggagtttgtagacaaacanattggttcaagcatttgtctcttttaagtatggaatgtgggcccacacaacatcatactttatactagcttcaactataagaattattttagctatggatgcctatcaccaaaattccctggagatgaaagtgttgattaatgctaggtatgcaccatacagaaagtaatctatcacgggattttgcttggttaaatgactgaaaatgtagattgcctagtctcatancagaaaatcaaaaaatttcaaggcaacatttcacagattataatagttacttcgtccaatcattaattattngatgtttataaccaatatttggttaaactttaaagctctgacaacattaac

SEQ ID NO: 64668 - DNA, 353 bp, Oryza sativa
  unsure (1)..(353): unsure at all n locations
atgttcgtacaaaagactgtttatgtgtatggtcttcgatacagttaatacaaaagagataatggttttgtcatcttctatcataccgtgctaacaactcttatgttacattaactgctgcaatggatttctatctgtatactgagacgttgtgtatatacgacataacaatcgtatctttatccgacanaacatctgtggttttctatgctctgacatttgtgactgagacgaagatactgaagagacttaatatactgatactaaacaccctgtgattcagcactgtagttctctgataaatggtagagtccatttatattggtatgtatactactacaacatacatgctc

SEQ ID NO: 64669 - DNA, 383 bp, Oryza sativa
  unsure (1)..(383): unsure at all n locations
ctcaccagaaacgatgatctcatatattcctgtgcatcaagtaccttaactttctctcatttgctctagagagcaatgatcaattggtaaattccttatttatgcaatatagctatgtagtgatcatttgatggggctcttgttctcataaatatggtttttntgctactgatacattnttcatatggcactgcacgcccatttcctatggttcatctcagttggtatcatctatntgtattaatagagtntgttgtgagttataactntccaatacttgaatcattgttgcaagttatctcctaatcataattggttggtcgactangtaggtaactgatgcagtctaacatatctcatgcatattgtangcattccatatc

SEQ ID NO: 64670 - DNA, 146 bp, Oryza sativa
  unsure (1)..(146): unsure at all n locations
gtcatcggtgagccatccggcgacgacccgtcacaagtaactagtcacctgtgactggccanaaatagaacccgtcaaaagtgatgtanagcacctctgactggccgataaatattagccctgcacagataactagtcacctgtga

SEQ ID NO: 64671 - DNA, 190 bp, Oryza sativa
actatgttgacaatatcatgtgtgaatcattaacaatacgatgttgatgccaggctttatcctctatatatctcaatgctagaggcatgtaagcgtatcgtaatgatcaatattcaagagaacagacgcaaggcatattaatggcatggcatagtgtgtctaatatattaataagctcaagataacattg

SEQ ID NO: 64672 - DNA, 311 bp, Oryza sativa
  unsure (1)..(311): unsure at all n locations
agcttanggatatgcaatgcgtcaccgggtgcatggtcttcctaagtcaggtcatatcgaggctgggagagaaggcgctacccttatttaagctcctcaaacgctccgggccgtttacttggacagaggaagctgaacgtgccctcactcagctgaaggcgtatctcagctctcccccagttctggtcgccccggagccaaatgaacccttgctactctacttagcggcgaccctgcatgtggttagtgcggcgttggttgtggagcgcgatgaggacaattcttattccgcgcacccccaccctgtgctg

SEQ ID NO: 64673 - DNA, 466 bp, Oryza sativa
  unsure (1)..(466): unsure at all n locations
catgcaagctcgcgacaattgcagtacaatctcaacagataatgctttttatgagttagatgaccaaaagctgaaactgcgatggtttggatatggaaagcagagcatgtgccgatggaggagtctgagtatcactgcacaattagcaaggatcgggtgcgactactgaaactttcgaaattcagcagattcttggtgataaagagcgagtcagtaatattgtgcagaatctacctactgtgacattaacaagtagacatttaaaccatacactcctacaggtatcggatggaacaccatatagctgtacggattaattatgcattcgatcatgtatgatctcactaagccgactagagaggtgaatgtagttgtgatgccaactaccttgcactctgcagtgcgaccaccgaaacacgagccaacacagaccaaagatatcttatagtagatanactctattact

SEQ ID NO: 64674 - DNA, 460 bp, Oryza sativa
actagctaggtgtatggtgtcgcaagttacaactctgactgtatgatctgtgcaaggaacattacctcaacacattgaacgaacagtttatgtcgttggctggagtcaaagaatcatgctgtcaacactgcatttgatacaagaaacctacttgatgctgcctattggggcatagatcaacgacaagaggaagtgaagaatagtatagaggatgccagcaaggggtgtattccaatgcgacgctgagagatgttggacatgacaactaactgtcctgcatctaaaacgaagtcatcttctgagcccacaattatacaggagaatcatggttacagaatctaataccagaacatgcttcatggacgacgataatcttgtgattacgcgacaacatgcattgtgtacatactctctgtggtcaaaagcatatgtgctgctatagcaacacgacattaggtct

SEQ ID NO: 64675 - DNA, 498 bp, Oryza sativa
  unsure (1)..(498): unsure at all n locations
taactattctcacgaacataccacataaacgacacaagtcttcataaacatgaatatcatcatggtggtcattatccaactgtttcttatctatgtccgtaaccatattctatggcgggctattagtttgattcaaagtggtggcgaaatcacttgttgctggatcttactcgcctgtttttttctctcttgtgatggccataaatccattcgttcaaactagtaatggagcaagattntcactttntactctccataagaagtgaaggacggatatattttttctgctatcttctttacaattcanaagacttacattgataaatagtgagtgattgtttatttgatcgcataattaagtangaatatgtgatttttgtcgtacacacatnattacgtgtttcccatttctcggncacattaatgcttctcgtatggaatacattaaatgatgaaaagaaaantagtgaacaaataacatgtctttttaatggacac

SEQ ID NO: 64676 - DNA, 401 bp, Oryza sativa
  unsure (1)..(401): unsure at all n locations
gcttgttgcggacattctgcagcagctgagacagattgcctctccattngtagaactccagctccttcttgttcagaatattctcagagacctaagatgataacaagggcatgattaaaccgttaagaaattcaaacaagttgaaccaaatgaggtggcaagcatggaaaactgctattcatatgcccaaacaaaaccgcattgtaataatgtcaagtgggttgaanaacctttgacgtctatgagcagcacaacttgagaacagtagtggcaagaggatcctcaaagggactgcgtgccaaagcactcgctgccttatgtagtattttcattatctcgactagcgtactctatatatnttttagaacaaaataccaatataagcatccaaagcaaccggt

SEQ ID NO: 64677 - DNA, 222 bp, Oryza sativa
ttcgtcatacgctgtgtacgtctctctgctcgatccctatacaactcccatattacggtggatacgaccacggcaacaacacaattcgattaggatatggaataattactgactatagacagcacctacatgacggcgcgacatgcccgacaggcctccggttcgcgatcgcgtcgcgcgttccgcgtgtctgacaacgtagccgcgcggcggacaccattg

SEQ ID NO: 64678 - DNA, 285 bp, Oryza sativa
  unsure (1)..(285): unsure at all n locations
ttagtctaaattctaagaaattataatcgttgaattcataaaataaactaaaagtcataagccagaaaacccacgtgtttcagattctcagaagctggttatcaaccaattacttcttagaatattaaactncccacacaggctcataaattcttctaattatttgggtgcgctattttggtgttagatacgaagaatgcagaatcacgagacaaaacacaaagcaggacacagtcacacaggctacctcaccaaatcgggcggagcagaagatcctcccttctc

SEQ ID NO: 64679 - DNA, 219 bp, Oryza sativa
  unsure (1)..(219): unsure at all n locations
tcagcacacaagtagtttaagntatatgagttgctgattatagtgacctcggctatttcaagtatagtaacatgtgtactctagagacttgtattgcagaataatctattgtatccactatagctacatcataagttatatgtggacgcattaaaattgtagagatttaatatatacaccatcacaatctgatgcactataggtatactaatatgatat

SEQ ID NO: 64680 - DNA, 429 bp, Oryza sativa
  unsure (1)..(429): unsure at all n locations
agatttgatagagtttacaaacataaatagaacacgaacgcattntnngttttntgaatatatttctgaaaaatatagccatattgtcattgtatcgtccanaaaacatcaaagtccgtaaattttctatgtctatntttctcttcaaattttccatttctctctcaaaactttggccatatttatgatgtacagtgatagatatatgtcgaatagaatgtgggatggtatcagatctaaaactttgtggacttatatttagagaacttttacggtacattctactgtaagtatatacttgcagtatatagaaaggtaagtttggtatttgtgaaaatatagaagggctgttagtaattgaattgagattattgcacccgagtaatctcgacgggttgttagtggattagtctggactcgaaacgtctg

SEQ ID NO: 64681 - DNA, 251 bp, Oryza sativa
  unsure (1)..(251): unsure at all n locations
agtaactagccgtgggctaaccggggcgcggctgcctcaacgacanaaacttcccgtgtccaacgactgacaatgcgtccttgccgataaactctacccgttatgtcggcttggaatgcacacaaatgttcccagagcactgttcataactggcagattgtaacactcagactatacacagttcctacatgcagtttgatcagtaccacttttttcggatcacatggctcacccgccactcttgtcttgaa

SEQ ID NO: 64682 - DNA, 316 bp, Oryza sativa
cattgaaaagaattcgaagtgataatggtggtgagtttaaaaatgcttcattcgaacaattctgcaatgaaagaggtcttgaacactgaatttcttctcctcgtgttcctcaacacaacggtgttgttgaaagggaaaatcgtgtttcggtcgagatggctagaacgatgttggatgaatataaaactcctagaaaatttgggctgaggcaattaacactgcttggtatatttaaatcgggttttcttgagatcaaacttggaaaacttcttatgaactctatttggacatcaacccaaagtttcacatctgcatg

SEQ ID NO: 64683 - DNA, 506 bp, Oryza sativa
  unsure (1)..(506): unsure at all n locations
agctntgagctatatctgccaagtccatatcagctctatcggtataatgaagtactgacaatgccggtccacggagagcctcaattgatagcttacactcgggaggtgtaagctccgtcggtcgacttggacgaagagtcatcttcacaactatgtcttctttgggccattgtatgaacgtcttgcgcgcatcgcccanagtcatgatttcatcatttgggggcacgggcagcggatagcctgaccaggtgtcctttactgtatcgatggacaccttggcatacccagctagcaagtctgcgccgtggaccttgtctgtaaccgagggcttgaaagccatgccctcagcgacttcaggagcgaaaggtgggtggactctcgctagtaggacacactgtgctgcgccttgcataacgcgaaagttnngaattaatattggaatgtgtacatgtcttttattagatatggattggataacaaacaatacctcgatgtggtcactgcac

SEQ ID NO: 64684 - DNA, 351 bp, Oryza sativa
tgaagtacaggcaactgacgctgatgatgctcatacggccaccacccctatgcatatgtacccagcaggagatggacttacatctgtacaactggaggcctaaccgcacttcatgatgacccctcatttataactgaaagagcatggaacgatatgggtgtctatcagcactcaagcaacacatgagacgcgatgctctaaatacatgagtgcgacatcatattattatctcgccccctggataacgcgacactatgattgtaagaatcgcatgcatgctaaactgacctactgagtatagttcaaacacttgcgaacttctgtatgttccctttgacggaacgacgggca

SEQ ID NO: 64685 - DNA, 473 bp, Oryza sativa
  unsure (1)..(473): unsure at all n locations
tcttaagcacctgagctgcagctgatgtactntaagggtcgagtgtgatgggctttggttttatcagcatccacatgcatgcatgccgcaatgggaataattaattatatatatcaattgttgatgagtaatcaaacgcacacagcttaatataatataatctgttgctagtactgcaagcatcaccggatatcgaaaagcttttcgttaaggttaggcattggttcggctgtggttaggggcaagaagaagaaagagaaattttaagtttttgtttacaccgtttgaccactcgtcttattaaaaaaatagaaatattatttatttttttagacttactntattatccaaagtacattaagcacaactttntattttttatatttgctataaatttttgaataatacgagtgggcaaacaatgcaagcaaaaacttaatatctcttatattatggaacgganggagtataaa

SEQ ID NO: 64686 - DNA, 420 bp, Oryza sativa
  unsure (1)..(420): unsure at all n locations
attgccctaccaaaatttgaaaggtttaaagtgacaacaaactaaacatgccatataacatntttaaccagtgtaaaattttcacaacatggaacaagaacagaaatgtgatcgcacctcatgatgagcctcttataccccaagaacccctctgactcgagaatctctgacgtgccaatggccagtgtctcttcatccctcccggagaggaggaaaaccttgaaccccttggcttgcaatgtggcgaacaactcaagaaccgcagggtatcccgggcaagcccctttgctagcccacgtcttgaaagccgagggatcatatgcctctgaataaaaataccaacaagtcacgacatcgctggatatattaatctgtacttgaaagtactcaattgcacatctccagcatttaatattttac

SEQ ID NO: 64687 - DNA, 408 bp, Oryza sativa
agcttaaagccatgaatccctttatgcatatctggatctggattctgctgaacaaacatatatgatgagtagtatctgatataaatataatactcgagaaacaatcaagtattttaaaataattataaatatgtatttctcctcttgtcaattgtgatttccccgagcagatgactcattatcgttaaacactctgcccgactagtcatagccaccaagcactgggagtcggctcagcacttcccaaacatgcatatgagtgacatgagttctgtcttaatggaacaaagattcacggatcggagtttactattctggtacttttgccattattaagagcagaaaataaactatcttatctctatgctcttgatgtatctcgaataatacttagcaccttgcgtactc

SEQ ID NO: 64688 - DNA, 431 bp, Oryza sativa
  unsure (1)..(431): unsure at all n locations
gcttatttatntctgaggagctaatctccataattttgcttgtacttatggctactccgttgtgaaaagaaaatatttgcttacatttcaaccttgcggcgtgttttgtccctcgacgcttcatnttccagcctcgttttaactttatgtgtttagttggatttatttatcttcgaacgtcttactctattaatggttctgacttgctattcggactttaaaacattaagttcggtactcacttaccggctggtatacaccctcgagtttcaacttcgctttttccagtctgatgtattcatttactaactttctcttggattccttgattatgaaaggttcttcttgcatcgattcttcaaatatcatatttgggagatccaatgtttttagtcgtaacagctggtctcccttaaattaattgaacttct

SEQ ID NO: 64689 - DNA, 210 bp, Oryza sativa
  unsure (1)..(210): unsure at all n locations
gacaccctagaaagagactaagatagatccttgtcatgcttaagntcccatgtcatctgaccacatgacttgttgaggaacgaaacacgcagtcgatgctcattatctattaatgcatagtgcacacacctcattgatctcccaagataatatgtnttatatggagatacttcattattcatgcgtaacttaactacttggaacctatta

SEQ ID NO: 64690 - DNA, 417 bp, Oryza sativa
  unsure (1)..(417): unsure at all n locations
atatgnacatctcagccatagactagattaatagtaaaccactctaatagtatgcctacatgtgtatctatagctctctaatctatagctacatatttctctatagattatcttcaaggtagtagatggctctgctctctctctctcttcatgtaatctcttccaagcaagaaaatatgctgacatggatctcttgtagagagcctatagataaatattgcaagtgctcttagctagctaagactcctaatttgcatgcacacgcggcgcctgatgatagaagccatatcgatggatgcaccaccatgcggttcctttttggtgagaatcttacacaggagatgcacatgtacgtacgtagttatagctagctaactatacggtactatcaagctcataatcgaaggcacgtctacc

SEQ ID NO: 64691 - DNA, 439 bp, Oryza sativa
actgatatagccctcccttacacatggtgccctcagcttcgtggcactcatcgttcccatggtactcacgatacaagcctgatgccgcaacactcacagtcaatatgccttccacactacgtcctctggcagaatattgaataccgactctgatccattgacgatcgtaagggtttcctttctaacactagccatgagtatgagctctcactataataagccctgcctaccaatatgggacatcacatacaaatcacatcactatgaggggtctagatatatatgtgacactattactttaaatcaacctaaatataagtagagtaatatcaaatctctatatagtagttctttgcaaatctaccatgaatatcattgcttgaattgatgctgaacatggacacctgatgcaacatactacagtgcttcatgttactac

SEQ ID NO: 64692 - DNA, 447 bp, Oryza sativa
  unsure (1)..(447): unsure at all n locations
agctntggatcgagaggacccaagttgaatatacttttattaagttgcttcctggccttgaaactcttgctatgatcaaattacgctcgcgcaatgcaagaaggagcaatttccatatcacgttccgatgcctatagtcgcaggccctgcagctgtcgtgggcactctcggaaacaagaaaatgccaagtggttagatatattgtatagtcttctatccacataataatcgtccagaagactacatgatagatgatagctgtttgagaaaatggctagccgagtacatctgcagccgtctctttcccagcctagaaagtcggtcctatcgacttggctgtgacgcccaagccaaggactgatgaccacgtacatctctttgaacagcgacgatatacgtacgtacctacaggcttccttgaagaaattccgctagctactgacatcg

SEQ ID NO: 64693 - DNA, 397 bp, Oryza sativa
  unsure (1)..(397): unsure at all n locations
ctagtgcccctaacgcaccattctctaattctcttgtgtaaagaaattgtatttccgggtgtcgctgcacacttatctcagtttgcaggttgtgcactaananntcatatgaacaagaatatctaaacagagaacatgaagtataatggtatgagtattgtgagatagaagaagaaacgaacatcttgaanacgagataaatacttaatcaaccgttaaagcaaataggagtactacatcacagacagccgtcttgttaaagaagagaaattcttgcgtactgatatttcctcnacctacatgtgctagtntggtatcctaatgtagcctacatctactcatactacatacgttaagtgtgtactttataatgacattatcctctgagatagctact

SEQ ID NO: 64694 - DNA, 342 bp, Oryza sativa
  unsure (1)..(342): unsure at all n locations
aacatctaaatttccgtgacttgctgagtactaaagtactcacccttgctctatataaatatatatagttcctccaccctgaagctgaagatgaagtanagtgaagattatggtttcgtcctggttcccacccgtcgcctgtggtgttgggtgttagtccgttggttccgctgctgctgctgttgttggtgtttcctcgtttgcgtcgtccggtgcatttctcaagctgttctaagctgcaacctaaattaaggtaaataagtcatctatttattntaaagagttgcaatgaatcatatttgtcaccgtgggtaccagcactatgttctgtgactggtactg

SEQ ID NO: 64695 - DNA, 274 bp, Oryza sativa
  unsure (1)..(274): unsure at all n locations
tcaccgatatcatggaatagttngcacatatcaatcgtgagggtgaaaacagtgatcatcaaagagggtggatgcgatacggacactgggagtgttacaatgacgtcatcctatgcatgggagatggtaccgacatgccttcccctaaaaaaactcatcgtctaatattgcccgtgattttaacatattacgttgctataaaaaactttggaaatgaaactttgatctaaagttattgcatgataattaatgtagaataatataatctaaattt

SEQ ID NO: 64696 - DNA, 464 bp, Oryza sativa
  unsure (1)..(464): unsure at all n locations
agctagctggggggcgcatccgctctatagctcgtatattctctgagttggcctcgatgcctcgggcagagaccaagtacccgagaagctagcccgcaggtataacgaacacgcacttatcggggttcagttntatgcgggcggagcggagactctcaaaagtttccgctagatccgagagtaaggtctcttggttgcgcgtctttacaaccaagtcatcgacataagcctcaacattacgtcctatntggctacccaaagaaattcgagtagtacgttgaaaagtaagacctgcattttttaacccgaagggcattgttgtataacaataacgtcctatggaggtaatgaacgcagttntttcctcatcctccctagccatgcgaatctgatggtaaccagagtatgcatctagaanacacannaagtcgcaccccgctgtggagtcgacaatctgatctatg

SEQ ID NO: 64697 - DNA, 433 bp, Oryza sativa
gactcaagattcagtcatcttcatggctcaagccatcggataatgtcactcttacgcttcttaatgatgggacatctactcccatatctcactaataacctatataattaaatgcagactctctccgtgaatatgaagggtcacttcatcactacggtgaaagtcttcaaattcttatctgtgcccaaagcgtgaggtttattaatcatatatttcacaagcggataccaattttattgtgctctcgtcgatacagcacacagacaattatgaaatattttgattcgtgacgtaccgattctaaattttccttctggaccccaatatattcagaacacagtagtccaataagacggtggataatgtcctaatgtcagtccaatgaatccctggacatctattggtaactcttcttacccctcaaaaagttttt

SEQ ID NO: 64698 - DNA, 259 bp, Oryza sativa
  unsure (1)..(259): unsure at all n locations
gaccttgaagagtcatcaccttttctccgatatagntatcncntcatgaatcaactggagcttgtctcgcagaccaaccatctgcgtaaagtttaatgaacacttaacattcatatgtccgtcataaatctcatcaatatgttcttcaattgcatcannagtacttgatattccgntctctctctcttgaaccatctgaagacatctttgactgtgacaaacatctctgatcctgctcacagaataaagcatttgatta

SEQ ID NO: 64699 - DNA, 433 bp, Oryza sativa
  unsure (1)..(433): unsure at all n locations
agcacctgaggctgcagcttggtctttctcccacccagatccttgttttctgtgttcatatcataaanacagtaccaagccagtatttgtcagatcagaggtaattccttattcagatctgaataagatcaaaggcatgtcaaggctatatacctgatctgaatgaacacagacacacacaaacaatttgatcttattggtgatctaatcaaagaagtanattaatttcagcaagaattatgccttgaagaccaatcaagtgcttaacctgcaggccattggttcaaactctgaagaagaaaggcccttgcctggctgcctgcccacactgccaaccaagcagatgcagatgcacggatgaatcagcacanactncgtggaagaattacctctgaaaaataaataaaaactccatagaagaatcaaacgcaca

SEQ ID NO: 64700 - DNA, 302 bp, Oryza sativa
  unsure (1)..(302): unsure at all n locations
ctacagntcactgattgcattttacctgttcatctcacatgctctgaatttccactctactacagtagctaaaaagggaaacttccaccatcctcactgccaaacagtagctaataagggaaacttccaccatcctcactgccaattggtccatgtatttaccattatgacacacaactttcaaattttcttttgaaaccgaccggaggagcactactggatatattaaggaggagcacagaagcctaccagaaggcagtacagacacaaacaacttctaatcaaaacactgaggacaagca

SEQ ID NO: 64701 - DNA, 320 bp, Oryza sativa
  unsure (1)..(320): unsure at all n locations
actaggtggatggtccgtgtggcgctatcgtatatagtggaaaagcccctattacttaccttggcgtctgacagactgcccctactcatgaactttacttctcgtctatcgccggcaatgaccctgtcttatacgggacccatatttgcactgtgtgacgcatagcacctattctgcccccctgctactgtcgacacggagaagccacacggcaagccgaacgacgcttgctcgaatggtggcccactaaagcgagccgngagtgtatgctaccagtactgcattccgagacagaagccacacggctgctgacatgcttc

SEQ ID NO: 64702 - DNA, 284 bp, Oryza sativa
gcacgaaaatatataccccgccgtaagactatcgaaggtgagggagaaccgctcaccgcaggaaacctgtgctccatatatggcgagaaacaccacacatacatgcacatatatactaaccagcgtatgcacgagcagcatttcacagagcattaccatagacagcacacgcgactccatatgcggacgactacaagtatgacgacgctaggtattcaaactattctaccttatgcgtcgggtatgctctctactatgcggtacttgtggagctcttctacaaa

SEQ ID NO: 64703 - DNA, 150 bp, Oryza sativa
atggaccacgcaaggcgcgcgcaggttctttatattgatcatggccgtactactaccacatgatgtaatattgtgctccacaagagacacccaaggaaccattccttgcggggcatacccgatggcgattaaattattaaaccaataaaa

SEQ ID NO: 64704 - DNA, 364 bp, Oryza sativa
  unsure (1)..(364): unsure at all n locations
tttcttgaccgtgacatgttttatgttgtcataacaagggtgatcatgggaaatggactggaagcacctggcctgactcatgacctatctgttgtcatgctggcaactgtctgtaaaaagtctgagccttctgctgcataccagctgagtctctttggtaatgaaccttggtgaattgagcctttaaaacagacacaacattcacttcaggggtggtgaggataagctggcatatactgaactttgacaacactttatgctcttgcgtcatgatgacaaacatatgctgtgaaaaggctgattctgcatgcatataggcgccagctggtgtacatcaattacacaccangagtaaagtgtgtac

SEQ ID NO: 64705 - DNA, 389 bp, Oryza sativa
  unsure (1)..(389): unsure at all n locations
gcagcttaacagctggnctagactctactagatagatctgtccctgcaagnctgactatgcaccagcggcattgaaagaaataaaaaacctgacaattgatcagtcagatcaaagatcaatggggaaactctcactagctggctagaacgatgttcgttcttacccacagccgcaaggggcgcttgaaaggcactaatatccgctggcaaagaactgtgaagagatgagattctctctgccttatttataaagctcttatatagaagttggggcatgcatatagttagggcatatccttttttatgtgtttgttatctcgctgcgcgcctcttctatgataagaatcatttttatctgacttggttgagtaatgcatgagatcaacctg

SEQ ID NO: 64706 - DNA, 195 bp, Oryza sativa
gtactgatggaactcgtgacagattggcacttctaatgagcataccgatatgaatgatcatgagtcaataacactctactagtcgcggcatcatcgtacacaagtatcaataatcattccataagtccaattagtaatgtgctcatcttcttacaaataaataattcccacaatagacaagattccctctattct

SEQ ID NO: 64707 - DNA, 324 bp, Oryza sativa
gcattgaggacatagagctacaagcttaagagtgggcctttcatagatggtggagtgaatggaaactacatctatttcatcaaccagctcgcatgtatatgacagacctatttccggatgtcatccctcaagtaaatctttacttctgcaattctgctaaaataaccggcagccgaatgggaccttgactaactttcttctctatcttgcagacaacagaatcttcttctcctcggtaaagcaatatggacaaggacatataatatgctctaggcctcataccagacagaggtgggaccataaccccaatcatctgctaccatg

SEQ ID NO: 64708 - DNA, 359 bp, Oryza sativa
tactaattaatatacaaacaatcacaatattaaattaataacataatggcgtctaatttaaactataggtcagactttgatttctgaatatcagatggagatttaacatcagctatttatgatattattgagagaataatcctttctttgctacgaagcacgtgctagcgctctttcatttgtctctgtctttttagaagcattttccttttttcttcgcacaaagcacatctccgtatgtattcactcacaacagctctcttcggagcatttatatcttttttcacacaaacactttgcactcgtattcacgcacactgacacgcactgatgccttctatcgcgatggtatcaatgta

SEQ ID NO: 64709 - DNA, 429 bp, Oryza sativa
  unsure (1)..(429): unsure at all n locations
gcttcttcctcctctcactggctatatcgtcgngtctaacgattcaattcanaatcaagtgatgagtgagtgtttaaaggaaaatatataatctcgtcgcgatcccaagctgatcactgctactgcgactacggccactccaatcagttagcacactgattaacgctgcgtcgatcattggtgtactataatcatagctccctctgactaacctcacgctgcatatgcgtctgccgttttctcgaactagtaatattgttgtttaatttctggaaataacctgttgagatattcccctcggatgccacaacacangggcatgttttaagaggtactccctcaatcccataatatgagtaactttagagggatataacatatcctaatacaacggatttggatagagagcctatccagattcataacact

SEQ ID NO: 64710 - DNA, 278 bp, Oryza sativa
aacgtcttctcgaaaactgatcgctgtatcttgcgaagggggctattaattattggcgtgcgaggacaaacgactgtctgtgcacctcaaaatatacggcgttcattatatttgggaatgtcagcggacatacctgatcaaaaaaaaggtatctgcatggtgatggtatggtggagatcaccgtagatgtgtctctgaacggaagaaaacttgttctctgctcattacgactaaaaataatttactaaatagtatattacatgtaccgttcgttctat

SEQ ID NO: 64711 - DNA, 212 bp, Oryza sativa
  unsure (1)..(212): unsure at all n locations
tgttagaaatagactcttcgacttataagtngtgtcgcaatccagcacagatcatagcatggcacaccatacacgccattgcccatcaagcattctaccaagcccatcttttcaataatattcttgtctacccaatnttgtntgcagtccaatatctactcgatttaatntcaatngaacattttgtcacatannattaaggctcgcacatg

SEQ ID NO: 64712 - DNA, 403 bp, Oryza sativa
  unsure (1)..(403): unsure at all n locations
agctagcatgtgcttagaattnntaaaatgggcctatataatgatccaatgaganatggaaaccgtgcagctcgtatgctccacgtccgaagtattcgtccgagaagcacgcttattagcttattttattacacatgtgccctttcctagttcatattgctaccaattgttataaaaatatataaaaatagaagatgtttccgttataattntgatacgttatccgtgtttgaatcggttttaattntatgtttctgtcaaatcctttcctttnttttcttacaccagagtgtccctcttatccgagacgcgtgcaaattaattgggcccgcacattntcacacgcctcttgttgcatggagcgatcaggcctgcccctgagtctgttttccacacatgcctt

SEQ ID NO: 64713 - DNA, 398 bp, Oryza sativa
  unsure (1)..(398): unsure at all n locations
gcaagcttgtccacttcgtctacccacacaagcccaatcttgattctatatttcgtccgcaaagacatcgacatcgaaatgaagtatgtggtggtggctntangtgaagtctataagcatgtgttatgtgagctctttgattgctcgctctacgccagcattgtcaattactgatcacctctacttccagttcctttgcctcactgccgcctccccaatctacaaagtcacatgccgtgcataccaaccttgacgacttcctcgtctttcacctagtgccttatcccttccacaccgaccagttctacataccagagatcacttcaagctgatttggaagaagagaaggggccatgggcataatggccactaagaagtgtggtggtgtgggcacaaca

SEQ ID NO: 64714 - DNA, 520 bp, Oryza sativa
  unsure (1)..(520): unsure at all n locations
cttccgccccctccccccgtgcctgatcatcttgcgactacactagctgcacttagcgacatgtttataaaaccattatttttatatgccggtaattttcaaggcaacatattggctttctggtgtgagcacacttactaaagtaggatgaataccgagagtnttaaaagttgcatgcagaaagcttgagtcgatagctatgcaattttttgcccattatggatggagattcacaaatatactttaataatgtgtcctccgatctttacttggtatttttatcttaagcgctgggtgctttatttttggacacactttgtttgagtgcaaaatataaaatgggctatactnctttgagcaaggtcgggatgttatatttcatttntaaaaaataacttatagttaacaacaaacatgacacttttcaccattacagcttataattatatatgttaaaatactctactctatatcacatggtatatatctcattattcatatgtacatgtatcacatctta

SEQ ID NO: 64715 - DNA, 376 bp, Oryza sativa
  unsure (1)..(376): unsure at all n locations
accaaacagggcgatgataaaccaagtaagcacactgaataataaatcacactccattattatgatgatagcccccgactgacaactttaaagagataacttgatgtttgacagtctaaaaggggaaatacaatgataaagtttagcgtataaacgacgaagatgttctatgtttcaagagatgtcgacgagagtgccggcttctcgcttgagtcgatatgaacctggccgggtaacttcatagataataaaagagccttcccatagaggagataacctgtgccgatctcgtgtggctggaatattncgtaaaaccacgtcgccgactatataagcacgagatcgaacattgcgattatgataacgtccaaccctt

SEQ ID NO: 64716 - DNA, 401 bp, Oryza sativa
cctctgttacaccagaacattccacgcgcaacataatttgatacacttatctcacaaactctgtcttattttacctatcgaagcactgacatttactctgcagaactgaagtagaatattgaggtggtaacagtcagcaatccacattcatggacgatgcaccgatgtgaagtgtctccctgtcgacacagcaccataacagccccaacactgaggaatcatatcacacgcatcaaaatgtgaggtgacgactgatgatcatactgtgatactgcatgtaattatgacgaaccaaacctgatgtaagacatgggtgcgaccgggaccggatcacatctgacctggtgacatatctgagctattaacatgcacgctacagcaggtgatgccaccacgactcc

SEQ ID NO: 64717 - DNA, 436 bp, Oryza sativa
  unsure (1)..(436): unsure at all n locations
tagacttaatggcgttcgtccaaacaaacatgcagggtgtatattattgcttgacacccagatagttcagctaaaatttgggagtatattctagccacgtaatactaactgatactatataagaagaaatgggatcatgcttatgatatgttcacaatattgataattgattgtggatcctgaatggacanagtantnttcaaacaagtcagacgcacaacaattggaattacttttgacaaaaattgatatcagaaataagaaatggttcatgctattgcattgtattatctaaatagaatgctacaaagggaacctctttcaagcaagatgcttgatacagtatgtacattcctcgtagctgaatctacaactagctgagccttgctttgatcatctacggctgaaaaaatgttatagtctctgcattcctcaa

SEQ ID NO: 64718 - DNA, 441 bp, Oryza sativa
  unsure (1)..(441): unsure at all n locations
agcttcgcgttctagccttaccaagaacccgggttgtctccaaccgaccccgccccggcgttccccaactattggcatgcgaagtttccctgaaccgactagttacttagctagggtgtcccattccaccttgtggctgcactctgttatgaatgatgaagttcccacatgaatcggtccttatatgcgaatacgggacagcgccacgcatgcaccacctccgcatcgtgagtgttcacaattcattttatttntacacacaccgacaccacatgtcgggttttcaaggcttctcaaacccatctcccaatttttcgacaatcaacggtgtatgtgggatatttggtatacgcgctcagagagcacggataccgaagtaccacaagagtggagcgacaaggaatcacggtagtacaacctatatgaattagtgcgactact

SEQ ID NO: 64719 - DNA, 90 bp, Oryza sativa
atgtgacgtgaccaaatattggacttactttttagtgaaagcgacattttcgactcgattgagcattctgtgaagccacaaaccagtggg

SEQ ID NO: 64720 - DNA, 274 bp, Oryza sativa
tttttacctagcctaccttgctatatgtcgctataatctataaagtgccatgattaattggttactggaaatatttcgaatatgcgagcccacaaaggtggatgtacattactgtccagaaaataacatgagttttttggaaggtgctaacatactcgcttctaggactgatcttgactttagaaggaactggcaataactgctattcttggacaataaccttactttgtctcaggtgatccaaataccttacatttagcctatctagatgctg

SEQ ID NO: 64721 - DNA, 341 bp, Oryza sativa
atcctaagttaattcatttgtgagattcaatttggctgaaaaagaagtacttattactatatgtactatacgtacatttttctcatctcagaaaaatcagtctgcattgtgcgaaaagaatgagtgtctatggcccacaaattggccaacactcatactgtgggcgtgcccatggattcatctgccagactgtgtgtataactgccaagacactggcaattggaattgcattgatgacatcttcctcaaattgaagtacgacgtcatgctatgaatatgctgaatgtaaatgattacttattaacctgaatatgcatgcttgcaatgattgctatcgataa

SEQ ID NO: 64722 - DNA, 298 bp, Oryza sativa
ttattactctactctggttgcaaagaccatatccgtcattaggtaataggacatggtgatggacactatgcagctcatatcgaggacaatgacatgtctttctttgtgtcatcacaggtggtgccgaatgaatgtacgtactggtctttatccacctacactgatcatgcttggtgcaacacagagaatgctgaatacagctgaatcactagatttgtctttggtgataacatagctcacttgtttctggagtaattcacgaaagcagatcaataactgcccacaaccaggaagttga

SEQ ID NO: 64723 - DNA, 348 bp, Oryza sativa
  unsure (1)..(348): unsure at all n locations
attaacgtgcataacccacattttatggacataaagtttcacatccttgctaacaaaatatattgagacatatgcatacagattaactctttatgttaagactcaacagatgaacagaaggatatttgaccagtccactataactcattatcttaaaactgtattgactacatgtgagtcgaanacttcggacaccaaacaatccctgactagaaaagtcatgggtttatgggattaaaattaagccacattacattaatggaataacactactgagtaactcaagtctctggacagtgtccacggtgcctgagagatccatgagatgctccgaagcatactgaatgg

SEQ ID NO: 64724 - DNA, 151 bp, Oryza sativa
attgctctctgttgtcatgcatctatacgatgctctctgtgtcatgctctacacgatgctcttgtggttatgctcttactccgatgagagttgagggccgaattattccacttgatgccagatattattgcctatcactttcatgtacatg

SEQ ID NO: 64725 - DNA, 451 bp, Oryza sativa
  unsure (1)..(451): unsure at all n locations
agctnttttattcttttactactgactctttgttgtatttactccacccgcggnagggaactactaattcgttgcgtctataacgatcttggatgggttccttaacgagctaactattcactattntttgtntagtagntcttccctgtgaattctagatacatcgtcttgaaattttgggtcttttctttgtttaaaccgcctatctccttcgctagtagtcatttatcattcaattaaggaagcataaactcatttgatctcttgatattaatcaaaattagcatcctttttcctttagaaagacagccttttccattttncagaattctttgttctattctacctgctcaaggatcatcattcagacaactgtgcagttaatacaacagatcgtgttagggactagatagcttactcctatctatctatgaaaatttcggatctggat

SEQ ID NO: 64726 - DNA, 300 bp, Oryza sativa
agatcaaaacagtctttacctataaagaccctatataccaccaaatttgtcagaatgcaatgattgaatgactctatcatttgcatgatattctggatcattgggttgcaggatcggttttatattcgcaaaaaagcttatctgattttaaccttttgaacattaaagtggagctgatcacatttatcagtcgattgtaaaaaaatcccgcaatcatatcaatagagagctgttttttttttgatgatgatgatatcgtatctacataaattttttagaatataagtgactatatctttt

SEQ ID NO: 64727 - DNA, 446 bp, Oryza sativa
  unsure (1)..(446): unsure at all n locations
agctntncagcttccaccttaactgccctgttcgagcttattatattctgcaatttgcacgcagatgatcctcctcttccctcgccgaaattagcatggtaccgaatttgtgcgaaattagcttgattgggtaaagatttgagacccgtgttagtctttttagtgcttttcacgatttgtttgtcaaagctgcagtctgcatggtatagaatccgcaattgatacatcaatgtcgttgttacctaactgccanattctaatcgagttaccgctggaacaaaaccacgtaaatctgctaatccatttgatgcaaaacatgcttctatcangaaaacaaatcactgcaaacatatgatgaacggcatgcattgtacaatccatcagatcacacacattcataattctgacttgaaacattttgtgctagaaaagggagaaattaatat

SEQ ID NO: 64728 - DNA, 481 bp, Oryza sativa
  unsure (1)..(481): unsure at all n locations
atacacgcacgccggtcttactctaattccggggctgcagtcgactcacgctgcgtttgcgcgcgcttccgctgatagccgattccccacataacatctatttatatggagcggaataagccccaatatagtgaaggctatttaaacctaacatgcatcagttacatgtgtagtagaggattaaagccttgatggcatgaagttggaggtcttcaatggcggtgggactgtgggggctaacaggactctctcggtttttaatatatgacgcgcgtgactgttatacaaacggtagacctttcgtcttatgtaaaaaaattatatatctataatttatgctattgtgatgtcgattatcatcacatggtctttaagcatgatataaagtattttatatttacanntaaaatttgacataaatgagtggtcacacgttggtaaaaagtaactgcgatataatattttatattacataaatttt

SEQ ID NO: 64729 - DNA, 363 bp, Oryza sativa
gctttctggcttgactaccccaaccaacaatgttcttaattgcactttgccagaatctacccacgggcgcgcctgctgccagaactggttacaatatgggcagaacggatcggcgaagacgtaaacaatgaccggcgcaatcttttaccgtcgaggagccagtgagattgtccatccgttccacatttcgcgtgcggctggagcgtaaatttctttttcgataagtgtggtactcaagttatcacctttctcgttgtacatgtaaccagagatagcgtgcttaccatctggagtcaagtagatggtgacgcccatatcctgatactttccgagataacctttcattcctccgggggcatcgaa

SEQ ID NO: 64730 - DNA, 149 bp, Oryza sativa
ggcgaccctaagacatttttagcgttgcgatgcgtgtattacacggaccacacgtgttacggagttctgcgacacgacgacatatccgcgcgcacgtgcaatgctacgcacggacacgtatcagaaaacctcgatctctttgaggtact

SEQ ID NO: 64731 - DNA, 370 bp, Oryza sativa
  unsure (1)..(370): unsure at all n locations
gagcgcctgtgaagatggagccgtaagcccgctagtccgctgctgnttatntttgattgtcaagcctgaagcgcctttgtaataatgtaaatattatcgatataataaagatgtgtcttttatatcatgtttgtgtggagtaccccggcttttcctgggacggggattaatacactagcgttcgggaaaaggcaattttcccggtcgcgacacggtcccatatcaccgacagtagcccccggcgttatgccagagcaatttcccttcccaagggaagcggtcaagtgtgacgccacccctaaagcctggtgacaggtgggaccggtctncatagttgggcaaaatacccaacggtcttaatccatgcata

SEQ ID NO: 64732 - DNA, 370 bp, Oryza sativa
tatagtcgttgtatttctctatagcagacacaaatattcctactttgactgggctagcctgttaatggactaactttagtctatactcgtgtgaatatatattacgtacatataacctctatctgactatgaacattagactatatctatacatgagtcgaacatttatatataaagctaaattgctggatacttatatgatagttgagagcatatatcttataggctagacgacagtagcctgtgaaacactatctataattgactaaatgtataaaatatatgtgggttgcacattggtctacactgcatgtgggaaatatgaaaatgcaaaatgattgaatgatgtatgtgagacgatctcccttca

SEQ ID NO: 64733 - DNA, 306 bp, Oryza sativa
  unsure (1)..(306): unsure at all n locations
gacttattagctacgctcaggtcctgagagctcggagccgttgcgtatcncnaganccgactgcgcgctgcagatttatcgtccatgctgagcaacataccatgcgtcaaccaccgatgacatgagagtcaagaagacgcggagacgaagcatgtgtgatgcacagctgctatgctgtgataagtatatgtggactggcacaatgagacacatgtatcgtgtcatgcatgccaacatgctggctgaaacccgtggtttctattgccaatgaagcgacttgataatccgtgcgttcgtaccattcat

SEQ ID NO: 64734 - DNA, 312 bp, Oryza sativa
tataatccttgcaataatccgctcaataatataaatcaaacggagtacttttcagctgcttcaaaactgacccatcgtgtagtatgacttaagtaactttgaggcagcagttctctttcttgttagtctttcctagtgcaatatgtttctctcattcttaataaattcggccatcccaacacaagaacttttttgcgatcacttcaacaaaagaacttgctgtgaaataggaatgcatgattaaacaggtatcttaagctttatcgactcggagatgtctaacactaaatggaaaaggaagacttacagcaa

SEQ ID NO: 64735 - DNA, 309 bp, Oryza sativa
acgctgtgagcagaaaacactgaattattcggactgagcaagaggaagtggcgagcaactggttgacatgtacttcttcagagatgactgagagggtatataactgcaatgggacacgtttgaatgttgtaggcattttcttacatttccgactcagatctgaaggggtgcatatagaggtgtgtgcaggtagttttattggtatagaaagctctctaaacaattatgtccaaagacctgctgaacaatctctggttttgtgtctgcagtcgaggatgtttgtattgtccttcttacgtaagattacgc

SEQ ID NO: 64736 - DNA, 316 bp, Oryza sativa
  unsure (1)..(316): unsure at all n locations
aaacgactgagcagcagcttctcagcgctgaagagaatggatgttttattatangacagctatgtgaaaccaacagatacactggtatagaaagcaccataagttcttccgcctaaataagaggcttnggctagttgacagctctttatttctctctaaaattaccacataccaataatcaccgaaactccaggcacaccagccgttatggacaattaaggtatttaaagcatgcttctgattttctatactaaaagggagagcttaatgtcccagcatgatatacgcttggcacctaatggtgcagggagaaaat

SEQ ID NO: 64737 - DNA, 456 bp, Oryza sativa
  unsure (1)..(456): unsure at all n locations
gcttgcttgatacatacagatgtctatatgtctctttataagtgaagngctctggcaaattatctgtctgtcagcgagcagcagtggtctgagtttggactttaggacctttgacctgatccgtattgtattcttattgcattggacaacgaagatttggatggttaacttgattgtcgtggatgtcaaaggtagtagttgggagatgtcatgtcagcaaggattgagctcanaggaaagcatgagtgacatggaagtgagaatgtattgtggcagtttttcagggtctgaaaaggtggagtccaagagttctaatgagagttgtattcctgtattactttcaagattcttttcagtggctcttaaacatgcttctatgttcttttagcacaagaatgtctatcaagaacatggagttccaaaaaaaaagaagaatgactaataggtcttttgagc

SEQ ID NO: 64738 - DNA, 328 bp, Oryza sativa
ttcaaagatgatcaactctccttaacaatacacacctaccactttatatacaagttggcgctatatgaccttccctcttgtgaaaaaaaatgtatggcatgcttcattgtctcttttcttctcacccaccaagacttaatattctcaacaacgagaagaccagacaagacacaatagattccaaccttctcacattcatataaatatactacaaggaaacatacaggagtccttcaaaaaataaaacaaacatgaattactgccttatgaaaataaccatctaaccatacccccttatcccaccccgaacaaaaaaaaaagaaaaaat

SEQ ID NO: 64739 - DNA, 126 bp, Oryza sativa
atgtttttttttcacaggaaatagcatctggagggccatgactaaaacgactaaggtccccagacattcaacccagttccatgtcatgccctagccacaaagacgccgagtagtctcagaaatcgt

SEQ ID NO: 64740 - DNA, 54 bp, Oryza sativa
cggtcaatcaataattaaaaaattgatttgataatttgtacgttgccggttgca

SEQ ID NO: 64741 - DNA, 421 bp, Oryza sativa
  unsure (1)..(421): unsure at all n locations
cgtcagctacattatgctgacaaatatgacaccaagttgatagcccctctagcagtaacattacacagttacatagctatatacagaggtgagccatttacagacgagaaaatccagcggcctcctagtcagtaatactatgaagcaacatttatacaaattactgatggagcaacacatttacatagttgattttagtacaccttctaagactggacattatatcgttttaaatatttgagtttcatcaacaaaatattttgtaagcatgactatgctgagtcatgttgatcacaccatatgattgcagttcattctgacagcaattcattacatatactgtggctctatntattaaaaactcgaaggtcattcaatggaatgtatttaagaatctatctatgctgctggatcttaactg

SEQ ID NO: 64742 - DNA, 116 bp, Oryza sativa
  unsure (1)..(116): unsure at all n locations
catgcatatggagcgttagatccccctatgccaatgatgtgtgtatactacnggaaatggaatagatggcatagcatactacgcaccagatgacattcaccataatgatggcaatg

SEQ ID NO: 64743 - DNA, 333 bp, Oryza sativa
tgttggataaattcagatggatccctacccttgttacaaggcttacctaaaacatgtccccaccgaaatatgaatgggtaaatcataattactattagatacaccgcggaatgacaaatatatagctaactatattgcatatatccatacttcaaacctatatgatcatcatgcttaaaccacaccctgatattaaagcacggagcataaacatatgttgaccttaatgatgccactcaaaatgatactggataaagattagttgcaatataccccttgcaacaaaatccaatctaaactacagtccctaaatgcgcacttagcaagcaaaac

SEQ ID NO: 64744 - DNA, 193 bp, Oryza sativa
  unsure (1)..(193): unsure at all n locations
attataaacagatgcgaacatcctatccgcagctcctctctgccgcagcgcagccgatcgacgatgacacggtanaaacggcgctgctgtgcttncttcttatgcaagccgcgaacaccgcgcgggcgccgtgcatncaccgcaccaaccaccgtcgncgaaatcagcttcgaagctgccgcatcatgatctc

SEQ ID NO: 64745 - DNA, 319 bp, Oryza sativa
  unsure (1)..(319): unsure at all n locations
ctcctgcatgatatagctctagaataatgtagagtacactaagagaatgacactgatgcacgtgttacaagatgcccatatgatgctactccttattagccgaaacaagatgagattattccacaatggacttggcgtaccagattcctgctatatttatattccactctcttngagtacgatatctactataaagggttatgcagtgttctacaatggatcagtagttcttacagattattgctctgtactcaactttggcatatctgctcattaatgtgcttcagatatctggactttggctgtgtacatcctctca

SEQ ID NO: 64746 - DNA, 215 bp, Oryza sativa
  unsure (1)..(215): unsure at all n locations
tcgagacacacantgagcgtatcanagggtataaaactcatattgctcctgaatnnttagttggccaacttctactatctatgtgtactcctgaatcctcttaagtacctgaattcaaagaagggcgagaagcttaatgaactacaggaagaacatactcagttgcagtctgatctacagaanagtaaggaaagaanagaagaaaaatcggcgga

SEQ ID NO: 64747 - DNA, 283 bp, Oryza sativa
  unsure (1)..(283): unsure at all n locations
ttgagtctccctacatataagaccaaactggaacagntagctgctcattgagagtgttacatcacgatacattgttccaacacacatatattcttcctaccacannagttagtttcaagggttctaaagctgcatggtaaactaatgatacaacattgttntagctgtagcttctacagaggttcanggttcagcggacagaatcaatgtactatttgccggatgcgatgcaatgcatagcatcatagaacacgtctgatgccgctggttcaacactgtgaat

SEQ ID NO: 64748 - DNA, 255 bp, Oryza sativa
  unsure (1)..(255): unsure at all n locations
ttctacatagaacgtgcacatcatcaacacatatctaccgttgaatatagagtttagatanataataacaatggcgctagaatatacgagttcataattagcttaccactatagtagatgttctacacattgattctagctcatcagatactttgacggatccagcaacctcatgtccttggatagacaactgctatggcgtcaccgcgggagagcttctgcgtggatcatggtgtgaggatcaccgatagtgtg

SEQ ID NO: 64749 - DNA, 200 bp, Oryza sativa
  unsure (1)..(200): unsure at all n locations
agaagataaccaaacgatggtgcatatgactaccaatgtggatgctatttgatgacctcacactaattacaagactcaagccatanatcanaagcatgtccaacacgagataattgccaagctacagaagactgttgaacaaatggaagatatgtctcaacctgaagatagtgacacctgctagatgttgaaatatacag

SEQ ID NO: 64750 - DNA, 457 bp, Oryza sativa
actcagctcactccacattgaaatctctgtcatctagaatgtgagtggcagctatagtctgtccaatgtcacgaacattctctgcccacgttactgattgagtagcgaattatcatttggatgacacgacatgggaatgtgatcgacattcgaaaacagacacacctgctgaatgtgtaaccacctactcttcattcaaatataacgcatatgattacagataataaatttgtattaatcctaaatctaattctggacgaagagacttcgatacttgttattatgttctctatccaccagtaatagatataaaccgaatactataaccaccttatagactatgtatattttacttatctatctaatgattatatgtataccaactcgtcgtgatttacacaactattatgtacaaaaagagagattcttaatggatggcttacttattttttaaaaa

SEQ ID NO: 64751 - DNA, 416 bp, Oryza sativa
  unsure (1)..(416): unsure at all n locations
gctgtaccagcctcgcctcctacacatattgtccacgcggacctagtgtgagntctctaccacagatgtgagttcataagaaggaaatggggaggcacaccagtatacaggaagacactcatcatctatccttgccatactatagtctatatgtgcaccctgccgagtaccacctcaatcatagccatgggttaagcccagctcctcctcctctcacccagataatctctcatactatccacaaccattccagctaccgcttcctttctatactcngtctcaatgctaagtgcctatgcaatcagtgcganacttgctaatttgttttctggtcaaaaccgctcatttgtatccactcgcatgttcactctggcacctaagtgattcgacactacttgtatatgctgagatagagt

SEQ ID NO: 64752 - DNA, 272 bp, Oryza sativa
  unsure (1)..(272): unsure at all n locations
caagtttgggctgccttcgagccactaagtgatgtagatggtgaaagtggagatgatgataacgggaagaacatctnncgatgttgcttcatggcacgtggtgaatctgacatagatgttgaacataatgaggtaagtgcgtttgacggaagctattaatatttgagtggaaaaaaaagaagtgtgagaagatgtatagaacacaggaatttatcattgaatctcttanatctgaagctgcaagaatacaatctcttattcctaatgatgat

SEQ ID NO: 64753 - DNA, 376 bp, Oryza sativa
ttatctagctgtggaggatcaccgcacgtatagcggacatcaagtttgtcttgctacgggaacccaaccactgtggtctctgcttacgacagataccagctggctcactacggcgagggacctttttggcgccaccacgaaaagacacgcctcgccgaactcaagctcatacaaccaggaaggtgtcatctgttttgttcagatataatattataatatataaatatattaagtcttattacaggaagaaagtggaatacattctaattaagctgatgctaatttttaatctcatgaaatctttgagtttcgtttcgaccatccattactacaagctcgatacccttaatatctactgctatgtatttagcttggg

SEQ ID NO: 64754 - DNA, 319 bp, Oryza sativa
tcattcttctatgtcacattgctgcacatttctccttgttcgagcattaggagcactaaccttatcttgtttagactcttacgaagtcttccattgaactcatatgctaattggcctgcatctgagacacctcagttaccttgtctgtgtaaacagaactttcaatggctcactgggcatctctcctcctcttggtgaggagcctgtcagtgcgctcatacctccttcaaagtcctacctaaaagctctactctcatcttgttacatgaatggcccgttattgttctcctgttcgtggctctgaaatctctcagtctat

SEQ ID NO: 64755 - DNA, 399 bp, Oryza sativa
  unsure (1)..(399): unsure at all n locations
ctcgcctggagtangtcggtgagagacacaacttctttcatctacgacaattctttgctgaggctgtcgatgcagagaatggttgctattgattatcgccaagtcangtgcatcacgaggagcattggtgcattagttctgctatgggttctgattaacacgangccgtacgggtacagcgtttgctccagtgaccacaatactgatggaatgtctgcttcgtgtaaataggcagtaatgtggacgtcgattctgccttggttgggacagttattgagtaatcccttttcactgcagtgtacanacaataactctttacactcggttcttcatcttgacttgattctcactgctgatggaacatctaaagacaacgcaatactggctctgcttgcagct

SEQ ID NO: 64756 - DNA, 352 bp, Oryza sativa
ttaactaacttaccagcttaagactacatgcagggatgggactcaccgctcacagcccaaggagtggagttcgagcttgaaactgcgaggtgaacaactggacttggagcttttgacaagatgcaagctactcaatatgaaagtaatatgtcaataatccggcgtctagctaacgactaagaccacctaaccaacataccagataactaaacactagcccttattggaacaactcaaaacactgatctcctttcttcttctttcatcttgcttcttcttcttatattttatttgagagcttagttcttctttacactttgctttttattttttattttttcacaaacactat

SEQ ID NO: 64757 - DNA, 250 bp, Oryza sativa
ttaaaaaagcacaagccatcaagaatggccaccttacctacccatacccatatctgtaactcagtgggaccacaaccctacctttaactgcattatataagcccgtcaatacaaaattctcattgcaaaacacgtccaatttgctctgatatgttattgtggaactgtaacacatccttcaatactgatttatttccttcaatgactgacagaagaattgtaatcatgcaaggtacaatacttagcttca

SEQ ID NO: 64758 - DNA, 247 bp, Oryza sativa
  unsure (1)..(247): unsure at all n locations
gcgtatanagatatgacagactgtcacggaatatatatatatatatatatatatatctatatatatatatatttatctatgtattcggggtcgtgacacattggttgatggatcaatggctgagtatcangctacaagaccagtatatataccaaggtgtgttgttccatattatctgcccctgatcacaaatattcgccgaatggttcagtgtccaccagcttacctgacagacatatcacttctg

SEQ ID NO: 64759 - DNA, 75 bp, Oryza sativa
aataatgactattaagtcactcgtcactgacacatctatgagaaaggaatataagacactctgcttaccatgtcc

SEQ ID NO: 64760 - DNA, 250 bp, Oryza sativa
  unsure (1)..(250): unsure at all n locations
catcaggccggatcacatncggcctggtgtgctaatgcctgcaatgaatgatagtcgcgtcttatcatgccaccattatnanantatcgctgtnttgcggtacgctatcgccaggttatgccagaatcataaaatagcaggttgggagtcgtcatggtgcagcacgagacatanatggagaaccagagctggttgaataaactcgcacgccgcctggggcctggtcatgtcgntaatctctgctttatcg

SEQ ID NO: 64761 - DNA, 293 bp, Oryza sativa
  unsure (1)..(293): unsure at all n locations
cgaatccgatgatactctcttggctctcatctcatcatctatgtggatatataatacatctcanggttggtggctgatatatatattgagtctgagaagtacaggtggatgggaagcgcacngctctgagttctatgtatgtatgctattagtttcaacggtgtactttatatctttcaattctttactatatcatatctgacatcaatggttactcatctacttgcacctttacaccatacatccaatatggcatgtatggtgccaaatgattgccgtgagctgagtaacat

SEQ ID NO: 64762 - DNA, 311 bp, Oryza sativa
  unsure (1)..(311): unsure at all n locations
cagtcatcgagcagccgacaatcctatatgattacacatggtacaagtactgtcaaatntacatcgaactaacacagnacatcctcgtttatggatagcacactaagcaaagggatagatcaaaccattcttgaacagctgaaccccaacgaaagcatccctgtgtggatcatatcacatgaccagctgacataactggccacaatgtagaaccacaaagtagaaaattgcacannaatgtgatgatgatcattccttacagctgcttccatcctcagtccctccactcccttgatgtaatctctcaacac

SEQ ID NO: 64763 - DNA, 201 bp, Oryza sativa
aaaatacaatggctaacatatgagattccagaagttcagtatctattgtctaccagataatactttgtaacacataacttatatacaccttattatagctaagtaactaatacatatataagtctaacaggacaaagttggcaagcggacatatgtagttattgaataggaaaaattcttcctaacccacggtaagaatca

SEQ ID NO: 64764 - DNA, 171 bp, Oryza sativa
  unsure (1)..(171): unsure at all n locations
tcgtgattctcgtcggaaagacaagatatggccgcattangatccttctcatgctcggatgtcgtcgatgttccgttctccacttctgcgggaggatcctttgacatggagtctgcccaggttgtaaccacggcgttctcgcttcccgtcattgatggactagttgagatc

SEQ ID NO: 64765 - DNA, 154 bp, Oryza sativa
atacaatatcattgctctttgccacgtatgtgtgcattcttattgaccaatattatcgcttaagctgattatatattatggtcatctgtcacgcaggttggtaatcctctacgaggttacttactccgatgttataccatatatgccatatatt

SEQ ID NO: 64766 - DNA, 58 bp, Oryza sativa
ttagtattttatgaatgatcagtgtgtggtcagaactatttaataatgatttcatttt

SEQ ID NO: 64767 - DNA, 463 bp, Oryza sativa
  unsure (1)..(463): unsure at all n locations
ctcagctttagtacctcgtgtacctactacctagatgtacgtaccatatgttctaacagagtatctctacagtccatcatangataactcacggtactcacagtatcataatcgcttcgatcgctagatataacgatattcatcctgtctagctgaatctaacgatctataatgattcgataccatgagatatcgatgcctcgagctatttttattatactgacagtaatctcataaacatatggtcctctgaaccttttaggtagtaataccctatataagatggagttatgccgacgtacgattggccaacacattatgcgcggcttttggtcggcaatgatatcgccaaagatctttgcgtcatattgcaaggatgtaacactcccttcgggatatattatttgtgatcactaatgcctatatactagacatcatcccattcatataaaaatctaacttg

SEQ ID NO: 64768 - DNA, 341 bp, Oryza sativa
  unsure (1)..(341): unsure at all n locations
catattattcagggattcacacatcatatgctattatcgaaaccactcagnntggtagaactattattccttgactatatgctcggtttgttcaattaaccacatagtcngnggctacacctaatangtgcatctagtcggggcacctgactgtatnttccagccctncacagtcttcagatgtggaaaagtactcggaaaccatgaccagatgattgagcactccctttggagtatctggtcagagaagatatcttttcactgcaaggctcaaggcactgtgatatattggacccatcccatcggatggtattcactagcatagngatacttatatctat

SEQ ID NO: 64769 - DNA, 355 bp, Oryza sativa
tactacgcatgactcgtaaaaccccgcccaactaccatgatgctttattgctccgccttacagaccgtaataatctttaggagaaatacgctacaagtgactatgggagtcgctaatcctaggactcatacgaggcaaattatcgagacattatgcgaatcgctgtttatgggattccgttcaagagatcgcgtaataagctgaacatgcggcaacaatgggactcattcgagtcagcttgacatcgcttgttcataacagtctatcaatgctagtgcgacatacagattgcttacatccaaccatctctccatgagaccatactctatatatcgacagagaatttgttctaaat

SEQ ID NO: 64770 - DNA, 217 bp, Oryza sativa
  unsure (1)..(217): unsure at all n locations
atcctcgataacctgcatatgatccacaatatctgcttgtcttgactgagactcggtggtaatgtattcttgagtactctacatatganatatggcggctgcttggctcgacggcaacagatcgacagcgttgtctagatcaatctgtatctgattagcatggcttactcgtgactctgactcgtcacgaatgcattcttgtatagtatgtatttca

SEQ ID NO: 64771 - DNA, 365 bp, Oryza sativa
  unsure (1)..(365): unsure at all n locations
ctcagcttctctcgtgcttacatcgtcagcggtcaagcaatatgaagagttgaatatacactngagctcggaattagtatnttacttcatctgctatatgctcaagtggatattccgatgctgattnntggtggtgtagaattgatatgaaaagtactattggaacatgtcattctcttggtacatcattgattgcatggtcttctatgaaacagtctaagtgtgctcaatcaactgctgaatctgaatatgttgctgctgctatttgttgttcacagattctatggcttttatctactctgaaagatatggtcttactctcgagatagtagctctctcttgtgataatactcagtgctataaca

SEQ ID NO: 64772 - DNA, 178 bp, Oryza sativa
  unsure (1)..(178): unsure at all n locations
ttattagaatcacacactcaactngcttggcctcggtatgcgtgccaaaccgacggacctacctagtagtcgcactaattcctgtagggtgtactaccctgatttccttgtcgttccacctttgtggtacctcagtatctgtgctctctgagcgcgtataccaaatattccacataca

SEQ ID NO: 64773 - DNA, 169 bp, Oryza sativa
  unsure (1)..(169): unsure at all n locations
ctgaaggctttgaagtgctattgctcggcaaagtcaccgggtgagaaaaagacacatctgattacgaattagcggtgtgatcatcggttatattctacgtgaaaatttccgatcaccatccagaatattacagcgattcatttgaatcngttgatacgctgccacgtca

SEQ ID NO: 64774 - DNA, 79 bp, Oryza sativa
cttacttcggaatggtgaagtcgggctgcccttagatgattatggtaagactcctgattctgactgtctgcatttttaa

SEQ ID NO: 64775 - DNA, 101 bp, Oryza sativa
ctatctgatagtagcaccttgggtgttgtgttatgtgacgatccatgctcatatatgagctggagtaatcgacatggctcgaaatgatcttgtaggattgc

SEQ ID NO: 64776 - DNA, 310 bp, Oryza sativa
  unsure (1)..(310): unsure at all n locations
tgcagctgagcaagctanacttagtagtaggaactggctntgtcatcatatcagctgggttatcatgagtacttatctngcatactttgacatcaccttcagcaatcacacctcgaataaagtgatatctcacatcaatgtgcttttgtctctcatggaacatctgatcctttgtaaagcatattgcactttgactatcacaaaatatattaatgcaagacgtaactccacaaagctcagtgtacaaacctctaagccaaatagcttctttacaagcttcagaaatagccatatactctacttcagtagt

SEQ ID NO: 64777 - DNA, 313 bp, Oryza sativa
ctgtgtactgaatagcacaacttttactattttaacggccgcgcacggtcctcataattaagtctgcaatggtaggacatatacattaaagttggattgcttttttcaatcaggaaaaactgaacttgagactttaactactttaaatcagctattcacggccgaaactccatcacccacacgccagagcaatcacgcgatcaacgccaaacccccctcctatgcctgccgcccccgcccaccccactatattcccatggaaaccctggcaggcccaatacccgtcttggtgttccagcactttatcgcgcct

SEQ ID NO: 64778 - DNA, 198 bp, Oryza sativa
  unsure (1)..(198): unsure at all n locations
atgtgagtactgtatcacttaggctatcatggactaatangctcaaagatcatctcgcacattatgataatcatgtatatctangctcaanagatcatctcgcgattctatacaactatatattattagtttattttattatattaatgctcaatataaggtcaaaattcatggatgttntgaaaaaaagattgaaac

SEQ ID NO: 64779 - DNA, 364 bp, Oryza sativa
  unsure (1)..(364): unsure at all n locations
caccgaacacacacttatcggtgtntatttntatgcgggcggagcggagactctcanaagtttccgctagatctgagagtaacgtttcctgggtgcgcgtctttacaaccaagtcatcgacataagcctcaacattacgtcctaattggctacccaaagaaattcgagtagtgcgttgaanagtaggacctgcattctttaacccgaagggcattgtcgtataacaataggttcctatggnggtaatgaacgcagttntttcctcatcctccctagccatgcgaatctgatggtaaccagagtatgcatctagaaaacacanaatgtcgcaccccgcagtggagtcgacaatctgatctatgcg

SEQ ID NO: 64780 - DNA, 172 bp, Oryza sativa
  unsure (1)..(172): unsure at all n locations
catttattattattatttgcttgcagatggatatgatagctcctgtgatatanaatgagatattggacctctctctctctctctctctctctcatgagattgttctgacattataatcaaataaaggcacattccatttttcttttctcaagacagcgacatctgtaacaca

SEQ ID NO: 64781 - DNA, 466 bp, Oryza sativa
  unsure (1)..(466): unsure at all n locations
acgcacttagcacgcgctgcactcctgagaaggacacccagagtcagcacagcccaggatcatgatccctggattgacacaccgcccaatcatgtaaatggaagagagccactgctgactcccactttactcaccaacaacaacagaaaatggccttgtcctactcttaaaactcctcagaccactcatacaacaatggctaaagaaacaatacctgaagtatgtgccattgttctgtatactgaccaacaatactccctccgtcaaaaaaaaacaaacctgatttcgtgttaacgttgactgtcatcttattaanaaattataccaaaatacacaatacgtacgcatacagattaatcatgtttattatctaacaacaccggatactcatatataaaaattctatagacgacagcaacgttgcacggacccacgttgccttttggacgaggagagctatgatata

SEQ ID NO: 64782 - DNA, 173 bp, Oryza sativa
ataatcattatatcaacattgattttttcatgactctgttcctcataatgcaatccttttagatccattctgcaaattgagcattgggactacttacctctattaagtctacaggtctcataactatattgagtggtacaccaaatgaggtgtactatacttcttactacaga

SEQ ID NO: 64783 - DNA, 391 bp, Oryza sativa
  unsure (1)..(391): unsure at all n locations
cgttcctttcatgacanaacctttcgggtgcgccatgtatactntttcctccaaatctccatttagaaatgcccattttacatccatctgatgtaattccaaatcataatgtgccactagtgccattataatcctatagggaatctttacagagactggagaaaatgtctcattgtaatcaatcccttctcgntgcgtgaagccttttgccacaagtcgcgctttanacttttctatattccctctggagtcatnatttggtttgtagacncatntacagcctactggtttggctctttangaattcttctanatccanacatcgttagttcattgattcatttatctttatggcttcaccatcagagagcagcgctttatggctcttata

SEQ ID NO: 64784 - DNA, 162 bp, Oryza sativa
  unsure (1)..(162): unsure at all n locations
ctaaaccggctagcgcagccgatctaaatagaacgatggataactactcgtctcgtgtgcaaaacggaaggttntcatgacaaacctacatagaggtatcacactctctcagcggcggcggacgaattacagtgcagatcgacaaagatggacatactatac

SEQ ID NO: 64785 - DNA, 122 bp, Oryza sativa
  unsure (1)..(122): unsure at all n locations
tcttggatctgagccggcacctccttgcgtggntgcgtgttcgtgcgcgtcgtggagtcgtgtgtatcgagaaaggcgtgtgggatggcacacgtcgcgaactgatcgtggcgcactttgtg

SEQ ID NO: 64786 - DNA, 379 bp, Oryza sativa
  unsure (1)..(379): unsure at all n locations
ctgcagcttgccgcggtacaccaacacacacttatcggggttcatctttatgctggcggagcggaggttctcaaaaagttccgctagatctgaaagaaagnttcttggntgcgcgtntntacaaccaagtcatcgacataagcctcaacattancgtcctattggctacccaaagaaattcgagtagtacgttgaaaagtaggacctgcattctttaacccgaagggcattgatgtataacaataggttcctacngnggtaatgaacgcagttntttcctcatccttcctagccatgcgaatctgatggtaaccagagtatgcatctagaaaacacanaaggtcgcaccccgcagtggagtcgacgatctgatctatgc

SEQ ID NO: 64787 - DNA, 116 bp, Oryza sativa
tctagctgtgtggatcgaattcagatggctcccgcccctgtttcaatggctagtcctaaagacacatggtcacacactggaatattggctatgggataaatccagtaataactcat

SEQ ID NO: 64788 - DNA, 166 bp, Oryza sativa
  unsure (1)..(166): unsure at all n locations
tataccgcgatggatttttttntctcttcgttacttcctcccgntcacggcgtangtcattctagtatttttcacattcatattaatattaataaatctagatagatatatatgtctagattcattaatatcaatatgaatgtgggatatgatagaatgacttaca

SEQ ID NO: 64789 - DNA, 300 bp, Oryza sativa
  unsure (1)..(300): unsure at all n locations
tgagttatgaaaatgtntgctgctacagtgtcattaaatctgtatgtttttttcccctgtagttacgtggcagagctggcagacaaggtgatcctgngtcaacaaggtttatggttaggtatgtctcttcccaaacataagcatttatctctaataaatttggcatacactctgatcttatctattcacttgaaactaactgcccctaattggtcaaccagcttacaagatgaaatgttccggaaattcaatttggacactgaatgggctgtgagacttatatcaaggataacaaatgat

SEQ ID NO: 64790 - DNA, 115 bp, Oryza sativa
  unsure (1)..(115): unsure at all n locations
aatactcttatgtattcgaacatttaatatgacatgacanggtgaaaaagttatcttatggaataaaccgggcctagctacgatcatgccatcnagcgtcgtaattccgatccat

SEQ ID NO: 64791 - DNA, 190 bp, Oryza sativa
  unsure (1)..(190): unsure at all n locations
cgtgttgaccgtcaaagcccgacatcgggccggtatccagtcccagcgcccggcaggcgacgatcagataggccgccttgcatggaactgtgcgaaacgctgtntcttcggcaaagtgtgggctgganggtaaccaactgcgggcatcaccgtggggaaacagtagtggtaacccgtcataanattcact

SEQ ID NO: 64792 - DNA, 443 bp, Oryza sativa
  unsure (1)..(443): unsure at all n locations
gctgatatatantctatnntattttcccatagttgcttattggtttgctatcacanactctgcttaagtgcttagtattngctctcccttccggnttctcacttaatcacaaatcanatgacnatcgagttcgnttggctttatactctntctttntactataacactaatatgtcaataatatacataaattagtggttgaaggattcttaattgtagaattatctntntattatggaagggtagtttcanaactgcaattatgtagaaacttcaggtggtgaaaatgatatggtgtcctatttggtgatggatggatgagttagccaagtcctcatgtatatacgttaatatttttgtcctctctggtataactctggatccaatattctntggagctaggtattttagctctaccatccatagatctagattaaatgata

SEQ ID NO: 64793 - DNA, 453 bp, Oryza sativa
  unsure (1)..(453): unsure at all n locations
catgctatattatctataantttatannattattaaatttagagctnntaaaatggcaagcatgtaaatcatcatcccacctaattcacataatatntcaatatatatctntattantttttataatatgctatgtacctatatagttcgtcctcacttaattaatattaattttatcttctctcattaagccatatcacatcaatnggttntagtgctcaaacaantaatctatggnctaaaatatttctcttatttcttctctaataatccataccatctcaattattntagccttaagatgataatctacggtcaaaccatctaatactttcttctttataagcatataccttacttatcgttgatcatcatgattatttgtaatttaatatataaccacgtaactatatatctatgtgctagcatctactataatttactatatattat

SEQ ID NO: 64794 - DNA, 320 bp, Oryza sativa
  unsure (1)..(320): unsure at all n locations
agtgacagcgttcgaaatatgcgctaagttctgctatgggatgtggtgtaccctcagtcctcacaatgntgttgcagcaagatgtgcaacagaataccttgaaatgactgaagatgtggcaanggaaacttgatattcanaatcgatgtcttcatanattctagcatccttcgtagctggaaagactctatcattgttctccagagcacanaagcactattaccttggtccgaagagctgaaggtcatcngcagatgtatagatgctattgcttcacagacatctgtggatccagcttaatgtacctggtcatacagtca

SEQ ID NO: 64795 - DNA, 316 bp, Oryza sativa
  unsure (1)..(316): unsure at all n locations
ctatctgtaccttntcttcttctatcaatataacgccagtcaattctgaccggccgttcgaaaatatatgtctctgcgtgcaaacaatgtcgtttacgttttgtggggaattctctgaagatgttcctatatataaatgctgatggagttgggtctcttgtgacgcaatgaattgtctggcaaggtgacttgcacaagattctgagctccaacacttgtccctgaagaggacgaagacttgccatatcctacatactcctatattcatatcagacggcatgaactgtattgacatatatatctctagacttattac

SEQ ID NO: 64796 - DNA, 356 bp, Oryza sativa
cttattactactcggagcgcctccgaaggagggttacctaaggctatcaaggcccggattcgctatacaagctcgttggtttgcacgtagcaatcacagtttttattatattttttattaagtttacaaaaatttcctttgaaatgacggaaaagcgctccgcctctggaggcatttaaggcgctaatgactggagccgcgtcctcttgcgacgcgtacaaattacagggccctgcgcctcctagcgttttactgcgggccctgcatgcgtagaggattaatttctcttattctaatttcttttttagtttcatttacttttttttttctttactttaacttttctactttcttta

SEQ ID NO: 64797 - DNA, 192 bp, Oryza sativa
  unsure (1)..(192): unsure at all n locations
acgtggtttcatgtattgtaacctcgaccttcgcataagagagcttgacctttggcataagagagtcttcgtgtagaaatcatacganatccctttcacagtttcaacattccagagttntaagtgcatgatcattcaatactattccgtactcttcaaggctcagtaaagaatgctaaatctctcgttttc

SEQ ID NO: 64798 - DNA, 395 bp, Oryza sativa
  unsure (1)..(395): unsure at all n locations
attagctacctttatgtctcttactatgttcacattgtgaatgtcctaagtcgttagatccacattattacatangctctatattgacttcttcctggtaaaattgctctattatctctgtttaccttacatggcttccttattgctagtcatccncttggcggccccatcgccctaccaccattaccactcctcttctgtattagcttgtanagaacgccactaanagctcaatgttgagacttatgggaaataggagctccagttcatcanatcgacttaggctgagnttaaaagagaagttagccattagtatataattaattgaaacaataatttatagtattattaacaactcgagtntattttttaaaaagaaactttatatatttact

SEQ ID NO: 64799 - DNA, 374 bp, Oryza sativa
  unsure (1)..(374): unsure at all n locations
actatctatgcaattgcttgctactatgtgacaccagcttgcaacaaanactaccaaagctagatatatcanaatgatagagtcttatatttatgcagcatgtatgcatatataccccggcccctaccgccagcttatatccattccatttgctacttattagtgcatgcattcatgtatgcatgctacagcactatatatgcatncatgcctttgtcagcttcttcactgtgtacttcaagtaactcgatcgtgccccatatatacttatatacacatcgaaatgcatctgcttttgcccttatgggtccatgtatgcatngacatctagctcatttgcttttcctttcttcttttttaagacacatcaacac

SEQ ID NO: 64800 - DNA, 437 bp, Oryza sativa
  unsure (1)..(437): unsure at all n locations
ctctcagcttacaanactcgactatggaaagacggggtggttattattatacatctatcctatattgttcagaaatggagagntcttttccttcaagggttggatcttgggtttgctcaactggcactgtcagactgatagtctncaatcttatggagctgctctgttgcctctgctntgtgtaggatggttactctgtctcaaggggctctgttngggaaccaggattnttcttgattcatgccataattgaactatttcggtatataaagggaatttgggcattgatttgcactttcangactcttatatttaaaacggatagtatttggtatgaatcangattctgacatacctacacctgatcttgtagacagcagactgaagcttttatctctgtattgacctgaaatgtagtacattgatgctctgcactg

SEQ ID NO: 64801 - DNA, 66 bp, Oryza sativa
tatatatatagtcttcagtgagaaaagcctcagaaccacaccctcgagagcccgagctggagaaga

SEQ ID NO: 64802 - DNA, 344 bp, Oryza sativa
  unsure (1)..(344): unsure at all n locations
cactaatagcagctggctgggcatcgactgctggccactcaagaagtaactagtctcttgatatctgtatgnaaattagcaatgtaaagtacagaattntatcatccacaaccgaatagctttattcggtccatcttcatagcatatcaacaaaattgaaacaatatgctagaagttaataatgatttacctgtggaatggctggaagacgaaatggttcattgtctggatggttatcacgcgccaaataattcagcagcagcacaatggcacaccctaatcgatgatgcangcatgcccattatggcttgaactgacgtttctactgtattatgggaaaagca

SEQ ID NO: 64803 - DNA, 310 bp, Oryza sativa
agtaaatactagctatgtttgcgatgtataattcccgaataacatatctacttccactatgtactatgctactaacatctatgtagaagaagcacatataaatagagaagaatcgacaataaatagatgaacgatcaatcagacgctgtcgagaatcagacttatggatagatgggctgagaactcagatatgacacgatccaatatgaccaaaattcactattctggataagaagaggagtatgggggctacctgtccaaaatgggccagagtagcccagcccatggttcggccgaacacaccttgaag

SEQ ID NO: 64804 - DNA, 116 bp, Oryza sativa
  unsure (1)..(116): unsure at all n locations
cacatacctacatatcatacgtaactaaaccattagaattgcaccaaacttaatatcaactatgctccaccatagganataacagaggtaatctccatagtccataatccaactat

SEQ ID NO: 64805 - DNA, 500 bp, Oryza sativa
  unsure (1)..(500): unsure at all n locations
gctttaactaagctctacaagatcttaccaatgcaagcggtatggtgacatacaccgactcaatcaagcaccccaatagagggtggatgtatcgatgccttggcaaacacttgctgtacggctgcaatcaaatctgtggagctctangtaggcttatatatgtagcanaggaatagcaaatgctcanatcagataatgcaaaagtgaataattgttcaaagtcaagtaccgtgctggtcctangctagaacgtactatagacgcgagcctagacacaaacgataccacaagatagcactatgaacaactcatgcacaactctgatatatgaagttcagctcaaacataacagtatntttgtgaaagcaaactcaaagatacaactgannnttctctttctttctttcttttctatcttntctttcttctttcttnnttcttttttggggcggctttgttcttattttacaccttctgcttttttctttttttaaattttt

SEQ ID NO: 64806 - DNA, 338 bp, Oryza sativa
  unsure (1)..(338): unsure at all n locations
atatcatcttctattattggatgatcaaccgaataatatgttcctagctattgaactntggttattgtttaactgacatgaaccactgaatgcttgatgctaattattaattgtaacctctttactgaaatatatatntatgttggaatgtgttgtgctcttgtgtgcttgttggtggcttatattgtgatggaaataagctntgatggatatagtaaacaaatggcanatagcattattttttattaacacgttctcttaccgggtgcttcanacacgggaacgcaccacatgttaccnggtgtgaatatacacggaacacaccaatgtaccgtgtg

SEQ ID NO: 64807 - DNA, 249 bp, Oryza sativa
  unsure (1)..(249): unsure at all n locations
gaactatgtacgtcacaagcggtgggttgtgcgggataacgtgcctgtcagtacggtgtactggcgaagaacaagggcacgaggagatcatgagagctttgtcccagattctgagaaagagatgctgtggaccacaatgctcgagacattcaccctttctgcgggtacagaggacaaagtgaanaggtggactctgaagaaaatggcagaacagtttcagagcttcaatggagatctgtacaagaagta

SEQ ID NO: 64808 - DNA, 377 bp, Oryza sativa
attgcatcagcagaacacacctgtggtatctttcaaagtctctctccaaaaaattaagaaagaaataaaaactaagaaaaatattaccatgaataagaataaatacctattttaactgtcacaacatgctaatcatttcaaaaatggaaacagacatggaattctacatcatatcatatgagctatcacttatgctctaaaaaaaaatatataaaaatatgaatacaaatcaaatcatatatacctctttatggattgaatgcttaaacttattattttatacctttataagaaaagaattctaatgtgctataaacaagataaaaatgataaaactctatatactacagctctattcacttttatatatactctct

SEQ ID NO: 64809 - DNA, 287 bp, Oryza sativa
  unsure (1)..(287): unsure at all n locations
gagcagtgccaccctcttctatanatctagctcacccaagaatccaccanagtatccaacgagatcaccccaccgacaacatcttatgagacatcnaacagggagtatccactcgttctcatattgcannattttgtgagcattactcgtttgtgtcttctcttgaacctctaagggtggaagaagctcttaatgatccggattgngtgatggcgatgcaagagggagtgaacaatntcaccaggaatgaagtgtggactttggtggagcgatctcggcanaatgtg

SEQ ID NO: 64810 - DNA, 395 bp, Oryza sativa
  unsure (1)..(395): unsure at all n locations
aactatgcaagtacgaccaaacagcctatacaacanaaggagattntgaatcacatcgcttgcctttactagcttataagatgcccttcanatntaaatnnntaaatttaatggtgtagtncgatttggtcttctcatcngaatttcattctttagcattggtttttaaaccaggaataacacatacataanagttntacttatattgnttttttcttatatgccatcttgcttattggatggctagaattatttttcactctactntcnnttctaaanatagtggaagatcaactattacaaatattgcatatagcatggaatgacctgaaataatcttagccaactgatggaatcaagaatgatggccataatatatttctgactttgtttac

SEQ ID NO: 64811 - DNA, 371 bp, Oryza sativa
  unsure (1)..(371): unsure at all n locations
tatttggtcactccttttacttaatcacaggaatgaataatccatattntgatagntgaaaacggtccttcgaaagagtaatctatatctcatattgaagaatgatccactgaanatgtcatacagggaccatgataatatnttggaactatataaaaagcttcttaccaggtacatgtgaacacaattcactatattngcaatttaattaactgacttgaacttatagntctttnttgtcagtgagacattntctgtattntaaactagcaatttctgcatgctcgcctaattggaatctttagttcaagattaaccatanaaagtactgacaaataaagggtaaaaagggggctatgctaactttataa

SEQ ID NO: 64812 - DNA, 471 bp, Oryza sativa
  unsure (1)..(471): unsure at all n locations
taaccatagcacaagctctntccatgtgggctcgctataattttctctcacctaatcctntcaccaatcacggcatctctcgttcctacgtctagcctaggcgcgcgtgccgagccgtcgactatttagtctaccgcttntctctctctttacaccttccctcttncaggtataanaatgagctgatgtcattggctaatagtaagcaaactnttcctattgcacttngccctttagtctcagcctcttccaacccttatttctcgtgttccgacgcgacgttttaactactaaatatgctaacaatatgtttttttacaaagttctatatgaagttcttaaaaataatctatttttaaaaagctaacttaatatacgcctataaccgtctgtttcggcgagaatggttctacccatcacgccatattgctatctacgnatttaagaaaggttgtaaaacttattaggtct

SEQ ID NO: 64813 - DNA, 239 bp, Oryza sativa
cccaccccgcccccagttcaccctcccccccatatccccccccctaccccccccaaccactcctccgctacaccccccccccctcctcccacccccaccccccccaccccccccactcgccccccccctcccccccccccccccctcccccccccctccccccccccccccctccccccccccccccccccgcctccaccccctccccacccccccccccccttccccccccccccccc

SEQ ID NO: 64814 - DNA, 373 bp, Oryza sativa
  unsure (1)..(373): unsure at all n locations
cttcagtcactgngctgcagctgaatcgataactatctgcccacagtcatcaattatctaactatggtatggatatgtctttgtgacatgctatgaattggattaaaatttgcaaatgtagataatattgaccaatgtactatttttttttcagttntttcatagctatttgtactgagattaaatgagtagcacataaaatttgatgcatcanatgcaagcagcagtggtttggtgatggagtcatgagtaacaccacccatcangttaagtattatgtacatgtgggcgcacattcaatangattttattgaggctanggagttgacgctagtctttgtctctttgagtatgtgtaaaagggtgtattcat

SEQ ID NO: 64815 - DNA, 308 bp, Oryza sativa
  unsure (1)..(308): unsure at all n locations
gcttctgtgaggagagttttactactatttattangaaccataacatttttgagaatatattgtatctgtgggaatgctatattgctggatatgtggagtttaaaggatggaagaagttatgggactcccctttcatactggtaggagntaatggaaaatatcttttagatgacaataaatgagcggctatactaaantaatctatcatccccatattcacttctactacaagactgagaaatgactcatacaattttaagttataactactgtagtaattatgtgagtctgcatgatcaacattaat

SEQ ID NO: 64816 - DNA, 240 bp, Oryza sativa
  unsure (1)..(240): unsure at all n locations
ctctattgacactatatctcagtttatcttagtangaatatggagagagtagagtagaagtcgtcggaggagtcccggagttgtcgggaacttcttcttcttctnttactttatggaatactctgatcattaatagaaatatcattatgagtatcaagtttatcttagtaagaattatatctcaggtagttcctaagtagaatactggattactggtcattataaacaaccaacttatag

SEQ ID NO: 64817 - DNA, 416 bp, Oryza sativa
  unsure (1)..(416): unsure at all n locations
gctattntgtagtacatgggcatcagtatgtaagatgacatatgcatacttttaatgaaggcctagttctttgacaagtaatccacgtggatagataactgtaaggtcaacacaaagaattaagtgtggagtgttntgagttaattggttcttactgcttaatntcctgttatcttanaacttcctgttatcttanaactagacactgttctcctaatttgtcatccttttcctatntagtttgttgtnttctacgaatctcgagctatntgtatggagaaaaagcagtgacaatggtaaaagatggttntgaaggcactacaagacatgcctcaagttataaccgtgctgttacgaagatccaagcatncaaaacacttggaagattaagcttcaggcgttgcaacataatgcat

SEQ ID NO: 64818 - DNA, 285 bp, Oryza sativa
  unsure (1)..(285): unsure at all n locations
caacagctcatttaataatgtaccgaccctcccggtcagatcattacttctcgggctccagagccattccacttgattaatcggctcccagagcctttntcattntctcggnactccagagtccagctgcccagcagcacaacaatccgcttncacttcggaagcctagtctatgatacccgcagacatcccgaatcacacagattcgtttctgaccactcaggtcatncatctgccacataggctgattctggnntacgattccacaccacaacaaactttcac

SEQ ID NO: 64819 - DNA, 336 bp, Oryza sativa
tcgaatatgatagagacatctttctcgtcaaaatagcatcaagttatatagatatacaatgagatcagtcctggctcaccatcataaattctatttaattttcactaccccctaggtattttgtaatattctattaattttcactacacctagtatattggttcactaaactatgatatggtttgctctatgagaacctgattatcctattaaactactattatatccatccatcaatagttaacctcatgcggctctagaaggacacaaaaattctcactgaacttttacatttgcatgttgagaaactggcttcattattataagtatactgtg

SEQ ID NO: 64820 - DNA, 273 bp, Oryza sativa
  unsure (1)..(273): unsure at all n locations
tatctaatccaccgttgtctttaagaagtgcatgtgcacacaactactcacttgaactggtgatcatgtgaaatacacaaacaatcctatctacataatgcattancttttatatttgtagatggatgaatggacaacatctaagatcactttcccctgatgtactcatcaagagtnttgaggatagatggaaggacacaggcattctccacgagtctgaaagtggtnttgctatagtaagattggaggcctcttgttatttctacacaccat

SEQ ID NO: 64821 - DNA, 116 bp, Oryza sativa
attctggtttctttctacattaacccagaggatcgagatgagacatgcttaccagctataggccttgtcttcgaaaagaaagatgaagtgtactgcagcaatatgttgatctcaat

SEQ ID NO: 64822 - DNA, 324 bp, Oryza sativa
  unsure (1)..(324): unsure at all n locations
tgcagctatcccattgagctnttaacatnggatgtgcacgtttaaccctgctagccttnngtgaatacttaaaactttgtggcgatgactatatatatngctttgatcacttaagcataagtgccgatcattccatgtcattccatggtactgctgatatntaagtgntttgatgccagaagtaatggttagattgcattacaacttcgtattagatgggaacaactttagtaggcactaatgttntcttctagggcctctatagctnccatatatnggtgagtggcaatctcattgttcaaaatgcaaccatttgcccatgat

SEQ ID NO: 64823 - DNA, 139 bp, Oryza sativa
  unsure (1)..(139): unsure at all n locations
agatccccgcgacaggtgatctctgagcccgctgcttattaatgatgtacactattcgaagcgggcgtggccgagatgatgaatncacatgcccacgcaaacgctcggcttactcgaccacgtcgtcagcctaaacacg

SEQ ID NO: 64824 - DNA, 429 bp, Oryza sativa
  unsure (1)..(429): unsure at all n locations
tgcagcttatcaacctcatgccgnggaacaactatgccatgtctagtntcacttgtgataagctggggaccgataaagtctgcgacttcatcaaaagcacacaagagagcaacttgatagctacaacaacagagagaaaagttacctaatcaaaagcacatttgtataatatatatttaagaaaagtaaaaataggggggaaacagtgtgtgcaaggatatattcatacttgagaaacatggcaaggctgtgtccacacgcagaatttagatacattccatggtcatgttcacanaaataatctggatttataatacctagaaatccaaatcaattgtaagtatgaactctgtataatatgaattagtatgaatttgtagagaataaatcgtaccttcaaagggacatgagtatattggtacacacact

SEQ ID NO: 64825 - DNA, 337 bp, Oryza sativa
ttttcccaagaaaaggtgaaatgcctacttgggacatacggtaggtccactttaggtatcataagccatatccgtgctgaggcttgcaataacttgcaggtaatgacttgaattacacacaagtgcaatatgaaccccataactaataggttattattcttccaccaatgattgaattttcacactttacatctactgatgcagatctggtactaaaatgaatcttgatcatagaatattcctatcaaagataaaagaagcccgtctttgagcaaataccttacgaaaaaaaattacgtacatgggcattacgggatgtgatatgttaacatttttt

SEQ ID NO: 64826 - DNA, 316 bp, Oryza sativa
  unsure (1)..(316): unsure at all n locations
caactgaacatagagtcgagaactgtagcttcatgtcatcgagtagccattcagtgagtgaagaatacgttgaagatgtccgagtagaaatattgaagattggaacaccacttgntgtagtagaataacacgacatcgaatatggaagtgcatgccgagatgtcgaagctcttgtagacgtcgtggttggtgaagtagcanaacttgcgaagtagcggcaattanggtttgccggtgccgaagataatatagatgaagtcgcttcaccatggtgacaagtgatagctgtgatgaagtgacacgagtcggcggaaca

SEQ ID NO: 64827 - DNA, 405 bp, Oryza sativa
  unsure (1)..(405): unsure at all n locations
gtatgagctagtgaaaattacatatgagacattgcagcacaatatgtttctcaatactaatggtcagacattgcatggttataggaatctaacttcagaaacaagtgcttcaaatttaaccttgtctatggaccataaagcttatgcaagtggaaacactaaaatgccgcatcaaatctgtgaaataggacttatgttttcatgatgccctgngcaacttanagccctgtgtccatactgcanatggaactaaccatggtcatcaaagctatgactagtcaaaaagcttaatattgcaaagtattagctgatgtgcgtgataatatttctacatggcatcctatcatggataagcacatattttgactactgtgtatgatgactgctaagatttcaaatgctgca

SEQ ID NO: 64828 - DNA, 353 bp, Oryza sativa
  unsure (1)..(353): unsure at all n locations
ctgtgcatgtgctctggattctatgacagatccaataatacaagcagacccatgtgcgcatggaacgtgcgcacacatggatagaattcattctctgattgcaatntacatatatgcaatcaactcgataacacacgcaatggaagatataccatgctctgacacancggcagtataatacgagaagacttcagacaccagcacggaatttcttgccagaagtaggagtatatcacaccaatatagaattcaatatattcagatgcatgactggacaattcagaattgcaaactaacatanggaaataaaganacatccacctgcaaccatactacacactaaagacctttat

SEQ ID NO: 64829 - DNA, 268 bp, Oryza sativa
tttttctttctcacttatgttagaattgagatcaactacccctctacgcagtgactgatggctataacagacgaagtcacataacctctcataattaacaaccatgttattatatcttacaaagatatccataattcatttggtggatccacccaatacttccgcctgatatgtcttatcccaatactttaccttaaggtaaattagtgtgattctatgagacgctataatctaattgtatgaaatatccattttagtattattacaa

SEQ ID NO: 64830 - DNA, 210 bp, Oryza sativa
aattcagcaagacataacccttgactcggcgaacggattgctcaatctttggaaacatggagttctgctggtgtggtcagaagaatctgtggagcacagaaggagctggtagttgtagtaaagaaaatatgcgactctaaacttaagctgcttgcttcagtatcggcttctctatcatcggccttacattgaaattgaccaaatttgctc

SEQ ID NO: 64831 - DNA, 451 bp, Oryza sativa
  unsure (1)..(451): unsure at all n locations
ctctacgaatatgagttatatgatatattngagtccgcttcttntggttcgtaacattccttttattgtaactcgacgaataggctctctaaccagagtcgcctaccactgaaagcgtgctactgaggctcttataaccactaagctacaggccctttcgcggaagagggtatattttgctaaaacttaccaccatatatataaacataaattatgaagaaaagaagtatattnttcaaattaattcgcacattggcacagacgttntgcacccncaagaacctgttgggacgacacgggtggacgggtggattcacacccccggactccacatttcaaatttataattaaaatgccgcacaacggccgcagatcctccccttcctgagtanctccacccaacgcctaacctatannactcctctcttccttcccttcccccgaatcatct

SEQ ID NO: 64832 - DNA, 339 bp, Oryza sativa
  unsure (1)..(339): unsure at all n locations
ctcttgtagtacatcatggcctctaactattttctgnatgtaaagcatntaacaaggaatcaacaaaatcattcttattttgaagataaaacagccacgttgattcacctgttctacagagtgtctgccctctaagagaagcccaatgacgaagttgtaggacattntcttcatttccccaaacttcactctctctttggcaaccaattctttccaaaagattattccattcatctataacaagaatagcgaagagtaaaggacagaatcctggtgactgtatccatatntagaagtgcatagaanaataaaacatgagtggagacctgcanaaatctt

SEQ ID NO: 64833 - DNA, 286 bp, Oryza sativa
  unsure (1)..(286): unsure at all n locations
caaccggatggtcacnaagtgtgatctcagctcaagcttgaccccaagatggatggcgcaaggcanaggtataatgtagctaaaaatgttntcttagtattttcccggtcttggtgtttggtgtagaccggatatgctagataggcgccgtactatcaagagtggtctatgaagcgagcttgtggatgatcttgtgccatattagttcatatgcatgtangtgcattttgtgggcttgtctaaccaagtgtagaagtgggcatgttcaatatgagtgagtgacatc

SEQ ID NO: 64834 - DNA, 278 bp, Oryza sativa
  unsure (1)..(278): unsure at all n locations
agctaatcaattataatttaacaggtggttcatgctcatgntatcgagtccaagtgcaaacctattatactctctattctgttgtgctcaacgtacaattttaacattgaagagttctgtacataatcgttgctttgctaatgcctttagatgataatgcttagtttgcattacctaaaaatgatgcgacaacagaaactgtgcgaaagatgtggccccggaccattgttgcccagatcataatcttcaaaatggacagcaagttcttcaaatctatc

SEQ ID NO: 64835 - DNA, 263 bp, Oryza sativa
  unsure (1)..(263): unsure at all n locations
gcacagaagaatcatacacacaggagtagggtattacgcttcatagcggcccgaacctgtataaacctcttttgtctcatcgtcttggaggagcctccgagatcaagatcacacacagtttcgctcaccanattctctaatctcaccagttgcccncggccgaactctcaaaggggggcctcacagcctctcgctaaagagggtcacccctcgacagggagtatgagtgtattactagtatggtatanaaagatgccggttct

SEQ ID NO: 64836 - DNA, 254 bp, Oryza sativa
  unsure (1)..(254): unsure at all n locations
catacgagatgccaggcgacagggctttcctttccaggaagctcgttagctgaagactacgatgaaacggaagctgccgcacactcctctntgctaccctntcaccaatccctctactatcctgaanaataagaagccaacagagccgatctccctcgaagaaagtttagtggctgttcctagtagtgtcgtattgggtgtgaatctcataccccaataaanatggagatgtgccagcctgctgtactcctatc

SEQ ID NO: 64837 - DNA, 340 bp, Oryza sativa
  unsure (1)..(340): unsure at all n locations
gctcgtcgctgaacaagctcctgcccaacttgctaacatctttctttgtttttgaatattgatccactagtgaaccagctacctcgcttgctcgangaaggagctagagctactgccatactcgtgtattatgagagccatttgcgagagtaagcttctctctttgttaatatgtgatgctgctcctgttattgtgcatatcctgcgggatcgtatcgcatgactatctatgctngtgctgaatcatcctatgcttcttagtactgttgctagcaaaaactactcgaattatagtttttgcctggttctgacgagcttgatgagtaacaggttcagtatg

SEQ ID NO: 64838 - DNA, 352 bp, Oryza sativa
  unsure (1)..(352): unsure at all n locations
tgcagctgtacaaatatcgactgcgtattatagatagtgttacaaacatatattaattatatcatcatatcactaatttcaaatatatacataactaaattagctatgcaatattttaaaataaaagttacacccattatatatatagccatctattatctatctattatatactanaagtggcgctctatataaatagagaaaatcctacaaacgctctcaagccaccacgttacgctctaataaattatagaaaatcctagaaattctaagaagaaagcanaacatcaacccctttgattttcacttaattaagttggtaagtccaatattatacatttgtagatgaaat

SEQ ID NO: 64839 - DNA, 341 bp, Oryza sativa
  unsure (1)..(341): unsure at all n locations
aattgtctcgcaattacacgcatctgtgtaatagttattttntttgcctatatntaatactncatataaatagtcaaatgttcgatgtgactgggtaaaaaatattgaggtggaatctatacacaaccatagtctcattgaacacatactactgctacctcatataattaagttactgctgatataaattatcatcgccaactaatatatgacgctactctgtatgccctcccttgccactctcactangataancatcatcatctatcatcatcatctatcatcatatcatataactaaatatatatactaatattctaaagccataacttctcaacgtc

SEQ ID NO: 64840 - DNA, 207 bp, Oryza sativa
  unsure (1)..(207): unsure at all n locations
tggacctagaaaagagtccaagagccaaaaatagactatgcccttctgaaatatgtcgatgcttgtggtcctcaccttgttcaaatatagattgaaggtggatattcattcttgcatgtcactactgacaagaacattgaatcaacatttctnttgtggtactgcagatgcttntgctaactatatgctgtgtcttgcctctaaata

SEQ ID NO: 64841 - DNA, 210 bp, Oryza sativa
cctactttgaatgttgttagagactatacttacctaataccactgtggattgacctataggtaagggggctaattatctggacaacatgctattatcaaaattgacatttatagaatatgtccatctatttaatgagttttttttttttcggagagcagataggtttcctacctttttgggacataccccgaaaaagaaagaaaaaaacg

SEQ ID NO: 64842 - DNA, 139 bp, Oryza sativa
  unsure (1)..(139): unsure at all n locations
ttctatataaacatcgctgtgcttcgacgtacgggaagagcaacgagctgtgtcgacgctagcttagccaacaccaacgaagattcgaagctcgcgggtttcttggctttggtcgtnagcatcaaaaatggccggagct

SEQ ID NO: 64843 - DNA, 372 bp, Oryza sativa
  unsure (1)..(372): unsure at all n locations
tgcaagcttgttcacattctaatcttggaactgcatgcattgaaattaatcaatatattagnaccataaatatcaagagctgtctagtacatagtatagagacttacatcctncgcgttagccctgtaccgtccattaaccncaaggaattcgcacgcataatacccgcanaggaccgttcctcgcgggtgcttgtgacacttcaggacatatcatagaaaaaagtagttaacatttgcaattagtgaaacaattggaatacatatagtgagtagagtattaccggccaataggtacgtactagcagcttctcccgtgttcgggtctngtctccacccttgaacttgtagtattggtatgcactgtatggat

SEQ ID NO: 64844 - DNA, 383 bp, Oryza sativa
  unsure (1)..(383): unsure at all n locations
gacgttcgtactccatccaagcatgaatgaactgtatgggtcggtcanggtgcgttatcggcccgccacttgaagtaactctgactgtgtcaatccattgtacgaattgacatttncttacatcctcctatgtacantccatttgggatagttaagttaatgatagtactgaggagtgatgaaaagaatagttgtaattaccacgaaatcatcgtcgacaatgtttggacacacgaaacacctttgtcctcgagttcggtgccttacggaccttatgacctgacaacggtcaccacaacgacactccggacgctcacgccacgtggggagtcctatgggagttacgtgccattctaaagcctcagcagcaattcgacgttcat

SEQ ID NO: 64845 - DNA, 367 bp, Oryza sativa
  unsure (1)..(367): unsure at all n locations
gctagctcatatataatggagtatcatatatatacatacatgtgngcctctcctttgccttntctcttgcaggaaacaggtgccattcttgacatgtatcagcaaagctagtagctagccagggtccagggcgggcatgcatgcagtagcaagctatgcctgcactgcatatcatgcatgaatgcatgtgctcgatcggaaatggngtggcagccttggcgtacgcctgccaatntaaccaagccactacatggccggcagactggccactntactntgtcctctccctgttccgcgtacaccgcccggatacatatngccacanctgttgatcgatcgatcgtcgatcgatctggcttgatttctc

SEQ ID NO: 64846 - DNA, 176 bp, Oryza sativa
  unsure (1)..(176): unsure at all n locations
gctggctgcaccttgatatatagaactagagtccacaacacttcatttgtagcaaattcattcagttctgcgcagttcgtctttttgggagacctcattggcaattagatggaatcaatatagtncaattaaacgctcatccttatattcagtatgtaggtaaccatactgctaat

SEQ ID NO: 64847 - DNA, 231 bp, Oryza sativa
  unsure (1)..(231): unsure at all n locations
agcccatggaagcaaaagactggctacgcatcatagaanagaaactgactctagtcagggtacgcgaagccgactatgtgatcttcgcagtgaaccagctggaaagacccgctggtgattggtgggatacctacaaggaagcccgagaagacggtgctggagaacccacctgtgaggagttcacttgcggcgttcgcgagaatttcgtacctgctgcagtgatgcgcatga

SEQ ID NO: 64848 - DNA, 197 bp, Oryza sativa
  unsure (1)..(197): unsure at all n locations
caccactacactatcaagntcatntcttctctactgtgtaagttaaactctngtatagtgtgccaataaataggaatatggttaaagctggccttctaccacatattctcatatttgnttcatcgtataatatgttaacattgcgtaacgtactataatcaatagatcattcggaatgatatatatgcgtgctacct

SEQ ID NO: 64849 - DNA, 334 bp, Oryza sativa
  unsure (1)..(334): unsure at all n locations
agagggaatgaatatgtattgaaatggggtggaattccctctctcggccgactggctcttatatggtacccacaacggtcaataatgacatgtgggacccactagccgttaccctgccaaaagtggcagggaaccgttacctggccggttcaaccgaaccctaggtgggcccaaccggccccactnntcggctgtggattccaacggttagtgtggtcatggcacagtgcatttcgtggaaaaatttattnntggtttgctctgaaaaatcattngaagaatttcctcanaaatcaaaagtcctaaatgccaatttgaaaatcanatatgtgat

SEQ ID NO: 64850 - DNA, 360 bp, Oryza sativa
  unsure (1)..(360): unsure at all n locations
attattgggtggtagagacctattaacacttccaacctacanaattntagaatatatgcatgtccgttagagtatgggataaaaaaatgccatgaaaataactcagtagcagcccgagagagtagttatcagttatcacctgaggagataggcctgcggctagccagtgtccttcttcaggattgtgttcaactgcggcagcacgaccaattggctacaccacanattcaacacagaatagaattaagaaaaaagagccacgtgaacacacaattaatgccccaattaacataagtatataacaattnttcatcagagcctagaaaggcttattganatcacaccangtaatgcaccaca

SEQ ID NO: 64851 - DNA, 420 bp, Oryza sativa
  unsure (1)..(420): unsure at all n locations
tctctgagtcacctgcngcatgcaagctcatgcacttanactctggttacanaggcatattcttactgagagtctatcagcaggtgtcagtgggatntctttcagcatgttccatagaggagcanttgggtccgatgatgtcggtgctgctcgtattggtntgcaggggtgtcatggatcccagctaaggtactctntaccatatccgccttcctgccatcatgtggcacgggtgcctgcggntntgggttaggagttgtntatgttctgctgactactntgcacttcttcaatccangcttgagagcagccattgtgctctcagcanaggatccagatggctgggcagatggtgcactagtgtcagacatcacttcacaaagcactgcatcactacttngctgcacctcatgacagtca

SEQ ID NO: 64852 - DNA, 379 bp, Oryza sativa
  unsure (1)..(379): unsure at all n locations
tgctgtctcagcacgagctgcactgagtggagtaggatgacagtgctactctaactgctgtgactatacgtacagtaaacactcgtcgctacagttatcctagatgtagactgtaacagttatttctaaaaatgtagacttgtagctgggtcattctcacgagttaanaatgagctatatctttntcgtatcatattaataatttcaaacttatcattntacatgttatcatatattaatcaattaagaacctactanatacgatgaataagttcaatgtaataaaagactaagtatattagttaaaagcactatattagttaaaagcactacgtatataaaggtataacgatatcttttgtctaacgaactaattaaa

SEQ ID NO: 64853 - DNA, 96 bp, Oryza sativa
tgaatatcaataaatgagatgcatctcatcagatatttaactacgcaagaaatttctcatccatcttaatctgggccgtggatgctcgatcgaacg

SEQ ID NO: 64854 - DNA, 292 bp, Oryza sativa
  unsure (1)..(292): unsure at all n locations
tctctatctatgggaattctccttgagtattcatttggacatttgctagtatgaagggtctatgctattggcacttgctagtataattattaatggacattcatgtgacttccccaatatggagtcgataaattttcaaataanaatttcacttgcttatatccctaanatttgagttcttgttttaaatgaatcaaaataattcatgtcgaccaaaccaataataactagctcaaagccctgtcagtatcttaacacatgaaagtatgctaatgaatggcttgaatcactc

SEQ ID NO: 64855 - DNA, 431 bp, Oryza sativa
tcaccgagatgcagcatgcatcttatagattgaacatcttcatcattcttcggctatatagttccgctctcctaagcaacccaatcatcttgtgggccgagtgatgagttccacaaattgcttcatgcgcctcgtccatagccactttagatgatcttatctaacacttcatagactcctctatgttggcgaataatttctcaacaagatttgaacctgcccaatttcgacaactaaggtagacttcaaatcaaccaagaatctcatctttttgttctggccaatgtcaagtacatcattcgcttaatagtgggtggcccacctctgtaaacgcaatatataaatgcatattcagctgtagacctatatgccgcaacttgaactcgactgtgccacattcatacaaactccggtactcatttctactgagc

SEQ ID NO: 64856 - DNA, 269 bp, Oryza sativa
gatacgtgtatttcatattatgcaataatcaggcttatgattcagtgcatccgaggagtttatcatggtgacgatctactacaagtacagaagaaaaatgagaacaagacttgtaatggttgtattcatacttccatagcgttgacgccatcatgagttcataaacctctgaatttgtcaaatgaattaggtacgttgcatgtgtaatcctcagtataaaataactctgttccaaacctaatccattctgaagagtcattacagattta

SEQ ID NO: 64857 - DNA, 183 bp, Oryza sativa
acattaactaaacaagtcctacatgatgacttatgcttcagacacgtcgtgtcttttggactacttggagaattgtcatatcagtggaactcgctccttgatatgcttgatgtaggactagataacgaggatattaattgtatttagaggttgtagaccaagtctctaaattgtggaaatcag

SEQ ID NO: 64858 - DNA, 283 bp, Oryza sativa
  unsure (1)..(283): unsure at all n locations
tgcgacatcgacaacaggaaggggatccagttcccggagttcgtcgtcttcctctggctcatgntaccttcttttggttcagatgtcacataccgtgtaagtattttcttgatcatttngctcttataggtaaattcaactcatagagtgatcantttgtgtgtgttgctgaagccagatcatagantttttggttctgaaatggttggagtcaggtttcagaagttgaatccgccaggctcaactatgtnttcgatgagctcatcgacgccttcctgttctt

SEQ ID NO: 64859 - DNA, 330 bp, Oryza sativa
  unsure (1)..(330): unsure at all n locations
atgttaagaaccttatatagcagatgacctgtctacatatataaatgaaatgcattatacggttctctatntgtngacacantgtatctacacctcagtcatctgagataatctgttnttaaaatgctttagaattctcaatatatcagctgctgaaggttctggtgatcatatcttgcctganattgtgtcgngcacacgttatctaagttttacaantttgcaactgaatatcattcatgatctgtaagaaaatcaagctgctagatntgcagttaatacaactannatttttcaccgtgcaatgcaatttatattatgtggtatgtt

SEQ ID NO: 64860 - DNA, 406 bp, Oryza sativa
  unsure (1)..(406): unsure at all n locations
gcttctcttttggtgcagaaatgcagcatcgatggatggttcctgcttaccacttatagcttcctcattaggttgcaccactgaaatatctctggatggctcctgttctactctagcttcatcatcaggttgcaccaatgcagcgtcactgtgtttggtcttcttatcangctgtaccatttcaatatctctaggtggctcagcttctactctnttagcttcctcacaaggttgcaggaacagagtgccacaagatgcctnctgtgttattacntgtggctgcattangacatcagaatcgtgagcatctncagccactctagcttcatccttttccacatcaacagcttgaccatncttcttcatgaatnntcctcttgtccatttcttcttgaaaccacctttc

SEQ ID NO: 64861 - DNA, 233 bp, Oryza sativa
  unsure (1)..(233): unsure at all n locations
gacttcctagccaaaccgatagtcctagactcgcagagctgggacatcatcctacggatggattggntggctaagcacaaaggacagatagatcgtgccgaacagtccatcaccttgcaaggacctggaggaaagcaacgtcgctttacccctaacacacctacctgcaagccgtctattctaacctagttacaagtcacctccttggagtcggtgccatagtctgtgatatc

SEQ ID NO: 64862 - DNA, 186 bp, Oryza sativa
caggtgtacaggtcgcccatgcctctcactcaggtaagtaacttcccacatgtggatactatatgagtttgttccttttattatataaaggacgtattcacgcacacaccactatacgtgcacgtacatatgtatacatgtacacactattatatatgcatacacacgtcacgtatataaatatat

SEQ ID NO: 64863 - DNA, 271 bp, Oryza sativa
  unsure (1)..(271): unsure at all n locations
ctatcttcatgggctctntcagcccatctattttttctctaccactcactgatcggcagtaatctatggagatacatatcgatctcatctcttcgatagcaattaacgacagagatgtgggagagaggactncagcgaccacgagatactccgcacgatttgtgacanntttgaatctcanaacctctcttactcagctactatnttacctacatctttgacagattggntntttattgattttgattcagactcatctgaaacatcatca

SEQ ID NO: 64864 - DNA, 459 bp, Oryza sativa
  unsure (1)..(459): unsure at all n locations
atatatatggagctctcaacgtgccgcacgggagctacacgatacatatacagatagggtcaaacatagagaaatctgatagttcgacactttcttcggtatcannattatttgattggcacttataaaaataacatagtgtactatcagaaatatcaaacatagcttaatttattnttgatgacgagagtaaatgaaagtggatcagaaatatcaaataatcgagacccactttaanaaagaaccanattatcaaacctctcgtaaacgtatggctctgtagaaccactgacgaagtatatcactatcggatatcatctatacttttcttctatttaaatatacagtctgctaaattattaatatacatatntcggtggtggatttgtgctcagtttggataacctcatacagatatacttgtcatgatacgactgccgatccataattttactacac

SEQ ID NO: 64865 - DNA, 238 bp, Oryza sativa
atggacttactcctagggccgttcgcccctgaaaaatatcgcgtaataatatcctccaaaggggtaaaggcacacatcatccctgctcaatggcggtatttgggtgaaggacagagctatctaaaccctaattacatataagactgccttagcagatatagcggcctatacgcattagttaacttggcactgtgcccctccagcgctttaattttagtttctcaacacctaaatttgc

SEQ ID NO: 64866 - DNA, 228 bp, Oryza sativa
  unsure (1)..(228): unsure at all n locations
ggatcttgccttaattaagtcaccaatgtagggtgaatatgtgaaattaagtgtgtgatccagatcatgagtatagtgcatttttgtgagaccattgaaagttaagggtgtgcttgagaagaggagaaaggaagagcctaatatgtcattntttaaaantgtaaaatggacttaatatgatttagaaacaacttttctataatatttatactgttaacagtccgagaa

SEQ ID NO: 64867 - DNA, 209 bp, Oryza sativa
  unsure (1)..(209): unsure at all n locations
cacacagaaactatgcatatgctaaattgtcaccacgcatggaagtcttagcatttaatggtaaggttttcctaccaagtgttgcctagcacnttgtccctcgatggaccattcagttttctaatatgcagcccaacaactgacaactaagtgcaaccaggcaatgaatacaatggtcgacaggagcgatgtcagcagtttttactaat

SEQ ID NO: 64868 - DNA, 367 bp, Oryza sativa
  unsure (1)..(367): unsure at all n locations
ctacttattaatctgngaggcgatcagactggtgtattcggtgtaattaaacttttacaataagatatatcacatgattatatttgatgaaatanaaacatatgtttaaatccgtctgctctagttgaatcatagtacgtagtagtgatatgtntcaacgtgtatcttcactgtgntttataaaatgttgtagtgttccaactgctgaattntnttcaccatatataagttaatggttcactttgttgtcaactgaacanttgactgttcaanaagtngncatccgatggggtagtttctccaaaatatcataaccacaactanccatcttgatgtaaatatcttgaattnntttgaacgatattct

SEQ ID NO: 64869 - DNA, 435 bp, Oryza sativa
  unsure (1)..(435): unsure at all n locations
gcgatcttaagcacctgcggctgcgagcttatccagctcacaacggagaatcttcagcacaagctataacggagcanagcanagatggattgtgatcgagtgatatcccananaaaacaagaatctcaaggcaagaactctcgaanaggcggatntttccagtcgaaattgaaggcggaatccttacagtcacagattctcataactagctccatcaggacgaaccgcttctcanacaaacccaanaaaaagaactctcgtttcattcagaaatcagaatcgaagcaggcgggcacgcgtgctcaccttcagtcggatcagtcttggttgctacccgctgagcctgaacangccgcgctgcaagaagcagcaggagcaccaccgcatggaggangagatggctcatcaccctcatcgtctcccttcttgagcctt

SEQ ID NO: 64870 - DNA, 331 bp, Oryza sativa
  unsure (1)..(331): unsure at all n locations
agagcacgaactcgtcgaaataaaaggtaagcgtggaaggtggcgatgcgccgagattgtattggatgtctctttttttacataggactcgggtctatttatacccgagaattacaagatacgttcataacagacacgactattatctctaacaaactctaagatatcataagtctttaccgcagactttttgccaaacatatctctaaggaaattaaatagaatatcctaattaatagataccaatggctctccaggactctatccatgcatggcnnatcatcttgagcacatcaactttgacccgatgacgtacaccgagtcatattat

SEQ ID NO: 64871 - DNA, 474 bp, Oryza sativa
  unsure (1)..(474): unsure at all n locations
gcgatcttaagcacctgggctgcagctcggtgggtggtggtgcgcgtatgttggacttgtctggctgatcgcgttggcgacttggcgagaccggggcgcgttgggatggccgtctactcatntttgtttntggaagtgtctactctattatcattctaattaacactattaaactggatgtgagaaaagcactagtattaaaatctagtgttaccaaattatggatcagcaataaactaaacatgatcttataacataaaatcttaccttgtgatagtttcagagaatttacgttggtaacgaactaaatataacctcgctaaatacaatactccagaatttggtagtctaaaatttctttcataaaatactatcaaacctatgaagactcaactaattgacattacacatntaggctatcatttggtaataaatactctcttcttcttaccaagttcatatcgatatcccgtc

SEQ ID NO: 64872 - DNA, 212 bp, Oryza sativa
gatggatctgacaccccaactcattgatgaaattagagatctgatgggctcaaatggcgattatgtatatttgcacatctcactgtgatctagctgattctggtggaaaatactatcaacacgagtactttcttttttacttggaaagaaaaccctcctttagaagaacattctaccgttctaagttcttgtcctgctcctataacaataag

SEQ ID NO: 64873 - DNA, 179 bp, Oryza sativa
  unsure (1)..(179): unsure at all n locations
cttgacgcgttaacagttgactatactcgacgaccgaaacatcgncgatcatcctgcgggcttctgcttcggtctggtcgagggtcaacactgtaaaagtagaatgtgaagctatgtcaaaagtcaaataaggcgaaataaccaagcacaacaatatatagcanaagaacagtcttacc

SEQ ID NO: 64874 - DNA, 319 bp, Oryza sativa
  unsure (1)..(319): unsure at all n locations
acgttaattgttgaaacatnagtttgttttttacatcattgcaataaattcttggggcatttgcaaatntgccactggttnttataatattgcaagatgccactcgaatgatagttctagtggtatttttcaattttctagtgacagtcttgcaataacgattcanagtagtggtaaattcttaattgcccctaaattctttgagtggttgcgcanacaccagaacatatgaatatgcatgcttaaactatatatcagccagcacttgtgatcaggccgaatgtgataanaccatatatcaacacatnnctgtcatgtg

SEQ ID NO: 64875 - DNA, 398 bp, Oryza sativa
  unsure (1)..(398): unsure at all n locations
cttagagtgacctgcggctgcaagcttatagtggtgtaataatcatgcagcgcttgatgagagggcacatcacctgctcnacgtgcgtcgcggagatggtgcangagtgccaatggtgccgcgcgccggatgccaccaccacgcgctgacgcgccatggagcactttctcgccgccctcgccgtgccgtgctccttcaaccacaagggctgcgccgccatggtgccctactgcgagcgggaggcgcacgaagcggcgtgcgcccactctccgtgctactggccgatccgcggctgctcctcctccccttactccggcgtgtccctggtcgaacacctcgagcgcaagcacccggagaactgccgtactcgcgtagacacgaccaccctcntcccgctc

SEQ ID NO: 64876 - DNA, 443 bp, Oryza sativa
  unsure (1)..(443): unsure at all n locations
tgttggaccaactatgctagaaacatgtgtacattatttataataaccgttcgcgacaattatctctttgcaagatctgtctccatggtgagtgtgacatatatcgctttggaattaaagtcttaaacttgacgtctgactcacagtacatttttatgtattggaatttatgtatattggataactgtcatactgtttatgctctgatcaatctgcggatcataacaacagtgaccgctaatccggtggctttcacatacttcctgagagttgaaggtagcatgcaacttgcacatatatataatcctgttgatatttcactgatacaatatatgttctcagacgcagaacactaggtcatcttgattaaagataatgtctatgagagcatcttttcaatatntacaactgcacttcttataccttctgatgaacactctaga

SEQ ID NO: 64877 - DNA, 471 bp, Oryza sativa
  unsure (1)..(471): unsure at all n locations
agcttgaagtcctttccatatattntaggattactttcccctaaatttatggactagccctagtggtatggtagctaccagacctcatcgacctcattcttgtaccctagtcccaattttccatgaaatctcaacagatatttttttgaataattnttttattgtggtgagccaaattatgaaatttcatgatgcatacaagtaaaaactgaaaacccggaatttcagatcatagaaacctgctgtgcttcatgtatacatncatcgttgataagtatggaaacttgggaagtctgaatatccatctgtctgctttcctgttcattttcacattnttgtttttctggtcgactagaggttcanaacaacgcagcaatttgttctcaatgaattcaaggtagtgcactgatgagatgatctatcttggttatatccccaattttttgttaaacatcatcactcaatcatgtg

SEQ ID NO: 64878 - DNA, 400 bp, Oryza sativa
  unsure (1)..(400): unsure at all n locations
agcttgctaaaggcgacacattggcccttccaagtctcattaataagaaatgttccagaccatttgttttctttcccccaatctacttttccttttcttttcctgtacaatgggaaacaattcagatcagataatcttcgagttacaaccgaatggattgtcttgagacagacattgagaatggtctgccattcaaataagtttctctgcagaatggatgtgttctagcaaagtgaacgactcactttatccaaatatcttccaagatcagactaatgaccacatggagaaatgacanatcgattgaggtcactctccacatagancaaacaagtgcacatgcanaanagaatgtggacaggtagctgtcagccatttcatgaaatgctcttcacattct

SEQ ID NO: 64879 - DNA, 278 bp, Oryza sativa
  unsure (1)..(278): unsure at all n locations
atcgaccantttcgaccgtcaatattacccaattagtaaatactagctatgtttgcgatgtataattcccgaataaaatatctacttccactatgtactatgctactaacatctatgtagaagaagcacatattaatagagaagaatcgaccaaaaatagatgaacgatcaatcagacgctgtcgagaatcagacttatggatagatgggctgagaactcagatatgacacgatccaataggaccaaaattcactattctggataagagaggagttat

SEQ ID NO: 64880 - DNA, 314 bp, Oryza sativa
  unsure (1)..(314): unsure at all n locations
agcttgtgataattagtactagaataagcatgcgctacattctggcttcttctatgggccatcgaatacttcagccgatgtacacttagaacgcagttgaattgaagggataagatcgctcanatgggaaaagataagggaaggttctccttattttaccaaaagaatatgagtgacacctacatgatagcaagctcaaacaggaaaaacgaaaaaacataaggaaggggcaaggttctttctattttgcctgaaaatataactctcgaagcctttaacactactcaagaatcgattnttcgaacaacactcct

SEQ ID NO: 64881 - DNA, 338 bp, Oryza sativa
  unsure (1)..(338): unsure at all n locations
agcttancaaggacagagaatatgagttatatatgctattctgctcatagcacagcggacagcggacatactccctccgtcccataaaaagcaaacataggatgtgatgtgatcttttatagtacaatgaatctggacatacatttggctagattcattatactataaaacgtcacactccatcctataatgtggatttatgggacggagagagtaaactatggattaacgatgcatcacctctaaagcctacttattgtgtggttagcttctaaatcaactttagatgacctgtaaacaattggagtttgcgaccggcgatattaaacttgctctta

SEQ ID NO: 64882 - DNA, 345 bp, Oryza sativa
  unsure (1)..(345): unsure at all n locations
agctngcaccatgtcaagagctagacgctcgtttctcttctcgatgatcctgccagntaagctaaaagcagattccgatgatatagtagaaacaggaacagtcaaaacatccctagctaatatggaaagaataggataggtgtggttgtgctcatgccaccagttaaggatattgaagtcatcatcgtattggttgacagtgtcactgtcaagataggcaaacaactcagatgcattcatgttagcagtagaagaaacagcctgaatcaaagcggtagcagaagttctcctataaaatgcaccagcaccaagtccagatcctgcactggcaccagcatcaccaag

SEQ ID NO: 64883 - DNA, 370 bp, Oryza sativa
agcttctcttactgaaggtggaaaagattgagtttatttattaccaccacagtactcagcgagccacaccggctgatgcattgataatgcacaggggtacaaagggtaataatatatatgggttaagttttgcataaaacaacatttaaaagtcacttatttgcccaaagccattttataaagacgatcctagagctacacagtattattaatcacggtcgtgaacccgcacgagcctgccttaaccctaggcctacgattattcagaccgaactggcaacccgaccctgtgtcccatctcgtcccagccaacccagccaaccatccacatttagttgtgacaagatttagaattaaacactacttggta

SEQ ID NO: 64884 - DNA, 375 bp, Oryza sativa
  unsure (1)..(375): unsure at all n locations
atgcatatctggatcttgatcctacagaacagacatatangatgtagtagatctgatattaatataatactcgagagaaactcagtactttaaataattatacatatatatctcttctcttggcaatnttgaattccccgagcagatgactcattacgtntaaacattctgcccgactagtcatagccaccaaacactgtgagtctggctatgcactttccagacatgcatatgagtgacattgagttcgcatttatggaacaaagtttcactggtcgtgagttactactcnggtactttgcaatattaagagcagaaatacatatctatctctatgctttgattattctgaaaatactagcaccttgngtattc

SEQ ID NO: 64885 - DNA, 269 bp, Oryza sativa
  unsure (1)..(269): unsure at all n locations
agcttgcccgcaagcacgccgaacacgcacttatcttngttcagctntatgcgggcggagcggagactatctaaagtatccgctagatccgagagtaaggtctcttggttgcgcgtcttcacaaccaagtcatcaacataggcctcaacattgcgttctatctggctacccaaagaaattctagtagtacgttgaaaagtaggacctgcattctttaacccgaaaggcatngtcgtataacaataaattcctatgggggtaatgaatgc

SEQ ID NO: 64886 - DNA, 282 bp, Oryza sativa
  unsure (1)..(282): unsure at all n locations
ttcgtagtataactctgctcaaagatcaganaaagatgtgtccctaacattctcatactcaaagaagcgagccatcgtgactggtgagcgggatgagagctcatactngtcttctcttgttnntagggtgtcgttaattngagtagtacgtatcttatgtagatnttggtttggtggtgtagcanatatagagtgtatttgagtatatatatatagaaagtctgtctatctatgacgcatagntagaatcgttattcaatgcatggtcattcctatgggcta

SEQ ID NO: 64887 - DNA, 368 bp, Oryza sativa
  unsure (1)..(368): unsure at all n locations
agcttagtgctaatgaaataatgaaacatcttttccagntaaggagcanggaaagtggaagagtgggtacctgcacatcaatctggcactgcaaatgctgttgctgttgctacctcggagctggctggtagcactgtgctaaaagagagacatggtgccaaactttgtgtgacggtgactcaaccgtgcagcaataagtactagctggctgcaccacatctgagctgacgctgccaataacaacggcgaaatgtgggaggcaacgctccaacatcggcgtcccttcttggccctcttgcttgagaaccagcggcatgacactgtacagaagtacaatgttcaagccaagaaatgatctatgagatgat

SEQ ID NO: 64888 - DNA, 391 bp, Oryza sativa
  unsure (1)..(391): unsure at all n locations
agcttgtgctgaatgtataaaagcatattaacttatatggagaaaagagatagaattagaatcagatgaaaggatattatctagtagagtacgagttttagaaaacagaataaataaactagaagtggaactagagaatctaaaaattaactatgatattaaggcattaccagaaaataaggatatacaaaataccgaatttaaagagcaagtgataacattaaaagacagctatactgctaaaataattcaactaaaagatgccataactatatttggaaataaatatatagtaaaactgcctttcaaagaaatnttgggaataagaataccggttaaagtaaaactatcacccaaggtatcatatataattctagcactagtagacact

SEQ ID NO: 64889 - DNA, 323 bp, Oryza sativa
  unsure (1)..(323): unsure at all n locations
ttaactactggtagttgctttctgcgaatttttttaattgcgtttaattatcaacatatggagtatttgtacttcatatatcaccatgtatttgatgcaactacatgtatcttgatggtctattgctctaaantatgcatggaatagaaagagatacacctactacaatgagagattggtccatacctcgttattttataatagatagttaagacagagaatgctaattagacaaagatccgtttattaagaaatagtataacataggactgctatttaacaaaagaaacttttttaagagatagtacagacagagaatgcta

SEQ ID NO: 64890 - DNA, 487 bp, Oryza sativa
  unsure (1)..(487): unsure at all n locations
agctntatcaacgtctataaaggggaaaagggtttcgtttggatcatctacngnngtgcagtcaccggtgtggattcggccctctgattcanaagacgatcaggtacagagcgcaattnttgagatatctaagctgatgtctcgaatagttcagaacagtcagtcggaaccgcaagagccatcttcaccttaatctaatccttttgctagatctcatgaaaatccaaaggagtaagcgcacgcattacctcgatatcgntaggttttctaatgcagcttgcaagattcanggtttgtatggattcatttatcgtcgcgaggctgcgctggtttttgaagttaatggcagctggcaatgctttgcactgatgttataagtaaattcagaattatatggcccgagtcaggattctattggtctgtgaaattgttatcatcaccttgtattttaattaattaaactactttatggagactctatacatac

SEQ ID NO: 64891 - DNA, 428 bp, Oryza sativa
  unsure (1)..(428): unsure at all n locations
gtacataggagagagcttattgtttagaattcattgaatcccgggaaatgctttccttctagcctttcgtaccacgtggggtcacgtactaagcaagccaaaggcgagaagagtaagaatcagaagagaaaagcaccgatgcgaactgaagaagaagtacgtaagatgactattaccagcaccgaatggcctccagctgggataactattcctagacgtcaaagaggaaatactttccgaggtgcacgacagttgacccagcacctcctaagccatggtggcagagtatctgatagtgaagggtcagatcaagtctcctcggattatgaagatgagtcttcccgacatctcggcgaggaagagatggaatcataagcatgctccctgtgtggagaaattggacatgtngctagcatgtgnttcacact

SEQ ID NO: 64892 - DNA, 139 bp, Oryza sativa
tacgagatggtcatgctcaacatcgacttcttcaccatcaacgagatatagcgacttcttcacgcatcacatatgaggtacatgataatgatcttgcaatggtagaatctacattgccagttttgatggtagtatgatt

SEQ ID NO: 64893 - DNA, 396 bp, Oryza sativa
  unsure (1)..(396): unsure at all n locations
atcttaagtcacctgcggctgcagctntctgaactattttctgaaagagagatgtttataacctggctctgctgtggggaattcttttggcacagttgcttcactgctccangtatgatcatgctngatcccacaaagaattagtaatttttgctgtgttgtactatgtacgtgttcagttttttttttgaggtcttcttcaaaaaggtggttntgatgtcagccactcttagtaattggcacaccctaaaattcccatatatataaattgttggttaattagaattattagaaatgatttaaaagcctagaagagaagatctatatntaaataataaattccaatataaaagntgggcagaataaaatttattaaatactttgcttgattctata

SEQ ID NO: 64894 - DNA, 344 bp, Oryza sativa
  unsure (1)..(344): unsure at all n locations
agcttgggactngatcgaagtctgcggcttgaaagatatgtcaangacatcaattctatggcccactttgcgaatccgccattttcttcgcgattatgaagtatatccccgagtgggaatgatgtgaccaccgtgaccgagtgaccttggaagtagtgtgatagtttcctgacggtaatcaaaacaccatataatagcttttggacctgaggatatcttgtcttggagtcagccaaaacctcgctaacgaagtagattgatcgttggactntttgaacatggccttcttcttcacgctcaacaacaaggactgtgcttacaacctgggaaagtgccgacacgta

SEQ ID NO: 64895 - DNA, 124 bp, Oryza sativa
  unsure (1)..(124): unsure at all n locations
gcttcgtctcatgtggtgcagncgactgcgaccgtgcaagcgattcaagcttcgactcacgtggtgcagctgcttcgaccgtacaagtgcgacatatccctaaagcaacaatngtgcatgtacg

SEQ ID NO: 64896 - DNA, 279 bp, Oryza sativa
  unsure (1)..(279): unsure at all n locations
tatgcatgcaagctcgctgctatcgccatagccgatattaatcagcagattgctcttcagcgngctgcccgtaaaaaaggcgtcgtccacgtgttgacggtcaaagcccgacatcgggccggtatccagtcccagcgcccggcaggcgacgatcagataggccgcctgcatggaactgttgcgaaacgctgtttcttctgcaagttgtgggctggaggtaaaccaactgcgggcatcaccgtggggaaacagtagtggtaaccgttcataaaattcact

SEQ ID NO: 64897 - DNA, 406 bp, Oryza sativa
  unsure (1)..(406): unsure at all n locations
agcttcgcacttgacaagcttcngcactatgttatattggtaatgtaggggtgatagcttgtacatggattagtactaataagggataaatatatttataataccaaaaaaaatagtacgggaaaaattgagcggatgtttggtctgcacatgtagaaattttatgggtattagcttacctagtggattttcctgcataattctatctggagctaaatctgagatgatgtggtgttagtactatacaactgttagcttgcatatccacaatttcattttgtgataactattgatacacggtaaaatgtgtacttttttgtccataaacaattctgagtatggaataatcggaatatgatgttatttatttctgacgatttttaataaggaagaattttttttattt

SEQ ID NO: 64898 - DNA, 399 bp, Oryza sativa
  unsure (1)..(399): unsure at all n locations
agcttaacatgcaagcatatagtaattatttctactatttatttcattctaaaactaaacagacatatgctaaatcatcattctcaaatcattntcataatatttcaatccaaatcattttatcatttctccaatatctaacatatatcccgtagaaaagcatggggcatcatctagtttttaatattatcatagacatgttagctatcctaatcaagcgttcaaaggaggaatgaacaaatgctggagtagtgccacatttgnatgatgatggtttatctattctgcaacatctagatgatacatngntntttatggatcatgactntgagaanactaagaatatgaacctaatactttngtgttttgaagagctctcttttcagaaaaatgaaatat

SEQ ID NO: 64899 - DNA, 379 bp, Oryza sativa
  unsure (1)..(379): unsure at all n locations
agcttaagctaccttntcgagtcccatcctctattttatcaccagctaatgccaaacacccatttaagctttaaaatttcctcatcaacaacgatggggacgcatatgctcagaccacaacaaaggggtgaaaaccgatgggttcgatcggatcacaccattcctatataacctatacttttcttcaatttcnaaattgtgtacgggtagtgtccgataacatatcactcatctggtattttatctcatattatntctcctaaatcagaataagaataaataattatttgtatctctaattcgtagatattaaatataaggagacanataaagtgttcaagagacacatctatgaanaacttatacaatattacacgtg

SEQ ID NO: 64900 - DNA, 358 bp, Oryza sativa
  unsure (1)..(358): unsure at all n locations
agctngagctgaattataagaggctctattgttctatattgtgtactagaataggaagatagtagagtagaagaagtcggaagaattccagagttgtcgggaatcttctcctatttcttttattctgtttattactctgagttcaatataatattcttcttgagtaatttagatttatctcatgagaattatctcttggttagttcctaaatagcatacaggattattgttcactataaccaactaaaatatagtgattgctttagtgagttataaaaactaaagtagatattaattgcttagacgtggtgtttaggtagttgttatccagtaattattgcgtatcccacagtacgtt

SEQ ID NO: 64901 - DNA, 254 bp, Oryza sativa
tcagcggaaactgtcggccactgattatgaatcgcaaccgaaccctgggtcgccggcgtcacaatctattgtgaagttatatcgattctgcattctccctgttatactattagcgttcaccctcgttataggccataatgcctaaaaataacgctcgcctgcattatctagtctgtgtaccaaaatatttgctgcatgagccatccagcggattggaactgatcccgcggttcacacttgttctgcgtaaattt

SEQ ID NO: 64902 - DNA, 426 bp, Oryza sativa
  unsure (1)..(426): unsure at all n locations
gtcacctgcggcatgcaagctnngtacttccctctattagttttacaagaccttatttcgtaagacccatcttgtggtcttgttttcgtgccatttatcangtaggccatccttagtaacgtactatttacacgcgattgaccacaatgctgtagtcaccattgatttaaggcaatgcataacaataactacttatttaatattaaaattatcgcaaaatatagattttaatgtttaaatccctaacgctactgatatattgaagttataaatgttgcatattgaagttataaatgttataatacttgaacaaacaatttattgaatcaaaagtctagtagatacatatcaaaatgatcagtacaatattattagtataacatattacaatattaatcaagccgacccctagtgttctcctctatg

SEQ ID NO: 64903 - DNA, 280 bp, Oryza sativa
  unsure (1)..(280): unsure at all n locations
attattaattgtgttaaatggaattctaanataatttaaagtcttgaagagaactcgttataataaatcattaaagggcgataattataatcttgctaattatatctaatttctgattattgactaaaagatttataaggatgcttagaatattaatgaaacgttaaagcttttgttgcaagcgcaacttttttctgcaccgcatccgcccccccctctgtcagggcacgactttactgccgccactattgcccgtctcacgctcttttcgcataaggaa

SEQ ID NO: 64904 - DNA, 421 bp, Oryza sativa
  unsure (1)..(421): unsure at all n locations
tcgttaagatcctttgctgtnaattagctatattnttccagatacttcagctgacatgttcgttttagagtgctacactcccagcccaaaaaaaaaaagagactgaatggccctgtagtgaacattttttggctcattacgcaacatctccatcaatttgccgtgtgacaagggcaatacctgtccagacagctcttcgtgtatgggtagccctacaccaccaatcctttgaacactttcgcgtagctcatcaagatcctcatcctgctgcctgaaggtaaattaagtacagttatcagataagtgcagaacatcatgctatatgaactctacactgctagaaccaacaatatattcttcttatcaattccaagtgtaactcgaagaatatgcatcaaccagctaaccataacagaaacat

SEQ ID NO: 64905 - DNA, 139 bp, Oryza sativa
taatctggactattcttctgctgatcttttgcatgatgactataagtatatagcttgacttgagatttattctacgtctgatgaactgcgacatgtctgagtgtcttcgcttggacctgaccacaactcagcgaacatt

SEQ ID NO: 64906 - DNA, 130 bp, Oryza sativa
tttcgcaccaagccaactagtgtcttgcctaatcactggtctatttttaggccatgactaataaggggaaggtggtgctttgaaagaactttataacagctattctgtgcacaaaaaatgtccacatacc

SEQ ID NO: 64907 - DNA, 231 bp, Oryza sativa
  unsure (1)..(231): unsure at all n locations
tatcacaanaccaggaaacacactttgctatcctgctgtgttattctcaacgtccgcgctganattcgctcctgctaagagcgtggaattcagcgtatttctccaactcgtgatgtctattctcctattcacaagacanagaatcacgacctctcaagctgcantgtctntctcagcgccatgaatgcgccatcttctaaggtccaacagtcacacattctcatcatggat

SEQ ID NO: 64908 - DNA, 481 bp, Oryza sativa
  unsure (1)..(481): unsure at all n locations
gcttgccattcttgtgatgcactttggttgatctttgttgattctaatagatgggcaagatatccgagaggtgacactggatagtctccggaagtgtattggtgttgtaccgcaagatacggttagctatctactgctctaaatctgtcaatgctgcattacttttcttgtcttattgaatttactatgctaaatggataaagcatgtagactatacacnaatggaacattctggtgcccttgtgcaactttagttagcatatgtaaaagtgttgagtaaatagaagtagctctatcaacatgcttttcacatnatcagtaggaagtaccacagttcactccaagagctcagtagctcacactggtaatgcattatccaatgcaggtactttntaatgacacaattaagcataatatacaatatgtgcggttatcaacaacagatgaggaggactgtgttctaccaatacattacattatg

SEQ ID NO: 64909 - DNA, 271 bp, Oryza sativa
  unsure (1)..(271): unsure at all n locations
atctaaagaaggccatgtgtacatcaatacatgtactgatatatactccctctgcgcacaatacatcaactcttgtacatgtccgaatcttcttgntcaacttgtcaaaccagaacatattactccaaaatcacgaacaagaacatattactctaggagtactcgtcctacataattcgtgctctgcttggcttggaccagcaacgcagcaaccagtatgctatgccacttcacttactacctgacagggcagtccagctatgatatctct

SEQ ID NO: 64910 - DNA, 228 bp, Oryza sativa
ttcacgagatccgcgtctgcaaataactattctaatctcaagcagcactgcatactgcaagttttttcaccgcaggcgtcgaatctggcagcggaacaaccagcgcgagacaaagatgagtgggaagaggaggggtgtcggcgctcacggtgagatcggagaggtagtccgtgaagtgcgggacgtcatcgaggaggtagccgtagtcgccctcctcgagcttggcgt

SEQ ID NO: 64911 - DNA, 386 bp, Oryza sativa
  unsure (1)..(386): unsure at all n locations
agcttggaagttatatgttcacacaaaactggttaaataacatgaatctttngactaaatggaggggaaaaaaacccttcaattgtgtgttttacggtcattgaggaggtaccagaatctagtgtagatgtagcatagaacaacactagcgacacaaaaaaaaatgatgcctcgccaaatactgtaaaaaggttcttaacatatgtatccaagatctagaaagagcgatcaataaggaataaagagatagttacaatntattattgtgtctgattatagttttttttacggtatttgaaaatgtacatnatgtacacactctatactgtcggaccaacgaaaagtggcttgagttattatgttggaagagttttgcgttaaaaaat

SEQ ID NO: 64912 - DNA, 145 bp, Oryza sativa
  unsure (1)..(145): unsure at all n locations
tgcgataatattatggacagagntattatagatctntactcacaactaagatcatcatccagcgggtcatcctggtgtctnccgatcctatgtgaagtagtgaactcaggtcgactganatgatctcatatcacgctagtctcac

SEQ ID NO: 64913 - DNA, 467 bp, Oryza sativa
  unsure (1)..(467): unsure at all n locations
gcaagcttgagccaattacgtacctctttggtcttttttgcgtggccgatcgcgcggaaaggggagcggtttggtcgggttggacgagaaatcgacggggcaccccggcccgcccgactgatgagatttcacacggaaagcgttgcgcgcgagcgcgagagctgcaccccacccaacacgtaaaggttgcgtncggatcataacggtgaacgttcaggggcaaacctggaaacacagtattaggccattcccaatgcaatgactagatgatgtgtatagtattaaataagctgccacctataantaaaaatgatatgacaactgaataaatgaggaaagagaagaaaactatgtctcangacatggtttctacacgatatcanaacatcatgtgagataaataacattaaaattaagtatgaaatagtgatgtttgcatataatagttgtgtctagagtagttctta

SEQ ID NO: 64914 - DNA, 94 bp, Oryza sativa
  unsure (1)..(94): unsure at all n locations
tagatctctactncaagctagtcctatccccattcaccgatctggggccccagccgcgctcctcgagctgctgatcctcatctgccttgagtca

SEQ ID NO: 64915 - DNA, 476 bp, Oryza sativa
  unsure (1)..(476): unsure at all n locations
ctgcagctttcattctataacatggcgatgttttttttntgtgaccatcaactaatggtgtcatgcatttgcctcatcacaattagacctatttctttgcacatctcaaagcagaacattagtcccaataaatcagttgtcatcctccacttgatgaccaaccgggtgcatatgaaagatatggatatgtatgttgagtattcattaacaccacaagcgtcatatactcatatgcaagcttaagtgtaaagatccaatataaataatatgtgaacaacatgaatctagaacatgcacaataaatgtataggaattgctcccnctaaatatatgcttacaaagaaatatacaagagaggccagtgtatgcataaataaagaaaaccaatggggttatcctatatacatggagaaagcatgtagcantgataaagataaaacaaaacacataccttcatgatctccatgttctaaagt

SEQ ID NO: 64916 - DNA, 313 bp, Oryza sativa
  unsure (1)..(313): unsure at all n locations
catgcaagcttatncctataacacgttataagattgttttggtaatatcttaatattaacaaagttactattgatatctcatgatcacatcaaccattaaaaattaattaactgtaagctagtggatggttgatctcctccagaaacgcagcatcaatagtcactcggatgcctcttttgcgctcangatcttgagacggcgaaccacattctcctcgacttgcgtgttgctcagcangtctggctccgtgtactgtcgtcttctggatgggttgccctctctccctcgtggcagctggttctaagactggtg

SEQ ID NO: 64917 - DNA, 390 bp, Oryza sativa
  unsure (1)..(390): unsure at all n locations
agcttctaaagccaatgggtgccgtcctacattattgaagaaaacctgaaggagatggtggcgcacggcgttctccctgccaaggagatcatctggtggcggccaccgtgcggtgaggctttttcaacccctgatacacatgagatcgtagtcttctcgcatttcttctatggcggcttcgctcttccgacctcgaaatttttccgcgggatcttgaacttctatggaatcagcttgcatcacctaaacccaaattccatagtgcatatcgccaatttcgtccatgtntgtgaagccttnttgggaatcaagcctcactttgccctgtttcgccggatcttctttctcaaaccccaaccgaacaagagcaaaccgtgcgtattcgggggg

SEQ ID NO: 64918 - DNA, 274 bp, Oryza sativa
  unsure (1)..(274): unsure at all n locations
ctattatggagaaccgatttgtgactggcgatgcccgaaaacgtgaccagtcgagatgattctttcgccacttttncagtcctccactcgccactgggtgttcgaatggaaactagcatctcgatggtgaaagtaactcataccaatagctctatatggcgaacacaaataacatgtaagattgggacactgaacaaggcacatgacagcatattacaccagattgtcggcctatgaatccgctgtgagacaatttacccagcccttaagatat

SEQ ID NO: 64919 - DNA, 409 bp, Oryza sativa
  unsure (1)..(409): unsure at all n locations
agcttgcgtagcatgaatggtatctcctgtttttacaatnggctntcacacaagtcatagatcctgcgagtgagtaacagtttgttgcttgaattctcacatgcaaattgaatggcatcttgccacatcatgacgccaagcatatggaggcaagagggggagaggtagaaataacttgtttactgtatttctgaaccaacgtatagtaacgtagagcgcggcgcaacaatgaccgtatgatgcaaggtcggtcagatacgcaagcccctttacctcgcttcagtccttagtccttactccgatcctgtgcactgcccaaaagtctctaaactgcgtgcttaaaactgcgcgagtcgagctccggatttcgattcgggcggcaagaattaaaactttttataattactac

SEQ ID NO: 64920 - DNA, 225 bp, Oryza sativa
aagaaaaaggaaggaggggaagtaaaagagcaaaaaaaaacaagaggaaaagaggaagagaagggagagagaaagaaaaggaaagaaagggaagaattgataaaaaagagaagaaaggaagaaaaagagaaagaaagagaaaaaaagagagagaaaggagaaagaaagagaaggaaaggaaaggaagacaaggagaaaagagaaaaggcagaggaaacgaaagga

SEQ ID NO: 64921 - DNA, 185 bp, Oryza sativa
agagagactctagccagctgtggtacggactcttaaacataatgtgtgtatgacatgtgggaccctgcatattatagtgtaggatatgtttatagggaactctagtatgagctcgccattgaagcgactatagatgatttgaagctaatatgtgactctactattaaatatcgctcttagaacat

SEQ ID NO: 64922 - DNA, 275 bp, Oryza sativa
  unsure (1)..(275): unsure at all n locations
acattatatcaacgctaaacgaatgattaaagtagggagctactgtanagaatatggcttatatactatgacctgtgatatatatagacccgtattggtgactattgagttgtcaagaaaaataagtacatcctattttactaaaattagtgatcaacaaatgattaatacttacagatctattaacatataataattatgaagattttttggtatacactattatttatatgtcatccttctttttttgcaacatgtcataagtcaatatcata

SEQ ID NO: 64923 - DNA, 398 bp, Oryza sativa
  unsure (1)..(398): unsure at all n locations
ctgagagcaaactttagaatgggaatgaannatgtgtgaaatggggtggatttcccttctccggccggttggcttaagtggtgcacccacaatggtcaaaactgacctgtggggcccactagccgttgcctcaaaaagggaggcagccgaccgttgcctggccggttcggccgaacccttggtgagccaaaccagccctactttcggccgttgggttccaacggtcagtgtggtcgtggcacagtgaattttcgttgaaaaatttattttgatttgctctgaanaaatcatttgaagaattttctcacaattcanaanaatcctaaatgcaatnttcaaaatcaaacatgtgatgatgcanaattttaaattggtgaaaacaaatatgcggatacata

SEQ ID NO: 64924 - DNA, 327 bp, Oryza sativa
  unsure (1)..(327): unsure at all n locations
cacaggggtgttagataaatgaataaagtttggcgtgtacatcatgattatatagggtgtcgatggggtatttaacactataaaaattaatccagaatccgcagtaatcacaagacgaattattaacctattaatcgtctaagcaatgttactgtgcaccatatatcaaatatggagcaataggttaaaatatttgttcgcaaatagtacaatttgtgaattagtcattttagcccatattaatatttcttgcnggtgtcaaacgtttaatgtgaaaggggtaaaaatntangggtgggatctaaacagtccacagntcaaaaaatt

SEQ ID NO: 64925 - DNA, 52 bp, Oryza sativa
caccaatcacactcacaataagtgtagcttgtccggcactcatgagcctatc

SEQ ID NO: 64926 - DNA, 191 bp, Oryza sativa
accgacctagactttttgttatcattcgaggcaatgtgttcttcgccgtggcatagccgcgcactccgccatttaatccggacttttctggcgattcgctcatcacgacctcgcggttcaccaacttttttgtaaacccgcactctgagatcgcctatcttcgcgtgtggaatctttcttctttcggccgc

SEQ ID NO: 64927 - DNA, 342 bp, Oryza sativa
  unsure (1)..(342): unsure at all n locations
atctttgagtcacctccacgcatgcaagcttggactatatgttaggctctgggattgagtatgaatgatatgatntttgacaaatcactatctatttcatttatgcaggcattcttcagagcaacatattggctccggttttgggcacaaccgtaaaagtgtgatgaagatggagagcttttgaaagttatatgtcgtaagcttgagacgacggttatgcaactttntgccaactatggatggagattcacaaatagacttaaataattgtgtgctccttatattggtctggtcattttttttatgtttaggtggtgggttaattctatttgaactacactc

SEQ ID NO: 64928 - DNA, 113 bp, Oryza sativa
  unsure (1)..(113): unsure at all n locations
atcacttacaccatgatcatgacatncgtagcanagtgcgaaagggtttgagaagccttgagtgtgtctcatagaatgaagtcatctggttgtaagcctgatacactattcta

SEQ ID NO: 64929 - DNA, 295 bp, Oryza sativa
  unsure (1)..(295): unsure at all n locations
gctgcagctttcttttgaatcttagagcatttgtattggtttggcttgttaanattatattatgtggtctggactcactgtgtgagattgctattttgtgaactatgtaataattggttgtagctcgtttgagtaaaggccgggatatttgattttattatctaaaaaaaatcaaaaaaagaaattctaccgtaattagcctattgggtgtgtttggataatggaaaatatgaggtgggattgagattgagaaatgaatatatggttatgaataaatggaagacgaataatgaat

SEQ ID NO: 64930 - DNA, 222 bp, Oryza sativa
  unsure (1)..(222): unsure at all n locations
cggtcngagtcgatcgccggagttggtgacgccttgtggtggccacgtctgatagacctgacgtcgaactcgatcgcgtgcttcttctcctccttggctcttatcttgcccttccttgcacctcatgcctcggtacggcctcgctcttcgtgaacgacccgatgcggtcttatctgtgagacagtgccggagctctgtcttcggctctgtctgagcacattc

SEQ ID NO: 64931 - DNA, 249 bp, Oryza sativa
  unsure (1)..(249): unsure at all n locations
gcttcgaaccaaatactcctactccgcgacctttattctctnttctgcaaaagttcagtatcggtggttttaccaatgaactaaacaaagctcgttaggttaaagataggtttacctttggggacagtaatcctgaccagctgtagaccccgtgagaaataacacagagacgtgcgaagagctgtgaccgcgttgccggctcagctccacagctgtaaggccagcacacaccgtatgaccggcacgtgg

SEQ ID NO: 64932 - DNA, 381 bp, Oryza sativa
ctgcagcttggagaggcaaagagtaaactagattgttataagaccaacgacaacaagtcgaagggtacatattaaggaaggaagatcaaggagaatctcaagaaggcttttgatcaagtctgcgccgcgttcgagccactaagcgacgtatatggtgatagtggagatgaagctaagggaaagaacatctccggtgtttgcttcatggcatgtggtgaatctgattcagagtgtgagaacgatgatgtaagtgcttttgaggaaactattattattttgagtgcacaaaattagagtatgagaagatgtttaaacactgcatttatcattgaatctcttaatctgaaatgctagataaaatctctatccctatgatatgat

SEQ ID NO: 64933 - DNA, 305 bp, Oryza sativa
accattatgactctgtctaactgctatcagataattagaatgaaccttgtatcactgaaggatcttctactaacaaactcctcgttaaagttgaccgtgctttaccggttgacgcgctataaaattggaaattaactttggacgtgagtttacatgataacgttgaagataaattttataaaacaagtaaccgataaagcgcggcaaatttaaggtgtgttataaatacatgctatatgatctgagtacatatgtgttaagtcttcctcttgtgcaatgcattgaaacatcttgctacttgccaa

SEQ ID NO: 64934 - DNA, 131 bp, Oryza sativa
  unsure (1)..(131): unsure at all n locations
gtggacacaacgaaacttctttctaagatgtctggacttgcacaagagcatgaggcnanaanactacagactcttggtgcttaaagaaatcgacaantttggagaacggncatctattaaagtttctctag

SEQ ID NO: 64935 - DNA, 288 bp, Oryza sativa
gtcgttcttcgtgccagcacaaatgagactttagcacgtgctcttctctccttgtcatgccgcgggagcggaggggagatgggatcaaggggaaatggtgtctatgtggcctatctcgtcgaccgcatcttcgctgctcgccgagacactcggagaaggagccagggcaaagcgactcgaggtctaccactgtatggagagtgggccttgatggtacacaacccacgtggcggtggtggacttttcgttttctccaccatcctcgctgttcgcttctcgacttttagt

SEQ ID NO: 64936 - DNA, 285 bp, Oryza sativa
  unsure (1)..(285): unsure at all n locations
aaactctaccgattacngaatcactctgcatgtatatttctagggcttaccaattactgtacatgcagtagctgataaggtatgcgtttcaatataatggaatacaataactcatatggtctctatctttatgtatttatttatccgggatatttgatgctgttatcaatgaatgatgaccttacagcgagtttcccccaaaattctggatattcgaaccggtggacggacctccccactctatttttttttaaggattttaagaatttatgcattggtaatatt

SEQ ID NO: 64937 - DNA, 360 bp, Oryza sativa
  unsure (1)..(360): unsure at all n locations
actttggcctcctcgccggactagctatgtagctacctctctctctctctcgcagttggaaccaatggcgtttcttaactagttttgtacctccggttcctcttcttggtctttatcgacctctctccctcttaatgtttgattcaagctcgcttcgatcttggtgtgcttgatttataatgttattaatcagctaattaagtctaagcgcttgtggaagagtactgatccaagaaacatgaatgtttacagttcggtgggtcatcttctatctgcggagtaagataataatngaagattaacacattgtcgcaacctcgctatgtctcttgagactcaaaccatcactcttgcaacaag

SEQ ID NO: 64938 - DNA, 388 bp, Oryza sativa
  unsure (1)..(388): unsure at all n locations
agcttcttcttncttctcttggtgccatcggccatcccattcttctccgcgtgtngtagggcccatgggctgaatcatttagtaaggcccaacggatgcgccgtggtgcgcggaagtaacagcccatcgctgctcatggaaatgccagtttctccaaaagacgctatgtttataacaagtaaaaaaacaccagtaacaaaaaaaaaagcatgtactagnatctatctatctatctatctatctatctattatattattaaaatagctttgaataaagacaccacgttcgctgtcgaggctagttaatcgaagaaaagagaanaaagctacaccgttagattacaatgaatataaattaaagggtgtnggttatcagaaaaaaaattta

SEQ ID NO: 64939 - DNA, 428 bp, Oryza sativa
  unsure (1)..(428): unsure at all n locations
agtacagcgtatctacatggaaactaatattgtcttctataagaaaccaactagctattgtactatnggtggttccagctactggtttggcatcctagtgttaatangcttgagangagcataaagagcaaatatttggagtaatgatgagacacacatcatgctacataatgtgtactaacactaatgaaatgttacgttcttctgcaggcacctatggcctatattactggtgtgtatggcagcacattgattgtttaacgacttgatgctattgtatgtgttgcatgtaaagaagtgctaagtatgactggattaattgttactatgatacttaatgagcgcacattggtctggttgaattttgaggtctacaacatcagtgtgagctctactgcaatgaatcataaaacaaatagtgtaatctc

SEQ ID NO: 64940 - DNA, 256 bp, Oryza sativa
gcttatctcgaccgagtcagcttcaaaccacacgatctatattccatctactccgacaccactagatcaagattgacggagcgtggggctcctcaccgggagaccgcgcaggcccccctttgtcggttcggccgggggccctgggtgagactctatctccttgtctgagtgtggaaggttcgcgagagcgaaaatacacgagacacgggcgatgtatacaggttcgggccgctgagaagcgtaataccctacttct

SEQ ID NO: 64941 - DNA, 227 bp, Oryza sativa
agagactaatgacccccttggcgctatttaaaaccgtcagcgtctttatgaaatattctctctcacgactatcagatctctttggacggcttatatttaaaatacggcgccaagagtatctatcggcgaaggtcatgaaatggcgcaactataagggctaaataaccgccggtgacccataggcagccacttagccatgaaacattatttaacgctaagtggccgcc

SEQ ID NO: 64942 - DNA, 334 bp, Oryza sativa
  unsure (1)..(334): unsure at all n locations
tatcatgtgcgatcaataattttcatcgtaagatcctaatgatatcttctgatcagtgtagtgtatatatactataacatgggcaagataatgcatcttgctaagagctaatccactcatcaatgtcatagtaaaatacgacgcgttatgttgccagtcatatanntgtcatagttactatgtccaagattatatangtttcactaacttatcaactacatcattcgtttcatcttatcaatcgttntgacattttatcanatctatctattaaaataatagcaataatactaaattagttcattaatataacactgaatgtagtttgaataca

SEQ ID NO: 64943 - DNA, 286 bp, Oryza sativa
ggatctttgagtcacccgccgcatgcagcttacaaaagagaagatatgagcaactagtgtcatacccgaactcttccgaaggtttccggactacgatttctactatattcctattccactagcttaagaacactaaactaacttgagaaaatatgagagaactcttgcttgaggtgtgtgaaaagagtgaggaggtgaagtccttttatagcctcccaatgacggttatggcagttggaatgatcggaaatgccctctaaccgttattggggagcaatccttgaca

SEQ ID NO: 64944 - DNA, 326 bp, Oryza sativa
  unsure (1)..(326): unsure at all n locations
actcttanatccctattacatcggatatntagacactanagtgtanacgaatggttggacactaattataaatattatacgtggactattaataaaacacatntataatcttagactaattcgcgagacgaatctatngagcctaattaatccatgataagcctatgtgatgctaccgtanacattctctaattatggatgtaataggctcaaaaaatnatcttgcancatagctntcatttatgtaanntagtntgtangagcctatattaatactctaaatagtgctaatacagagactaaataagttctggatcaacataact

SEQ ID NO: 64945 - DNA, 448 bp, Oryza sativa
  unsure (1)..(448): unsure at all n locations
gcttntcacagggtaactgataggggaacagtttcttattaccattacaactaatccatctcaatattggaagcataaaaggtacaaaaataattgaaatggtggcacacgcttgtaaaataattaataaaaattatattccccaaagggcatgtcatgtatatgaattatgtgccgggaacttggtaaaactgtacaaatttccaaaccaaactgctagtaaacctaanaatttgaatggctttcattttagagtgaattagtgaaaagatgttatgtgatcatgctgtcaactgtgacgtactctttgcaatgcattgtgaagaactcggagctgatccaaggttggttcctcatcagtaaccgtagttcaacttcatatgatccatctggtaatggtgtaccaactacgagtcttcattgtctttctataaatctattcacacct

SEQ ID NO: 64946 - DNA, 264 bp, Oryza sativa
  unsure (1)..(264): unsure at all n locations
tcgctgagtctcactgctatccacgctggtgaccgttagaatgtttgtggaaatgacaccttgcaagtaacaactgtcaacaccgtgcccggcatggcgatggagtgattctacgtagttgttgatctgttggaattgtgtatanatcgttcatgttgaaaaatcgcactgacgatactatgccggtggccgtaaaagtgtggcccgtggccgtgaaagtgtggccggtggcgttaaagtgtggccggtggcgttaaagcttgc

SEQ ID NO: 64947 - DNA, 185 bp, Oryza sativa
cttgtggctctggactgtatgtgtcccctgttatataacacttggctaggagaatattgtcctgaccgctgatgtaacttaacactgtgtgaatatgataaatacagtgtaattgttttcactataggatacttacttcttatgtgaggaataatgacgtgggtatcttcacaaaggcatgtgaa

SEQ ID NO: 64948 - DNA, 339 bp, Oryza sativa
  unsure (1)..(339): unsure at all n locations
gcatactgcctgttgaaacatataatataagatccgtccggcaaaaactaccaggctgtccgatngagcagatgaagacaggatcgcttactcacaaggatcatgcccttatgaagagtacatgactcgagactttacaactctaccataactgctttatgaaatgattgactctgtgntgccgtgctgccatataattctacgccatnaaatcatcaacataccctgaggtttcaacccgattccgacgatatacaatcactcatccttcctaagtaccaattaaacagactctcgttacattcggtcaatgctgtatcccctacacacttgtcataa

SEQ ID NO: 64949 - DNA, 330 bp, Oryza sativa
  unsure (1)..(330): unsure at all n locations
gcatcacacctttttctttgatgcaatgctggaagatgagcctctgcatccctctacaaaatttgaagaatataaaattacactcgactctcaagtctcaagactcgtaactaaatatatggcaccgtaattatgtggatcatgctaaaactggatttgttgtagatataatatattaatgtgagaatatacaatattttacctttggcatcacaattccttccatattaccaacatcactanttgtcaactccttgcgcaagataacacggtattctctacagttgaatctctgctagaaaaatcagagttaggtcagtttgaagtaat

SEQ ID NO: 64950 - DNA, 257 bp, Oryza sativa
  unsure (1)..(257): unsure at all n locations
attatatagtcttataatatatttatctgcggtttcctacatgtntttctcttcatgcccttcactagaattggagagtaaatatgctgcttgcattaaccgataagatgaaataagtggcgtcgganacagaatgccttacacatgatataagtttaatatacaacttgcaatcactattggatttaaagaactctattaaaagtctcgtcaaaccaccgttatagttgaaaggtgctacaaactggataatatga

SEQ ID NO: 64951 - DNA, 235 bp, Oryza sativa
  unsure (1)..(235): unsure at all n locations
atttctcttaaaacatatttgtgtatggtttgttaaatatatgaaaacactgtgaaatctaattgttgccttgttggtcgtaattcacaaagtttgaggacaatctatttatctttcaatagatttggagttttagggtgtgtttggataatgggaaatggggggtgggattgggattgggaaatttatgaagagttaggattaaatggatcatggagaataaatggttangatt

SEQ ID NO: 64952 - DNA, 451 bp, Oryza sativa
  unsure (1)..(451): unsure at all n locations
gcaagctngtctgcanaaatgaaaggtattgatggatgtgcttaaattgatgatattatnggatacagcacaatgttcctattaaaatataacagatattataacctcatgcctaattgcttaccctttccaacaatagcctcaagagactcaagggtagtgagagatgcagcgagatcatcagcccagatgttgcgttcatccacaacacccgcaaagaggtacttttcagaggggaaaccagcactcttgataatgtcaagagtctctgcttcacggataatgcaaaaccatagcagtcacgctgttcaggatgtagggtcctgcatgaaaggcagtatcatgttttgtccttaaagaaaaacttgctaaggaaggcggtttggaatgtctatagacagaataactactgatgatcacagatgtagcaattgtttataaccattatcaa

SEQ ID NO: 64953 - DNA, 239 bp, Oryza sativa
  unsure (1)..(239): unsure at all n locations
aagacaacttctactgagaagatcttcagctctggcgtgtgggaagagagagcaagactgagtactacccactgtactcagcaagncatactggaagaagatgtatgatgcacgatataaccaacggaaggctataggtcatttgcgtatagtaggcatttaaaacagtagtcgtaaacagtataacatctgtaataaattaatcaatattaaccaatcaccgctcaacgctacaccac

SEQ ID NO: 64954 - DNA, 326 bp, Oryza sativa
  unsure (1)..(326): unsure at all n locations
tatcatcanggtcaatcataaaacagtttgtattgtttttatagaacaacttatgtcctacttgcaacnggtaaattcacggtggtaganatggcagatgaacttttcactgccagtgacctctcctaggaagtccncttcagttatctccctatattcaccatgaccttgcctttntagcacttcacgcttctcgacctctttctggtatgcacaggcanatgaataacttatagtgaagagtcacaagcttcatgagggaatatgcagatctaccttgagagcagcaatctctccgatgcaactctaagctctgggtctatagt

SEQ ID NO: 64955 - DNA, 281 bp, Oryza sativa
tatacaatcctatgctatgaaacatatgaaacatgggtttttaacctacacatatattgctctgtagtgaataaatgtatatcagataatgttaccaacgcttgttttgtgggataaaatgaagattataatgtctcggtatatttgagcttgtcactatataccacccaaggggacagaatatcagataatgctataatatgaaacatataaaatttttttttttttacctacccatatattgcaatgtacagactaaatatcagataatgctattaatg

SEQ ID NO: 64956 - DNA, 112 bp, Oryza sativa
aggcatatcctctgcacgcatacagggttggccgcaccgctctcgaacgccgtcactccgtactttcaggtgaaagaaacaaaaagaacctgactactcacttgccccaaag

SEQ ID NO: 64957 - DNA, 244 bp, Oryza sativa
  unsure (1)..(244): unsure at all n locations
tactatctctacttgcagatnagagattagagctatatctcacttacttgatctatntctgctaattgctgctcgaatngatcttcatatattatgcattacttttgtagtctatgatccatcttgttcattgtcatcttagtgtntcactgataagcatgttgataatatttgatgaagaaccttaatccatnntatgcgtctgttacaactacaaagtcatgtctatatcacatggagggtc

SEQ ID NO: 64958 - DNA, 105 bp, Oryza sativa
gtatccggaaatttcgacgatctgtcgtgtggcgcccacagtgaatgggtagtctgcgagtggccgggcagagggggtcggatagggtttttcccaaataggggg

SEQ ID NO: 64959 - DNA, 460 bp, Oryza sativa
  unsure (1)..(460): unsure at all n locations
agcttcaaatgcagtaaagtactgccttctatttatcttatgattattgcattatagaatgttttgattcgatcgacaatacgtacatgaaatttccatatttgtacatgtctctaacctgcatatatttaattaccttcgtatcattttacccaaaaaaagtgcagatgatttcaaacttacaattatactaacagataattcatcgnggttaattatggtatatggtatttgtatagcgctagtttttaagctgcagtaaatacattaccctagtagaaaaataagaagaaacttagaaagcttgattttatatantaaaaattgttgaaaatataccggcattgtcacaaagatttatacatcaataaagntcacttcattctaaaatctcgtataaaaactggcattctatacccaaactaaataatactgatgatattggccgacaattgcatct

SEQ ID NO: 64960 - DNA, 363 bp, Oryza sativa
gacttatctactgctgcaccgtcactacttaacccatgctttaagacatggtgcacagacaatccgctttgcaggacacaatctttttgaaaaaggaaatactaactacgattgccctattgcggtttacatagacagaccttgaatgttataaccatcttgatatgccactgctgagaacctatcactgacactggatacctacactaactaatttgaatcacgcctgtgttcacataactcttcttttctgtaaggactgtgatagatgctctttcttgtcgtgagaccgtgtcttctaacatctctcatgtttattctttactgagcaagtacaattatgggctccatgtggcgcaatca

SEQ ID NO: 64961 - DNA, 373 bp, Oryza sativa
tatttcctttcacttggtggttaaatattgcatgcatttggaacctaaaacacataaaatttgcaaacttaaatacaaaaagatagttagatttaagataggttaatttaatacgctcggtagacatgcttagtcttctattgaatgtgaataatgctctgtttatatctctatatatgggcatgggttagtactctcttaaaattgatagagagccaacattattcgggaccctgaggagtgagctgactttctgactgagctaagtggtgcagaatgaatataaatagaatgctttagctgtctaattaacttgatccgatgtttatttcaaagataattgaagtctcattgtttaatctattagcaaata

SEQ ID NO: 64962 - DNA, 359 bp, Oryza sativa
  unsure (1)..(359): unsure at all n locations
ctcagctgatatactcctctacatattgggtccctgtctaagtngttgagattgtgcagcatatcacgtgcatgatatgaaggaacaaatctagctcgcatgactctnttcattgcatnccaagntnggngagtgttanttggatnggaacanacaaattcactccaccatatggatgccaaatcagtgaactcactagtagcagccctaacancgttattctcatgaaaatcatggcangcanatnntctgatcaatggctaactccaagtaagatatgcatcanggtcatatttttcatcaaagcaaggaatggtanacttgatcttgcctaaagaatcatcatttatcacgtacct

SEQ ID NO: 64963 - DNA, 219 bp, Oryza sativa
  unsure (1)..(219): unsure at all n locations
gcttcatttnctcaagatccaatatgagacattctacatgttgcctcatgagagtgtgaatgacatgtatgggaggctcaatgtcattgtgaatgatctcaaggggcttggggcaaactacaccgatcttgaggttgcccaaaagatgcttagagccctaccggagaagtatgagacccttgtcaccatgctcatcaacttcgacatgtaaaaatgaca

SEQ ID NO: 64964 - DNA, 266 bp, Oryza sativa
  unsure (1)..(266): unsure at all n locations
ctcatcatctcgctgacanagtgagcacagatcatcatgtggcccagttcgcttggcgagggtgtccgcatgcaacggtcctttatcgcaagccacatgaagaagcggactcgcgagggagctctggagtgccacagcagctcgccgaatgcacaattntncgtagccatgaagaacatgtcgtatgccgacgccacagaaaatngccccatcgtcgcccagtttcacctcgattcatccgtcgaggggagcaacaacacatcatg

SEQ ID NO: 64965 - DNA, 252 bp, Oryza sativa
  unsure (1)..(252): unsure at all n locations
gagagaattcgtgataccacctaccttagcaggagtgattaaagccncagcacncttcttncggtccttttcatacacttctatcttgggcttttccttagtggaacctgcagacctgccaagttctttaccctcgagaacacgaagccgcgtctcaagctgtccanatggatcacatgtcaatctcaatgggtcagaaaatattatggacanaggagatgtatntccacanagtanataccttgactcgac

SEQ ID NO: 64966 - DNA, 304 bp, Oryza sativa
  unsure (1)..(304): unsure at all n locations
ccttgcaagggtcagcgtnctcaactcagtgcacgaggcaaggcgaggcggtatagcaccacgcagcgtgttggtcccagcatcaaagttgttcaacctcgtgagcaatctgcagtcaatggtaatctcaccggacagcgaattgttcctcaggctgaccactctaagcatcgggcagctcgacagggatagaggcaatgtgccattcaattggttggaagccaagtttaaggactccaagctcctcaattttccaaacacatcangggatatggcattgaacatgttatatgacaagtcaatc

SEQ ID NO: 64967 - DNA, 305 bp, Oryza sativa
  unsure (1)..(305): unsure at all n locations
ccgagcaacagacatccgcgcaggactttatggcgccgtctcgttcctgccatcaaagaaccggctcatgtgctcgnctggcagctgcacggatggttcctgcctgtagtgactgaacatgtaagctctcgcgngcgcaaggtgcaccaggctgctctctgcgcactacccgcgctggtgacgacgtggggggggggcgngtctactgtaccgcacccgactaaccaatgcatgttcttgcggttgtacggaggacctgtgtactcattggttgtttcgctatgctcttttagtcgctgttgcgc

SEQ ID NO: 64968 - DNA, 393 bp, Oryza sativa
  unsure (1)..(393): unsure at all n locations
agctngtagagntgtaatatgtactcctatatgttatgcatcgtcaaacaagtgaataactcctgagcatcttcataagcaaactcaactcgtttctgcacatcaaatagaaacaaataggagtatggtttgatacttggatgccacaatcttccaaggatttctttctccttattaaacctctttggttcacagaanagtaaaggcgatattccatgacatgacatgacatttttatggcttaactttatatgaaaatanacagcccaatatctcggaaattttgctttgcgtcctttttttttttcttttcagcagaaagagctttcattaactgagagcagcgaatcatggccactggttataatgggctaacatttaacctacaaatta

SEQ ID NO: 64969 - DNA, 348 bp, Oryza sativa
ctagaagaatcacccaagatctctatatactgtgtccaacagtcaagcttacaaggtgagttctttcaagaatgctctgcaagacagcatcttcgcttattaaagccaacagaactcattaagtcatagccaacctgccttgcagctcatgagagtacatgcatcttcacttagagagggtatagaatggactctcctctagtttactaatggtttggtcttcccaggttctaattcacgggatcttcgatcacatagactggggtaccaccatagtataactcacatgggtctcaaacccatctccttcgatgcattatctatgcacatttgtgatagtcccttcgt

SEQ ID NO: 64970 - DNA, 302 bp, Oryza sativa
  unsure (1)..(302): unsure at all n locations
atctattatcactcattatactatctactagcagactatcactgaagaaaatacgcactctcctcatatctgaagaaactaaattaccaatccgcataacatctcacctgctatagcaatgttaagaatctcattagctttctctagcttgttcttggactcattaccgactcataggacatgtagtatctgtatggctctgtcaatctggtgtgctcagaacctgatataccttggatcngacaatctcctgctgctatcactatatcagcctactgatgtatatgaaccaacatccatcc

SEQ ID NO: 64971 - DNA, 239 bp, Oryza sativa
  unsure (1)..(239): unsure at all n locations
ctgatttgatcctctagatgaaaatatagataactagatcggtcaccaagctttgtggtgcatgagtaggcaagcatgaaaatggtttttctagcttgtgagtggttaattatatcatcgggtgaagccactgggtacgagaaggtaaccatgggcacaattntatgttaatattggacataccaatagcctgagcacttgtacaaaccctttcatagaccatacgaagataaatcaat

SEQ ID NO: 64972 - DNA, 315 bp, Oryza sativa
  unsure (1)..(315): unsure at all n locations
gcttgagtgtgtgtgatatttgagctgccactacctattatttgataggagcgcgcatanttttgtgtacttctttgttcctactaaccatggcaggattgcgtaagggaatacaaaaacatcgacttctacaccttcgacgagatatgacgacttcttcacgtgatgcatatgaggtacatgactataattntgaacaagttgcatctaagttaccattctatgatgggaagtatgattctattgcatacatcgagtgggagctagcaatagacaatgaatttgatatatatgatttttctgatgctcaaatga

SEQ ID NO: 64973 - DNA, 425 bp, Oryza sativa
  unsure (1)..(425): unsure at all n locations
tgcctcagaaacttgtcgcttcatataatatgggtaatgcttaccgccaataatacaataacctctacaaattatctgccatcattctgaacttgcttgtctcggagctgaacttttgatgattacactctttggtacctcgatccctctatgaacagaacctcaaactggcactgatcacaaagccatttgcgggtcatttcagcatatttctggtcttcaaaacttctcaatcactatgggcttcatctttagataacacccatatcatgtgactcgacaacagcgacaacatgttatatatatggtcttgtatgagccacactgtagccaaatcatcaccactaacagccatgctagcactaaatgctatgatattctcgctaagatgatgnngctcataccgacagctatcgcaccgccaa

SEQ ID NO: 64974 - DNA, 360 bp, Oryza sativa
  unsure (1)..(360): unsure at all n locations
cattcatatgtctgtagacaaccaaaaaaagaacaatttgttgtggtactaggcacgaaccaaagggttcgaaactattctatttgactctgtttgcaacacgtacactcacttgcacctagttcatgaataatacaggtctgatcataattatcattccacaatatagtactcgataaagggcttatcaatccataatattattttgtacttttggacacactaatcgcattccaactcaccttcctaactgtcagacatgtgtttattgaaacaaattttttgcagctatacaatataatattttagctgcttttcgggcacgtatgtatgtatctattatactatanagaaagcttg

SEQ ID NO: 64975 - DNA, 268 bp, Oryza sativa
agaccttaactacttcacaccaacgctgcattgtgtccgcacactctcaagaagaaaattgaccaaataaagaacgaggagaattacattaccttaggacttgaacatgaactaactgcatttcttgatggtaccactgcatttttttgaacgaagtgcaataacacttgaaaagatagtaaaactttgcctttgaagagaacttgcaaactaatggctgctaaattgtcggctgctgttgtatggatggatggatggaagatattga

SEQ ID NO: 64976 - DNA, 261 bp, Oryza sativa
  unsure (1)..(261): unsure at all n locations
ccgcagctttttaactccagacggagatgctgctaatggtcttnctctgattgtgagtacaccaggatgtcgtcgatgaagaccacaacaaacttatccaagtattccatgaacactctgttcattaagttcatgaagaaggcaggagcattggtcaaaccgaacgacatcaccgtgaattcatacagcccatatcgcgtggtgaatgcggtctttcggatatcttcttcacgaatacgcaattggtgatatccggagcga

SEQ ID NO: 64977 - DNA, 277 bp, Oryza sativa
ctgagatcggccatgaatgtggacattttcatttatgttctactttgagtatgaagcaactacacataaccattcactcatatctttcttcaaatgcaacacttctgatatctcttcacatatatgcgtaaggaatatgagctgggggatgtactgggattcgattaaaactagtgaacaggtttatattggctaaatcacctcaagatgggagacataaagatggacctctacactatgctgagcttgaacaatgaatgactcccaaccatcacag

SEQ ID NO: 64978 - DNA, 273 bp, Oryza sativa
  unsure (1)..(273): unsure at all n locations
tcatgantatcatggtagttaactatatatttaacgaactanactgtatcagtcgatcatatatattctcctcttgcaganatctgtccttcagtggtttgagtgctgacatatcatccgctcttgtgaatctcaaggctcttcaatacttgtacgttctgagctcagcatgttaacattcttcttatgcttatntgtgatatttattgtatattnggataacctgctcatatcttgtgttatgcttcttgaccacatnctgcncgatctatc

SEQ ID NO: 64979 - DNA, 225 bp, Oryza sativa
aatatacaccaataacgaccgttgtgcaataaagatttatacaaataatttgacaatggttataaatctagactccacatttgatttgagaaaataatcgattggctaccaacagcatagaaaagggctatttgttttttttattttcttgaaaaagcagacttgccactctaaagtatataagagttaccacctgcgtcccacaatatatgagatttagctgcc

SEQ ID NO: 64980 - DNA, 219 bp, Oryza sativa
  unsure (1)..(219): unsure at all n locations
tcatcataggataattatatctagagtgtttatgtgatcaaatacggctacgtatggatatatagacactattatatgagtgactagtatatgggataatgatgtatgaagatctctatagaatgcacaacgtttcacacgctgagaatantttatatctatgcttatatagatgaagtaatagttagcagcaactcagataatacactgatatatact

SEQ ID NO: 64981 - DNA, 202 bp, Oryza sativa
gcttgtacccttcttacttatagagagagagttagatcgagatcggaggcgtacacgaggacgatgaagtatagggcaatgaaagctatgggcacccgaggcagctgccacttccccggagatggaagtgtcggagcagcaacttcctggggaagatcgatgatctccacgcgccgcctgtactgtgggggaggcaccacca

SEQ ID NO: 64982 - DNA, 144 bp, Oryza sativa
  unsure (1)..(144): unsure at all n locations
tagataccacgcctggctctatcaacacacattatntcataccgatgcacttgtgtgccttgagcaacaactcgatgtctccgtgcctttttgaatttatcnttcatgtactntgtcactanncgtgccaacacnntatgtgta

SEQ ID NO: 64983 - DNA, 380 bp, Oryza sativa
  unsure (1)..(380): unsure at all n locations
ttagcgcccatatataaaatttttatatatggagcgcccgattaaccggtggattttaaagatcgcaccgtttgagagcctgggaattaagcgcgcatatttattcaattattttagaaaagaacataccctggtattccctctggtttttttatgaacgtggntagttcaaccacatatatntanggaaagtggtaacatacgtttaattgatctgcgtgtagtataatactggtgggttaaagcangtttaatataatatagaaaagaactattagcctttaacatatatagtattagaataatatgtataacagaatagcgttcagactggctntaatttttttactcctctctctttaatctcaactatacaatta

SEQ ID NO: 64984 - DNA, 339 bp, Oryza sativa
tgtactactatgcacagttccagttttgtatggtctgtgatcatctacctgctaacactaagaacttactaactcacacatgctgtttatcctagtcaaaagtacacagtattagctttggtagtcaaatatattcgataacaagtattaacctcttcatgatattcataactataaattcgagttgaacattattaagatgaatagaacatggtagtattgtggaaggtatctatagaaatcagtagtatgtacctgtttatttatggctagagattgatatggctcatagattttcttcagttaatttgtagaatgcatattctctttctgggttta

SEQ ID NO: 64985 - DNA, 349 bp, Oryza sativa
  unsure (1)..(349): unsure at all n locations
agctngatcatgacgaggacggtgatgaagaatctttatttctacagatgaaagtgcaaggaagcatacccaatagagacctccacttgaaggttgaggcttccattgtaaaacaataaaaactctcagcttctctcctatgcttgcatccaagggtgcctcgccggagatgaacaaaatgcccggcgcaaccgtttgtgaagcaaacttgctntacttccagtcggngagcgttcatggcaaaacccaaagaccactccatggatggatttggccagaatccatggaaaagaactgggacaagagaaacacgatgctgatgaactacacannagcaccaaagaagaag

SEQ ID NO: 64986 - DNA, 344 bp, Oryza sativa
  unsure (1)..(344): unsure at all n locations
gtatgttctcctcttttgctagggacttgttgctttttctgagaaccgactgatgattagatggtggtcactangcaatgcctggtgggagagactcancaaaagtcttactcctatccaatgcacaaagcttatctatgttccttcatgggaaggggtttcacccaattcagctcgtctaagtataatttccaccatttttgacatgataacatcaaactcagaggataccctttatattatcttctctgaccatgtatatttnggatgattgaaactattgttaatctggtcaaaagctagtataccgtagctcatctatttgtatttcattctactatgac

SEQ ID NO: 64987 - DNA, 291 bp, Oryza sativa
  unsure (1)..(291): unsure at all n locations
actagcttacctttnttcttgtgacctaagagctataactcttgtttctgcttaaactggacttcttcaacatacatttgtacaatggtgacccataaataaccaatccaccatacggaatgcatggtcttgtgatgcaaagtcaacatatgagatattgggattgtctttgactaatgctgtatacggacaagtcataaactatgctgtgtgtgtcgttgataccatattacacaagatttgctaggcttaagtgaggtattggctccttggctgatctgatgtattctg

SEQ ID NO: 64988 - DNA, 293 bp, Oryza sativa
  unsure (1)..(293): unsure at all n locations
cattatcaagggttattgccatgaccttattctctattttccaatcaaccaagcaatcaataatagcctgagctatgacaatactggtgtgaggaggctccaccttaacaaagtttatgacacggcattgcaaaacccaatgaacatctatgtaatgagccaccaaacacatatacttgaaggtttgatttgatgtccacatatttgtaattaaacttatggtcttagcctccctaagacttttcctgagatgttccttttanaatcatacaatttcatgcattcacttttta

SEQ ID NO: 64989 - DNA, 270 bp, Oryza sativa
aactactacgcagtcttatggcctctaattctccttattctacttttttgcatagaagtgaagataaaaaggatcaagaggacttatgtatatggatattttaaaatatatatttaatacttcttttaatggcaaatacgtatatcgaacccggaacaaaacttttgtcctacacccgaggttgcataaagtctactatgctgcatatgctaaaaaattttatctcaataaatctttctcacaatatctttcaatggaatgtctgatttt

SEQ ID NO: 64990 - DNA, 320 bp, Oryza sativa
  unsure (1)..(320): unsure at all n locations
gctgngtgcataggatatgttccccaagacttatacctgtagttttgtgataacggagacacgatatcttgtatttgtgagacangttcgtanatctgtaattctgtgatagattgtgcgaagtacctgttgtttagtgaaatttactaaaaagaactctgaatcaaatctaacatagtttcttctcgaaatttagcaacgaatggttgtttctttaagacaagtattactgatcttctgtaaaataatgcgatgtggttatttgttaatccttactaatgcatgtgtgtttaatatgtgcttacacatgaaccgtctct

SEQ ID NO: 64991 - DNA, 246 bp, Oryza sativa
  unsure (1)..(246): unsure at all n locations
ctcagctttatgagattactccaatcgagtcgttgagcgtgaggcgttatgtgggctgtctgagccgatcaccgataatcttccttggatctctcatactcctggaaacaagagtccnggtctcgggtataataaatgacataatctaaatgactccctaatattgagngacgtgacgacgtggtatacgacctgagttgaactgtgggacgtgatgatcgatggtgtgtgcctcatcatactcga

SEQ ID NO: 64992 - DNA, 351 bp, Oryza sativa
attttttcttggtcaaagctccataatggaaatattatattttgtttgcacttgcataatagaatccacacttaactgcttggcctcggttgcatgccaaatcatggcctacccagtagcgcactaatttgcgtaggtatactactctggattcttgacgctcacctctgggtacctcggaatcgtgctctctgagcgcgataaccaatatccacataccccgttggttgttaaaacctgagaatgggttgtgaagccttaaacccacatgggtgcgggtgttgaaaaaaatgaatggaaactccgaggcggggtggccatggcactgcctaactcaataagacgatctgt

SEQ ID NO: 64993 - DNA, 401 bp, Oryza sativa
  unsure (1)..(401): unsure at all n locations
atgctaactatagtagagatgacacatgtcatgctctcaattctgtgtacatggaagagatgtggtacatatcagttntcaccaatatttattntangagaagtcaagccagatggtcgtgcaatgtacttgtgattntgatcgccagaagccagtaagataaatggtgtaaccatatgattatagaatacatcataaacaaagattacatatatgtatgcagtggtaatttctacctctgtcgtcatcagattacaantagctctggagattcatgcctctttcacacatatggtagatctcgnctaatatagctctaacggtttgtctctgaagatntctcaggaggagatatctctcatgtgaccaattatcttgttacattgctagaaaataaaaaa

SEQ ID NO: 64994 - DNA, 302 bp, Oryza sativa
catgcgcacactggtttatcagacgtgctttagttcctacaagacacatggtgttaccacacctggaaatatattgcatatgttgtgtaatatccgagttaataaactcattaaggatttaccaaccgtctagataatgaccacaatatataatcagcctaagccattatattggtcaataataaggcacacttatcttgccgaaaagcactgatattgtatccaatcaattgcttaaaaacccaaacagcaccttgacttatataaaaaagtagcgggacagctattttaagctttactgt

SEQ ID NO: 64995 - DNA, 425 bp, Oryza sativa
gacgttttgagagagaagcatgcatgcagtggttatcgagaatatatagctctgagaatacaaatgaagtgacggcaacgtaactaattgtgatctactttattgtcgaaagcagtttgagttgatgatcttgatgaaatgaaaaacttattatatcattaatatctgttcaattgcttaactcaactgtttttgacttgtgaatgacaactcatgaatttaatgtacatagttgataagtcttgattctatgagatattgcatcttgtgagttattacgaataagctgcaatgcatctgtatcataatgattgatgaaataagtgactcttcttgtgctagcgcggtgatgttaaaactttaaaaaaaagtttgaattttttagtagtcgaagaacaatggttttctaattcaggttcaatatt

SEQ ID NO: 64996 - DNA, 118 bp, Oryza sativa
gctgcagctaaggtagtgtctgatctttctctacaaatcaggctgaggcattatccaatattgggcactatgatgctgctgctgcgaagtctgtctgatctgaagtggtgaagacact

SEQ ID NO: 64997 - DNA, 128 bp, Oryza sativa
atgggcggatgtaggtgattctagcgtagttgttgacactgctgtgaattctgtgtggaaaggttgatgttgaatacctgcactgatggacagcttgcccggtggcgttgaaagtgtggccggtggcg

SEQ ID NO: 64998 - DNA, 412 bp, Oryza sativa
  unsure (1)..(412): unsure at all n locations
aagccacctgtgtaaccaaatgttctntnggctttctcacagctaatttagctacttttcaaaatgtcacagcccacagctgcttttgcaaaagccacagcccaaccaaacacacccttaatcatctataggcataagttaaccacttttaatataatgctactagtatccgaaagaggggggcacatgccccctttaacgcagtattatggttagtcgtctagaaaaagtgggataagcctatgcatattattttgcacgggaatcttgtcataatatattactatgttccaacaggtgtagatatcatatcttaaatccttagcttttatgtgtgcaataaaaatatntataaaatttttcataattttgttatgatcgggccaatggtcttctattttgtcttcatttg

SEQ ID NO: 64999 - DNA, 173 bp, Oryza sativa
  unsure (1)..(173): unsure at all n locations
gcaagaactatgtacgtcacagcggntggggtgtgctggataacgtgcctgtcagtaccgtgtactggcgaagaacaagggcacgaggagatcatgagagctttgtcccagattcggagaaagagatgctgtggaccacaatgctcgagacattcaccccttctgcggtacag

SEQ ID NO: 65000 - DNA, 457 bp, Oryza sativa
agctcgaacttggtcctggctatgcagtgcattcctcgcatcttgatcgctggcttaaggctgctagcacactcaaaatcaaggaagttgcctttgagctttccctacgcaacaagacagaatacaccttcccatattcacatttgctttctgataaccgcagaggaaattcagttcaatctttccacctatctttctgcacgctccatccaacacttcaatttgagtgcttgagaagctcgaagagtgtgcatttgagttgggtggacattactgcggaggaattggcatgcttcatctccaattctttcaatttagagagtttggaaatcttttcctgttgcaagattggcttcctcaagacaacaagtgtgctgcaaatgctcaactgtctgcgtgtgcagcatagccatagtgtagatatgatagagataaatgctccaaagctctctatttt

SEQ ID NO: 65001 - DNA, 220 bp, Oryza sativa
tctattatgagtcatcaaagatctctctcttctcatatagaatgaccttgtttggctggataaaaccatcagctatccatctccatatcacgtcatctctgtcgatgatataatcctccggaaatatactgagatacatacaacacgttttaagaggagaaggcatatcacaataactaagagatattatccagcgcatgttcttcacatctgtactact

SEQ ID NO: 65002 - DNA, 504 bp, Oryza sativa
  unsure (1)..(504): unsure at all n locations
ttgcttcatgagagtcagagcgatagcggatttttatactcatactctctcctcaatgcctgggtgtcacttaaataggtataatatttttagaagatgtattaacatgtgatatatcactacacagacatgtaacttacaatttaatttatgtttacattgtcttttttacatgtagaagttgaattntgagttgcatatttgtacaacaatatatcatatattaactcatcttctcaattttgtttaattctctgacaactatttgatatgcaaacaatgagaggatatctgatcgagagtttaaaataatttcgccctttaatacttggagtgggaaccaatataaaaagaatggattaggtactaccttcataccaaaataagcttatttttgaaccatcctatgtatcctacttccaacataaaaactaaattagttctgcctatcaactcaatacaaaatttttctcttcatctactttaacgtgttatgcctacttt

SEQ ID NO: 65003 - DNA, 389 bp, Oryza sativa
  unsure (1)..(389): unsure at all n locations
aaatattagagtgggatcacttgttgtcttacacacactttggaaactgttgaaagataaaatgctatttcttatgacaattaatattgcgcacatttattatgtatatagcacannatataggagttcactggttcgtcttacatatgcttgagtatgctgtatctaaatacgttcataagacatatcttgaaagttccaaggctacatgactcactgctactatatactattgggtgcatcttggcatgctgtgagaacatgatatggcacatcagactcgagaactgtaacttacagtagttgaccgtaaaataatgaggtgaacaatacatgattcctgcgatgatatgcactcgttcatgaactatatnanatatattacatct

SEQ ID NO: 65004 - DNA, 159 bp, Oryza sativa
gcctttctccgggagacatattgcactaattggttcacatctttcaactggttaaaaggagtcgataaaaacatgggcgagtaaaaaatcctaacgtggcactacggtactgagggtaccgcttacaattgaaccatacttgcatgtaacagaaatacg

SEQ ID NO: 65005 - DNA, 251 bp, Oryza sativa
ggaacagtacgctctattagccaatgtcgtgttcataattgtgcgaccgacaggtcgctatatcgttcgaataaacatatctttctgcataagtattgaagaaccatgcaggccgaccagttagcatgactgacatgatcgatgcaatactatatgcatggcctccattaacagttactccctacatatagaagatggcccatgcatatgtaccaggtgaactagtcatagccattacaattttcatagct

SEQ ID NO: 65006 - DNA, 220 bp, Oryza sativa
ctccaccactgtatttgtgaatgtatgagtacgatgttacatgtgtagtgtgtgatttatactataagaatgtagtgataacaccgcatctactttcattgtatactatcaccgttgcattcgcagattgcgcggctagtatcaatatatttctctctcatcatatagcatatatagttcttcattatattattcacatatattaaattgacaacataat

SEQ ID NO: 65007 - DNA, 111 bp, Oryza sativa
gatggggccactccactggtggggcttattgtttgggataactgactcccgaaagaaaaaaacgccaggatgaaggagaaaaatagttcctgcccctagtcgaggggaaac

SEQ ID NO: 65008 - DNA, 416 bp, Oryza sativa
  unsure (1)..(416): unsure at all n locations
atctgtctttctgtgatcaccacctctgatatctgaagaggacacaaattctatgaagatgctgggtgccgaagtatattacaggaaattctggataatattatagcaaatgttaaataacacaaagagaactcgtgaaaatatggatactgttagcagcgagatattaataactaaagaaaattcacgagcttctctatggattatatcacaaaaataattaaataacctacaaatgctatgcttaccttgcagcagcgaacatatcttttagatagaccatgctcatntaaggtgggtggctatatatttcgtagctgtcgtgacgccgtacatacctaaagagcgtatggggtgctggatcaattgatcataaaaaaaaaactctgatgaattttaaaaatatgatttgcatg

SEQ ID NO: 65009 - DNA, 316 bp, Oryza sativa
ctgcagcttttcctttttgctatatcgggattttaacactcttcttctctctctggagcaactgtgatagatacctttgtcgagagcagatccacaccacaggcttagcacaagagagagctagctaccttctgtgcttcagttaggtccaaagtatggggccatggataatgataactgaaccttcggattggacactttcgcgaccccgggaaaccaacagactttattccgactcacccccataagcgtcagcatctgaccgttctgtgtttacaaagacccgttgcaattatgagtattataattcagtatt

SEQ ID NO: 65010 - DNA, 305 bp, Oryza sativa
cgcatgcaagctcggattggagaacggcgagcacaatgtggtcttcttaagctccggcacagacgaccctccaaagatgccacaatgacactgaccagagcgttgcatccatcccaccaagttgttggggctttttgtctgtgcatctgtgcatgcataacatgcactcgcacgcaacggctttggatagaatgactacacgttattcccaatccggctgtacagacttaattccatgttgatatgaatgctgaagcatactggagtatactaccattagtactactattgttaacaatgaccag

SEQ ID NO: 65011 - DNA, 245 bp, Oryza sativa
tcatcggcggcctgacgggcaacaagaacgctcgcctcactggcttcctccacctcatgcgcgagaacgctctctacatcagcgacttaagcgcctccgtgatctacagcgtctcctagtttctcggccggggagacacctgccaactccgcagctcctcactcgtcgaccccagtaagcttacactcacacacacacacacactcgctggatcacatggctcgagctaacgaacagccggggcg

SEQ ID NO: 65012 - DNA, 102 bp, Oryza sativa
ttaattctttatagctcttcactgtctttcacttacaaccgcatctggaaatgaacatgcaattaacgatttgaagagtgtgcattggttactatagtaaca

SEQ ID NO: 65013 - DNA, 344 bp, Oryza sativa
agctcgtcctctaatttgatatgcatgagtcgtttatatgtaaatggatggatgccaaacttttgagctaatctaattacatagttgtagaagggaaaaaacaagaaataacaccataaagaaatcatcatacttgtttctggtttcaatacaaacttttttcctctaaacttatacttcctccggctaaaaatgttgctaactacgatgagattctgaacggttaaattcgaggacctatattttcaactttctgcgctagagaaaatacaagggataatgtcatggctcctcccgttaaaccctagcttaagccctcttcctcttcttcgcgcctacggctc

SEQ ID NO: 65014 - DNA, 371 bp, Oryza sativa
  unsure (1)..(371): unsure at all n locations
tcaccatcttcttcagctccgnctncgtcggcgactgtcccagcgaccccatcaccgtcccaagctccttgctcgtgatcgtccctgcattgcattntcttctggatacattgattgatcatcgtccaagaacacatgcaattgatngattganntgatggattaccgtctccatctttgtcgaacaggtagaatgcctaccggaactcggcgatctgctccttngtcaggtggtccatttatngnctccnctcacagaatattagtaacacaagaagcaaattctctgattaatgacgatggattgatggagatgacgagaggattaagctgccgctgattgataccccactctcattctatctaatatc

SEQ ID NO: 65015 - DNA, 393 bp, Oryza sativa
  unsure (1)..(393): unsure at all n locations
cgcccacctaccttacctagcttggttttaatcaaaaaactgacgatgtcccacgctttgttgcgggatatatattanataataaaaaaaaatgatgaaatgatttggattgaaacattataaaaatgatttaaaaatgatgatttagcatgtgtatatttagttatagaatgaaataaactatatatataattattatatacttacatgttaagcttttctttcttaatgggttagtgtagcatgtaggttttagaagctaataaatattatgcttgcatgctgagctttagatgtttagggtgtattagctntatagtagaaagaatggatacaagcttgctcttgagccggccggccggcgcgcatgcatgcatcgatcatcttcgtcgt

SEQ ID NO: 65016 - DNA, 416 bp, Oryza sativa
  unsure (1)..(416): unsure at all n locations
cattggttgccaccttttccaatttcgcttacattctttttagaaaatgcaggagagctgtgcttcatttcattaaagaaaaaanaatcacacatacaaccaagggctcacgagcccttcgcccaaaacacatccacaaatagcatcacacaaggcaacccatgaccaaaaaccaccctacgacagcctagtgcccttgagttattgacctacaaaggaaaacttggagcacaagagctccagcccggcaccaaagcctagcttctgttgacactgcccgcagaatctccatgatgtttggatgttacattgaaacacatgatatttgcatgggcaaacagaaagcatgactcaatgtttgaacacaaatattatcacagcattcaactgaacagtgttcacattcattcaataca

SEQ ID NO: 65017 - DNA, 356 bp, Oryza sativa
  unsure (1)..(356): unsure at all n locations
tcatactcatcagaatggttgtctactgctagctcccaattaatgtatgcagcggaatcatactatncatcatagactggtaacttacatgcaacttgtgcngaattatagtcatgtacctcatatgcatcacgtgaagaagtcgtcatatctcgtcgaaggtgtagatgttgacgttgagcatgaccatcttgtttctccttgcgcaatcatgccatggtagcagcgaacaaaaacatacacaagaatatcacgctctatcaactacttggtctggcagtcanatgtacacacactcaagctttaaccaagctctacaagatcttaccatgcaagtggaatgtgatgacaccgac

SEQ ID NO: 65018 - DNA, 390 bp, Oryza sativa
  unsure (1)..(390): unsure at all n locations
tcgtacccgggaactctaagtcacctgcggtctgcaagctnttaagaaatcaacgacttggctatatctatctagcacagcggaaatacaccagtggtgcgcatattgagcctccatttgctacattaacactcagtcagaatcagttctttcatcatcagagttattattgctcggctgaaggtcagtgttgcggaattgctctacaacatcacttgcaatcttgtcagccgcactatgagcattactgataagatcaagagcagcttcttcacttgtaccgtctgcaacgccatcaatggtatcaattacaattctcgggatcaaggatttggtcattgtcaatgccatgctagctcccatacttccaggtctcttgatgttcttgaa

SEQ ID NO: 65019 - DNA, 209 bp, Oryza sativa
tatcgatcggaaagctcaacacttcacacgtgacgcggcatctagtggaacattaataattggactgcaccccgatgaagatgatgatgatgatggtttggatgattctgatcagctgaaaacgtcggatgaacacagactattattccataacctgatgttcctaactagcttggcatatatggatgtcgaaatcttgcgactatttc

SEQ ID NO: 65020 - DNA, 204 bp, Oryza sativa
agctttgttggatttctcaagaagagacttctactactatctgaagatgaccattatgttgaacaaaatcatattgataccttctttagtgcagcagattcctattttgatcatattattgcaatacccacagttatggttcagctaagatgctttcttgcttgaacctgagctgtgaaccgggatcacaaagtgctacttcat

SEQ ID NO: 65021 - DNA, 248 bp, Oryza sativa
  unsure (1)..(248): unsure at all n locations
cttaagcacctgagctgcagcttctgaacacacaaatagaagatttcttattataacgctccatgcacaatgtccataaacttggccttcttcagcaaaccattgggatgttggattngatagaattctaatatttacaacctgccttagggacaaaaaaaaagggtatcttttcccaatatactatagtaaaacatatgcacttgacgaacaatcaaaattgatggttcaagggaatgccacataca

SEQ ID NO: 65022 - DNA, 204 bp, Oryza sativa
gcgtttttctacttctccccaatctcaccccagttattcccctcccctaccacatatccctaataatatttcatctcttgtctactttcgacccccttatcacttaactcgttatcatctccccacgtaccattacctctatctacagcccaatccttcttccacactcttttcccactcgccccctaattccttcacataatt

SEQ ID NO: 65023 - DNA, 105 bp, Oryza sativa
ggtgatcgtctcaatgatcatttaggcctttaactagcttccgtaccatgcgacgcatgtcacaatttcacctacggacacggacacaccggcgtcactctactc

SEQ ID NO: 65024 - DNA, 229 bp, Oryza sativa
gacccggaacttaagccccgaggctgcaggttcgatcttcattgtttttaagtaaaggccccatacccttgcaattcacctaggcaattgggttgcaccacaggtttataatccactttggcctcttgaacaattctaatgtcacattcatatgttggggcgaagttattaaagccaaagcatgcttacatggtttttcagtgtgctgccgtacaggttgtaagcttta

SEQ ID NO: 65025 - DNA, 451 bp, Oryza sativa
  unsure (1)..(451): unsure at all n locations
cgctcggaagagaggcaaggttgtatngcaaatcttttgttttgaaatcattttgagatcactaagaggcttacttctttctaagcttgggccgaaaagaggcttgcgtctcgattcgactctaagagatgttcttcaacaactcaattggtaatgtaccgaccccccaggtacagatcattacttctcggcttccatagccatttcacttgattaagcgggtgccagagccttattcatgttctcggactcccagagtgcagctggccaactacacaacaattcgcttgcgctcgagaagattcacctatgatgcccgtggacatccctaattacacagattcgatacttgaccactcacgtcatacatctaggacataagctgattctggtaactgattccacaccacaacaactgtgtacatagcacaagcaaacagatctacgctac

SEQ ID NO: 65026 - DNA, 468 bp, Oryza sativa
gcttaagcacctaagtaaatatgaagacactcttcgatctactcattaccatgaatagttcttttggtccatgaatagatgaatacgttaaattattttatcttttctggtgaagaaacactaacattagaacataacaacgtgggagataactcataagagactaatataagcaaataactcggagaaaagaaatataaaaagatccctttttttttggcttgaggtattattgtcatttttcaaatcataaaatctatatctcatttcagcggagatggtttttccccaaacctccctctatttaaagccggtaatatgctcgtattttgcaacaagtcaggacactggcctcatataattggggattggttggatggttatgggtttattgagaataaatactagctagacccatattattacgaactatcttggcggatggtttaggataatatattacgatga

SEQ ID NO: 65027 - DNA, 100 bp, Oryza sativa
acttgtatcaacccatgggtatagatatgtatacccggggtctatgtaatctatcatcacgatcaatacaattcggcgcatcgccaccctttttatatct

SEQ ID NO: 65028 - DNA, 229 bp, Oryza sativa
gacgacatactccggttgggttagatctacccataaccgcacttatcgaggagcttacagttggagaatacatctcttaaacccatctccggggaatgggtgaagcaccaaagtgcccatacctggcgcgcctactgcgacgtgagatgtcgcgaatccggtattcgcgtcgtatggcgaacaatgtggctagggtatacccgagagggaggggatagtgatggataca

SEQ ID NO: 65029 - DNA, 299 bp, Oryza sativa
  unsure (1)..(299): unsure at all n locations
ctaagcttatcgcacccaacgacgtngcagctccgactctacccgacagagacagacttataatctgtatgccaccaatacaagaaaggagacatgaagaagaaggcctcgccaagcacataggcatctattgcatcgagctgacacatgagtgcaccaacagcaaatggtgcatgtggtaatgttcttcaagacgatgctcccaacgaggatacgacttgaaataccaccaccgtccgtccggaaaaccgatcacagatttcacctggagaatggtacggtggagaaaaatgcataac

SEQ ID NO: 65030 - DNA, 336 bp, Oryza sativa
  unsure (1)..(336): unsure at all n locations
aactgcagcatgcaagcttcaatgacttcatcaataattggatcatgcctcttctccatattcttccaatcaacccactgcataagaataagccccctcttaagtgcaatcactatctcatagatatcctgctgaaaaaggtcctaaaccgaggatcagtggacaactggtgaaaattgtaaggatctttcttacactctttcttcactttaaaccacttgccgttcaccttacgactcttcgatgattattangaactttagagggagcagtgataaaaaaggcccttcttactagcagtttgctgacgggaatgtctcttctaactgaattctt

SEQ ID NO: 65031 - DNA, 358 bp, Oryza sativa
  unsure (1)..(358): unsure at all n locations
tgaccctcaacccacagcatattatttgtgatgaaaccggcggcccacgaaggcccaacccggntactcactaatagtgcccatcactaaacatggaaggtggaagagagaatggctattaatacaggagtagagaggaggattgtatactataaaatgctatggatgaatgagataggatgcacaccctcatatattgtgtctccactttngtagaattacggaactctctctgtctacttcctgtaggaggaggggtacgtatattattatccaaatcactgcatacagaatggtctgattgaatgcatttgtcacaagccgtctaggttttatgctttgcatgatacaattactc

SEQ ID NO: 65032 - DNA, 378 bp, Oryza sativa
agctttattatttctgtcacagtactctattctatggtgatgccttggctgtcattgtattctataaggagctaagagctgtgctcatggaccatgctgtctgatgtgcaatgccagcttgactgatagggctcaaaacagtcatgcccacagaatgcaagtgcttcatactgaatcagagctagcagcacactgaatgatataatcttcagtataaagactttaccttgaagagggatggcatctgtatattgaaacgggcctgtattgttatttctgagttctgacttagactagtcttgcatctgtgtgctcatgcgttatttctattccttctattgcttggtcaagatggcatttggagcctgtctgtggacc

SEQ ID NO: 65033 - DNA, 229 bp, Oryza sativa
  unsure (1)..(229): unsure at all n locations
atatatcgcttagtctcgaattatttctcttattcatgtataagaattaagtataacatcctagtttaccagtgtaccttctggctcanaaatgtcatcaccaacaatgatgtaatacactcctttggcaattggcttgcttatctcgtatcactacacattatgattcactcagatacaaactgagagtagtgaagtgctagtgatataagtgcataacgaaacatat

SEQ ID NO: 65034 - DNA, 400 bp, Oryza sativa
tagcttcaaacttatcggagcttatgagactcctatacttctttgcgcaaacctctagccttcacacatacattaataagacagagatctacccgatcagatgtgagaacatcaacctcgtatctcttctcgcaaatttccctggtatggtaaagcagttcccttgccgctacctcggtctgcctctccatatccgaaagctaaggagaaatgacttcctgccgttaatcgaaaaaattggctcgcgaattcccggctggaaagggaggttctttacttcagccgtgaggaaaacactggtccaatcggtcctaagctctatgccaatttatcacttcaccgcattgcaagtgcccaaatgggtgataaaaagaattgatcgctttacgagatcttttct

SEQ ID NO: 65035 - DNA, 342 bp, Oryza sativa
agcttgaggttgctacagataagaattaccaggctgcttgctccagagggcgattgtccactgttttgccaatccactgttgatcatttccttcaacaattctaggatgggagtagttaattcccttccatagaatgtaaaaatgcatttcattgacagaaaatataatacctggacatgacggcaggctttgcagggcaaactacataaggatgaccgcaatctacatatacaagttggacacttggactctggaatattctggttttggtaccaatgcacacagagatgtaccatgtgtgcattggtgaaagaacaatgcaatgctttatgtcatttgac

SEQ ID NO: 65036 - DNA, 192 bp, Oryza sativa
acaaagagctggttgtcgatcaagagttgctactatgctgcatatctcaaagattcaggtgcaacgtatatgtactctctcagattaaataatcattggcacggtggcttaccctctcccctgaattccacgagacactgcttcttcttggtctgggcgggtgacagaacacaatcatttatagccccaatc

SEQ ID NO: 65037 - DNA, 358 bp, Oryza sativa
  unsure (1)..(358): unsure at all n locations
tgccgttcgcggtacataaaatactcaaccagggctgtctccctataaggagcgaggtatatgaatgtagcatgggaatccgccatattacctactacaatagtgtataccatgggcccctcttatggaaagtaggtactacttgagctacggaggatgctctttgaccgatagctacataaacacatattacatctcgccctttntgattgagaattggatctgcagctactgctgttatgccggtttgtctgtccccaataattaactctcgctgaccgcgcccaataggaatcatcgaatcgatagcaataagcacccgttgaaagggttcatatacagaaacgcctggaaatat

SEQ ID NO: 65038 - DNA, 440 bp, Oryza sativa
  unsure (1)..(440): unsure at all n locations
agcttagctattntagctctcagtgaatctttctcttcttctagagatgcctataaaaaagaatagttacttagccaatggggcatgttcttacaaactactgcctctaattctgaatgtaagtcattntagactttgcatcctttgtcaaagaacaaattgaaaactgtagcataatttaacttaacaaattataaaaagcaaagttgtttaacaccacaatcatcaagtatccgagtagtatgtatacaaagggggttatataagaaagcttaagatcaaagcataaatgcctctaaaaagagaagaaaagagagagtatcaacatggccctcatttttgcactattntcaccatacaattggagcgtacgccacgataaatgtcttctaaatagtggatatagaatcaaacaattcatagatgtgtaataactcaat

SEQ ID NO: 65039 - DNA, 362 bp, Oryza sativa
  unsure (1)..(362): unsure at all n locations
tgatggtgctgaataatcggataatcaagttgtggattctcttaatgaacccaacagaagtaatacanggaagaagcggtgaagaccaaataaagtgtaagcagagcacgaggacagtaaccaactcttcaacgggaaacaccttggcgaagacaatggngtaattactcagccttcagtgtgttctatgagtggttttgagcatgtactggatcatgccttgatacaaattttagtcctgtattagctatttgacaataatatgagataccttgtcaccagttaaagtcatgatgctggcagagtcaaaactacacaacatttagtaattatgattcagtgttttgtaatctattatcatc

SEQ ID NO: 65040 - DNA, 512 bp, Oryza sativa
  unsure (1)..(512): unsure at all n locations
tgcacganagcacaaacgttataccttccttgattccttgcgatcactgctatgtctacgagactctntagagtcatccttctcatccctttcagagctcacatcatctgcagtgtcatggtggngtctcttatgcttcttttccttggccttttctcttttcttgactattgagccatggctatctgcatcaacagcatcaatatccatctcatctttcctcgaccgatcctttcctttggccctttctctttctttctccttgtctctttctctttctttgcggtctttctccttctgttctttctctttactgcgctctttctcttcacgttccttctcttttcttgcctgaatagaagatacaaattcacgcgagaaaaacataagtctatgctacacctgacaaagnacagatgctgctgatacaacatacaagttactgatgttcaaccatgttatacacattctgacaccttcatgaaatgcatgtaaccatatatcatatgata

SEQ ID NO: 65041 - DNA, 94 bp, Oryza sativa
ctttctacaacgtatatgagttctattcataatccacgggccttatcaagttcttcagcagctggattggaaatctgcacagtgaatccatata

SEQ ID NO: 65042 - DNA, 389 bp, Oryza sativa
agcttaatcaaatttataagaaatatatgaatattgtcaatacataacaaacatattataaaaatatattcaatgtaaaatgtaatgaaactaattttatgttatagatgttgctaactttcttcatagacttggtcaaaataaaaaactttaactatgaataaaaaagtcatataacttataatttgaaacagagtgaatactacaaatcacaaaacggcattagctaagtatctactccctccgtactccaattagatgtcgttttggcatcgctcgcgttttcgcataggatgtcgctgtacgctcggaggaaaggaggtggacgtgtttgcccctgcgcatgcgtgctcgtcgtccgcagtaatcacgcgcattaatcgtgcctg

SEQ ID NO: 65043 - DNA, 310 bp, Oryza sativa
  unsure (1)..(310): unsure at all n locations
tacgcctangacaccagaatatcgaaccatgaacgaagaaaggcatgagagaaatattggctagtaattgtgaagcctcaactcttgactggaagggacaccaaaggcctctgccctccctctctatctatccaagagatggaatggcagagctctcttttgtgttttcatctttttatcaaagagtcgaacaatgaatatagatgcaantgcctgatcgatttgatcaggcgtgtangaacaaggttcatatcgatctgtcgttatgatgcctcagctgcatacatcactgcactttcacttgacacct

SEQ ID NO: 65044 - DNA, 343 bp, Oryza sativa
tatcaaatcaatgataatcataaccgtaggcactataagaaacagaatagtatcagagatttcagttatgaagcacctttgattgccacaatgttaattggtcacattatcaaaatatgtaggtacttggtttattaaagaccaaaattattagaagtaacatggagcacctgagtacctgactatatgagaatgaacaagccgtgaatttccaagccatcttaattctctgacagtgctgctatggacagcaaagctaacagatattgcattaactaaaacatcaacaatttcaatagtccccattctgaggtcctacagcaacaagtggtactgctggagc

SEQ ID NO: 65045 - DNA, 412 bp, Oryza sativa
  unsure (1)..(412): unsure at all n locations
catcgctagctagccatcaatcgtgacccggcaagcagttaagataagaagctntgacttttttttttaagttatatttatagatgctggatcaaatttataaaaaatagcaatattttcaacacttaaacttagaatatatattcaatggctaatgtaattaaattaatttaatgaagatgttgataaaattttctttataaatgtgatcaaatctaaaaaggtttgacagaaaataatcaagacatcctctaatacgaaagagagggactactatttatttatgatgtcctacctccgtccaataaaaatgacaatgctagctccgcccaataaaaatgacaatgctagctaatttatgacatattaggaggatagacaaatgacctcacctattcatntatagacaact

SEQ ID NO: 65046 - DNA, 255 bp, Oryza sativa
atcgagggatatgaattattggagtttaaatgaatatttctggactaggagatgagttgtctgacatttctggagtacgagaaatggtttatggaatttatataaataatattctcaagactattatgacattcactgacatacgggctcgaggggaccgaatattggaatctcacgactaagaggatgggttatggaattcggatatatgaaacgattattgatttctagacagagaatatgtgtgggtattgg

SEQ ID NO: 65047 - DNA, 384 bp, Oryza sativa
  unsure (1)..(384): unsure at all n locations
caagctgatccatctagtggagcacgtgttcttgtctaaaataatggcgaaacccggcacccaggtaagtcctgatttgcctgtccattgtgttgatcaggaacagaatgttcaccctgaagctgttttgcgtcggcaattgatcaagcgaggtggtgcggcggctccctatggtctgattcgctggagtggattgcctgaagagctggctacctgggagaacctgcgctaacttcgacaacgcttccctgatgctccagcttgnggtcaagctgttccttaagggaagggaattgtcacgcctagctattatttggcctacattgttattgtgcctgcattgttattgggccaatgagccgtgtaacgagacttgtatccatg

SEQ ID NO: 65048 - DNA, 289 bp, Oryza sativa
  unsure (1)..(289): unsure at all n locations
atgtgtccatctggctatgagatgcgaatggtagctaccatgtagtgcggtcaaccctgtgtgattgtgtatatgttgattacaagatnggacaacttatgaagttgtcaagagtcttactttgtttatgattactgncaatctgctggccactttctattgataaaattgtcgagacatcaaagagtgcagccaacaccgatgccagttttctggtttatgtattcttttagcctactttgactaatttgaggcatgacaaccatcttgatccaactccgattcacaa

SEQ ID NO: 65049 - DNA, 298 bp, Oryza sativa
  unsure (1)..(298): unsure at all n locations
agaatctgccacaattaccacatttcggatagttgattggttgccctcctgagctccgcgaaggaaacgctctggggctaatggcattcttcgcaaatatagcagagagcatacaaaacatgtgaattcatgacgaagaatacgtccttgaggagaaactgacgtgcctctcggaattggaagacgacggaattgatgttatggccctgaaagagcggcttgaaaacctcgtgagcattaataatcaccatacataactcatgaagacaacagcangattggatcaattcatgcttga

SEQ ID NO: 65050 - DNA, 292 bp, Oryza sativa
taccaaacatgaagtgtgatgtgaaccgaactggcttggcctgtataacagccatcttgaggtacctcacctcacaatagactgacctacttattttcttataatacttgtcatctcaaaacattggtatgttatagaaatttgcagtgcattaccttgtttagtctcgtcatagcgggacataataaccccatgtggggtgatgcggcataactacattatcccatcattggctaatcctatgccactaatgatctactgtctcacgtttcgtgatgagacatacgcgtcg

SEQ ID NO: 65051 - DNA, 224 bp, Oryza sativa
ggactccgggaataaacgagctattggctgacagagccttcattatatgtactcacgctactctttgaatgggtggaatgaggcctcaattcgacgttctgttctgaaattttgatgaacaatgagattctatcttaagtatttggttatcaaatattgtagttccagaatgatcctatgaactgaaatttctgttagacacaggtgttcatatacaacatgct

SEQ ID NO: 65052 - DNA, 267 bp, Oryza sativa
aatggtcttctcttctatgcggccactcaacggttaaaacctgaccccaaaaaaagagtctttttaaacgtagtggctacttgagacctggagtttagtcacgtcacaaataatacactcatctccgttcattgagcactgagtcctgtacagatcaccccataagttgaaaaaaagccaccttttacataaatacttctcgaaccaaagaaaaatctctgccatgcttatcaacttcatcccccttgatataaaatgatttggtca

SEQ ID NO: 65053 - DNA, 406 bp, Oryza sativa
  unsure (1)..(406): unsure at all n locations
agcttccaaaaatccgcttccaattcgcgaaactacactagtcgtaagcgccaaatccaaccgacgatgtcgctgatccgccgcagcaacgtgttcgaccccttctccctcgacctctgggaccccttcgacggcttccccttcggctccggcggcagcagcagcggcagcatcttcccgtccttcccgcgcggcgcctcctacgagaccgcggncttcgccggcgcgcggatcgactggaaggagacgcccgaggcgcacgtgttcaaggcggacgtgccggtgctgaagaatgaggaggtcaaggtggaggtggacgacggcaacatcctgcagatcagcggcgagcgcaacaaggagcatgaggagaagacggaccagtggcaccgcgtggagcgcagcagcg

SEQ ID NO: 65054 - DNA, 358 bp, Oryza sativa
  unsure (1)..(358): unsure at all n locations
agctcgcanatatatatggtgttaagtgataacatagttatatctctagtccatgttgcaattattctcctatcattngatttattgttaaatatactttgatgtatacatatagttttatatattttataaaagtgtctaaataagacgaacgatcacatgtgctaaatagtaaacggcatcaaatatttaaagaaaaagggagtacattttagttacttttagctaaaaaataattttttgactagttatttattagggaaaagcgtgataccacaaatatagtaaatatagctgctcccattggttttgacatgcacgcacattacacgtgtgcaggcaccgcgcaatgccaatg

SEQ ID NO: 65055 - DNA, 285 bp, Oryza sativa
tggtcattgaattatcctaagatacttaaggtgcctgttggctgttgccctgagttaaatacacagctgtggcagcgtaaggatccatgttcaacaacacaattacaatctgaacaagataatagcaggactcagaagtcattaatcggacagtcacaatcattaagctcaatgtaagcagcttgatgcgcatagacaatgaaacgttgggggctatgaactctatggaggccatagtgagcaagtatcagatacagagcataggatattgatggattcttcatg

SEQ ID NO: 65056 - DNA, 183 bp, Oryza sativa
  unsure (1)..(183): unsure at all n locations
ctcaatttggttctgttatcgcttgccactatcctcttccgtcttgcatatatcatgcattactgatgtgatcatcattngngtactcgcagcatttgtcacgctacttcaaacaatctgccataacaatggagcagcagttccacaaagagtctaggttctatggctcattaatcacgcatg

SEQ ID NO: 65057 - DNA, 446 bp, Oryza sativa
agcttgtctacctcagatcacaataggcaggacttttattattacattaaactaatcacactatgacatagaagtataatacatcttataattgggtttactcctttcaagcctataggaaaagatatctacataatcatatattaaatatgttgattaaaaaacaaagttaatactaagtaaatttcataacaagaagataaaaatgcaattacaaaagggagtttcatctttcgattaccgtgtctatatgttaacgacccatcaacactatagttctgaacatattcatcgcaagaagatcatttggaaatgtggatccactcccacatcagatatccaaatttattcaaccatagaattctatgaatgtcctaagtatggcatactcctatatattctctccctaattgccagtaaattgagttgaaagcatgcatctatct

SEQ ID NO: 65058 - DNA, 310 bp, Oryza sativa
ttgtgtgatccactgctaagaaaagctgtgtcaacatgtctgagctgctcctaactgtttagaacaaatatgccacgatcaaattcagcgacacatcgagtgtctatgaaggccccttttgtcgaacatccataaccagtccttgcaaacatggttaggatggttttgtagactactttatccacagtaattctaccactatggcatacaaactcacagagggtaagggtccttgtccgcatcatactgatgccgggtgttactcaaaagaaatgtatatgacaatatcattgtggatgcaacatatcct

SEQ ID NO: 65059 - DNA, 163 bp, Oryza sativa
  unsure (1)..(163): unsure at all n locations
agctnggaagtgtgtgagtgaagtgacggagtgatgtctttatatagaggtaggtatgacgggtggcttatgggaaatgttccaagtgcccttcaacagtcatcacggatgcatctaagacgtccacgccaaaccccacattcaacggtggagatgatggttc

SEQ ID NO: 65060 - DNA, 483 bp, Oryza sativa
  unsure (1)..(483): unsure at all n locations
agcttcgtgaagaccttgagcaatgcatgttatcctttgatcaattgcccctataattgaaaagtcattattattttgtttgcaacttgcattattagaatcacacacttaacttgcttggcctcggtttgcgtgccaaaccgacggacctacccagtagtcgtactaatttacgtaggtcgtactaccctgattccttgtcgctccacccttgtggtacctcggtattcttgctctctgagcgcgtataccaaatatcccacaaacaccgttgtttgtcgaaaacttgggaaatgggtttgtgaagccttcaaaacccgacatgtggtgtcggtgtgtttgaaaaccaaatgaatcgtganaactcacgatgcggtggttgtgcctatgtggcactgtcccgtattcgcatataatgaccgatttctgtggaaactcatcgtacattatcaaagtgcaccacaaggtggaatgggacaccct

SEQ ID NO: 65061 - DNA, 373 bp, Oryza sativa
  unsure (1)..(373): unsure at all n locations
agcaccgcggctgcagcttgaaaggcttaatctccatagagaacacattatactgttggtncaatcggtgaagccttgactcgatgctacagataggcctcatcataccatcgttcaacctggagcagtataggtccatcttctccatcttagagagaagagtatccagctttccctcaatgcgactgaaaggatttggattttcatccatgagaggagtaacaagctgatctgtattcgacacactctgcgtctttgtcaaaggagcgtgtgtattttctggtggctgtatacgccatagaatagacttggaatcctttagctcataaggggtgccttttcataagtattggatcgccatctatgcaattag

SEQ ID NO: 65062 - DNA, 113 bp, Oryza sativa
ttatactacactctaacccgtgttttcgatttaccacaaaccaaatccccaatttttaccgggaacaagacttaaaacccccccattttttatcaagaacatgatatctaaaa

SEQ ID NO: 65063 - DNA, 209 bp, Oryza sativa
gagcttcgagagcaacagatgttgcgtactatctttatattatgtctattgcattcatacaactgcgcgattggattggtaactaaagaactagttaccgtttagccaacgaaacacttttaagtattactgtccgcacgataataatacgctccaacatttgatactctgtagataccacagtttcttctgttcctactatacgcatg

SEQ ID NO: 65064 - DNA, 170 bp, Oryza sativa
tttaacataattaatatctcgctattagattacgaatggctgggagttaagaactatgtccatatataagcggcacataatattgaaaattatctgagcaacaataattattagttttaaagaaattgaagtgtatctccaataccactttactgtatggaacatttgtg

SEQ ID NO: 65065 - DNA, 474 bp, Oryza sativa
  unsure (1)..(474): unsure at all n locations
agcttatntaatattngcacattgatttgccttttgttctgtaattatggcacaattctagaaatgtaccatcagatggctcggatgacagtaagtttgcaacgtgtgcagctgaagcatcaagcccttcaatatcatcacggccatccacggaagtgtgctccacattaaaccctggttcaatttcagtaaataggagaacggccatatcataatctgtagccaggttgcaccaaaagaaacggcctagaaaattaggaaagcaaagctgcatgcttcttttttccatatctatttctctgtgtttctctctgggcaagtcatagatggttcagaaacccacatgctgtgctagggaattcaccgaaagcaactacatggccggttggtgcagtaaggcaaatccattcgatctgcataatgatggtataagcttgagagttaataaacttataactagcatgaacattgcta

SEQ ID NO: 65066 - DNA, 337 bp, Oryza sativa
taatagtgaggctaactcccttttaataactacttagtcgcgggttcaattatatttgacatagattataaatggcacttatatttaatattatccattattgtcaacatcgattatacctagtatatgtggttgccttagtgaccgaatatatgtaagataattatgctactggacatatctatctttattattgccacactatttagggtactttaatcaatcctctgatattacaatccataaatataatgattctgctaataatgaactatatcttattggtaagctctgaaatatttggattaagtacaagttcattcaatacgcctatact

SEQ ID NO: 65067 - DNA, 393 bp, Oryza sativa
  unsure (1)..(393): unsure at all n locations
agcttgcccgcggtacaccgaacacgcacttatctgtgttcatctctatgccggcggagcggagactttcacaagattccgctagatccgagaataaagtctcttggttgcgcgtcttcacaaccaagtcattgacaaaagcctcaacaatacgggctatttggctacccaaagaaaattnaaggattcggtgtaaagaaagagactgattctttaacccgaagggcattgtcgcattacaaatagatcctatagggagtatgaaaggatgttttttctcatccttcctatacatgccaaactgatggttaccacaatatgcgtntacaatacacaaaaagtggcactccgcggtggaatcaccatctgatctatctaagcagggggaatggt

SEQ ID NO: 65068 - DNA, 279 bp, Oryza sativa
cccttaactgttgtatttgctaaaaaaacaatcctagtattacactaatggaattaagcagggaccatctatataacgagtcatctttattcctcaatagtcgctcagtaatatagttggtgaaaatcatcatctgaacagaaacaatataaaatgttcagcctgcatagaagcattggtgctttcagtcatatgtaccaaatattggatcttatgattgagaagtatcagtatagcccgcatgacagtgttagggactactacagttgagatattgtg

SEQ ID NO: 65069 - DNA, 508 bp, Oryza sativa
  unsure (1)..(508): unsure at all n locations
agcttctagtgctgcaccaagttccttggttctcatagtcagtcctatgcaagaggacgtcattagtgtgaggtcatagcaccacaaatatatgtaatgggttaaaacactaacctgagataaggaatatcccgaaggtgctgtactttgacagtgaatatttgtgagcaaggcatccgagtgtaggatccatgagggccagagcaatcccagcaattagagcttaacataagaaacacacaagctaagaaaatatgtacttgagcttgtctgagggatgcacagacacatctacggtatcatctncattgcaaggttgcaacatagagcaactaaaaagcacgtgcagaggaactaactagtgcataattgggttcacagaaacttngtgaatttggtaactggacccgtctaccctagcatttctcttgtctaatgaaatatcacggtcattaacaagtaaactagctggacgaatactcctattgcattacaatttatgagaatt

SEQ ID NO: 65070 - DNA, 420 bp, Oryza sativa
  unsure (1)..(420): unsure at all n locations
atacatggtaatatatgatcaaataaccagagaaatttccagacattccgtttctcatcatatatgaaacacaataacacaattccttttatataaacgcactataaacacatatacttacaacacacacactcatctctacgaacatacatacaaacaacctatctcaatgagcacatgcattcgaaagagtgagccgatatatcttgagattagcgaagtcaccacagatgcctcaatatcgatgggtattctatcctagtataaagntatcctccactaactctctanggctaacatgcanagatgacacatcatcatccactaataagataccacatcatctccactaattaacaagatgccacatcatcattcactaacaatcatcacanttaaacatcatgcagacatgctata

SEQ ID NO: 65071 - DNA, 365 bp, Oryza sativa
aacctatcacattcgttcacgccaaataccttaagacctagaaatatcctattgtgagcgataatcggtactctaggagaggaaaaacagtgctcgcgcttacaaattgagctacaagtatgttgcaataatatacacatcttcttacatcttatttcctctcatagcgcaaaactgacacggcataattgccacctactgagaactgattcaagctttgtcatttctgcttcaggctgttatccaccatactgaaatgaccgaagtgacatttgagaccatccttttatgtacaaatgctataaacaaccagactaggcattggaagtacttttactggaacaatttcaacataaaattttgtt

SEQ ID NO: 65072 - DNA, 252 bp, Oryza sativa
accttgttcttggttgagatgggtagccctctgagtgagctgtctatagagtcctagatcatcataaacggactcccgagtgaaaagttatagtgcggatactctgtgcttttgatgaatagtcacgaaataactactcggaaactgccgagaattttatggacattccgaaagaggctgctaatatgagatatgcttctgtaagatttcggacttggacgagaatgcatttctgaaactacagaaattaca

SEQ ID NO: 65073 - DNA, 239 bp, Oryza sativa
  unsure (1)..(239): unsure at all n locations
agcttatcaagtctactttcgaatggatacagcttcatgtccatatctgtgccggagcggcgcaattgcattctactcccgactattttctggncatcgcgctgcgtcatctttataggcccaatgggctgtgtatcctaattgggcccattaagggcgccgcctatggtacgagcacgaccctatggtcgttcttgccctcttcttataccatctagtcccacaaagaacaagctggt

SEQ ID NO: 65074 - DNA, 422 bp, Oryza sativa
  unsure (1)..(422): unsure at all n locations
agctttgagagagtatggctagctcttntcttctctccccctctttatcatcgcgccccacattttgtatgaggaagactatctttctctctctgttttatctctagtataggcatacctctctttcttttgagatatttggtgagtaaaggatatatatgacatggagtatctatttggcagtagtgatggatgaaaatagaaaatataattatgatggatgtagtggatgctaactttcaatgtactagacgtagcatatgtgtgcatatatgtggaggtgtgtgatcttgatcatatattgcgagaagcatctgacaaacgctacaagaatttcgaccaagatcaatgtgataacaagtaaccaaagtataacgttataatgaatatcactatttccgctctggtaggaatttgtatca

SEQ ID NO: 65075 - DNA, 218 bp, Oryza sativa
atttgtgatcccgacgtttctttaaataccccaaatgcttattaactattaataagttaaattcttgtacatataaaaacacgatggttaccgatatactcgcattttgtactccctttaaaccatttactcgccctgtacaaagacttttagcgaaccgttttgagtgctggaaggagttaagaaaggtgacttggatacgaaaagttatgaaaatc

SEQ ID NO: 65076 - DNA, 441 bp, Oryza sativa
catgcagctcgagcatcgcgaacaaggtgatccggataacctcattcatatcaacgattcggtccacctcttttcttgaacctaacattatccacagcttgagaaaatttgttagataacaaaaccaagtcctcctcctctaactgtgcgagttgctcatcggacatggcatcaaataaagcaagcacagaagacttcgatgaagaagcaccatcatccaaagaagtcgaggaagataccaaagcactcgacttataatcaattttacgagaaagaatattcatctcatgtgttatcagttttgtgtaaagcgaatccaaagtgaaagtacacatattatcagactcctgaattgatgtaattttcttctcccacatagacctgtctataccattcaaaagtgacgagaaacctctgattgtgagctattaacatcataag

SEQ ID NO: 65077 - DNA, 374 bp, Oryza sativa
cggacggaactcaatgcagctggtgcgctgggaagaggaggtaattatgtttattgactattaagaacagtatataatctctgcatgcatgggggaagtaactgattagagtgatatagggagacacaaaatagcacacgcaagccactatattcgcacaccacattgcgcgttatatgtgaggggttctgagcataggataatacatattggccgcacactagtgagcgaggttttgtcctgtgcaactgtttgagcctcgcaagggtagtacaagtgtttattagtaagcacacagaaagaacatctattttgcgggcatgctgctttgtgtggaactatctatgaatacataagagccttaatgagttcta

SEQ ID NO: 65078 - DNA, 309 bp, Oryza sativa
  unsure (1)..(309): unsure at all n locations
attgcaatgagctcgacaatataatgcatatgtatttatcggcggccagcccagcaacaatgacacacgttctttgtaaagttggagctgatgtgtcactattgtcacaagctccgcaatatcataatggttgtacatgggctctatcgttactcgttacataattcgnttgcgggttagtggatgaatgtngatgtatgaccngtgctcgtcggcccgtctaaccacaaanggtatagtttcgactagatctaaagtagtgagagaataatctttctctcaccacaataagccacatcactcaaatat

SEQ ID NO: 65079 - DNA, 308 bp, Oryza sativa
tgtgatatttgagctgccactacctatttttaatatgaacgcgcatattttttgcgtatgtgtcttgttttctactaacgatggcagggatacgcaagataattggggataacggtgctcaacatcgacatcttcttcgagacatgaggagtgatccacataccattatgagggaagggacaattttctaggtaagatcaaatctgcacttgcttatttctaaggaaactatgatcctcatgcttacattaatttggagctagcggctgatagcgaattttataagcatgtcttgtctgagaaacaaa

SEQ ID NO: 65080 - DNA, 455 bp, Oryza sativa
ttatttcttccacacagaagatgtcgtcgtcctcaatacttgtgccgcagttgtccccggggcaaacggtttgctaaacagctgaaatcgttacttatgcagtcaaatctgctttatgtcgtgagcggcagtgatttgtcaccctaaacaaaataagacaataaccgcggtaaacataatgaaccgacgcgtatgcgagatatattttcttagcatgctaatgatcgacgcgatgtaatataaaaggctaactatcatcggtgtgaattacaaaatatgtatgcatcaactaataaggatggaaatggcgctgtggaaaataacataatcaaattgtacatgaaaaatctatgttgggtggcacggagggtagactatatatagtagggaggcaatagatggagcatatcaatgggtctatcgtggacaagcatggcctcggctgaaccaattat

SEQ ID NO: 65081 - DNA, 428 bp, Oryza sativa
ggacccaagcactgtgctcagcttcgcaggtttatgccttagtttagatgcgcgactaaccgcgagataggtgtattcacccagcaatcattatcggccagcctgagacatacattttgggcattgttgctgggactcaaatctgggaccgtatgcggccccggcgggttgatatctgatgtcggacgaaggtcactaatggccgagcttattcgctccaaatcataacactcgcacttaattcataagggcatatgcccgttagagggctaccgtatatacggatatggccccaattataagaactcttcgcgatatggaagaatgggctaagcttgtttcctcactgccacccaaagcaaggcaatggagcggccaagcggaatctcaaggcttaaaccaaactttacatatcagaagacgggatt

SEQ ID NO: 65082 - DNA, 208 bp, Oryza sativa
gcaactgtagacacaccacgtgttatcccggtgttttatggtacacaaaaaacactgatgtgtggcttgcgcttcgggggctacttcaaaaaatacactcaggaggtattttgttgaaaaacaatttgtttttatttttaaagtctctctttgggaaaatagtatctatctcgcctatttaatctctgttaagatccgagacaaaaaa

SEQ ID NO: 65083 - DNA, 419 bp, Oryza sativa
acgatgtatatatgacgctgctagtgtcacgggcgggagggacgggcagtgttcggattctccagctccaacacaagttatttgaaagtgcaattctccgaatattgtatgagagtcccacctctaatactacaaaaattatagttagacattacccacttcatactagtgatttcgacttgtggtgatgcctacgtataaacttagtacacgagaggaacgagttttccgcatccacaatttatcctagacaatgacggggatataaatacgagtatctcggcggtggtattttaagaaaatatctcggggttgtataaacagaataaagggtgcggttgtagataatattcaatatggctctagtaatctatcggagacagattgggttatgacacataactatcaacaatataatt

SEQ ID NO: 65084 - DNA, 510 bp, Oryza sativa
  unsure (1)..(510): unsure at all n locations
agcttaggacaatgtgaacgaagatgattttgttcttcacactaaaagccaacgttaggaccgcctcttttcctgtttctgacactattcatagctcgaaaaactttgttagcaaccaaaaccaagtccttctcctcgaactgttcgagttgatcatcggacatggcattaaataaagcaagaacagaagacttcgatgaagaagcaccaacatccaatgaagttgtagacgataccaaagcactagacttagaatcacctttaagagaaagaatattcatctcatgagtntntagtttagcggaaagcgaatccaaagtcaaagtagacatgttaacatactcctggatagatgtaattttcatctcccaataaacatgtcaagactattcaaaagtggcgagaaatctcagattgtgtataattagcctcatacgaagaataacagatctagatcactcaaaatttcgttaacctaaaagatagtcatccaagctcctcaggatcatc

SEQ ID NO: 65085 - DNA, 162 bp, Oryza sativa
  unsure (1)..(162): unsure at all n locations
ctgaacatagagtcgagaactgtagcttcttgtcgtcgagtattcattgctcgagtgaatatacgcatataagatgtccgagtagacatcttgaatattggaacaccacttgttgtagtaaataacatggcattatacnttgtgacgcatgccaagatgtcg

SEQ ID NO: 65086 - DNA, 358 bp, Oryza sativa
atgccttctatttaaagggcaaaatttccgtggggttatcactggatttatcacctactagtggccggaaacgggttgtgactatggagctttataaccaacatactgggggcctctcaaagcgcggctccacccaaacaaatatatacttttagatgatttacttaaaattataaaaccttctattgcttagactttaaagaccaacctatatcatccgtcttaatattagctttaaaatacacagtgctcccctatgcatctatattaattgcttgtcgtctacactattcattattctttggacctttaaattgattatagtttatattatgcacgtgggttcattttaatttaa

SEQ ID NO: 65087 - DNA, 246 bp, Oryza sativa
  unsure (1)..(246): unsure at all n locations
atcatctactgagtccactggtatgatccactatatattatctcattgatggaaaatagacatagctctcattcttatcatccgactgtatatgatgcaacatgacattgtgtcaactctcaattataccctatgggtncaaatggccaaatcctctcttatattgacgcagtcccatagtcattgaatatgagttactaaaggtgacaacgataatatcgcttgttgatgacaatacgtgtcaac

SEQ ID NO: 65088 - DNA, 400 bp, Oryza sativa
agtcacctgcagctgcagctgcgccctaagcaggtgacgatggttcttgtctgtaaagaccacatgggctgcatgtgggtctctgctctcctgtggttgaatcctttccaatctttaggggccaccacttgttatttcaagtccaatttgaagaacctttcctaaaattcttttatccccacccttcggatgagcttgggttagcattcttttgtctgcattttatttgttttcctcttcttccgctgtcttaaatagactggattctcgtttccgatcaatcaggcacgcgtggacgcggatcgagttgttgaaccaactactgatgaacaggcagtactacgctccttctgagctgtgaccatttataatgctgttataataagtgctgctatataaa

SEQ ID NO: 65089 - DNA, 196 bp, Oryza sativa
tcatctacttaccttcgggtgtttatggactgattcagtttggttattgatctaggggggttaaagctcttgacatttgccgagaactgacataattttttctctgtccacaaacggtgcaaagacatctgttgtgaatgtgacatgtgatattaaatctaaaattggcgtggataactgctcttttcaaccgttc

SEQ ID NO: 65090 - DNA, 202 bp, Oryza sativa
cgtaggtgctctgatcttgacacacaacctgataaccagtgctcctgtagtaaatcacaggatgacgtttcttggtgttacggcagcttgcaagcttcacgtaccgctgaatctccaaagcaaggaatactatgtcctcgtgctacccgcaagcacctgcgatcgtaactatggtcagcgatcctcccgttattcttactta

SEQ ID NO: 65091 - DNA, 488 bp, Oryza sativa
  unsure (1)..(488): unsure at all n locations
agctngaatntatgtatatatatataacatacttatgtaaagntaaatatatgtttttatagtttaatgtttccatanttgttaccggtttctgatctgtaccgacatgtttccgtccgtattgttccgtttccggttttccgatatttccgatatcgttttcgtttccgactttaccgtttccgatttcgtttccgagaaaaatatggttacggaaatggttgaggctgttttccgatcgtttccgaccgttntcatccctagtcagaacatacgcaactgctgtcttattgttggcacggttaaatagttaatgacatgcttttcacttaccttattttggtaacatttcattaatatctataacttataataaagtaatagaanaaatagcctccacattagctctcaagatctagaaactttcatattaantggaatanaatgggaaaaaaaaaggaaactcattgagacaggattcttttttt

SEQ ID NO: 65092 - DNA, 189 bp, Oryza sativa
caccgagcactgcacttcccgagtggagtgtggagcacaacttctgggaaatcatgatctcagccccctgaccgggggaggaccccacacgggcatccgcggggcggtgtggcactacactgggggctgtcgcggactgctgctgtccgatcctgttcttatatctctctctatcactctattatcgcg

SEQ ID NO: 65093 - DNA, 239 bp, Oryza sativa
  unsure (1)..(239): unsure at all n locations
agcttgtcagacatagcgaacggcgggacgcgctccttgangggatccgacggcgttgctgccgccgtcnaccggttctttccgtggtcgccgcctccggtggcctcctcggtgccggagaacttgggaggacagtcggggtagtcgttactctgcgggtcgccggaatgcacggatggatcgcctgcgccacccgcttccgtctaggtggacaggaggcggcgtccccctgttacgac

SEQ ID NO: 65094 - DNA, 467 bp, Oryza sativa
ctgcagctatcagtgcattactacagatactttttaagaggctcaaaggcagaggaagatgggggatgtctggaatcacctggagatcaaccttgtggagcattgttgggaagatgaagtggcatgggatatggatagctctcatctacgcaatcacgctctccatatttccaggatacatcacagaggacgtgcactctgaggcgctgaaggactggtacccaatcatgctcatcactgcctacaatgtgttcgatcttgttggcaaatcacttcctgccttctacttcctcgagaatgcaaatatcgctgtcgctgggtcgtatgcacggctcctgttttaccctctcttctacggttgcctccatggacccagtttcttccgcaccgagatctcagtgaccattctgacatgtcttcttggatacaccaatggatacctgacctgcattctcatgaccctcgcg

SEQ ID NO: 65095 - DNA, 395 bp, Oryza sativa
  unsure (1)..(395): unsure at all n locations
gcttctgcagagtgagccaaaataaaaaccagcaacataaacaccaaacaaaatttcgaattcttcttcagatgggtagcaaaattgcgggagggggatttcatcacgccctanaaatttaaaaaaaaaacaaaattccttcgaacagcatcaggaatctaaaagcaaacacacgcacccataaacccccaaagaacaccagcaaaaatcttcgtaatctcaccgccgcgcaaaaccctaaccccccacgagacgaccagaccatatgatttaatttaccagaacaacctacccggnggctggttgggcatcaagaacttgcgtgtctccgccatgcgaccaccaccacccgacccggccagaaacgcgccgtcgatcgccggttcgccgtcctc

SEQ ID NO: 65096 - DNA, 401 bp, Oryza sativa
  unsure (1)..(401): unsure at all n locations
ctgtaactgcaccaatacttcctgtttactccttattaatctattctttatgagagagannatattgcatattgatcccatgctatgccagctatcctaatgtcacttattcatgagaaccacctgaacatctttgctcctgttcctttcagtcgcaacatanccaatntactgcttatcatttctagtgttctttaagttgaatgaaaatgggtatctattcgtgtttgaggacttccagcagaaatgattcttaaatgaaatctatatgccatatttcatgcannagtgtgctacatatgtcccaatggattacatattntcatgcaatgccatgcacatctcatattgaaatatatcctaatcacctagatgctctctacatagttggcttgctacat

SEQ ID NO: 65097 - DNA, 490 bp, Oryza sativa
  unsure (1)..(490): unsure at all n locations
agctnttggcttctgtttccaattctgccaatgaagagaattaagctntgcgtcctgcaggtccttacgttggataggtcttttgttaggacattgttntgtcccttctctcaaattctgttatgtccctttaagttacccatctcagttattctgttcgtcttgtcggttaagcttcagtttttgttcatggtcacgtttcttattatgtcagtctgtgacttttgtcagaatgtaattaaattatgttctggtttctcctattatcttttgttctcctatgaatagctccactagaaattggaatgttttgtgctggaatgtaaggcgactaaattctgatgataagtggagggcagttcggcagatgattgatgagagtggttgttcagtgttttgtcttcacgaaactaagagggacagctttgattctgcttatattaagaaacttgctcctaaaagattgatctctttttcttccttctgtgga

SEQ ID NO: 65098 - DNA, 276 bp, Oryza sativa
tctgaatgacccccaacgggcgctgtgtggagataaactaaaaatctctggtgaacatctacattgtgacccatcccaagtctggtttgaaaattaagcaccccattgcgcaaagaaaaaattgtgtctgctccagaattgatacagaaaagttgtaccttgctgagggcatcggatcagaggattaccacccacaatgtattgatccactctggaactgcaactgataaagcttgaagttccacccgatcagaacctgtattactagataatgca

SEQ ID NO: 65099 - DNA, 323 bp, Oryza sativa
  unsure (1)..(323): unsure at all n locations
agcttgcaatggtgaaagtgaaactcttctggattcatcangaaagggcaaaagcccaagataaatcgctctgcttttgagttggtgtcaccattaaggttggcaggattcacgaaagtaacatgagtggttgagatgaatcttaaccatgtactcgactatctcaagaactttgaggacgatgcatgattgataattaaaaaaaaaactaaagacttcattaattcaacacacaacaaactcactccttgcaaccaagtgaagaaacaaagttccttctcgcttcaacttatacaagtaccctagttgcggttgtttacaat

SEQ ID NO: 65100 - DNA, 436 bp, Oryza sativa
ggcatgcgacgatattaatcgatgagtacgccctgctgggctggcgcgccatgctgactgaagtcaatctgtcaccgaaaccaggcctcgaggatcgcattaactgcggagcgcacaaagatatggcgctggaagatttccaccgcagcgcgctggcgatatacggctggctaccccgttccattgaatttggtgcctgtagtgcggaaatggcaccagaagcggaactccacggattacacccaataggtaaggctagcaaatgagatatgttccccgccaatgcgggcgtaaacacgcataaaggcagctatttgtctttacggctgatatgtgcggcaattggccgtttgcttcaactcaaccaaccggcaactgccacaaccgtttgttctaccgcggtaaatttatggcgagggctgaccgatcgagaact

SEQ ID NO: 65101 - DNA, 183 bp, Oryza sativa
aaaacacagtaaattcgaatatacaagtagagatcttttacccctaaaccctgcacaaataatgagggacaactgaacctcatttcctagacacctcatatacaatccctcccctggcgccccgcacgcatcgggtttggaaggcatcactcactcgcgatttagatttgaattttacgataa

SEQ ID NO: 65102 - DNA, 469 bp, Oryza sativa
  unsure (1)..(469): unsure at all n locations
cttgtcgacaacggcgtcaacaccggccccattcaaggagtccctacttcaacaatgctggngtggactcaagtcagcgaaattggtttcccggtttacaccacggtaccaatctcggctggtccatcaatgaccggaaacgagaacgccgtagctataacctcaaacgaccctgtgtcgaaggatcctcccgccatagcggagaacagaacatcgacgtcatacgagtccgagaaggttcctagtgcggccaaaccttgttcttccgacaagaaccatgagctgatcaggacaacttncgaggtaacaaagtactgttgtcccatccacaagttcaggaagcacaacttgcaagcttgctggtttttctaacgacatgctgaaatcatgcttgaatgagcgtggaatcagcgacttctcaactcgtgatgctattgcctattacaagacaagaatacgaatctaagct

SEQ ID NO: 65103 - DNA, 465 bp, Oryza sativa
actaagctctcagatgcatattctatgatctgagaggaaaccatgatagcttttgtgttctcttacctcggggggaccatgatttctatcacatgtatagtatcaatgccatactaagacgacacagtcgtgtccagagcatcactttggaggtcagagctgcaagttatgcatgatcgaatgtcttcaacttgccatttcgaggaagaatgcgttcatattatatatacatggtcctgtacgataacacctaatgccaaattctgtttgcgatcattcttttaataacatctacgtcatattaatatggtcagaattatgaaattatctgcagaacagtggccggaagcatctgttcgtcgctctcatgcacagtggctatggtcttagggaccgaccatctattgggcatcaactgacagcaactatagaatggatcagcacttctcatgggaactgactcac

SEQ ID NO: 65104 - DNA, 453 bp, Oryza sativa
  unsure (1)..(453): unsure at all n locations
gcgaccacagaaactaagctcgcaacctttattggtatgtntagctctgtcgttggaagtcttgatgttgggacaacatgttatcacacttattgcactggaaaacaataaagagaagatctgtagatgtttntttttccatagagaaaagaggaatgtaggtcaattccgctgatttgtttctaaggcatttgcttgttacaaaatatgtccatgttaattattatgaatttatgatgtacaagttgcagccgtacatgcagctagctagctggttaagcatgactgacacatttctggttcagcgatcttattcagtattaaattcaagtctaaagaggcttatattataggtgaacaacactcaaatattacttgtgtgcatattgacgaaactaagtaattccaaacacaatttgcaagaagataatcattttgtattgactcctaaca

SEQ ID NO: 65105 - DNA, 490 bp, Oryza sativa
  unsure (1)..(490): unsure at all n locations
ntgtagtgctggtcaagccggcaagcaagttgcatgttctcatcctactaagagtatcatgtccacatctagaccattggagctcttgcatatggatttgtttggcccaacaacctataagagcattggtggtaatagtcattgtcttgtgattgttgatgattattctcactatacttgggtattctttttgcatgataagtctattgttgccgaacttttcaaaaagtttgcaaaaagggcccaaaatgaatttagttgcactcttgtgaaaattagaagtgacaatggttccgaatttaagaattccaatatcgaggactattgtgatgatcttggtatcaaacacgagctttccgctacctactcacctcaacaaaatggtgtagtggacaggaaaaatcgtacattgattgagatggcaaggactatgctagatgaatatggtgtttccgattacttttgggcggaagccataaacatcgcttgc

SEQ ID NO: 65106 - DNA, 315 bp, Oryza sativa
  unsure (1)..(315): unsure at all n locations
cgtcgtcaacatcctcaactagctcaacgatgaccaacaatctttcgcagccggaatggcagctgaccagctaacaacttttctgaaattccttttttgtgctatagagtctttacaattaagtacctcgatcacgagcgagaacaccttacaatctggaagccactggcccctccccgctgtcgctacttcctctggttaggtcgcagcgaatagatgctaagctactgatcgtcttcgccatcggagccggtgctcccccaccctgtccactgtggtctntgcaatcaacatgaacagagtatagatcatatc

SEQ ID NO: 65107 - DNA, 482 bp, Oryza sativa
  unsure (1)..(482): unsure at all n locations
tctttggtccagaaaataagaagaacaatcttcttgttatgttgtttaatatgcgggtcatgaaatgctgaaattggctgttcaagcacatggtttgttttgaacattcctttntaatgttagcctttagaactagtggttttcatttgcgagaagataaaagtagcagaatggagatacacctttcttatatggttgagcaattgcactccagacaggttatttattactatgcgcagataattaaatctaatgcagnttgtttgtattttctgccattgtgctcatctgatcaagagctataaataatatgcttattttggttcttagtctgtcagactgattcggaacgtgttctatgtgaatattgcagagctttggccttggatgggctgttggatcacagcctctgttcctggctcttttcattagctctattcttggaacagcatattcgattaatgtaagagacatatatcttt

SEQ ID NO: 65108 - DNA, 456 bp, Oryza sativa
  unsure (1)..(456): unsure at all n locations
ctcagcttgcaaaagaattgtggctcaataatctgaacaccacatgtatccttggctctcatctgattctcatcagnttatcagctgtcaccccttcgtgacatgaaactgatccccaattcatgttcagagaggcctggtccggcgccccgaggcccgaccgcagaggagcgcgttctttgggatcgggttctcgtgccgccatgagttcgccggagagtagacccggaggtagaattgttggccgatgtactgtctagcccagctctctgacctgatgttccacatcctcacattatccacaggcatgtatattgcagtccatgattgaggatacacctgagnaaagtagatcatgtgcaagcaggtcatatgaattgcgcaatcatggagcatttccatatatggtctattgtgcttcttgtaatgacatgatcagaatatactgctcgatgc

SEQ ID NO: 65109 - DNA, 463 bp, Oryza sativa
  unsure (1)..(463): unsure at all n locations
tgaaggagccagggataaagtcgctaatgccgctactccacttatccaggccatgttcttcaataacgctggttcgagtacacttgatgctgccgaaatcttcgacaagctgagagtcgctccagatacttacttcaagaacatcaaagaagctggaagtatgggagcgagtctggcgttggcgatgaccaaatccctttatccaagagttgacattgatgccattgatggctttgcagatgggacgagcgaagaagctgctctcgacctcatcagtgatgcgcagaaagcggctgacaagattgctgctgatgtagttgagagattccaagatgtcgaccttctgccgactgggtctgataagtctaatgatgacaaaactgatactgattgatataacaatgattttgatgatcaatgacagtggaggctcaattngtacaatactgatgaatatatgcta

SEQ ID NO: 65110 - DNA, 246 bp, Oryza sativa
actagaccttggctaaaaataagaggaacgggaagtatatttatttctgcacgacacgcgaattgctggttacatcatgctagtttgagattacgatcgatgttctcgtttcgacccttgctgttctttctttacctaacatgactgaaacggatattacacctacctgtttcggctaaccgttcggggcaaaatacggctgatatggcactgcacgcaggatccattgggaggcctctctggtgg

SEQ ID NO: 65111 - DNA, 472 bp, Oryza sativa
acacttgaaactcaagctctggatgaatgaatgaatgagcctgttcctgatctaattatgatgatcaggggagcggctattggctctcacactctgaccagcgctttatctgaagcgacctcacctacctacctccattgtttgcccatgatgagcatgcctgccctagcttagtggctcacttcgtcccaacacttacatactactgctacatatctgatcgatctaagaccctgtttaatacagcttcagctctagttctacctcttctggagctgaggttcagccagacagtttcagcttcatctaagatgatagcggagctggatggagcgctctcacacgataaactagagatgtggagctaggttttggacgctccacaacttcactccatacttaaattctgaagcttaattttagagtgtgagctctaccacatagggctaacaatactatatcatttaccgct

SEQ ID NO: 65112 - DNA, 493 bp, Oryza sativa
  unsure (1)..(493): unsure at all n locations
ntaactactcattctcataatatattatctatgctaggtggaaagaaaagagaaagataatctattcctatacttctaatatacatagtatacatacatcctagttagctgatatactagctaataccctctttccgatgccctcctggtacttcgagaagccacccctgactgccgagttccttaagacagcccgttataaccatacatcaggggctaaatacggaggagtacccaccccaggaaattaacttaggattatatataggcgtggaggaatacccgtactgatctgtcaccataagcggcccacctctcatccgcaatatataacccctaataatgatatcccgtaatctagacaccacatctaaactaccagatactactctaatatcatcatcatgacatagagtaattgcataagcaaacattatacctgcaccaaagcattctccagataagctagccgtatattcagtataacaacagc

SEQ ID NO: 65113 - DNA, 428 bp, Oryza sativa
  unsure (1)..(428): unsure at all n locations
cttgtatgggtgatatgcatgcntttatatatagtatgcaggagcatgatatgttatatgtgcttccaacactaatcacgcacttggtctataatctatgtcctatactgcgtctatgcctatgatgtatttgtgatgtatatggcattggattgttccaatttgtattgttggacaatgtttttgacaagataaattcctcagtaaactaataagcattagaagtattctctagataactcttctttcacccatatgttttattttctttatatgtccatgttcatttattctgatcagtgtccgtggctttaccgcggggcacgacctaattcacctatacgtttctgtctcattgatttttacctgttgccctgtagttgccctactcgcgaacaggaaccaccacgatcttcatggtccgatta

SEQ ID NO: 65114 - DNA, 457 bp, Oryza sativa
  unsure (1)..(457): unsure at all n locations
ctaagcttgtcagnttcatagtaaacacacaaagctaccagcacaagcgctcataactatttctctcacttggctgttctcgcgctggggactcgacatactcggaccattcccacgaggacagggcggtcacagattcctgttcgtggcgatcgacaagttcaccaagtggatcgaatcgacaccaacggnggaaatcaaggctgacaacgccatcaaattcgtcaaagggatattctgtagatatggattgccccaccgcatcataatgaacaacggctcccagttcatcaatgccgacttccaggaatactgcatcaggctgcgagtcaagatctgtttcgcctcggttcttaccctcatgaaatggacggttagagggcaacgacatatactcaaggatcagactcgtgctacgacggctatgtacatgaaagaagggcgtaagaactccctg

SEQ ID NO: 65115 - DNA, 459 bp, Oryza sativa
  unsure (1)..(459): unsure at all n locations
tctgcgactcgtttaattacggcggtaactgctangggaaaaacgtctcgtttagnttatgtttttagggaaaaaaggttgtcatagtgtgttttaagttttaaccgtgtgggcttgcgcatggtgaacgtggtcgaaaattccgacgtagttggacccgagccggactcgagggagaccggcaggtgagaaaggtgaaagaataggggaaaggtgagatctgcttcgttcgtgtaggtgaagaaattcgaaattcttcacgtttttcacctgccagaattaccaaatcccaactgttcaagagtacaggagtagcaccagtaaactttctataaaaaaaaagagtagcagcagcagcgggagtggattttaatcgatgtccactcgttgtttacatgccactcanatagtnttgaaacaaattataaaagtgttgggaagatgtattaacatgtgata

SEQ ID NO: 65116 - DNA, 462 bp, Oryza sativa
  unsure (1)..(462): unsure at all n locations
taccacttcaatctcctcttcagttaacaatctggaagaactgccattaccatcatgcacttcgctaccacgataaatacttccatacatgtttaaaaaactctgctgagttcttagcttcccttatcatgtaatctggtggttgacccctacagaaattgaattaaggaaaataaaattacattagtaaaagcattataatatgatgaactccaatataacagtatttctagaaagagatctaaatgcatggaccaacaacattgcactaagaaaaatgcatatgctctacgaagcataaatgactgcatgccanacagcagagctagaagagaattacaggtaaagcccttacccaagaatntgtaccactgcgctgagcacatcatattctgatgctnccggaaataatggaaggcctaaatatagttcagcaactatgcagccaaatgaccacatgtc

SEQ ID NO: 65117 - DNA, 327 bp, Oryza sativa
agcttcatgatgatcgccacgcatggatagaatcctgagacgacaatagtctctattaattaggagatcttacgctggggccttacagatctgttagcgctcaagtctgccgctgagactcatggaatcatagaggttgcgagagataagagtcccgtgcgaagtgtacatatcttcgaaatctcgggtatcgatagaccccgcgccccatgtcatcaaactaatacacattcaatacgatctccgcgcatcatcacccttttactttggttttggttcgaccaggtcttgctttcaggttgagttgcatcgattgcgatcttcaac

SEQ ID NO: 65118 - DNA, 487 bp, Oryza sativa
  unsure (1)..(487): unsure at all n locations
tcgtctcaaggtggggggaatgtcacggtggcgacctcacctgtctacaatgcaggacaagcaacagaggctcagttgggaagtcggtccaggtgcacaagatgaccgaacacgcgattcccggagagtgagtggacccagtagtcataggctgggccactgtcagagagagagagaggctgaatagtaaattgctatataagccgacagggtaacaagttggggaattcgaagattgtattacaaacaaactcaaatctaattccaactctcccctgttcttcatctggtcttcatctctagctctgttcttccccttctttctgcttccgatccaatttcttccttctttcaagtgttttctgctgcagagaaactaggatcgtgacactccgtccncgtccaccagtaccaccaaggatgccgggcaagcgcgggagaagcgggcgctgccgttgccatccaccgtgtcgacttgcgccggagg

SEQ ID NO: 65119 - DNA, 439 bp, Oryza sativa
tgggtcaatcactgggtctgagcaagcattatgcatagagaactgtcaaatgtcgatggaaccaaatacatgtacacctatgagcagcttataagaacaagaaagaagtacccagctaatctggtcagttgatatgtggtaccctgtacatcacgccacacagcagccaatggttatttatggcgcgacggactctgttttttttttacttcagctgcattattttttgtttcagaatattcacttgcatagagtagcatgaaaactgaatctctttctcggattcaatatgtgagatgcttcagacagatgtacgatctggaggactgaggcttctgtggagctaacataacacatcgaatgctggagagaaagcgagaatcagagatgagatgtgccagtcagtccagcccagccatatgcccctgaatttcaatca

SEQ ID NO: 65120 - DNA, 288 bp, Oryza sativa
tcctttatcttctctactagtgtgacggaattgtacctaaaaaatttctactaccatacggatgagtcgatgagactaattaacatgtgaatatgcagatttagagacctatgaggaagaggatggggagtacaccaaccttgggaatatttgtcgcggactctgggaggaggcgggacgcgacgggcggcggtcgatggcggtgcgggtctagggtttcagcagtggtacgagttgaggaaggcgcgatgagggaggagtcggcggcgtctggtgaccgtgtgagtg

SEQ ID NO: 65121 - DNA, 487 bp, Oryza sativa
  unsure (1)..(487): unsure at all n locations
ctaagcttggtnggaaaagattaaaaggctttaaacaaactaataatctgactttgccttgctcagatagntctcggattcaagctttttaaaagttgggtattcgcagctccacacatctataggtagctttacaaattcaacatagactatatgtggctttacaaattcgtagatctggatttatgattacgctgataacatatgaatgaatcattctgtttctaatttagattaaatatgcaatttcaaactactataattagacatataaacttcatatccaacgtggatctggaatctaaagctgtgtcatacacgacataatagacaaaacaaataaggcgagctaaagcctttnttagagcctgtgtccaacctctaatatattcagaattaagcttcttctcttctgaaattaggagattatttctttcagaaaaatctgaacatatgacaacgcatacactcatataaatgcgcatat

SEQ ID NO: 65122 - DNA, 136 bp, Oryza sativa
ttgaaaccgccgatattgggggctagaactaaggggcttgttctccaatctaatgtcgtgggagccagtttgactgtgttggaccaaactgattaaagatcgagcacgcttctattattacatggctcggcctgat

SEQ ID NO: 65123 - DNA, 459 bp, Oryza sativa
  unsure (1)..(459): unsure at all n locations
tccatagntaaagtacaagtatgaagataatcattcgaaataatatttgatgatatagtagtaagaaggaagacttaggatcagatggccacaccatgaaggagcatgtgtacagcatttcagtcatcaacgtaagacacatataactttgtttgtctccattgtattctttactagtactgtgcaactgcaaaatttttttgcaaggttgaatatttgttcaatcacgtaattaactacacaaatttgttagaattaacactgcgatgtcatgccactattgtgtaacaacggcgtgcatctcctgcaaatgataaaacacaggaagtaagatcatagatacaatttggattgtatactacacaattacaagaatcatcaaatacaagcatgtntacaccagaaaaaacaaatatatggtaagaaaacaaagagggaatgcagaagatactttgcgtc

SEQ ID NO: 65124 - DNA, 488 bp, Oryza sativa
  unsure (1)..(488): unsure at all n locations
ntcatggccanacaagataaccacaatcatcgctttgagatccaccaccaatgtccacagggaagagcgccaacccttgcaggtctgctcattggaaaattgaagaatggccggcgtaaccttttattgcttgtggatttgaaggactacatgttacagatgttgataaccaaagcatcggttctaagcctgacgggtgctagctagacggcatcttccgagaccaagtctagcagatccatccatggcatgacaccgccaggacaaaggagacagaagtcgacatctcctttaatctttacaagaaaggtggnggagggggacaaaggatctgtaacataatttacccgactatgggacgagcttgagcactcccccggaccccccctccctccaatcctttcaccggcaaccaccggggacgaagaggagagggattccaacgagacaaagacaccgtcacctgtgggtccttctctaattgtgag

SEQ ID NO: 65125 - DNA, 464 bp, Oryza sativa
  unsure (1)..(464): unsure at all n locations
atataaaactaagcgtggcatggntcagaatgctcaattggcgcccgccatctgtttctttcctattatcaaaccataggccgtccgaggatgggctttggacttcattggtcaaatttatccttcgtcatcaaaggggcataggatcgtgctagttgctacagattacttcaccaagtgggctgaaaccgtgccgctcaagaatatgactcatatgaaggtaattgactntattttgaagcatattatccatagattcggtattctgcaaacattaactacggatcaaggngcttcttttatgtctaaagaatgaagagtttgccgaacttatggtgtaaatttttgaggtcttctccttactacacttangctaatggacaagccgagtcgagttataagacattgttgaagctagtaaagaagaagatcgangaacaccctaagaagtggcatgacgtgct

SEQ ID NO: 65126 - DNA, 459 bp, Oryza sativa
  unsure (1)..(459): unsure at all n locations
aaaaactaagctggcgatgggccagctccttgacaacgcaggcagtcgaagattcgccgtgggaggccncggcttggcccatgccaagcctcatacggtgtcctgccatcgagggccttggtatgcgagcggttgaggacgtaaacggacgtcaccaccgcctctccccagaagatggccggcatccccctctgcttgaggagagcccgagccatccccacaaccgtctggttgcgccgctcgacgacgccgttctgctgcgggctatacggcgcggtgtagtggcgctgaatgccctcatcagcgcagtacgacgcgaattcagccgccgtgaattcgccgccgttgtccgtgcgcagcacgcacagcttgcggncgcactccgcctctgcagcagcctgcgcgtgccggatggcgtccgcagactctcccttgctgncgangaccatcacccacatg

SEQ ID NO: 65127 - DNA, 481 bp, Oryza sativa
  unsure (1)..(481): unsure at all n locations
tgtgcgctggcatgccgaagaacggatagtcgatactatgctgaggcacccagcagattcagtacagtggaggacaatcgataggatttaccaggaattctcaaatgacccaagaaacatgcgtttcgcaatgtgtacggacggcattaatccttttggtgatttgagcagtcgtcacagtacatggccagttctgcttgttaactataaccttcctccctggttgtgtttcaaaagaaagtacattatgcttgccatgctcattcaaggaccgagacaacctggcaacgatatcgatgtgttccttgaaccgataatcgatgacttcgataggctatggaatgagggcatacgaacatgggacgcatatgcacaagagtatttcaacctccatgcgatngctgtttgtaccatcaacgattatccgggccttggcaacctttctggccaaactgtgaaagggaaatgggcgtgttcggag

SEQ ID NO: 65128 - DNA, 371 bp, Oryza sativa
  unsure (1)..(371): unsure at all n locations
tcgtgcctacgcagttaaatgatacagagtgctagtaataataaaatctaagacctgaactacatacaacttaagactgggtctcaatatcagctagattaaaaaacacaaaaggcgacaaaaccagttaaatgttgcatctccatgtgtagaatttagaaacacaagcagcagaatgcaagagattaacagagatgtccttgtacaatgattccttctgcaaggaattattttttctctttccctcattgcaactttacaaaagttcctatatcctatttcgctgatactaatttgcttaagaagttgttaagtaattatgaccaggacactttntccagaatgaatattttcattcaccagctcccaaa

SEQ ID NO: 65129 - DNA, 467 bp, Oryza sativa
  unsure (1)..(467): unsure at all n locations
cacaggaatagagatgtctctctcggagattatcgctttcaggcagnccctaaaacaaaaactgctggaccacactgccttggacaaagtccgcttatgtcaatgatccagacaaagntagattagagcacgggatgcatatacctggttcttccaaatataagctagcgcaacgaaaagaaaaaaaacttcattcagcatcttctgaccgacaatggcttgggtcataaacaagaggacaaagaaaaggaaccactcaacttctaccgacagcatttaggtgaacatatggagcacacctctacgattaacttccgcttcttacaagaactagtacaggacctttcagaactcgatgaacctttcacaaaggatgagaacaatatagcatgcttccaatctaggtcagacaatgccccaggatcagatggctctacaggcactttcttcaaataaaatgctgggag

SEQ ID NO: 65130 - DNA, 493 bp, Oryza sativa
  unsure (1)..(493): unsure at all n locations
tgatgttgtcagtcaagacagggaaatacagagataaacttaggctgttaaacgacgaagatgttcgatattccaagagttgtcaacaacgtttgagttgctaggaacctggccgagtgacttcggagattatgaatggcccttcccataaaggagataacttgtgccgatctcgtgtagtttgaattttcctcaaaaccaggtcgccgactagaaaagcgcgtaatcggacgttacggttatgatagcgtcgcaacccttgtaaatatcgggccgactgaatcaaagctgcttcgcgggcttcttccaatcggtgcaggtcatccactcggtcctcttcatagcgtttttcgcgaaaattgcgaaagcgcaaggattcgaattccacttcactaggcaacattgcttctgccccgtagactagaaaaaaaggtgactggcctgtggcccgactgtgggtagtacgcanagaccacagtactgatggtagctg

SEQ ID NO: 65131 - DNA, 504 bp, Oryza sativa
  unsure (1)..(504): unsure at all n locations
gatactcagcttgaaggaatccaaggaagaacctcaagatgattccaagaacacttagaactccaagtagaacaagaagcaattcaagaacatgaagatgaagaagttctaccagaaggcactcgatgaggcatttgcagctgttcaagaatcaagtgatgctgattttaaaagtgatgaagatgatgacaaaggcaagaacgttgttggagtttgtttcatggctagaagcgttgaagagtattctgacgatgacaatgaggtaattcctactcctagtgttgaatatcttcaagaagtgattgctagacttggctacaaaatttctaagtttgagaataagataagtcaacatgaagttactattgagtctcttaatgctgaaaatagtagaataagatctcttatttctgatgatgatgaatgcacatcttgtgaggttntatntgctgaaattaagtcaattagagatgtttattccaagatgcttgatgttgaatctaa

SEQ ID NO: 65132 - DNA, 475 bp, Oryza sativa
  unsure (1)..(475): unsure at all n locations
cgtcatttcacattnggatcatctcanggttggggactaaaatacatgtatatacaccgcatatctaattcgattatcattatgatgaggcgaaggcaatcagatcagtacaaagcacatacatacattagtatgtctgcagaatcacttgttagctgcaccggcgggcttgttgcctttggcagcggcggatggcttgttgggtttggcggcgctggtaccagcctccttcttctcctggctgctatcgggcttcttctccttgatgctggtatcggcgacgacattatgctgctgcttctccttgctcttggtcttggacttggacttggagtttgaggagagcttgagcttgaggtgcaccccgaggtcgccgccgctgcaggagctgtggagaagcaacgagttgttgatggactgcacgttgctggtgatcatcgacttcacgcccaccttggcattcgcactggttctc

SEQ ID NO: 65133 - DNA, 484 bp, Oryza sativa
  unsure (1)..(484): unsure at all n locations
taactaaacaatactacccatattctcatatattggcatcaaaattatacaaccaaattttttctttaaacatggctaaaatgcacgtaaatatttgccacaacgtgtagtcaaaataaggtgcttaattcgatactactgacacctcaatgatttgctaacacattcgtaatcctaaaatataattatttcctagttacaaaggaaatagctaaattttaaaacaggggactgtatatttatattttgagaaaatatatataccgctaatacactaatcgtgtctacgtggtaaatttattttggttntgctaanaaactgtttttatttatggaactttcgattnttttcatgtctgatgctctntaagattcatgcgcctttntagttaggaacttttttgattntgttttgtcatcagatgtgctntaagattcgtgcatgggaacctgaagaggatcaaaccagttacctcgcgtgagt

SEQ ID NO: 65134 - DNA, 466 bp, Oryza sativa
ctaagctggaggaatcctaggagaacctcagatgattccagagcctttatcttctgtagaacaagaagcaattcaagaacatgaagatgtataagttctaccacaacgcacttgatgaggcatttgcagctgttcaagaatcaagtgatgctgattttaaaagtgatgaagatgatgacaaaggcataaacgttgatggagtttgtttcatggctagaagcgttgaagagtattctgacgatgacaatgaggtaattcctactcctagtgttgaatatcttcaagaagtgattgctagacttgtgtactaaatttctaaggttgagacaaagatatagcaacatgaagttactattgagtctcttaatgctgaacatagtagaataagatctcttatttctgatgatgatgaatgcacatcttgtgaaggtttatttgctgaaattaattctattagagatgttta

SEQ ID NO: 65135 - DNA, 404 bp, Oryza sativa
ggcagaactgtatgagtctgaacaacaatggtcaaaagctgcacatatgcttagtgcgattgacttggactcacggatcaggtagaaactgacttacttttgtttctgaacatgtgtatggctgtttcttcaagacatgaagcatctgattcaaatttaaattatcacgatgctggatgacacacacaaattatccaaatgtgtccagattgcacgactttatttagaggttaccattgcttgattgctagtgcctcttctagggcatatttccagcttactaatttagctctacatgtataagatgatgatactgtgaaagctaaagatgtcaatatcaaagctccattgttggtctcaaagctgcacctagaacatttagatctaccattcctgaggatgat

SEQ ID NO: 65136 - DNA, 482 bp, Oryza sativa
  unsure (1)..(482): unsure at all n locations
tgtgatttagcttttgatgcagcatgtcacggaanaagcttcttaattgttggtaccaacaaaagagcagcggatgtagtagcatcagctgcaataagggctcgttgtcattatgttaataaaaagtggttcatgggtatgttaacgaattggtcgattactaaaactagactntctcaatttagagacttaagagcagaagaaaagatggaaaaattccaccatctcccaaaaagagatgtggcaatcttgaagagaaaattatctaccttgcaaagatatctcggcgggatcaaatatatgacgaggttgcctgacattgtgatcgtcctcgatcagcanaaagagtatatagctcttcgggaatgtgccattctggggattcctactatttctttagccgatacaaattgtgacccagatctcgcgaatatatcgattccagccaacgatgacactatgacttcaattcgatgattctt

SEQ ID NO: 65137 - DNA, 370 bp, Oryza sativa
  unsure (1)..(370): unsure at all n locations
aagcttcatatagcgaatatgggctggattcaccagattgcacttcatggtgtcaacatatgtacatgcatcggagatatgcaacagacgtttatgatgtcccttctggactacatctgtgaatgattggatgaataatgagctatgtgtgcctattagcaccaaacncctcaaatgtatcattgctttaactgcattactaattcttgcttcaaccttgacgctactaagatcttcataatgtgcagaaacgattagtatcgacatatgacgcataaggggcagtcttgtgttgctctgtagatatctataagagcgtactcagaccttgaaaccatccttcaaaatcatgcataatgcactcatgata

SEQ ID NO: 65138 - DNA, 445 bp, Oryza sativa
  unsure (1)..(445): unsure at all n locations
taaggctgatctttactttatgaccaacaataaggaatataaatataatcttcagattctcactcctcgcaccacgctcacctctggctgtgtttagatccaaacttccaactttttctatcacatcaacctgtcatacacacacaacttttcagtcacatcgtaccaattgtaacccaaacttccaactttggaaggaactaaacacagcctctgtcctcaaaattttgtcatgattctgaccttactcagagctggtgtcaaggttacnggtaaggtataccctttacccttcgacatacgtcacatatcgatatggtatacttgcgcgctgtcacaccctgaaaattcaaaatatataaattgatggttaattggaattattagaaataatcttaaaagtcttgaagagaagatctagntgtaattaataaatgccaatata

SEQ ID NO: 65139 - DNA, 249 bp, Oryza sativa
cagttatccccactcagtttcgtccagatcatgagttggttttagcgctatctctacatgatatgtcctctgtgggggtcttacggctttattgcttgttctaaccatagggctcagagctccgcagcatcattgtgcgtatcacattgataaactctctcaaaaaacaaacctcttggaccgatacttggatgactgtgacccgatgattgagcgatgacccttctcctgttggtgaccgcattatga

SEQ ID NO: 65140 - DNA, 483 bp, Oryza sativa
actcaagctggttcttggtctgaatagagagctcattttattttcaaattatgaaacatgaagggacgtgtatgtaatgaattcaatcggtaacaatgtaagagcaacaaatatatgtattcatgcctgaaacctaaaatgatcctacaactactcaccttttctatggtactgtctgaatctgcaaaagatgctagtatgtccataccatgactccctgcatagtatatctcagtcagcttgacaaaatcaaacacctggacatggagaggccagcatcaaacatcagatatgtgattttcatactgacataattgtcacactaaaacgtgaagaccaatacatgtaaaatatatattcagaccttgtcgcgggatctcccactaactattgctgtagggaagtgctttgcaacacttttcacagtaacacgcatctgaaggaaggtattcagattgagaatattagtaagtggcacataca

SEQ ID NO: 65141 - DNA, 479 bp, Oryza sativa
  unsure (1)..(479): unsure at all n locations
actaagcttcgggaacttgggagcaagngatatcattaagatattcatgttctgttggcattctgcagatggataannnncagggcaactaacagatactaaaaacttggatatgcaaagaaaataccatttgaaaatatgcttgcaaagattgaaatactactagtagcatgtactccatgatgggaatcatcaaagagacatgttaattaatctaagaatgagaatacaaatagaaagcacttgtcagtggcttattgtccctaagcagaaatagtgactagtctccattcaagtangtgaagcatgttgccctcgccatctcatgttagttntttaatagttaagggttatattaactatagcatatatgctggatttgctttggacatcaattcaaatgaaaagaaaagtctgttcttacgatgttcaggccttcagacaatatatgtggtaaaataagatgcgtacatgaaact

SEQ ID NO: 65142 - DNA, 477 bp, Oryza sativa
  unsure (1)..(477): unsure at all n locations
ctaagcttgaacaacatgaaatgaatcaatataataatcttcatctattgctactaattgtttctcattcatacaagtcaagttaggaccctatgaaatttaatagttgaattgcaaagagcctgagagcaactctgctgaggtgtattgcgggcttgcagcaaactaaacattataataaacttaaattattgtggaaaaatattagatgctggacataaatcaatgttagattttaagtggaaaatcattgggtactcataggagctgtgcccacttgatgcaagctaaatgagtctgtcatacactatatgggatgtttcaaccttcaactataatcaacaaatgttctctagaagcctgttattaaatnttcccaaagtagtgtaattacatactttttcagtgtttttagcattaatttgattgggaacttctacaaagaaatatttgntggcatcgttatatgtacttctc

SEQ ID NO: 65143 - DNA, 442 bp, Oryza sativa
  unsure (1)..(442): unsure at all n locations
tcatcttggagccatcggtgaacttcaatcgtgcttcatctatggtcgattgttcctgtcgncgaaacacattgcaatcattagtagaatgagaatgagaatcatgccatttacaatatgctcgacgtttgaactcttcttgagatggtatgacatggcctttaggtaatctaatttgcttttcttgtaaaagataatcaaaaattttatcacacttggccacataaaaactatatttaacctcactctgtcgatctttgcgaggagtcggcattaggttagagcatacaaaaggcttgtttttattagtacatgaccactctgcaacatatatatcatgataaccctcttcctcactatcactatcctcagggtaatcaatcgcattaacattgggctntttgtcatatgatctaacaaagtttttattattcttaacccg

SEQ ID NO: 65144 - DNA, 465 bp, Oryza sativa
  unsure (1)..(465): unsure at all n locations
cgtatcgagctcgagcctangcaggcgagctcgctcgagctcggctcgttgatagtcctagtcccatcttcaatcgggaaaccaccctcgaattggatgcgtacaatcgtgagttttcgttgtgggcaagtattggaagggtgggataactgcaaaagcaccgcttctccatggatgcaagtggggtgagcaagcaagttttttcatgctcccacgctgaagaaactaccctgttttcatattataagccatttgatatttttagtcaaagttctttatgtttaaccaagtttatagaataaattaataacatctacaacacgagattaattctattataattagcattaaatatattttaatataatgtgtgtgttgtattaaaggactattcaaaatttgagtatttgaattcagaatatatatttggactcacgaaaatatgtaagaatcaagcatgggaca

SEQ ID NO: 65145 - DNA, 427 bp, Oryza sativa
  unsure (1)..(427): unsure at all n locations
ntagcaaaatctagcttgattatgagggtcttgcatnttcttgcatggcacgcttgtatcaggtcagtggcatacattatatattcagagatgcatctacctttaaggaagcctgtctggtccagatgaatcattcttgtcataactttttgaagcctatttgccaaaacctttgaaagaattgttactgagcagatgctaaaggagattggacgaaagccatctacctttacaagtgagtagacgcttgtagtcgatagtgaaacaatgattgaactatctttcagtaatacactaataacagtgagcaaactgattgctatgtttcgtaactagactaacactgcgatctactactgacaacgagagaagaagaagatctcgagaactctcctagctagctgctgcttgatggtgaataatcacc

SEQ ID NO: 65146 - DNA, 424 bp, Oryza sativa
  unsure (1)..(424): unsure at all n locations
tagcgcgtcacatggggtgttcagatactaataagagaactaattacagaatccgtcagttaacaactagacgaatttattaaacctaattaacttggcattagtaaatgtttactgtagcaccacattgtcaaatcatggagcaattagacttataagatctgtctcgcaaattagtcgctatatgtacaattagttattttgtagcctatattaaatacttcatgcatgtgtgcaaacgttcgatgtgccatggcgtaaaatttacgatgggatctaaacagacnctaaatatcatatattcttcgtagctcattctctttgacgagtatttttgtgtcttacatgtaagggccgagctcaattcacaatccatgttttcttctctcttcagaccggcggtttgatactcaaataatatgca

SEQ ID NO: 65147 - DNA, 423 bp, Oryza sativa
  unsure (1)..(423): unsure at all n locations
tgtatgctatatctccttcctcttcaacatgactcttgccaacttttctgagataatggaatctcttcccgtagagacgaggttcacagagtttcccttgcgacaatatggtggatcttggttattggaggtcatgctcaatggcgttgctgcagctgaaactagctctcaaccgagaccatccgacatcctcctttcaagctgtcctaagagtggtaccacctggctcatagacctcgcctttgcaaccctgaaccgttcgacttacccaccatcggatgaacatcacccgctcctcgaacacaacccncatgaccattcgtgggttcttgagatttaccccaagctcgaggtgtacgagtcactgccatcttcacggctgctctcaaccaccttgcatattcgatgctgcctcatcgcatc

SEQ ID NO: 65148 - DNA, 481 bp, Oryza sativa
  unsure (1)..(481): unsure at all n locations
gctgataacttgctgctaactgattattgcttgtgggcatactgtttctntatctagaccagcatatgtgtcttgccaccagtcaaaatgccaaaaccagattctctgagccatatattttgtaaaaccagattattgctgataacaaattgccgtagctcagtcaatagacttggtcaggaacttngttgaaacattcatattcagagtttccagatagcattgctggttttatacctctgttcggagctggcttcttttatgatagtcacgcataaaacttggacaacattttaacttaatacttgtaaaatgtgtttcttctttgagaattggaacaaacacagtagagatgtcctctttgaatgtgatgggattcgctaatgtctcatctcttctttatttacccaatatatgctatctcacgttgtgtgtaaatctatatgtaggtatatgtttgatatgtcaaaactggaagctg

SEQ ID NO: 65149 - DNA, 485 bp, Oryza sativa
  unsure (1)..(485): unsure at all n locations
tattgggaataaagaaatntccaaagtattgagcatacgccatgcgctctctgctntaacagatgtgcttaagtccctagaagacacatggtttcaccacacctggaaatatatggcatatgtggagtaaaatctgagtaaataaactcataaaggatttaccaaccgcctagaaaatgaccacaatatataatcagcctaagccataatattggtcaataaaaatgcacacttacgtggcgaaaagcaatgatattgtacctaatcaattgcttaaaaacccaaacagcaccttgacttatatataaaaaagtcagcgggacagatatataaagctttactgtttgacancctttaagatgcattgtaccaactcctaaaaagttaagtaactggcggataaaaggaatttaagggattgggcacttgatcacgcgcactttggcctaagcaaaaagtgcctaagtcccttaaagaacgtgaca

SEQ ID NO: 65150 - DNA, 467 bp, Oryza sativa
  unsure (1)..(467): unsure at all n locations
actagctgagacacctccttgaaggcttgactcgcggtgaagtatgaggcttgtggcaacatcgaactagtgaggattatcgcacaccacatattttttgttgcacatagtgtgttcgtgatgttgaagccgtattttctggatgtttcttatatcagtactggatgttgtatttggtttcttcggatgttgcatatatngagtttttgttgttgcagacaacgctcttgagtattgcattcgattgaaacatcttcgataaatcggtaaaatattgttcagtgaaagatgaaacatcaagaaacaattcatgttgaaacatttttttcgagcgatgaaacactgtaacattcattcaacatacagtaaaacatcgtctagagatttgaaaatcttcggacgtctgatgcgtagctctctccatacaatactaaacatgcatgtgatattctactaccaatctaagt

SEQ ID NO: 65151 - DNA, 398 bp, Oryza sativa
agagacagagatacagattatgctcttctccacctctcaagcgcaagctgccaacattttgttcaataacccaatcaccgacttgcgcccaggacattgctctgctttgctccgaatgggaaaggcgaagaaagaagaggaatgtaatgatgacacggctgggttctgtgatgcttgttgcctcaaaagtcaaaacatgaggtttagtgaagcaaacatcataatctggggggtttgaatcttaaaaaaatggcatgatattgcaacctgtacaaatatatctagataaactccctatgtgaacatataaatctttctacaaatgaaactcccaaccaagtagcatggattaactaaaagccgcttgctaacttacccacatcaaaaaattaccaatg

SEQ ID NO: 65152 - DNA, 491 bp, Oryza sativa
  unsure (1)..(491): unsure at all n locations
ctcaagctggataacaggcgggcctgttgctgnatacctgaaatacagntcttgtatctttatcttataaccactgagaccaaacccaccatagattcatataacaacaatgaggaagcatgcttagcatcttcacatactatggagaaaaaaaaccacatgttcgaccaattcacattatccaatctgttctccgtcagatgtactcatgcaaaccaacattgcagtgaagtacaggctttaaacagctgctgtgcttaagcaattgagtaagaacaaagaatttacccttggatcctttgtggttctactgaaagcttcactgtaatgctacactgcttctgggtatttctgctgcttgaagaattcattacctgcacatgagtggaccaaaatcataagttcatcctcatcatcacctgcatcatagacacagtgattataacagagtngccacaacatacctttctcttcttcctatcacctttttt

SEQ ID NO: 65153 - DNA, 468 bp, Oryza sativa
  unsure (1)..(468): unsure at all n locations
cgaccatagaaactcaagcttntattaccattggatgtgctagcccanacattgtacttaatgctcttgtgaacatcatcctcactgtatgatntgatgatgaagaatttagcatctgagtatgtttccacaaaatcagcccggttatactgatccttcatgacagaaagcgagctatcgctggctgaaagctcttgtcccttcacaggtgcaacagtagctccaactccctgttggttattgaaaagaccacttcttggccctcttcttagctcattaaacccatcctgatttccatggatataaccataggatccattacctcttcctctgggatgtgtattgccatccgacagtgcattccatcccccgtacaatccagaaccatacaggtgtgatccataccataggccggacccatatgaanctccattgtatccatacattccactaaccgagtaaattgat

SEQ ID NO: 65154 - DNA, 421 bp, Oryza sativa
  unsure (1)..(421): unsure at all n locations
tatttagctgataaatcanaaccgtggatatgcataatacgtcgtgatcgtgtcattcacggatatgggctaagtctatgagcatgcgccttcgcgcttgcggcctcagcaacggcaggcgagagcagtggcggcagagcgtcgccagtcgctagtcaccaccgtcgtgtcgcctgtcgccggccaccgacgccctcgttctctcccacctctccccgccgaaggcagtagccgccgccgaaggcagtagccgccgccgccctccctagttgactagtgcctacccacacgagaagagtgagagagagaggagaaaacgagaggaggggagagggtatgacntggccagctgacatgtggtgcccatgtgggtcccatgctgactcagctatcacgtcggacaaaaccgggttgaaaacca

SEQ ID NO: 65155 - DNA, 56 bp, Oryza sativa
gaaaagaagaggaaaaacagattaaaaaaggggatgactgagctgaacaaaaaaaa

SEQ ID NO: 65156 - DNA, 290 bp, Oryza sativa
gagaaaactgcgtaaccaaattctaagatttcttggcagcccattataagaacacagttcccaatataacaggaaccggtgttctatttacaaagatttacgttattacttctgtctaaatatgtgatgaacaccctacttaatacaatctgacaagatccccatctaatactagtatgctcatctatctacacatttggaccgactctaatataaaggaaataaactccaacccattttttagtttcacggtaaactacttttactccaaataacaaaacacgggttcc

SEQ ID NO: 65157 - DNA, 402 bp, Oryza sativa
gttagcgataatggaatccatttcactacggacaggcttctttcagtagtctgcattaggagatgcatatgcttctgaaattgacttatgaagtgtatccacgaggtacacagtgaaatcatcaccaaaggacttatgccgcctttgtctcttactccttcgagaagcttcactgacattctgctcagtgacatgttcatgtgtatgttcagtttgttctggtggcgtgattgaactgggaattacttcagagggttggctcgaactactatgtgtatacttcattgggaaaaagctttcaaagaatgtagcatcacgagactccataattgtaccacatgcatgtcaggtacctcagatttaactattaaagatctatatgcaatgctgtgatgagcatat

SEQ ID NO: 65158 - DNA, 356 bp, Oryza sativa
catacgtgcaacacaaagttattgacagttctggtttgcataatggctgcgggaaacgggagggtttgctggtgttttcgacacggcggagaaaacgttctaacaatggagagacgcattctatgataaaccgccttacttgtcaggaagcgggtttacactcattgaacgcgatataaaatcgacatctctcattctcaccacgtcgtcctgtatccatgtctatgcttgacctcccagctcagaaatgttggacgaattgtcacccctttccattcaatgtatacagtggttctggagaactacctggctgatttatttctataaatacccacgctcaaataatatccatgtgt

SEQ ID NO: 65159 - DNA, 324 bp, Oryza sativa
gcgcggaggatatccgaagaaaacatttttcgtttgtcttcccaccaagttgaaggccattatttgtgtgtaccatacacaacctagaacgcgtgaatcagctacctgtacttaagcattgaacctcatatcatcatttagaagatatctgagcaccgttacatctgccccggttctatgaccaggctctgatgttattctttgttactaaccaaattgctactgattggacctattaaacgtatatatcggttgaatcctctggacacttggtggactggtcccgatataccctagaagattattctttttatatgtattata

SEQ ID NO: 65160 - DNA, 411 bp, Oryza sativa
  unsure (1)..(411): unsure at all n locations
actaagcttgtnccctactatcgtcttcaacgacaagctctggattcggcctcgtctggtcttgtcttcgacgctcacaagagtacaagacgacgcagtcgtagaagctcagtagtgtggcacgctcgctgcatagcgagggtgaggctctatcggtggctcagcgctggcgtacgtcggagtggtcgtggcgactcagaagggtgacgtgttcacgcccgggatcatgctgctggagacggtgaccgtggcgcatgttgacgaggagaagagcagttgagagctggaggtgtatgcacgacacgtcttcaatgaggagcggctgtcgtcggaggtcgtcgacctgacactgcccagtgaggtgctcaccatgttccacttcatgccgacctcgattgcccaatcgagctc

SEQ ID NO: 65161 - DNA, 504 bp, Oryza sativa
gacactatgatactaagctataggtggcgcccatagatgggtcggctcaacaactctagcgactacgatgcaccacgcactgacccgccgtgtgtagaaatatcctcatgcatgcatgtgtgctgcagataaaacaggaaaggaacgatatttggttagcctttaccttgggcagccattgatctaattctcgtgcttgttgattggccaagttcaggttgctctccttcctccaacgtccttctgctggacaccggcgccgagcgctaccggcggcgtgctctcctgctccggcgaagtagctgtggatgaatcttgatgggagtcggatggatctcgatgcatggatgtcgatcgcctagcgccgtctattgtgtggctgcctgtaccctcgccggcgtaccctttctgcgaggcctctgtgtgttccctcatgtgatctatgtatgagtggatggatcgatctcttcttgtggtgtacatccatgttccgtcctcatgatc

SEQ ID NO: 65162 - DNA, 415 bp, Oryza sativa
acacgatagatctctatctctgcttgggcgataagagactatgcgctacactcgactcttagagatgctgttgatctactcaattgtcaatgtaccgacctcccgggtcggatcattacttctcggctgccaaagccatttcactcgggatatcggctcccagaacctgtatcattgtctcggactgacagagtccagctgcccagcaacacaacagtgcgcttccactcgggaagcctagtctatgatgtgcacagacatgctgaatcacacacattgcgttctgaccactcaagtcatacatctgtcatatacgctgattctggttacgattcccatcccacaacaactattcacatagcacatgcacacaaatctacacaacgggaaccatctcacatccgcccatgaccgt

SEQ ID NO: 65163 - DNA, 394 bp, Oryza sativa
  unsure (1)..(394): unsure at all n locations
tgccttncatgggaaattcagcgcgtactctacctatatatgctcccattatcatttcagcaatcgaagtaataataatagattattgtcaacttaactgtactagatcgagctttgtgattactactacgaaaatagattgctatatatgggcatgttcaccaaaatttgacaatatttctgttcaaaaaaatttagcaataccaaattttcggtagatttggtagaattgtcaaatttcagtaggatggaacaaatatgctgtgccaaatttccctatgcattactaatatttagtagtaacaaattaaatacaattaaccatattattatcaattttgcaacagtacgtacctcgctgggcaagccattggcgatgacccacttgtccatg

SEQ ID NO: 65164 - DNA, 398 bp, Oryza sativa
agctctactcacagctaagaacccatgagatggatgtcttccatcgtaaaggcctcaaacactcgatggctttggtagctgatccctctggtaggacattttgtaatgactgagcttctgtgtatggtggcttctctcttgccgctttacactcagtcactgaggaacaattatagaagatccctgatgatgatcttgctctttttgctagaaaattctcaagagcttacagaaatgtgagatataaaaaaagaggaaaaaccaatgaaccatttgtgtgttttgagtgtggagagcctaaccacaaaagagtgaattgtcccaagctgaagaagaagagtgacaagacgaccaacaagcccgagggacaagggcgaaaggggaagaacgatttgatg

SEQ ID NO: 65165 - DNA, 335 bp, Oryza sativa
  unsure (1)..(335): unsure at all n locations
tggtccttgagaatacgtgtatcantactacactcgaccctcctgactctgatcaaaccgttacaaatgaagcggatgctcgatgatatggcattctggcagtgatctttcatggatgatgaccacactatcattatatcaaatgttcctgtcccatagcatcagcccgatcaaaatattaaatagaagacttggcaatactatacgccttcaagaagcggacacaccatgagctatggggatagatatggactatatactatcaggcaagtcgtacatacatgatggtgcacacgttggatgaacgaatacacactatctgtcattgaactact

SEQ ID NO: 65166 - DNA, 373 bp, Oryza sativa
agcttcacggtggccacgaacttacggccggtctttgactcttcctctgtgagcagccacagtgcctcctaggatacctgtaatgggttcgggccgttgtttctctccattcatcttacaaagacgcccctcatgaaggatgcgttcgccccgagcgcgacgggatccccggcgaaatctccggcctcgtcatcgccgagcgaaatggagagcacgttgacgccctcgttcacggcgtcattcatcgccgccaatatgtcatcccgatcacagactctgtcctcggagcacacctggtatagcgcgatgtgcgcgcgtggagccatgccgggcgccgtgccaaacccgttgcccatcacgttcgccccgggca

SEQ ID NO: 65167 - DNA, 305 bp, Oryza sativa
ctaactccttcttcacaactactcttgcagttcttccaagcaaatgaacaagaaggctcaattgatgaaggcaaaaatcttctgatacgcttgatcacgatgagacactcatcaactacacatactcaagtttcacttggccttaatatacctgcgcctcttgtcgaatgcatgtcagactataccttttaccatctaacgactaagtacacaatgcagagacttgcacgtatcttggcaagtgagttgggttataattgcttaaaagaaaatttttacaactccttcatgagttcctgcactat

SEQ ID NO: 65168 - DNA, 444 bp, Oryza sativa
agcttgaatgctgtgaataaattatattccatattattgggcatacgccatgcgcacactgctttaacagatgtgcttaagtccctaaaagacacatggtttcaccacacctggaaatatatggcatatgtggtataacatccgagtaagtaaactcataaaggatttaccaaccgcctgaaaaatgaccataatatataatcagcctaagccataatattggtcaataaaaatgcacacttacgtggcgaaaagcaatgatattgtatctaatcaattgcttaaaaacccaaacagcaccttgacttatatataaaatagtcagcgggccagctatataaagctttactgtttgacaccttttaagatgcattgtaccaactcctaaaaagttgagtaactgcggtataaaaggattttaatgtattgggcacttgatcacgc

SEQ ID NO: 65169 - DNA, 428 bp, Oryza sativa
  unsure (1)..(428): unsure at all n locations
ctgcagctgaattggcctgatgtttcttcttcttgccaagaatgcgggccgctcaggtgcgttatcgnttgacccatggaaataactctgacccgattgatccattgtacgaattgacatttcctaacctccttctatttgaaaaattgcggaaggagaggtaagtgcatgaaagtagtgattagtggtacccccaaaaaagatacttacgacgatatcgtcgtcgtcaatggtaggacacacgaagcatcttttgtctcgagttcgttatcttacggaccttatcacctgacaacggtcaccacaacgacactctggacgttcccgccatgtggggagatctacgcggtttacctgccattctagagcctgctcttgaattgcttatataaattatcacccatgtgacgcatgcaccaccgacttcg

SEQ ID NO: 65170 - DNA, 446 bp, Oryza sativa
tgagggcatggttacagatcagcggaacatgagagatcaccatgctgcagtcatatcgaatcacctcgagggtaacttacctatcattttatggctatgttttgggttttttttttttgttgctgtggcttatttaaggtttttcaaaacattatattgctagtcttagaaaatgtctttcttgaactgtgcacatatagtgttcatacgatagtgatatacttcatgtactgtggcagctgttgaagctcttgaagcaaagtttattgaggatgaaacacggatgaagaaaatagaagaagctgtaatctggtacagcaagttccttgcgttccacgttgttggaggagaaggtgagtgatgaatcagctcaatgttcaagtaaattatgggataaattccttatgccttttaaatttcatcttatcctttatatgccacttatc

SEQ ID NO: 65171 - DNA, 435 bp, Oryza sativa
  unsure (1)..(435): unsure at all n locations
agcttgttntgtgacagacagcatctcgtgataattgtacctgcgctggaggattcatgtcggatctgcaaactgtgaaaaaccatgtctaatcatggatccaaagctaatcatggatccaaagcttataatcttgttaagattgccctactgatgcgtcagatttttggtcagcccatttgagactttngagttcgatttcagaactttggcaatgacatgctgtcttctttattggcttcgactttgagacctagttgaaaaggtttgaggagaacaagtattacagtttatgcagaacaaggagaataagcaccgcaagttctgttcttattaccatggtagtacaaaagcagtaacaggacagactgtagaaagtgatctcttcagataatagcatcagtgacaaacacgagaacatgcgtttcagagata

SEQ ID NO: 65172 - DNA, 441 bp, Oryza sativa
agcttctcgcatgagactattatagttatgagtttgttgtgcgatgcattatttatcccaaaaaatatttttatataatgaaataaaaaatatgtatttatttttttataaaaagtcataaaaaatgaaggagcattcatacaaagataggaccaatgttcacaatattttttttatgaatgctcccgatcaaaaaaatccttgtcctattaaaatttcaaataaaaattgtaatatattacatttgttttattttcaaaatttatgtcaaaaatttctgcactaattatttagtctcattagtttcataaaatgcaaatacggtgcactcagactaaattttcaatcgtttttgaatcttacattcaaatctaaagcatcaagggcaaaatagacatttgtaacgaaacataatagtgaaatgatgacaaatgtaacggg

SEQ ID NO: 65173 - DNA, 438 bp, Oryza sativa
ctacagctttaagctttatactgttaacatgataaaacatatatacataaaggtaatctcaaccaaactgaacgtacccactacacatgtctcttcatactgtgctgtgtccaatggatcatgacccatagtataaagaatcgactgatcagcatctaattgcgccgtggtattgatctggaaaccacaattttgtaagttcacaacactttcgaactcatccacacatcttctgtgttacaacacagttacactcaacacatctcacctttgacgacacaatgtattggatgacaacgggacgatgcacctaggcattctccagatacttcgtcgagacctacttcaatgcgcaaccaattatcacacatactaactatcaccaattcacatacttttattatatcaatactactatcatattataactcatcatcg

SEQ ID NO: 65174 - DNA, 428 bp, Oryza sativa
agctctggcaataaaacatggcccatagtgcaactcactctaaactaattctggctatatatgaaactagatctagtatatatgtttagattcatagctagaaattacagtactactatatggggataaggagatttaccatgtatctacacacatactaagtgggctcgcattggggtgctcttgtactcttatgcatgccttgagcggagcggttatttgggctttggactgacatcaattaacatgtagatgagactatagatggccatatggcccgaggcccatggcccggcccaaagcccgcaattttggcccggcccaagcatggcacggcccgactggggtcgtgcccgtgctggcccgacaaccgggccgtgcctgggttgcacccttgtcacggtgggccggcccggcacggtccgagt

SEQ ID NO: 65175 - DNA, 450 bp, Oryza sativa
cttgacaccgaatatagttggaaatacttacagacatgctccatgtcttttcattgtttgctctgccttctaggctggatgacctgagtcgttttccttttgttttgtctgtggtgatcattggcattgtcgttcacttggacatgccgttgatattggcatcgatccattgcttattgcatgtcaatttgcactgccagtttgtttgttgtttcctactgctacttgaagtacctggtgttgctttcattcagtgaaagccggttggtccttgcgtattgcgagaaggcccattgggcttttggtgtttgtttccaagaagaaaagaaacaaacagcattggattggacgccggagttgcatggcatttgcagaattgcaggtcgttttcctctgcttctcgtggcccgatttggttaagccaaaacggtgtctttgatagcgtggaca

SEQ ID NO: 65176 - DNA, 431 bp, Oryza sativa
  unsure (1)..(431): unsure at all n locations
agcttctgagtcagagaacaagctctcgtactataacgcagacgcaccgccgctgccattggcgccggctgtgggtgagctgatggtcgtgtaccgtgagattgattaagtttgcataatgattggattgataacagtatggagtgcatataggcacaaaatagaactgggaaagatattgggaggattagctagaaatagaacatacgatacatgccatatgcacgaaatgtgcttacatccccaaccccgagcagtgttatcgtcggctggtcagacattgagacgggaatggaactctgaaaaaatagcactgggaaaacctttggcaaaaatatcagcatactatgaagttgtcggaacatggagaacacaaacaaaaccaacaacccnctgatcacggacaaaatctacatcgatctcaacgtgtt

SEQ ID NO: 65177 - DNA, 442 bp, Oryza sativa
  unsure (1)..(442): unsure at all n locations
gtcactacataaacctgctcatacactgtcttctggataacggtgtgaaaccggtgatccggtgtgacccgatgcctcaagaactgatcatgatgcctcaagatggtatactgcgatggattcctcatgttcaccacaaactggatggagggatcaattttcatctcatcactttgttcatcctcatcctccccactatcactgacatcatctctacttgcctcctcactagccccctcaacatttgcctcaacctcttcatcactttgagcgtaatcctctccactcgattcttcatgctcactcatgggatccggagtgggcgcacgacgactatggcgagtgcggngaggcatcactgtcaaatagcaaaggatgataggatattagcaataattctagaaaaatatntggagaggtgaaaatttgttatatcctgtgg

SEQ ID NO: 65178 - DNA, 427 bp, Oryza sativa
agcttcgatatccaaattctcactttcgagtcatggttgagtatgagatgggcgaactgagtacgataaccagcttaggattccgagagattctatgagattgaatcacaactttgagattatgcatggaacctagtgcaatatcaggtcttctacggtatgcgctttgtcctgtgaaatgtttaatggcatctctctgaagagagtggtttcttaacaagtcggaaaatccaactgggactgtgggaagctgggttttacttacactagagggatcatgatttgttaatgtgttggaggctctgcagaaaggcatcatatacatacaatttgcttggtccaaccgacgttatcgatggaaaatgtcttttgcgcgcccgtaaggctacatgctgatggttgctcaatgctgaagatggtgtatcat

SEQ ID NO: 65179 - DNA, 436 bp, Oryza sativa
tctacagctactgttgcatcgcatctacatttgcatctgcatcttacgaaggggaggaacatgtggtggacatcatctgatggcaatgtctcctcctgtattctgttggctggccatggccaatgccaagaacaactgaatgggctcaatcatgatcagagcctattgcaggcagctagtgattgtgtcactcgcttgatgatgtgatgcccttcactgatgatggatactaacaagtgtccaatggatgctgctgctatggctgctgcaaaatgagtcctttcctttggtgcttgcaatgaccatggatttcactcatccttgatgatactactactactacatgaccacagcagatgcaacatatgatgccactgtgcaaaatagattccagcttttattaactaactattgctgctctgatgcaaccacatgc

SEQ ID NO: 65180 - DNA, 463 bp, Oryza sativa
  unsure (1)..(463): unsure at all n locations
cctctaagncacctgcngcatgcaagctttgatgccttgacgtcttntggtttttttttttgaaatcacgtctttggttaggagtaacgatcaatgaaaacaatgagccaaaacaaccagctgtatggttcgtaaggttttcaacgttaaatttcttcgtgtttagacaaactaataaagttaattggatccatatcattataaatgtgtcattttaaaaaaataattactacttatttattactaacgattccatctgccttctttcctcttttgctggccggccaccccacatctctagcccccctctctctctctcccaccatagagcatatgacggtggcgcctatcaacgatagtggtggcgggtgcttcatacacgtagctctggctgcacaactccgatggcaatcccgagaaaccggcggctaaatcacccgtcgtacgtgcgccactaaatctc

SEQ ID NO: 65181 - DNA, 446 bp, Oryza sativa
  unsure (1)..(446): unsure at all n locations
agcttgcttgatacatacagatgtctagaggcccttggatatgtgaagtgctctggcaaattatctgtctgtcagcgagcagcagtggtctgagtttggactttggaccttttgacctgatccgtattgtatccttattgcattggacaacgaagatttggatgtttaacttgattgtcgtggatgtcaaaggtagtagttgggagatgtcatgtcagcaaggattgagctcaaaggaaagcatgagtgacatggaagtgagaatgtattgggcagttttttcagggtctgaaaaggtggggtccaagagttctaatggtagttggattcctgtattactttcaagattcttttcagtggctctntaaacatgcttctatgttcttttagcacaagattgtgtatcaagaacatggagttaccaaaaaaaaaagaagtaatgatct

SEQ ID NO: 65182 - DNA, 457 bp, Oryza sativa
ggatataatgaacgaaagccccaaatcgcataaatatgccctgcatcacaaatgggaacaaataaacctatcatacaatatcgttttgccctccaaagctgtatatgcaattcctaactgaaacaattaatcacagcatagagaaatttgagtagcagcgtgtgttgtttcaagctaaacagtttgatcacacatgacagtgttgaagtacatgcagagggaaatttctccacacaacctacacactataactgaagaatgccatacacattaaaagcaaatcaagactggcactgtaactaaatcaaggcttacacattagaagcaaatcacggttgtaatcatcaacaactaatgtccaaccacttccttctcatggccctatggcactgagctagaacgaataggaaaaaagagaacatgaacgactatgcagctattgtcgcggagccgcagc

SEQ ID NO: 65183 - DNA, 423 bp, Oryza sativa
acctgaggcatgcaagctgcttgcgcctgatgaggattacttattctaccgactcatcatagctcctgcacttgcaagattcaactactaccctccctgtccaaggcctgaccttgtgttcggcgtgaggcctcactccgacggctccctctctacgactcttctcggcgacgaagatgccggtggcctgcaaattcaaagggatggcctgtgggacaaagatccgtgactcccaacacattgctgagcaacttatgtgacaccatggaagtaattggcatctagcatccagaacactttctctctgaatctgcagagacatctgtaatatgatgataaacccacgtgtctgaatcctgatgcatatttggatgcaaaatttatgtgcaggtattgtgcaatggcatcttcaggagcccagtg

SEQ ID NO: 65184 - DNA, 456 bp, Oryza sativa
actttccctctctcgcccccacaccacaccacacacccacctgcattttcctcccatttctttccttctccgcagatattccccaagaatctcctcctcctcctcggattcccctctctctctcctcctacagagtaatagcttgtgcttgctttgctccgattctctctcttccctgtctctcctatctgcaatataccactatcagcatggcgcccagttgcgcgatcgatcgatcgagctccgtggtgccaagaacgccctgtacggcgcgccggtatgtgcgtggaggagtcagatggcgcggagaggctggattttggggagcccgtcgtcgccgtcgtcgacgccgggaagagcaagagcacgagccccgacgaactcccctcgcctcgggtgagtagggtactacttggttttctctctcttacgcatcgagagattagattctttgtc

SEQ ID NO: 65185 - DNA, 435 bp, Oryza sativa
  unsure (1)..(435): unsure at all n locations
agctctgtactattattagaattctcttctttatcatttgnggnattaaaatactttccgagtatatgaataccaactttacattatgtttatgttatactgaatatgctgctagcttatctgggagatgctttggtgtgggtataatatttgcatatgcagttactctatgtcatgacgatgatattagagtagtatttggtagtttagatggggtgtctagattaagggatatcattatttggggttatatgctgcggatgagaggtgggctgctaatggtgacagctcattacggatattcctccgcgcgtgtatattgtcctaagctaattccctatggagggtactcctccgtttntagccccgcttgtatggtcatgacatgctgtcgtaatgaactcggcagtcatgggtggcttctcgaagtaccag

SEQ ID NO: 65186 - DNA, 446 bp, Oryza sativa
tcttgtcatgccggcgacgtctgtgagcgtagggatgttttctcctcaccctgaatacatgttgctcctacaatggtggcgtctgtcatctccttgtaaaatcaaagcgtttttgattgttattctgtgatgaacaattggcatcgaagattattggttttgatatttggaatttatctttgaagtggttctggagatgattggattctacgggtgatctacaagaactgatgtctgtgatttggtccaatcataccgggctgtgtgtgccggttttaccgtcgttgattgagcggtcataccgtacatcccgcggtctgactggccgactccatgtcagtttcgatttccggttgtttggtaggatatccgtgattgattatgtttatggcttctagatggatactatacatatataatactgttgtttgtaacaatgagtcaag

SEQ ID NO: 65187 - DNA, 428 bp, Oryza sativa
agcttcgaataatagctacgctagtctccaattgcgtcttaagcgttggttttctttgcgggcatcgtaatggattggtggttcgttgcctctattttaaatagggtacggcatacttgcctgaatcttctctctcggttactcagtggagtgatctctctcttaaattcccataaggataaggaaaagtagacggttcgaaacccgtgcttaaatcctactcaaggcccactacgggtagcgagcaattaacaaatagagacaaggatgaggagaaatgacgcatatacggccggcctgggtcactcatgatgttggtagttcaagtgaattgtcgtagtgtaaggaagattgattggttttctgattgctacttggctggcataagatagaaagcgccccggcaggaattctgtaagcttgacttg

SEQ ID NO: 65188 - DNA, 467 bp, Oryza sativa
taggaccttaaaactcagcttaaagtaaagcctttattggatgtttgagatactagttatttataggttaagttcgatatttcactccgtgggccggctaattaatgaaagtaattcctggaggggaatcaatcgaagagattgcctgcccatgctacaattacttactctttatgactagagtgctaagctgcctccccggcaccaccactataatgaatggctcaaacaaataggagatgagaaagtcgagtagcagcactgatgggaacattttttgaaactagaatggttgatagtcaaataggagactcgcgttgtaggtaaggcttttcaaaagcctcgacttggctaacgccctttggttttgaggatcaatttgcccgtgcttgctggtgtcatggttgcagataagttgtttcggtgccatttcctttgttatgaatgaaaggcattttggagatttg

SEQ ID NO: 65189 - DNA, 419 bp, Oryza sativa
  unsure (1)..(419): unsure at all n locations
agcntttttctcaagttcccaactggctatctctggatttcctgggtacctaccatcgtagtatagtggcgtactcaacaaatggcagtatggcaccggtattcttcctttcatttcacggtatcaacaaccaaccgctcgtaattctgcagaagtgaaagattttcggtcgagtttcatacgcagtccttcgataaaaatcagctaaaaatattattctacaaagtagagaactgaatgcaatgccgtgaaaacgaaagctgccggcttcgtgaaagaaaaaatagctgggtcagaaaaccagccccatcgccaaacgacatatttgtaaatgagaagtagtttatgaataaaacttttatatacgtgttcctagtgattnaatagaaaaggcttgaaaaaacacttcgataaaaaaa

SEQ ID NO: 65190 - DNA, 369 bp, Oryza sativa
tgctcaatccatcacgcgtttggacgcggcgtatgactatgtcgtctacgcaaagtgatcgggcccggacgtgacgctgatggtagcgtcacatgctctgctggtagcgcgcggatcggatggacgctcgccgccttcgctctttcaagtagtcgaggtcatctctgcgaagctgatcttgatcagcctcgcagtacatggtggcccgaggagaccttatggtgagctcggatgggagaaccgcttccgcgccgtatacaatgaagaaaggcgttttcccagttgctcggcttggtgtaattcggtttgcccagaacactgctggctactcctcgatccatgaatcgacgtgcttctcgaatattctga

SEQ ID NO: 65191 - DNA, 428 bp, Oryza sativa
  unsure (1)..(428): unsure at all n locations
ctgcagcttcagcccaagagctctggatttgtggttgtctggcacatggtgtgtacgtgacagatcgtaccaccattcttctacattggcgcaggttgcccactcgtttatttggaggtcgatattgtttcgtacttgaagaattgtgcatatccttctcgacagtctgcaagtggctcggaggcgtaagaccgattctgtataagctcggctcattgggcaatagtgttggattggcctggctctcttttggagccgggctattattcaaaggccggaaagggtggtgagccanaataataacgggcgcgcacttagtggctcccttcattgtgagattgtctgggtgaatatcgagcccgctgcccaatgaattggaatgtgtgctaattaggttgagtagacaccgttctcactacaagaaaaca

SEQ ID NO: 65192 - DNA, 410 bp, Oryza sativa
tatgctttgtatggtttgaaacaagctcctatggcatggtattatttcttaacatcattttgcttgtgaaatgttttacaatgggaaacgtgacaaaacgctttttgttcttaaacatggcgattatcaactgttcgttcaaattcatgtggatgatatcgtctttagttgttcgactcacgcttttggtgtagattctgctgaaactatgctcagggaatatgagatgagcttgatgggggagttatcgtactttttgggattgcaaattaatgcaactacctaaggtacttttgtgcttcaaacgaattatacgaatgatcttttgatacggttcaagatggagaaatgtaagccaaattcatacatcaattgggtcttcagctgtgttggatactgatgaagatggt

SEQ ID NO: 65193 - DNA, 435 bp, Oryza sativa
  unsure (1)..(435): unsure at all n locations
agctnggaccaatcattcaactttcttcatgatctctngaacttccaacaagaaaattacaatgcaagttgattttttttcttcatccaccttattgaaccattgataatactgagcataaacaattaaacatgaacttataatggttttactgaaacagataagtcacaagataaacaagctttcctttggggtagaattccctggtgttgtcaatcctcttgatgggtatgtttggaatttagagaagctatatcacatctctctttggtccttattttccatgttcctgatttcctgtgtatttcagtgtagagtggatacaggagcacacaaatggattaacaggaatgtaccaatactttgtcaaggtaatatttttagtatctagtcacgtttttctcttgtggggaactagtcatgctatttaatatg

SEQ ID NO: 65194 - DNA, 437 bp, Oryza sativa
  unsure (1)..(437): unsure at all n locations
agctntgaagaaatatatgcactatttgcttggaaatcaggtggtcatcagaactgatcagcaaagtttgaagttcatggcaacccatagattaacagaaggaattcagcacaaactattgctgaaattaatggagttcgattacagtattgagtacaagaagggaaaagaaaacaaggcagctgatgcattgtctatgagggatactgatggagacaagtgcttggcaatcactctggtatatccagcttgggtggaggatgtgaagaacaactacatgggcgatgagaaatatgcaaagttagtaactggagaggaactgaatgaaggagcagaggggttcactttacaatctgggttactgaggtataaaaacagaatttatgtgggacaatcaactgatatcatacaaaggctgcttcaatcctttcacaatt

SEQ ID NO: 65195 - DNA, 401 bp, Oryza sativa
tgggatgccccttttactggagctgcacgctgcataatgcattgcttgattcgtaggatatttaccctcccagcttgcctgaagtaaatgagattatctaatagagaaatatatcattaaccctcatactgtacttgcttcaacaataggtggtgatttacccgaataagaatttcaagatttgattctagcggcgcattacttctcgtatctgatgacatgactgaaattcaagattgtaccacaatttgcttgaactgcagtgtggagaaatggaggaaatgccgatataccttccctggtcttatttactaaacacgaacacgataaaaagcagattgatcgatacctgatcgtgaatttgtgatctcagtgctaaacatgcgcatatgaagtacatc

SEQ ID NO: 65196 - DNA, 438 bp, Oryza sativa
agcttgtgaagattcctcataccatcatgtgctatcctccgatgccaaagccaccccatgtcagacttagccactaagcatgtctcatgtttggctttagttgaggaaaaatccacaagataaagcttgcccttgagaacacccttaaagactatcgaggagtcatcccttctaaatacggtcacatcaacatcggtaaaaagacaattgtagcccatggaacacaattgagaaacggacaagagattatagtttagagattttaccaagaggacgttagaaatggaaaggtcattgtagattgcaatcttacccaatcccattacttttccctttccatcgtccccgaagactatgttctcttgcaaagagccattatgatcaagggagcaaaacattgattcttctccggtcatgtgatttgtgcatccactatcg

SEQ ID NO: 65197 - DNA, 242 bp, Oryza sativa
atataactttcataaccctattgcagacccgtcattattttaaactagcctctatgcgacatttttaaaaaggaagatatttggcgctcccgtaataaatctccaccttataaattttggtaaggaaagttctctctcacacatcatgctgtgctccatgggaccccgagtaaggacgctcttggcctacctcaggttgtccattgtatgaaatgtctcacattggggaacattatcaggat

SEQ ID NO: 65198 - DNA, 447 bp, Oryza sativa
  unsure (1)..(447): unsure at all n locations
agcttaatggttttgcaggtgttctaagtacgcaagataattatctntgcatgttgcgcatgaaatttttccttgccactttcgttctatgtattattatttatctatgcggggactggaactatgcttctatacacaagtagaggattgaggcgagggaatagcattggctagtgctatgtatacattgttcaggatattgtactcgaggcgtgttgttatacggcaatactagattactcttggtagagcatctaggttggtgcattcaataaaagttgtgtcatcattgttgtcatatctgtttctgcgattgttgcagaattcctttgctcgtttgttcacagctccctccgtcccanaataagtgtggccatggttttccacgtctaactttgatcattcgtcttatttaattttntttaaaaaaaaataacaacataagtc

SEQ ID NO: 65199 - DNA, 441 bp, Oryza sativa
atattgagtagagttacagcccctactctccttctcttctctctcatttatccacctttgttcccttgtgtcactcctctctaattatcggcacacattggtctcgtcctacctcgtgtggttggcaagcaatacgtcagtcctgtatgattgcggatggaccccccactcccatttcagtgacggatctagaaaattgaagccagatgaaattcactttgacacatgactataatcgtacgaatctgttatgcttgatgtgctgatgattcctctgtcaataacaaatctagaatcttttttaaagatcagatgaaaccactcaaaaaaaaaatcacctacctaattcggtaccaacgacatggcatttccacctcatgtgttgtgtgctgctgcgctttatcaattgctcacgacaacctattgtagcctcactattgc

SEQ ID NO: 65200 - DNA, 360 bp, Oryza sativa
  unsure (1)..(360): unsure at all n locations
tacagatacttcctcaaacataaaattaagttttacaaatacatgaatgaacattcttctgatagattattttttccccagaataataagatgccctttaaagcagttttacacaagttcatgaatgaacattcaaatattacacaccagctccaagtcattctttccatcttggcaaagttaagatcgatgagcaaaaccttgtcattccagttgcagtttaaaaacaagaagaaatggatggaccgataatggatcgatgttctggttacattaanaaaacacaatgctgatgcagctgtttccttgttggctggtgctgtgaatattcgcaagccatatacatgtacctcatccgat

SEQ ID NO: 65201 - DNA, 443 bp, Oryza sativa
  unsure (1)..(443): unsure at all n locations
agcttgtaaagtggctgctgccatcccagctgctgtttcttattttgtcatgttcgttctgtaaatgtgaatactanggtgtcgctgcagaaattcagatgtattactacagggtatgctcttgcttaagtatttctcgacactgaaacagagtaaagcaaagtctagtcagattcgttttgtttgcttcaattcagatcatgcagtgagcttgctttttacattctaattgtgctagtatgtgcaattcagaccacattcacccattngtaccttttcgtcagaaaaatggaaaaatatgatcagattttgtagttacccttttacacaaggaatgtggtaaagatacacgcatcaactgaacaattgctgatgtagcttatccaattcaacatcaagaagttctgaaaccatcccaagcatgtgtggctcacaagaaaaac

SEQ ID NO: 65202 - DNA, 381 bp, Oryza sativa
atctaagctcctgtgattttgtcttgccaatacgtcaagttattctccaaaaaaaaaagaaatttcccaatgcattttcataactgcgtgaagcgacaacgggtgaatgatgaaattaatgatgatgacgatcaagggaaattttcatctaaaatgactatctagtaatcatgtccggaaactttctaaatggtttggtttgagccgcccctatcctatactacgttctaaatctctgaattagtcaagaatgtgattcatatgtattctactaacttacaaagtacggttgatcaacgtggtctttagttagtgctgtctgcttgtagcattcaatggtataacgaaaggacactgatcttttatgccatctgcgtgtta

SEQ ID NO: 65203 - DNA, 429 bp, Oryza sativa
  unsure (1)..(429): unsure at all n locations
gcgttctttactgattggtttatacatctgnntaggctttaagattacaattgtgattttgcaaatgtttcagtagttttactcgatgccctataacccaatcctgtattcgatccaatttagtaatttacgcaattgagtttagaatagtttcacaaatcaattcggagtcaaactatcaattgtttcactacaagaaatatgatcttctgtgacgaattctttgtaacatcggagctattcgtcattagcacattccattttatgaccattagtatgagatgtactgaaaaaaaaaggtgttcgtcattaataccaactagaaattgtcataaagtattngaatgggacattgtgacgaatattaatttgtcataagcggcanaaagcatacgtcacaaatttatataatgcatttctagtaaaata

SEQ ID NO: 65204 - DNA, 423 bp, Oryza sativa
ttcttacctgtcatttgggatcaaaattttccaaatgtgcaatatgcaaacgatacattgctattcatgcaatcctctgggaaacaacttctagctctaaaagctttgttcaatacagtgactctttccacaggattgaaagtgaactatgcaaagacatgtctgatacccctaaatttggatgaagagaaagctgatagtctggcaaaaacttttggttgtgctcatggttctctgcctttcacctatctatggctccctctcagttgttctaaacccaatgtagtggatttttctcctctcactaatcggattgaaagaagacttgtggccacttcttccttcctctcctatggagataggctaactcttgtaaattagttctgtcagcaatgcccacttactatatgtgctcacttatct

SEQ ID NO: 65205 - DNA, 379 bp, Oryza sativa
  unsure (1)..(379): unsure at all n locations
atcttgccacagctgaagcactcgtcgactcttgcctgtttgnggncgccggaggcaactccctgcgcgcctttgctgtcgcaatcctctgcatgtctccgcgcccaccgtagctggacacctccccgcaccttgagcggattactgacgtctagccgtgaaaatgagtcacccttcctcgcgtcaccctgatatgcctcccactggtcgcgagtgagacagatcattccgccgatggtgatgggccccaagagaggctgtggatcatcaccatagacgaccttgaggcgaactaacgcctgctagatcgacattgtggagaggtcctgcatataacagatccatcgatccatctgcctgtacctgactaggatgtatc

SEQ ID NO: 65206 - DNA, 446 bp, Oryza sativa
tgtccttaagtcatactaccgtggcagtagaggttatatatgtctattgattaatctctcatcctcagcttgaagactcgaccataccattgtacatactctggcggtccatactgtccagtggttccaagtggaggataagcattcctatcatctacgcgcgaaagtgggcttctttcaatatacattccaacaagtggtggtatatcttctgctggtgcaagcatggcatcctcaccatacatgaactccggtgtataatgtccctggcgataccttggcatattgattctttctaaactggctaccctggtgcggacgcgttgcatctcatcaaatgttgaacgatattacatatctagtgagcgcacaaagtttgcaagatggaggtatggggtgtgtattcctacacctatttcaactaaccctgggtaggtagtgtgttg

SEQ ID NO: 65207 - DNA, 407 bp, Oryza sativa
agcttgtgttaagttgtgttctgatgcaagatgggaaggtggttgcctatgcatctcgtcagttacgtccgcatgagaagaactaccctactcatgatcttgagttatctgcagtggttcatgcgttgaagatttggcgtcactaccttttcggcacccgtacagaggtgtatacggatcacaaaagtttgaagtatatctttacccaaccagatctgaacatgagacagcggagatggttggaatggattaaggattatgacctgggaattcattgtcacccgggaaaggctaatgtcgtagcagatgcccttagcaggaaaggcttttgtaatgctatggaaggccgacagttgcctttggaattgtgcaaggaatttgaaagggtgaatctgggaatcgtcagt

SEQ ID NO: 65208 - DNA, 451 bp, Oryza sativa
ggctcctcaacgaattgtcatccatgcatcccgaatctgtcctatatcccgcgttgcaacagctccaactccaatgagtgcactaccacaaggtgtcaatgctcaatttcagccccagccaccagctgacaagacagatgccagtatctgcgttgtacctttggaagttccaatccagcagctgagaaatcaagtacaagatgaagaacccaagtgtaagatagttgttgtttgttacaactgcagtgaagaaggacattactccaaaaactgtccccaaccaatgcaaaatcgacctccacattaccgccaatttacacgaagcagacattccaatcgtattgtggtcactggagcaaacgccgtacccgtaatgcctcgtgttaatcataacccatagcagatacaatgcaccagtgctactcctgctgcacctgactctgcaataaat

SEQ ID NO: 65209 - DNA, 431 bp, Oryza sativa
  unsure (1)..(431): unsure at all n locations
agctgtggtggagacttatttctgtcatgagtatcttangccctggttctttgagggactgtaagaagaagtccccccacttaagtccctaataggtcctagagaaacaaacacgagggactaaaaagtccctaatagtgcattttccagaagtcccaaatggaggtgcttattgggaaaaagtggctctatttcaaccactgacccttcacgccagccatccctatgcatttgctcgcccactctctatcctcgccttatctcttcctcgcgtcgtctctctctcgctcctcacaacgccgcaccctcgccgccgtctctctatcgcttatgacaaccccgcgccctcgccgccgtactgcgttagcctccaccgcagctacgtgctaactaatactctgcccgacgcttggttcgcctggtctcgtgca

SEQ ID NO: 65210 - DNA, 432 bp, Oryza sativa
agctttatatctctgtgttctgatatcctactatattctcactctggtggatatattaccttggcttgcatatttcaatgtgctactttataccctaacttctatgctatatgatacaaactccatttttaagggaagtgtcaattacaagcatgaaaggaggttatcggcgggtgttccagcggcctattgattctgagtggtatgccttatcccattgacttttcacttcattagatgaccaaaatcatcaccttttctttcgtataaattctagccctgttccactaaaaaatgctttggtgtgactgtagggaactcatgacttatacagatgacacagcatctttagcagaaactgatttggatgttctgtccagaaacatacctactaaagccatagaagttaatgagactatatctagcgcgatt

SEQ ID NO: 65211 - DNA, 376 bp, Oryza sativa
tcattgccctaccattatgtagtagatggttttttaacaaattttacgagccatatgttgggatacatatgttgggatgtaagctattcaaactttctccatacatatgttgggatgtaatcattctccttatcttaaaaactattgccacgaagttgagcttttaatcttggaatcagcggtacctcatatgtgatcagacaaggtaaaaccctctcctgaataactttcttcatgccccccatctatactactgtgcaagccatatggcttccatctcttacaatgtgcatctatatcttcttggtattgttcttatctaaatgacatccatatttgaatctagagcaacacaatcattttcccgtgtgacaat

SEQ ID NO: 65212 - DNA, 448 bp, Oryza sativa
  unsure (1)..(448): unsure at all n locations
agcttaaatgctcaggaataatatcaatcgagagaaacgagtaccagtcaagactcaagagtcctcacagacaaagtagcagtcaagagtcaagacttggatgctcctctggtcacatccatatgtggatctttcgcttaattcatcgattcttttgtcttttccatcatttctctgctactgcaagaagaccatttttagttgcagagaaatcaaagtgtgaatcggcggggagaaaacgatttcagtcgtccgattctgaaaatcataagggttcagttcactacacccgtagctcgcagagattggatttcaaactctcggatgtcccctcatagattgcatgtcacttaaacaatcgtgaaaagaatgtacaagtattgaaaatatgcattaacatgcgatatatcactgtccanacatacaacttataattcaacttctacat

SEQ ID NO: 65213 - DNA, 295 bp, Oryza sativa
tatttttatcacggggggaaccgagctttaaattgagctttctgatttgttcctaattcggcactctgtggataaaacggtctggagtgggaaaggaaggaaaaatccaaagagctatcggttataagagatgaaaggttttaacccaaggggggaagtattgcaagccactggccgccaaaaatggtaattggggatcattggacggcttttgggctcctttggtcttcaatgaatttgaatgtttgccgcaaggccaggatctttggtgacgaaggggatattaagggaaggg

SEQ ID NO: 65214 - DNA, 229 bp, Oryza sativa
agcttgcattaaacacctaagttcccgtgactttctgagtgcgaaagtactcacccttgctctatataaatatatacatagttcctccgccctgaagagaagataaggtgaagtgaagattagggtttcgtcctggttcccagccgtcgcctgtggtgttgggtgttagttcgttggatccgctgctgctgctgttgttggagttatctcctacgtgttgtctgatgcc

SEQ ID NO: 65215 - DNA, 270 bp, Oryza sativa
gagccagccgtgaagatttccaaaagttcagtaacttcttgtttcgatgaatcaatcgccgaggaatagaattttggcacccgcatgtgttatatggtggggaccgagccgcgatctatgcattctctgtgcattatcttttcgtcaagagacattgcagatgacctttaagaagagagaaaaattgagaaaggaaagagaaagggaagtactaatgtaccatatatcctttgatcatgttgggctgcagtatattaataacgtgataat

SEQ ID NO: 65216 - DNA, 446 bp, Oryza sativa
  unsure (1)..(446): unsure at all n locations
agcttccattctcaagtagcggaggtggagtttctgaatattacatttattctcagaatatttgaatatgtagttgtagaattaaaaaaataaaataaactgaaattagaagcagaaaaaccagtgtttctagattaacgtgactaacaaccagctacttcccagaaacaattatatgtagtaatgtatatatagtatctgtttccaagaggttctactctctttttatgtaatccaagaggttctactccctttttatgtaaagctaaagatctgtttctagctcccaacttcaacttacctagagccgaagctgtgccaaacggtccaaatccattttttttggagtggagttggcagagctactcctagaaaatgaactacgagggtggagctggngttttctgctccatagctccactccaccctataagacccataatact

SEQ ID NO: 65217 - DNA, 446 bp, Oryza sativa
actgctgttggatgtcaaactgctgccttctgagaccatattctgtcttataccatgattgaaccattcttctcctctccaccaaactctttaacaactgggtaattatccatgattgcaaacacatgtatcatcaaatagaaaaaatcatgcccatatgaaaaatacattttgtacatagatgatatgtgaatcataagaaaaagtaagacgtgcaaaactgcattacataactaaatgaaatatgataaaaagatagacatgacatggagacaaggttagcatggaactgctttagcttatgctaaagccaacagtaattacggtgaggttttatactagttggctgttagattggacgctgtcttaaattgcatcttctttgtgcccatgataaaacaagtgtatttcatggcaattggcaaatctaacagatgaagtgactg

SEQ ID NO: 65218 - DNA, 451 bp, Oryza sativa
agcttgtattgagcttaaagctagacaactatggtcgctcgagcttatcttgtttactgcccttattaaggaggcactagatgagccatatctcatacccctcaagtaaaaacacgcctaaaggtggactcaacactagaataatgcttaggacaaccaactaattttggcccacatcatatttaatatggtaaaatttaatataagtcaaacaccttacgacgacgcaggttctgcactcactgcgtccctccccacccactcctagctacctcccccatgaatcccatcgacatatgccactacccctaccctcaaagaaacaaacgagtcttgtcgcccgatgagccctcttgcacaaatctacccacttccctatcaacgtaaccatcaatcaccttctaattatcgtcgctacttatggttgcccctatccgcaagtacatatgtg

SEQ ID NO: 65219 - DNA, 443 bp, Oryza sativa
tcgcccttctctttaatccggtgaaatgccgaaagtgtggtatggggttgtaggtggctgcgttcgttatgtctgtttcccaacccaaacaatgcgcacgataaatggagtggtccattagcgcgtgattaattaagtattagctatttttttttaaaaaatagatcaatatgatttttttaaacaactttcatatataattgttttaaaaaacgcaccatttaacggtttgaaaaacgtgcgcacggtaaacgagatatgagagttgggaaccaagagtagcgaacaaagccttaagtctacctattgggatttaaagcttgattttcataaatatggttgtgaatatctttagttggtacatagacgagttacttcctccggtgaatattaattgtcgtttttggcacacaaattctactaagcgcaggtcaattcaactg

SEQ ID NO: 65220 - DNA, 443 bp, Oryza sativa
agcttctttttctatggagaatattgacctgtttctgggagaggcagcggatgatgtccagggagaggatacgggtggggaaatataagtggatagtgatgccaacagtgatgatcgggtcaagcaagagaagagccgagaaggaattgatcctggatgctaatgaaaacacatcttctccgtttatataacttggttaaaaaacatttataaaacttgcccattaaaacattatacaggctggaccattgatattttctaatggttggcctattacgctgctctgttgcgtttcttttctagtaccttatgaatatgggtaaagtgggtattattatctctatacccaaaacttaaatggatgattcatctttactcataacctcccaaaacaatatagatatgggcaacaaatacctatttgcagccacagcagaccactt

SEQ ID NO: 65221 - DNA, 140 bp, Oryza sativa
catctgcccctatggagccaccgtgggacaagagggtctcagtggcgacgggcaagagaatcgtacgactcttctgtgagcaggatacgcgaggggcaaacccgacggcggcgcggtatcacaggcactagccgccacaa

SEQ ID NO: 65222 - DNA, 442 bp, Oryza sativa
  unsure (1)..(442): unsure at all n locations
agctntgtggtgtcattaccactgccactgcctagttcacatggtaaatcagcactaccgtacatagatccaccctcagcatggctttcattataaaagccatccccccctctaccaccatgaccaccaccaccacttacaccactgtttaatatctttccttgtcctactccacttcggcagcctgaaattagaagatacgaaaattaattctgggatcagttgccaacagcataccatcaaacaaaagatcatcctgtggtgaaatagttacaaccagatgtagttaagtatactaaagcatcttttttgaattatgaaggaaaatagaatataaaacaaatatatagctcctctcatcattatttatgaattagccactgaagaagctgcaaggtatgtaaacagtatactgcaacttgagatgacaaagccctctgag

SEQ ID NO: 65223 - DNA, 370 bp, Oryza sativa
ttctctctgtcccatgggtgctcatatcctagacagatagaaatatgagatggaacgtgcttactgacacattcatatcttgcattctagtgatgatcagaacctggattctggaccgggagacatggtattaacacatgacgaaacctatcttgcagcatgtcatatgtccaggagagtgatctcaatggcatatcggaaagcactgacttacacaattacgactgggatgcccatatgaaatgatcattcgcagaatccactagaactgtccttgagcagcaccaactagaaaacttggagtggtagtgtgcaaaggtacatatgacaaaagctgtaggtacagatcgccgtaccttatttgcctaca

SEQ ID NO: 65224 - DNA, 450 bp, Oryza sativa
  unsure (1)..(450): unsure at all n locations
ctgatgcatgcaagcatgggggtgtatagaacttttctattttttttaaaaccatgacaagaagtatctaacaaatcatcaaattacaaattaataccatactatctatcatatgaccaagttggatagagaccaatcatgcgtttatgatataaggtagaattcgtctttttttcagagaaagctaactcagttaaacatctgagataatattatcttgactaagtagttaaatacaacaatttttactaacatgtactcatggaaaactaattattcatacattcacatgcaaaacgtaatgataaactaaaaatgttcataattcatatgccatgaacagaaacaatacataccgngtgaaatggcacattattcttacccatgaactgaaacaattctacttttcatgatactttcaccatttctcccaatcatgtgtataagaag

SEQ ID NO: 65225 - DNA, 435 bp, Oryza sativa
agcttctaacatatggctgatataaactctttataagttgcatctaaaaaggctaatacacagcgacttctacagcatgaaaaggtggtccatttcatgagagcatgtttctttcacaaccatatttaaaaagtagatatttcatgagatcttagtaatattctaccaaactaaggcggttaacataaataaagcaaaggggaactgatggctgtgaattcctgcaaaaattcagatgcatcatgaaaacaacaatgggaaggttcctagaaatgctgcaagggaatatagatcagaaacagcactcagtgaatctgtgatacaactatttcagagattgtgaaaaatgcacatgcttaaccataaatctatcattcctgtaaagttatagaactaatgtatgtcctgaaaccataatgttgctttactctacat

SEQ ID NO: 65226 - DNA, 440 bp, Oryza sativa
tctaagttcgaatcgaactttatacatcaaatattctctgcctcggtgtggtgtctctacttatgcggcgatagaggataggggagagaaataataagggaaataaaacggaaaccgtataaaacaaagaaagaggcttatgtattctaatggattttactcctagcctacatgtaagttaaatttcgcgggtaaatgggtaaagcgggcatgggtagtgattacccataccatgcccatttacccttcgacatatcttttgacctaataagaaacccatgggtataaaatggagaacaaacccaaccctaatatggtttttacccacgagtaaactggcaaacgggcacaattgccatccctatgccaaacatgtgtccacaccttcacttacatcgtggaccaacgtgtggtgttgtggttcttagatgtaagattta

SEQ ID NO: 65227 - DNA, 467 bp, Oryza sativa
atcctcttagtcacctgcagcatgcaagcttgaaagttgtgaagtcagcgtcagataggtggtttatgtcacccctgtttctgcttggtcagaaagattcaaagctggttgttgccgtacctccctttaatcaaaacattttgtatagtttaatcgcgaacagataatagctcccaagttttctgaccaggagattatggcgcactctccctatctgtatttgattaatggagaagatgttgctttgccacttgttgtttgtgacccactcgtctcccccaagagacaagatcagttattcctagctggctaacttggtaacttgcttcagttaaactcctacttagttgtgttaggccactcgatcctaaacggtacaatatttgctaaaactttttatatattatgaacttcttataatacttttaaatccatgttttaaaattatataagtattaagtcattca

SEQ ID NO: 65228 - DNA, 415 bp, Oryza sativa
tcccttcattcatgagattcttgatcattgtactgatcgtaacagtcatatgacacatagatatcagcgacacaatcagatcagcagcagttggaacaattaaaacagcttccataaaccatgactggactagttaagcagttgttaattacccttgttcagtatcatattttgcttcttcacgaatgagatcaccagcactcagatgtgtaaagccaaactgcttaacaattttggcacattgagtgcctttgccactgccagggccacctgcaaattaaatgattcagcaaaagctcaatggagtatgaagtcacatagtactatgaaaagctgaagcttgtagtagtgtgagcactacttattcagcacagtgggttagtttaatacagataggcatacctatgacgaacac

SEQ ID NO: 65229 - DNA, 450 bp, Oryza sativa
ttaagtcacctgcagctgcaagcttttcgctgacttgatggcctcgttctcttgcagacaacggagggttgactaccactagccttctcctcctagttccccatcacatccctttccacatgcccctgctggttcccctccagatccctctccacgttccctttctcgttcaagtactggtttggatcctccgtcccctattcaaaattacaatactggatgcttggatccgcgatcgtatcgtacaatatcatgaccctcaacgcggtcaggcatctgttgatacaagaaacatctgctaagatacgagacatttatgtattaacaatctaagacatgtatagctaatgtaaatgtcgtaccttttaaccctacacaacctgacagtgctaagactaatttccaatggtgatataagctaaggctaagtgacgtatattatacaaccct

SEQ ID NO: 65230 - DNA, 438 bp, Oryza sativa
  unsure (1)..(438): unsure at all n locations
tacaatagcttcgttagagtggtttgatgttctacaagttacaacagtttcatttaccggattggatggcgatacagtttaaacatgttggcataagatggatattagtttctgtatccttgtatcttgtatgattaaatctatactcaatcccattacactccagtaagtcctattgtttgcatatgatggctaaaactcataaattgatttcctttgtccaagaaaaggattattaacttggaaccgcttaagaaagtattattaaattggaatcaacatgcccatgctgtgactttcatgctcactgtatccattgattgtaatctgcatactgatacaagttgatcatactggtgtgcattgcgtccaaatgtccaattgaatcacacaattnggatgtggtggctcatctcgtgatttcttttgttatcttta

SEQ ID NO: 65231 - DNA, 356 bp, Oryza sativa
  unsure (1)..(356): unsure at all n locations
gaacttaaatacctgctgacgtttcatatggactggggcctttaatttgaatanngcaagcaggtccccattgtttttcaatggaggatcaaagccacttagatcgatatctgatcagcaaagtgacagaagttatgatctacatgttaccaagtaaactatacccgaggctagtactaaattttaacatcttaaaaaatacttgctgcaaatggcaaatacagcagatagagtctttctttatgtacaattacaccaatactgcattatgacagtttatccacactttcttaattctgacaatgtaatatacaatattccttattgataccttacatatacgaatccgcttaaat

SEQ ID NO: 65232 - DNA, 453 bp, Oryza sativa
agcttatctgaacagcttagtagttgctgatggatacacttgcgcaatgccattagcaacactgatgataggccctcattgtatacacacatgaaaatgatagaaagataaggcgaaaatgcctccatttggacaaaaaagctaaaatctcaaatatcagataagtgaacaagtgagagttggttaacagtaacatttaagaaatcaatattcgtccaagtagctgtacaatgactcatcgttcctccaccgacgccttgtgagcaatgatttgaggaaccccctgcccttgcttgagcttttctcctgctctttgtgattgctccagtcagagtgtaactgcattgaagtttgtctctgcaagaaatactacatcagaagcaataaataaaaatttcttctgaatatgattgaactccaggaaaacaaatgatgtaggctttcttatgatct

SEQ ID NO: 65233 - DNA, 491 bp, Oryza sativa
  unsure (1)..(491): unsure at all n locations
accctcgatcctcagagacacctgaggcatgcaagcttgtgtgttgcaaattatacaattcaatctctcggacataaagggagagcatcttcaagagcacctcatatagcctcaccatccaaaaaatttagaaaaaaaataactaaaaaaaatgcccctccaaatctccaataataacccctcaatccgatatggcatctatctagcctagtgtttttcaaaaaaggtaaaagggttaagatattgagcactcgacctttcaaacgactaatggtgagataaataagagcaaataactatatcctactcaaacagttatcatcgaagaaatatcgatagttataaacagagatttaaaaccttggtctaacccctctaataaccagcatcaaaaagtcacaaaatagtcatacgaagaggagcggcaaagcataatccctctattnttaatagatgacgcattgacatttagatacatatntgaccatttg

SEQ ID NO: 65234 - DNA, 449 bp, Oryza sativa
ctaagctttgatgagaccttcctaactggttggttgtatacacatcatctcttgattttatttctttgtacttggatagacaaaacatcaccattagcacgagaaccaccgcggataccaccccaacaagaatgtatccaacaaatttcattgcagaaacattgttttttcttgatggggcattccctgctggtgcaatagaagaaattgaaggttcttttgtggggacatgccctgctggaggtgatactgatggtaatggtgtcggtgcagcatgaggcaatgctgatggggctatgctggtattgaatgggttcccatccttcctgtgtggtacattagtttgaatgaacttttcttctttcgctaaacacaaatatgcacatgaaaaactagttgattcttaatattaaaagagtatacgagcaatggaattgattttaaacatt

SEQ ID NO: 65235 - DNA, 431 bp, Oryza sativa
  unsure (1)..(431): unsure at all n locations
acctgcggcatgcaagcttctcttcagaagggttaacagnacggctctgagctactcagctcttcttattagntactccagtattactgatctctgactgaaaagacgtggtttcctctacaaattagaaagtagtgtatatctttgatttgttgcttttcactatgatatggctaaaaatgtaagtgctttttcttggatatatttgacgtatagaatctgccaaagttggatgccgatttccattttccacaaagttgcacctgcaaagaaaaggtagcttttctattggtcagtgtatttctccctttttgtaaatgagaaaatgactagtggtcatatttatgtgtatggtcaagaatggagactcaactgtcaacctaatgatgtcaacatcacctcttactttntccactttgcgtggtcacatt

SEQ ID NO: 65236 - DNA, 470 bp, Oryza sativa
gacattaaaactaagcttgggacatgctattcgtcaagaggagcagtgtactttatgaaccgtatgaggaatgcaaccccgttcatgactccccatgggatatgttagaagcctcgtttcacaatgggacgtcacggtggaccttccaccatgattatccggcagcaccgtccttaccacccgggtagcttcaacaagaaccaccatagtggcagtcacaacaacagtgagcagcacggtctcaaccctactccgagttcactaaagattccagcccaatcagttcagccagctctgtcagaacagcccaagatgttgggagaaaaacccgaactctgcttcaattgtaacaaacccggacacacggtttggaagtgcccgaagccaagacgtgctggacccaagttcgttcaagcccgtgttaatcatgcatctgcagatgatgcgcagtcagcaccagatgttatatt

SEQ ID NO: 65237 - DNA, 473 bp, Oryza sativa
gatcctcagagacacctgcggcatgcaagcttagctcgttccttattcgcaaacattctcttcatgcgctccgcaattgggagataccacaccacctttgctgggcctcccctctttaacttacttccttcaccttcactctttactcgtttgtatcttgatgccccacagatagggcagacatccaagtcagcgtattccttgtaatacaaaatgcagtcgtttggacatgcatgaattcttttgacctccaggcgcaacggacataatacttgcttcgcttcatatgttgtctgcggtaaattgttcccctctggcaacagatcctttaacagctcaagaagttctgtaaaactcttgtccgaccagccattactagccttaagcttcatgagttccaacacgcataacaacattgctgtgcttcgacttgcatccatcatacaacggcatctgacaatcttccaccaact

SEQ ID NO: 65238 - DNA, 446 bp, Oryza sativa
  unsure (1)..(446): unsure at all n locations
ntacctttntgtcgaaacaagattgtggcaatactaatttgtggtggctatcaagctagaaaagtggatgggttcagagacaagggaatttatacaggttcaagccttcttaatcaagaagtaataccctactcctgtccggtgattgatccgccgagtgtattattgatcgtatgatctgggagaaaatcgtgcccctagatgcacccggacccctccttatataggggaaggggtccgtattacaaagtacaaaccatatccctaacggaataggtaattacagataaaatacaatcgtaaccgactaggatcccgggtatttccttgacatacaagtttggtaattaacccgagtccttttaaagatattctatctatacatgacaccccatacccagtcggatatacatgccgtgtaggaatggngtatccataatctccac

SEQ ID NO: 65239 - DNA, 448 bp, Oryza sativa
  unsure (1)..(448): unsure at all n locations
agcttcactttgtcaattagtcgaatgcagcttcttcgtggcattagaagtcgatttgcccctaatgcgttgtttagtgccaagtgcgtcctccatctgtgcgagtgggagccagctgagctgttcttttggggtttaataagcacaatagtgtctatctactatagtactaactactatatctatcacgtagacggcgcgcgacttttaagatctgaccttataaagacaaacatacaggtgttaagtattttgttagcagtaagacagaactgaggacagatgggaagggcaaacctaagaaaggagagaggcctaacaaacgaaacacacatcagcatgggatcctactaataagaacagtttactagtactatcaaactagcctgcaattacctgagcattnttctatctccattctccaggcggacttgtgccagcacgcact

SEQ ID NO: 65240 - DNA, 453 bp, Oryza sativa
cgctaggtggggcgcatccgctctatagctcgtatcttctctgggttggcctcgatgcctcgggcagagaccaaaaacccgagaagcttgcccgcatgtacaccgaacacgcacttatcggggttcagttttatgcgggcggagcggagactctcaaaagtttccgctagatccgagagtaaggtctcttggttgcgcgtctttacaaccaagtcatcgacataagcctcaacattacgtgctatttggctacccaaagaaattcgagtagtacgttgaaaagtaggacctgcattctttaacccgaagggcattgtcatataacaataagttcctatgggggtaatgaatgcagttttttcctcatactccctagccatgcgaatctgatggtaaccagagtatgcatctagaaaacacaatagatcgcaccccgctgtggagtggacaatc

SEQ ID NO: 65241 - DNA, 168 bp, Oryza sativa
gcggcgcatgcgaactgcgactcaagccgtttttttccttttcgcaagccaacaccaccagggaggattggccctcattgttcacacccatgaatatgatgaggtgactatgcgacattgcctccttatggactaataagctacgatccattaatgaggtcagtgaac

SEQ ID NO: 65242 - DNA, 441 bp, Oryza sativa
  unsure (1)..(441): unsure at all n locations
cgtgacgggtgggggantgcacctaacttctcgatcaaacaccgtcgtagttgcttggacagaaagatgtggtataaacgtaaaattacttgaaatcgatattgatacttctccagaaccgcaacacaagcggctcctgaagaacacccaccaccaaggaagtagtactacttctcctggtgcctctcatttctactgcatattttttattccaagaaattgaagtgttcacatgcactgtgtagagtcctatatacctacaacacaatgggtgttggttttatggtcgaagtaatgatggtgatatgtagaagtgcccaaggaacgagtgttctgggaacatattatgtaccaacaaactatacgtgaagatcttgattggagacacaactgagttgtgaagtgtagtttactagacataataataccaatccccattct

SEQ ID NO: 65243 - DNA, 446 bp, Oryza sativa
  unsure (1)..(446): unsure at all n locations
agcttctacattggaagttggctccttccctcccatttccattatcactgaagaaaatatttgatgaatgaattctccattcaatttatgccttcttctcctaagaaaaatccttgcaaaaaaaaaagaaaaggagggaaaggcaaggctatgaaaaaaaatatattgctctttcaaaaatatggagcaacatgaaaaaaaagagagtgggaaatagataatggcaatgccccctctacaattatgaacgagaaaactggagaagaagtgtaacagaggagaaacatttcctttcccatttntccgcatatatcatacactttccaaccaaaaatgttcaatccttgattcgagagtacgataaattatcttcttgagtccaagtatttgtgtttgcaatatatatgatgcaggtatgtcccgaattatccctaccaaactncaca

SEQ ID NO: 65244 - DNA, 417 bp, Oryza sativa
tccgagtgatcaaccgccgactgtgttccattcggctgcaactgaaactgctacaacccgatagcccccgactggaaatcagtcggatgtagatctaaatcaagatatccctgaagctgaagcgcatacaacttctcatggaccagaagttggtaatgactcattgattgggtctccatataaagagcaaggatcaacctgacgctcaaccaggcatattctcaggtaactcatcttctcaagtgatgccgttctgaataactccagcttgttcgtctaatgtcttgggaatacatcatgtccactatgcggcgacgaagaagaaattctccgcataaaggcagctaatgactctcgtcctcctatcatactcaaatggtgggacgagaactctcaagtttccggcattgttataaa

SEQ ID NO: 65245 - DNA, 423 bp, Oryza sativa
agcttgctgcataaactgaaactgttttccatataaaaaacggaagaatttcgcttgatttgttcctcatagaacaccttagcaaacagccacaccctataaacgtagttaattcttttagtccaggacatgaatatactctcttagtatggtacggatttgtatcggagttgctgcggtttatgtagtttcaggtatctttcccacgtaaatctgaaatggttttcacagccatgggtcctactagaataccaccaagctattcagcttgtctcatgcaagccaaggctcaaggtgacacctatgtttgtggtcagggttgtttagttagctgttcgcttggcatacgtatgaatcttgttttgaatccaatagaacatcacatgcacaggtagcatctcatgcttgtgatgttctcttttc

SEQ ID NO: 65246 - DNA, 461 bp, Oryza sativa
  unsure (1)..(461): unsure at all n locations
agatcctctgaggcgatctgacgcatgcaagctcgaatcaacaaacaaaattcatgagttcttacgatttatgangcaacatcttaacaagcacataggttgaaaaataaacactaaacacatatacctattgcatttatcactctgtctcaaataaactctagcacaaaataaacatcagaattatcgaatttcttaagacttcttgatcatatttttctcctttattccaggtatgtccctgtcgtcaatactgtttctaaggattcggcacccattattttgctcacatcgaatacgtccttgtcgttaagactgttcccaaggattcggtattcattgtttcatattttttattctctttctcacaatgagcaattaaaacaattttgaggaataacaattcaatagagcatatatattgagcatgtataaatcagaccatatgctagcttcaatat

SEQ ID NO: 65247 - DNA, 396 bp, Oryza sativa
caagccttagcaaaatatccttttcttaaacattttcgaaatttcacaagcttcagccaacagatcaaaacaagaagtaatgatgggttggttggctagttacatgattcatccaacaagtcataagtgagagcacttaaatgctttcttgggaagggctgattcacttcataaagttgcaaaaaggttggctgttggtggatgcagcaataaatgcatttgggggtggctgatgtggtgatgagggtgctgctggttgtggtggacgaaaattggtggggttggaggtggatttcgtggtgaatatggtggtgatggtggcaacgggatgaatataaatgaagagatggtggaagtgtttgcggtgacgaaatcgtgagcagaactcgtaactct

SEQ ID NO: 65248 - DNA, 446 bp, Oryza sativa
  unsure (1)..(446): unsure at all n locations
agcttgncaattngntaagttttctagtgtgctgtacaaatgtgcctttttccaatgagaagtacacatggagattgcaatgataagtacacaaacatgtcagttgtcaagtgtattacatccatttaattggtaacctcacaatgtgttagaatcattgcaaaagggattatttcttatttaccattttttagctgggtcatcatgttgataagtacaaatggtgatgtggacatcactacctcggatacatacaacaatactccaacggtcattcaaaaaccgatatcaagagctcgtgcgcgacaattaaatttagaggtgagctcgttcctatgttcttctttgtatgaattcaagaatagattgctaccgaatgattatattgtgattagtaacaatggaggggacaaagagacacttggagaaagacttagagccatggg

SEQ ID NO: 65249 - DNA, 447 bp, Oryza sativa
tccacttacaagcgatatatgttgtttgccacttattttctatgcggaagttaatggcttcgctctataattaagtggggtattatccttatatatttttgtattttttaaacgcggtctatttatataaaaaagatgaaaaggataactacaatagaagacaaaaaaatactttagtagtaaacatttctagaactaaatacataggagaaaatggttgtatgttaataccagaaccattatgtgggaacaaaattttcttactgctttgaaaccgagaacttcgtattaaccacaatattaaccacaatatttagttccacaattgatggggtcgccgaacaactttggcgtcagaatcttcacgcacaactaaggggtgtttagattcatatgtgtaaaattgtggcgtgttacatcgtatatactgacacatatttgaaatat

SEQ ID NO: 65250 - DNA, 435 bp, Oryza sativa
  unsure (1)..(435): unsure at all n locations
agcttatgaagtggtatgccacatattgattatcttaaaaaanaaggacggctataacatggactcccgtcctaatcgaataacttaatgagcgtaactgtttgaccaaccaactactcctgttattttatcaacttcatgtgaatccccacgtgagattccacacgtcagtgcatgttcttcgtgtcctcacaagggcccacacttcagaacacatctactcgttggaggcacaacacacccacttctattgttatgatgctaacatcagcgccaatttagatactatactgatctacgtaccaggtatctgatatccagtaccaggtctagtgcctatatgtatcagatcgatctatgtaccaagtacctgatatatatacctagatacctgatacctagtactcggtcttctaccaatgataatcaaaccga

SEQ ID NO: 65251 - DNA, 437 bp, Oryza sativa
cgccagattaccgatcgaggtggttggagtttgatttgtgaaaactcaaatggcctatatttatgtgaggatttgatccttctatgcggcatgaggtaaccctgtgtcggcttgggaaatgctttgttgcgaacctccgataccgacgggtgttcaaaataagttcgtatcttgtgggtaaagtgtactcctctgtagaggttaactaactgttcgaacagccgtgcccacggtcatgggcggatgtgaagtggttcccgttgcgtatagttgtttgcctgtgctctgtgaaaagttgttgtggtgtgggtatcgtaaccagaatcagcctatgtggcagatggatgacctgagtggtcagaaacgaatctgtgtgattcgggatgtctgcgggcatcatatactatgcttcccgagtggaagcggattgttttgct

SEQ ID NO: 65252 - DNA, 319 bp, Oryza sativa
gacaagcgcaagggtgttgtaatataggctatatctttatagctaaactactgttataacgtttctggatatatatttttatgagtgaatcacaatatgggcggatatcttttggcgcccatcccaaattaaaaactttgattaaagaatgatcccaagtgaaatatcgtaaataataagatggtgccaagcaaaatttgctttatttttgtagctactgattgactacttgactgaccatacgctctaccacttaaacttgctcacacgtggttgtgcatgttggtcccaagcttgattctttgggtggaattcttta

SEQ ID NO: 65253 - DNA, 420 bp, Oryza sativa
tacttctcaaatactacagggcacaacttcatgggagttttatgtaaattatgctcatccaaattcaattgccaatctaatggttgaagctatatcaaaaaataccataaaatcacccgaacagtctaaaactgcaaggaaaaatggcactaaactgctcgctgtatcatgagtattacaaattaacttactggtgagtgtccaatgtaaggtaacacacgtttaagattgacaaattaattactgcgaaaatcatctcagccatagttccattacctcatgaaaatggggaaatagtggataactggtagaaatgctagcttaccacttataaatccgcttcttattggtgaagtcgaacgacttgtcgaccttcggggaggtgaacacatctctctacgaggcaactgcagctgcaac

SEQ ID NO: 65254 - DNA, 449 bp, Oryza sativa
tactaagctatgttgtgactttgtactgccatgacagagagcaatttcatctcgcttagcacgcaaagctcaaacgatgattacagtatccctcatggttaacatccagagtgtgacatgatggggagggaatgtctcccgttggtgccgcatatgatggaactctccgattccggcacatctatctgcccctccaatagctcttgctttgcaccacctataagtgatgaaggcctcttaacatgccatctgagtctaactcttgcatcatgctcgatggatgctgacaaaagccaatgcctcaatgcaaatgggaccactattgacaacccaactgatgcagcaacagctaccatggaaaaggatgacaccattgacagaagcttcgatgacaaccaaaagaaataagctgattctcgtacagcagatgccacaacaccacgagcgga

SEQ ID NO: 65255 - DNA, 453 bp, Oryza sativa
agctttaattaattctatgtagcagtaccaccatctgtggctcgattcatagcacaggaaattcatattaagacataattgtagtaccagtaattatcaaagaaatgtaccattgtccagtgcggatggcgtatgtcatgcatacaacgtagtaccattctacgttgccgagatcctccggcgatagtgcagtgacaggcctcctcctctgttggtctgcagactcaccatataggagagagttgtacagctccctcagctgctcgcttctcttgtagaggagctgcttatctgtgagctccgtcactaggttgttctctatcttccttgtgtctatctcgccgttgtagaacccgtcattccatgtgatgactatacatgtggaataatatgacccggtttagttctcaattattttttcaaaagacatcacatcaaatctgtaatcacatg

SEQ ID NO: 65256 - DNA, 447 bp, Oryza sativa
tcatgtctcttcatctgttacaggcatgagttcactgcgaatgttcatctcctatagatctaagcgcgcattcaacccgtcctttgtctttccagattatttatcagtatcccgagcaaactctcgcacacattcttctctacgtgcatcagatcaatgcaatgacggacctcaatatctttccagtaaggtagtcgttaaaatatggatttttttcttccacatagccttctactttgccttactacgctttcttttcttcccaaactcattagttatgtccttgaccatgttgtggacctcatctccagacaaatccttgggagcaggctgaagttctctcttaccgctgaaaattatcttctttattctaaaggcgtggtgtagtgtgagccatcttctatgacgcatgtaaatcatctttcttgatttcttcagccacctact

SEQ ID NO: 65257 - DNA, 454 bp, Oryza sativa
gtattaatctcagtaaatttcatcaagtgatacaatttttctgagatctcattcggcttctgcaccaaagagttcacacagccaacatgaaagatacaaaagattaactcatcatccaaaatagcagatacaaaaagaactttatgagcccgctaaccgtatcctataacgtcacccatgtgctggggtagaaaactactatatggccactaactctatttgttgacaaaccgcaatgatagtaccctgctaattgaccttctgaaggatagcctatgagcggagccaatgtgtaatcaaaaagataacctgcataggagaagatatgttttttcctttcaaaaaccacattatttctgaaaagccaaatataccaaatagtggtagttgcacctaataagaccaatgatctcacattgcgtgattgtcttcttatccaatgcccaaacatatg

SEQ ID NO: 65258 - DNA, 425 bp, Oryza sativa
  unsure (1)..(425): unsure at all n locations
acctgaggcatgcaagcttctgcacacacacacccagatgtcattttcatatatattacgaagaactggttatatttcatagttggatgaaaagggttttcagcttacgtggggatgcggngatgaaactttcagatgagcacaggaagctcctgctgttatcggagataaacggtccatctagtacagacacaggacttggttggtcctgtgactcaccatatattcctggggcaccaataaccgggatggaagaaatatcctgacaaaatagagccaaaatttcatattttgaactttggatgactatagaagaaagggcacaaacatatacaagccttatctttttataaaatcggtaaagtaagtttgagcagagcatatcatgctcaataccttggcaagattgtttccatatcattcat

SEQ ID NO: 65259 - DNA, 450 bp, Oryza sativa
ctgaaagtatcaaaagagatataaatgctagattaatttcacagtgcacggacctatggcctcagatatgttcacttctgcttgcatggtccaaccaaaacatgtatttcgtaaaccgaactataaggttgattagttatagagctgtaataaaaattccaatacagtgaactcttcgctagcattatctgcacatggtacctctaccttgacaaggcttttattcttggtgaactaactgtgtggatgaagcaataatcatataagaatccaaataacaagcttgcaatctatgagtatttttatggctactaagcgccttggagttgacaaactcaatttggcatgtaacggaagctttcattgaaaagctggcctggcaacgtcttgttctaaattaataattatgtgtgccactatccaaacctatatataaagaatagcatgaat

SEQ ID NO: 65260 - DNA, 448 bp, Oryza sativa
agctgcatagtaaacaccaacttttctctactttatgtcttctacttgctatttcgaacccctcatatatttatatctaaaaatatggttgcccatagccacgaatccaactagaacaaggaattctaatcacattgaaaaaaaacccctccagacatggaaacatacatctctatacaaactccaagcttcaatcgtcccaaaatggactctgctttcgtatcacatggatttgtgcttgccgagcctgcttccacttaagagagtagaagaagctaagatcgatgctttcgtatcaaatggattttttctagccgagcctgctgccacttaagagagggcagaagaagctaaaatcgacagatcagatagcagcttcttccaacttgtggattgtcataatgtgataaacatatgatgtattttcgatattatggaaagcttcaac

SEQ ID NO: 65261 - DNA, 299 bp, Oryza sativa
aacatgcaaatatgccacatcatcattgtcacgtcccttatctactctaaaatatataccttaaatgatgcctataataattaatatccgtgtgaaagcctccaacaatttatatgtgcgaagttaatagtcaaacaaggcttagaggatttttgtatatttactaaaagcctaaaatgcgtaaataaattttattggaatattcagatcacaaataattattattaagaaataaacaaagcttaaatgattttataaaaagaaaaaccctaaaagtccccctttcctcccttttgccg

SEQ ID NO: 65262 - DNA, 396 bp, Oryza sativa
cttaaccacattcatatctgaatcaatagcacacaaccactcatgttggatgatggtgcctgacgacaacaggcctcacagagctgtctatatgtccacgccaacactgctgagccccaactgaaacggcccaaatcaccaaagttggcgaccaaaagaatccatatcgccgaagcaatgtcacccccaacatcatgaaacagaacccctcccaacaagtgcaagatgtatgcacgggcataacactcaacacgccatggctcaacatcgtcgtctagatgtgagaagatctgactcaaccaagacaggggtatttcattctgcttcttcttccccccttggccctgctcaatgttcagtggaatgccaaacagatgcttgacttgtgcatgccat

SEQ ID NO: 65263 - DNA, 416 bp, Oryza sativa
aatgcatttttctggttacacatctagaagtctataagatggcagagcttatttgcatgatgcaaccggacagacaggcatggccagaggacatcattgtctatgcgaattgtgataggataatagaatttgtgcacgaacaagtttatataatcccggtctctttctggaagaagatgacattacggcggtgtgtgggtgatgaataatacaccactggatatggtggagcatagctagtgactacatttaatgagtctgtggcgttggcaaccacatattttcgtcaaaaaaaagtacatgtatttcacagtgataactccatttgactacattggactgcatgatgatactaatacctaattgtggaatgctgctgaagcaatttatgagtgggcaacatatttattcaatcc

SEQ ID NO: 65264 - DNA, 405 bp, Oryza sativa
  unsure (1)..(405): unsure at all n locations
agcttggagaaagattgactatatgcatgcatgcacagcacctgtgctagttgatgactgtcatcatgctgatggcaaaaacatctccataattgtataattggtgtttaatttgcatggataatgtgaggagatattcaggattagcagaaagaagagagagagagaagagtcagaagacaagttcattactccctacaaaagcagcaagcagcaggtaggaaaagtacaagtcttcaataataagcctgcacaattaatggttccatgaatgcagagtgggtcctagttgaaaatttatgcacacacaggatgaanggagatgtggngtgaggtcgcttttatggatttaatgcaccccccattgctgcaaaggatcaaaacacatgctcatttatcaaccct

SEQ ID NO: 65265 - DNA, 446 bp, Oryza sativa
tgtgattatcatatttgtatgtcatgtaaactatcccattactatttcttggatatttgtatcttcacattgtgccccaagttatattctatattctaacatagtaccaatggattcaaaagctgccattatcgttctagatcaatgctcataatttgtaaatggcaaaaggcagagcttggacagatttcaccaatgtacttactgcactatctttgaccctaaaatcctagtactagcataaatgtctcgacgacggcgaccacaagttagcctagcgctgacatgtgatgatgatgctcctgtccagcttacatagatccaggttgcaagcttgtcatgggaatttgcgagtacactgaactcatctgggaccattgggcttgatggggtctctcttctgcaatcgatcgtgctgatcacatgcgtattcaatgcagatcctg

SEQ ID NO: 65266 - DNA, 440 bp, Oryza sativa
  unsure (1)..(440): unsure at all n locations
agcttcttccaagatcttcctgtgcctttttctctcagaanagataaggggaaaaagattaaacttggtcacatccattcttgttcttggttaccaattcctactgcagtctagccaccgacggcattgcccatacatgaagccattatccatggatctgaatcaaaattctcactaatcttatcctacttgacccgatataaaagactaaaagacgaagctttgctgcgatgcttgccgatgtaagcacatggcatatcacccaaaaagcatttcttgagcttcttgtgctcgatctggtaccaaatacccatatataacatcgagaatcctcgtttgagataccaaatagcccgtatgtctaagaaatgccacatagaaactaataagaaagaatacaaaagccaagctataaacacatccttctcattttccatttt

SEQ ID NO: 65267 - DNA, 456 bp, Oryza sativa
tactcaagcttctagagaaatacaaaggactttataataagtggtaatatgcacctttaaattcgcatcaccacttataacccggtcaccatcctgttattgaatattttttgttttcctatgcttcccatttgcaaccaaatgaaaatatttggtatttgagtcaccttccaaaatatctttagtcttagctcgctgataccatttaatttcctctcttctaagcaaacaagctaatctattctaaaaaaagtctagtatgaatctcatcctaactcaaccgagttaattcagctttttttttaaatctaacaaatctaatattttcggcaagaccttcttttcttttttgtaagtgccactattttgtttggccaatcctcttaataattgtcgcaatctacgaatgtttgcctgctaacactctataggagtatttccatcaataatatttga

SEQ ID NO: 65268 - DNA, 441 bp, Oryza sativa
  unsure (1)..(441): unsure at all n locations
agcttctaaagtgaggtatggtgcttctttttatagttctttgaatatttttggggcgctgaaactgcaagaagtatatcattttgattcctgaagcatatttttttttcctagggagtgtttggtaaaggtcagaaatctttcgatgagataagtactacagttgcctgcgaaaactttccaggtcaccaggtattaagggttgagatgcccagttcttgttgtcttttgcacgttggctttagcagggtgtgtcctatttgtgtttggtcggcactcactagtatggcactgctatgctttgcagtttttcctttntatggattaaacatttcaggtttattcgattattaatctctaattttatataatatatctatcggccaattctgttgtaataaattggcagcctgtctgtgggatttgtgtgctaagtgtcca

SEQ ID NO: 65269 - DNA, 446 bp, Oryza sativa
taagcttgtagacaaaaccaatgtcggcgacaataattattacagtgtaggttaattccggctgtttagccgaaactaattcgatgattcgacgaaacagtaattattagattaaacgaaatttggccgtagtatggccgattagatcgttccccagcgaagtcaccaaaaatcgtgttggcaactttttgtgacaagtcgacaagcatgatcacaacacctaaacgtcttgcggtgatatagagtcgccaaccacctcgatctagccaaagggccaaatcaagatgggttttgtagaaaaatagctaaaccggctagcagagccaatttagagatcaaaatcagcctctagttcgatttagatcgatatgaggataactacccgtctcgtgggcaaaacggaatgttttcatgacaaacctataaagaggtgtcgcactctcgca

SEQ ID NO: 65270 - DNA, 271 bp, Oryza sativa
acatgcatggcgcacactgtaccactaaaacactggagacgtgtgatggcagctgtagtaaagaagccgtcaacgcctagctattggtacccccggacctgctagaaatcatatgaatcggcccttatcaccaaagttggcgacacaaatgaagttaatatagcactaattccatcggtcagcaccgcatgcaggtatacaggacccccgtcccaagaattacaagatgtacgcacgggcataacactcatcacgccacggctgaacatca

SEQ ID NO: 65271 - DNA, 452 bp, Oryza sativa
tactaagcttccaggagcccgtcatctgagtgatcaatgcttgttatatgtttccacaagtagacgaatggcttgcagattggttccatgaacgcgttatagacagaggcatgataataatgggctgggcaccacatgtgatgatcctatggcaccaggccattggagggttcatgacacactgtgggtggaactcaacaatttagggcatttgcgcgggcgtgcccatgatcacattgccacattccgcagagcagtttttgaatgagaaatttgtggtgaatctgctgaaaattgtgctggagattggagtgaaaggagtggcacaatggggaagtgaacataaagaagttagggtgacaatgaatgctgtggagacagcagtgtccacatcgatgaatgatggagaagctgctcacgagatgaagatgatagcaaatacttgggtgtaa

SEQ ID NO: 65272 - DNA, 214 bp, Oryza sativa
cgtctctcggtgtgatatattatgcagaggacacatatatgcacaacgccctcacttataacgatagtcgagacacgacccctcattttgttgccgacttctaaccattcatgatgtatgatcattatgaaacaagggtgctcactaatcctatggtgtgacatcatatttaggtattagatagagctagctagctacaataattcaggtagct

SEQ ID NO: 65273 - DNA, 233 bp, Oryza sativa
tatcgaaatcaatccgtgacctaaacatataatctttatcttgactctcaaactcttaaaaccggcgcaaattgacttacttgacgggtaaaggaaccggtattgctgacatggcatcttaatggtgatatatgaccttggctccttcacacgtgacgaatatatggcgtttatgcgcgatctaacaataacaaattatttaggacccatctatcatggacacatataagaaa

SEQ ID NO: 65274 - DNA, 445 bp, Oryza sativa
agcttatagaactcatacagaggaaagatgatattgtttctaactcagcttcagcaccaatgtactacaagtgtgacctgaaagatcatatgctctccccatattttttcggcgcaaaatttgatgttattcttatagatcctccatgggaggaatatgttcatcgtgctcctggtatcactgatcatatagagtattggactcctgatgagattatgaatttgaaaattgaggttatcttttctgacttactatcctttctattttatttgtcatcctgtatgtattatggaatttctttataatggtaagtttattttacccagcatgccatagctgatacaccctcatttatcttcctctgggttggtgatggtgttggtcttgaacaaagccgccaatgcttgaagaatgtatgccagctgtctctttgcacatattcata

SEQ ID NO: 65275 - DNA, 461 bp, Oryza sativa
gatcctcagagacacctgcggcatgcaagcttcttccaaaaatttgaagcaaactggctgtctcgatcacacactattttgtgacgaacgccatgctaacacacaatcctggccatatacaattccgccaaccgacttccagaataggttgtctttactgggatgaaatgagccactttggtaagtctgtcgactatcacccaaatagagtcgtggcctgatgatgttctatgttgaccagtgattaaatccataccgatttctttccatttccattcatgaatcttcaaaggctgcaacaaaccggcgggtttccgatgttctgccttgactcgctgacaaacatcacatactgctacgtactcttggatttcacgcttcatacttgcccaccaaaatctgttcttgagatactggtacatttttgtactaccagggtgaatggagtataaacgatcatg

SEQ ID NO: 65276 - DNA, 423 bp, Oryza sativa
tacaccgaacacgcacctatcggggttcatttttatgctggcggagcggagactttcaatagtttccgctagatacgagagtaaagtttcttggttgcgcgtctctacaaccaagtcatcgacataagcctcaacattacgtcctatttggctacccagagaaattcgagtagttcgttgaaaagtaagacctgcattttataacccgaagggcattgttgtataacaataagttcctatgggggtaatgaacgcagttttttcctcatactccttatccatgcgaatctgatggtaaccacagtatgcatctataaaacacaaaaggtcgcaccccgctgtggagtcgacaatctgatctatgcgatgcacggggtaaggattactatgacatgccttgataaagtcggtgtattcgatgca

SEQ ID NO: 65277 - DNA, 452 bp, Oryza sativa
  unsure (1)..(452): unsure at all n locations
agctcgtgcatgcgntagatgtatcttcttccaatggtccattaagatatgaaagtctcatatcgccgaccatctacgtgttttgccacctttaaaacaccacttttatgttctaattttggctgtaggtgacaccccatatgagtacacacttttatgccctgcaagtcatgttaacaccaaatggaaactgacaatgcaagttaacattcacacattctgtcacctgctccctcaccctgacctttaatgctctagacttgtcacattgttgcatcttttaacttttttctatttaattttgtatttagtaggggaaaaggaagaaagattgaaatttgaacattcacacccttcatgcatcatgaggtgatgcacatttgcttgggagtaaacctgggtaccattttatggctgtttggggtggaaagaaacaacatataaaagcattt

SEQ ID NO: 65278 - DNA, 435 bp, Oryza sativa
attggaggtgttggaatttgtctgattactatgttccctgtgtcaaggagtacagcaactggtgaattagtagctgtgttgtttgtaatattgctagaccacactgggattttaagatgcttcactatgagaacaagatttccatcaactgagatggtaaggtttgatgatgctagatcgtagattggtgtgtccctgtttgccacccaaaccacagtttgaactgtgattttgttgtaccatatacctatgttccacttcccactagatcctccggcttcatagattgtatgtactaaaggaagtcacgcgtcataaaatgaaggagcaaacagctgatttataaaaaatacgtatgtatgtgcttaaataataagaagacaagcatgaagaccattgtattttcttcactttgtactactactagtctactac

SEQ ID NO: 65279 - DNA, 305 bp, Oryza sativa
  unsure (1)..(305): unsure at all n locations
tgcaagctcaattaattagnatcactattccatcgtcatatttttggtatggaattattacggcaggtcacgaatggatcggggagaaattaaccttttctatcacccggttgggtttatgaccctaccttgaattctgatagtacactcagcatgtgttattattttgtgtcttttactgacttattcttaatttgcagtcaaccatgtattggtatgtggatcgcctcccattggaaggaaaaagatagtcatataatacgatagatttcgaaaaaatatcccccttccctaaatgttgacgc

SEQ ID NO: 65280 - DNA, 446 bp, Oryza sativa
ttcttattcatatatatgacccaattcacgtattggcttttcgcttcccatggttatcctctaatgggtcatgggagtaattattttttaaagattttcagagactgatgaacttgtaatatttaccaaggatcttttggattgcacggattttataggacttaattcaattcacacaaaccttctccactatatgtggccgtatgcagcaaacaaatattattatctcaactagcatcgtgagcacacagcagaacacgcataactaatgctggcagtggcgtgcgtgggctgatgcatacgctggacaggcccgcaccacttacccacttacccacttatgccaaaccacttatgagtaagtgggctgatgcggcgagttcaccacgtactgtggcgccaccacatgccacatcgagcatcagaaagaggaggaacgatgagtc

SEQ ID NO: 65281 - DNA, 84 bp, Oryza sativa
tgacacccgacctgcactcatgatgtctgccgcaatattcacattgtgcgcatggtgacctccacaccggctatgaacctgata

SEQ ID NO: 65282 - DNA, 342 bp, Oryza sativa
agcttgaagaacctgaagagtatgttcttctccctgagctggagggtggtgtcctcgaagatggcctgcctcgagtccggcaccgggtagagatcgccgtcccagtagaggagggttcccccctccacgctcttgaactccacatggtggcttccccctgacctgaggaggaggtcgacggcctcgtcggcgcattagagcacccttgggcccaccaggtcggcggtgaagcgcctggacggctcgggcaccgcccccgaggtctccacctccgagtacaggctgcggcggcggagatcgactgcggcggcggaggatggggaaagggaaggggcggtgtct

SEQ ID NO: 65283 - DNA, 514 bp, Oryza sativa
atatatttttctttaaaaagaggaaaattgttgatactgcattcgtgaactatttatactcagcttatagatgcgatggacacggtataaatttcttcattcattatgatcgtggtaccatgtgggagaacaactgtagctcgttccactccgacaatgtgtgcattgcttccggcaatagttacaatttgaccagcctttttctttaaagactggaaataccgggtatctcataagagagtattggtggtacaacagtctaccagacacatctcctcttcattgacatagtacatatcactattctgatcatataccatttaaatataatcaattcatgaccatatagcaaacattaacactttaagatagaaaaataaaaaatctgggtaaatattatcaaaactataatgaggttcacctcaatttattaatgataaccagttgctctgaatgagcttacagaatctataattctgctatgaacacaaactaaatgcaccacttgaaaatc

SEQ ID NO: 65284 - DNA, 433 bp, Oryza sativa
  unsure (1)..(433): unsure at all n locations
agctttacattaaacaaaggctgctcactgcttacctttcagtcaacaaaatatagatgaaagaaaaccaattttaatgtacagtccaaagaaacaataagaactcacaatacctttttagcttctgcataaagacacattccagcaacatagaaaggaacctctcggcaaagagtggctccagtgcctcggaagaagccctttggaccatctttttgcatggtaccaacaatggcctcccctacattattgaagattccagcctgcaaacgctgcttaagaacctcacaaggtatacggactgctgttcccaggatggtgctgcagaatgaagagagtgattgcacctgtgaaacaaacatgtctatcatcagattttcatataagcaacatnttctcagccaatatactatgtcaaaataatttaagttca

SEQ ID NO: 65285 - DNA, 356 bp, Oryza sativa
ctggagtactatggcctcaacgaaactgttactgatgtggtaaagctacacagacagctcatgatcaagatggtggagatcgacatgctcaaaatgaccatcaactcgctgcaagaggagaggaagaagcttcaagatgaagtagaccgtggctcatgagccaaaagggagctggatgctgcgaagaacaagatcaatgagctgctgcgacagatacagatggaggcgaaccagacgaaaaggcagctgatgcttctaaagaaccatgtgattgcgctgaagtccaatgaggaggaggcagccatcaatgacgcacaggtgcataagaagctgaagaagctcaaggagctggaagt

SEQ ID NO: 65286 - DNA, 435 bp, Oryza sativa
  unsure (1)..(435): unsure at all n locations
agctntgtggatcccatgcaattcaatgtgcattgacccctcctacctattcctgaacggtcatttaccaattacaagtacgtggcccatatatatgctccttttgatccaccttaaaactttggggtgtaaaaatctctgtatttcactatttcatcgcttgaaaaaaacttctctagtgatacaagtgatttaatatgggaaatctagatcattctttcaacggtcgagtcactttatgacgtctggtaattgtaaaatcccctagaacatcaaatgataaaagaataatgtgtcctatagggagtaagggatgttctggaatgcatgaactttacagaattttcacataattaattntaatcccatcatagnttatttgaaatccattcattcccgcctggttgatttatattaccgagtggattattggta

SEQ ID NO: 65287 - DNA, 448 bp, Oryza sativa
ttcatggccttatccatgtaactgtcaagtaagtggtttgccattgagcagaatcatagccatccaatgtaatctgatggcttcatttgatcgctacagcacctatgcagtattaactgtccagtatacgatccgttttcgggtggttaagcactaataaaaaatatttactgtagcaccacataattacaaaattcgtcagtataccacgagacgaatttattaagcctaattaatccgtcattataaaatgtttgctgtatcaccacgaatcggatgcgatcgacctcgctgcgtggcagcatcgatcgacaggtgatttttactgcgggcacgtattacgccggcggtgatgcatgcacacctgaattcattggccatcgttatggataggtaccaatgcaaggacagtaatggcggccatattctgcgcctgtgaacatgtttt

SEQ ID NO: 65288 - DNA, 399 bp, Oryza sativa
cagatgatatacaaaattaacctactgaaatttcgatatgctgataatattatttagttttgataggatagccactaatgtgtagttaccaagaaattctatcaaaagttcttgtgtatttaccaaaatttggtaaaaaaattaatgtatgttcattttgaacaaatttattataaaatgaaacggtttgatatgacatcaatcagaataaaaaaatggaactttgaattgcaagaaacagattatgtccacccaaacattccacaaaggtttagaagaatgaaatttctgacaatagtcttctaccaaaatattatcagaaatctaaacaacaaagtaatcctccaaaattaattaggggacacatcaccattgacttcaagctgtatgcctgatgat

SEQ ID NO: 65289 - DNA, 443 bp, Oryza sativa
tgcacactaacgcgctatgtagagagcccaatgtatattatccattgtatcccgagatatgcatttcctcctagaccttcgtaccacgtgaggtcacgtgctttgcaagccagatgcaatatgagtcagaatccgatgagattagcaccgttgcgaactgaaaaataagttcgtaagatgactattaccagctccgaatggcctccagcagggataactattcctagacggctaagaggatataccttccgaggtgcacgacagttgacacatcaccttctaagccatggtggctgagtatatgatagtgaaaggtcacatcaagtctcctcggatgacgaagatgagtcatcccgacatctcggcgaggaagagatggaatcataagcatgcccccgttgtggagatattggtcatgttgcttgcatgtgtcacacactctg

SEQ ID NO: 65290 - DNA, 433 bp, Oryza sativa
tctcgaagcgttcttgctgctggaacgcaatacttcttctccggtggctccgttttggtggcgagcgtggctcgcaccggcttggcgagagtatcgccgccggcgtgcacgatcgccatggcagctcacggtgccggtgacatcttagcagaatcagatgggctgtgggcgcacgtatgagacgtgggcctatcacttgcatttcaactttcaaggcccaaagagtgcggtgtttaatcccacctcgctaaccaaaccacatgatctccgcttattaattgaaccgtgttttttgtttgcaagtgatatcacgcatttgagtattgaagtttcattggtctaaagacttatttttgttcagtctgtgttctctctctcccattctttttatatttgttttctacaatgttttgtttaagaattacacttacta

SEQ ID NO: 65291 - DNA, 449 bp, Oryza sativa
  unsure (1)..(449): unsure at all n locations
agcttggntggccttactctgcatggcaaaacatacatctcatcaccattttcagtgatgagatgtatcaccagaaatacagcctctatagactatatatatttcagtcccacttctgccctgagaacattttttttcttatttacactcgctgagtgttcttcctgttgttggaaatgttacttagccttgtgttaattttctttttaccttggatcatgttgcagtgccccaagattctgacagcttccatgctccagacatgcaccacggaatggaggttcgccttggttcgtcaaagggaccgatttgccctagtttcaattgatttcacaaaatgtatttctcgtcttgcactgttctcctcattcaatatctatgtcgctctttagactgagatttcgatgcttgttttggttcataaccacacttgtgacgagattccttat

SEQ ID NO: 65292 - DNA, 456 bp, Oryza sativa
tgatagcgcgcacacaaacacacagcaaattgtatgtctggtctaaaatcagtttgatacaacaaagatccaatcatacttctatactctttttgatccacagctttaccatcttcatcatgatccaacatagccgtagaaccaattggtgttgaaattggcttgcaattctccatcttgaaccttctcaaaagatcctttgtgtacttcgtttgatgcacataaaaaccttgaggtgattgcttaatttgcaatcccaaaaagtacgattacttacccatcatgctcatctcatgattccctcgcgcatatgtctccgcaaacttcacaaccaaagcgtgagttgaacaaccaaagatgatatcatccacataaatctgaataaaaagttgattatcaccatgctcaagaacaaaatagcgtttgtcaacctttcccattgtaaaacctttcgca

SEQ ID NO: 65293 - DNA, 425 bp, Oryza sativa
agcttgttcaattaattctaaccgctatgctttcatttctgcgaatgaaatttaacatgttatctgccatcctatggaccctgatgactcggtgttgtattacattctagagtaacacattttgttagctttagctatagtattttactagcccaaaagtcaaaaccgattgattttccaaaactgaatcattcttagctttcttttattgctggattggatccaacattcagttggtcatgttagtggtttagttccaaggttaattaatcactagaaatttatctaccattcaatttggatattttagtggtcgaattgatgaaattgaaggtgctggtggcatcaataccactctttacaatcactatcaaattccataaatgcgcttcagcttatatatgctcttcttgctattcccctta

SEQ ID NO: 65294 - DNA, 384 bp, Oryza sativa
tgccccagtcgaaatcgccaagaactatgttcgttacagatgttggctcgcgcgggataacgtgcctgtcagtacggtgtactggcgataaacaagggcactcggagatcatgaaagctttgtcccagattcggatatagagatgctgtggaccacaatgctcgagacattcaccctttctgcgggtacagaggacaaagtgaaaaggtggactctgaagaaaatggcagaacaagtttaaaacttcaagggagatctgtaccataagtatatactgaaggcgcagacaccgaactttgacacattcccaagctaagggatcactgtgacgagttcgttgcatataatacatgtgaacaatggcacgcgatgatgtgaaaaaac

SEQ ID NO: 65295 - DNA, 466 bp, Oryza sativa
  unsure (1)..(466): unsure at all n locations
gacacctgcaggctgcaagctggtgctttacacagaatacctgatacttcttacactgtttcagcgcaccagaganaagcaagataatcaactgcccacaagagaagcaaccattctttatgtgattctcccaatgttaccaagtgccaactagtgaattaaacaactatagatggctagacttctctccttgttaaatccctcatgcacaaatggtgcttaagcatcgtaaccaacatgtgcaaccgatgaaatatacagatgagtgtggcggtcaaggagccctttacccttctgatgactcttcaggctgcagccaaaggcacaaaaggctgtagtgttatgcatatccccacaaacaagcatgatgcctgctttacaccacagaccaaatgaagccgaaaccttgtgcccaatccaagctattattatgagcattctgctttcagagatgagacaattcttg

SEQ ID NO: 65296 - DNA, 419 bp, Oryza sativa
  unsure (1)..(419): unsure at all n locations
agcttctatccttatttagcaaactgatgaattacaaactgtggtttgaatatgaaagctgaacgctgatagtgaactgcccattgttttgtaactatcgtatgatatttgttgcttttatcatgcacgatagcttactgattacgatactattaatatgcacgaatgagctaatctaaattgatgctgtttatatacgtccgtgctggtagacatatttacagcatgctcctctgagtcgctttcttcagatctgntgaccgcgttctttgtcttcacctgatccagctgctttgctggagaccatgccgcacactgtgttttttgggaaaccattactataacacgtacggttcatccctcgccacagataactattaccaaataaaattgcctttttgcatcatagcataccacta

SEQ ID NO: 65297 - DNA, 415 bp, Oryza sativa
tttttttcgccgtagtgataatacatggaaattatttttttgtatcaacagacattagttacgttatagaactcgtgtatctgcgtccggcacaggtttattaacctatgttaataataatctactatgtaaaacaatgataccaacgttatatttcaaaatttaaatattgtgtcgtgactattcgctcctaagaaaacgatgagaacgttctattattttttatcttgaagacaatgttctagcgataaaactaacttatgaaaactccaaatcaacactgaaaaatggctctgaaattgaatatcggctttgttctactcttataaccgctcgtactctcatatggaacaatctactacatttatattctaaaatagtgatatattatccgatgctacgtaacttaattaga

SEQ ID NO: 65298 - DNA, 423 bp, Oryza sativa
  unsure (1)..(423): unsure at all n locations
atactcttattcagctgccgcatgcagctggaagagctgttgtcacctcctctggtatctgtcaaagganagaattaaactttttcaacggatagcctctacagagtttcttatactaactcaaaaaaaaatcggtatgtaagaagagttgcaaaattagtcttgattaaaaatttcatgatattattctcttgtacccagagcagttccagattttggaggaccatatcaacctcgatttgaaggatcttaataatcaaatatttgtagcgcatggaaaaacacagtgatccactgtcttgtatttggcacattcaatccttataagagaggggtaccgaagaaatattcatacctgttgaaatttaccccaaattccaatattntagttcaaacttgaatcgttgttgatgttgccctatg

SEQ ID NO: 65299 - DNA, 348 bp, Oryza sativa
cttggttgcctgtcttatgtgaaagtttaagaaatggctgtggcttgccggaccatttggctagccaccaacacttgccggaccttctacaaatcggagaaaaatggggtccatgctatttcatggactggttctttccatttttgagcctcacccaacagagtgaggggatgggagcattgttcaaggattttgtccccctgtaggacctctccaaaacttcatggggcctatgagaagcttgttcaatcttgctggacagggatgaaaacagctttttcttactgccaaacagatgcaattgggggtcaatttcaatggagagcaggctcaaattctcactcgtgc

SEQ ID NO: 65300 - DNA, 275 bp, Oryza sativa
ttacttataagaaaagcacatagttcacaatatttttgcattgggtatattagattcataggttccattcccatgtattattattgatttcctgtgcctacccccacaaagacactcaagtttttcttcaccgatttaatttgctatgaatatcttgcaaccgcgtggagtacctctaatggcacctattaatgttggctatccaacagatttacaatatgagatggggatagcaagggtcaattgtgtttgtaccaaatagatcacacttcata

SEQ ID NO: 65301 - DNA, 292 bp, Oryza sativa
  unsure (1)..(292): unsure at all n locations
gggggggagggagagagggagtgtaaanaaanagaaaaagaaaaaggggaaaaaaaaaaccagggggaggaaggaaggagaaaaaaaaagaaaagagaggaaaaaagaaagaaaagaggagggagaaagaagaagaagagggaaaagaaaaaagggggagggagaagagaaggaggaagaaaaaggaggaggaagaagagggaaagaaggaaaaaggagagggaaggaaagaagaaaaaaagaggagaaaggaaggggaaaaaggagaaaaagaaagaagggataagagaag

SEQ ID NO: 65302 - DNA, 329 bp, Oryza sativa
  unsure (1)..(329): unsure at all n locations
tgcaagcttagagaaactacggcggcttataacattctccacgcaacagaagggaccaagccatgctacactcccaacaaatccccaaaagcggcgacgccagctaaagaccacagatggccctccgaatggatggactccagaaccactgagaccgaagagagagcggagtcgaaaaccctagagttctgctccttccatagntgccaagagaccaggagcaccagggagtcgaagctgtcgcggaggtgctcangtaagcaagccctggatgacggccactagtcctggaaccagctgccacaggggggggggagggggatggcccc

SEQ ID NO: 65303 - DNA, 331 bp, Oryza sativa
tatcaagtggtacagagcttatcactacaaccgcatgttctattgacctttcatgaataaaaataagaacaccacaggaggctcatttcccttataactgcaacattggagggtatatctgcaaaatatattactcaactactccttccgttccaaaaaagaaggcatactctgggtttccgtgccaacgtttgactgtccgtttatatgaaattttttcataataagcatttttattattgttagatgataaaatatgactaatactttatgcgtgacttatatttttaatatttgtttataatactctcatataagaagaatggttaaa

SEQ ID NO: 65304 - DNA, 415 bp, Oryza sativa
agcttctggaactcaagtctgaaactagaagattcaatatttttagaaactttggattgcattttcctacaatctaagtggacttcaagacagcttaattttctagtcaagtactactcctatgtttttcttaatcacgtgtacatatcaacgtcgtcgtgctaactatcacgacgagaatgcgaaaggtacgtaaaacgaactttgaaccggcaccgcgacaaagcatgaatccttttcgagttttgtaatggcatgattaattaataaagcaactctagctttattatgtacatcaccactgataattcactacctgtcggaatcttatacttgatcaagtagtgagtgatcaaaccccatggtagcccacgatgagctcgccttccatgttgtagcagcgacctctctcttc

SEQ ID NO: 65305 - DNA, 390 bp, Oryza sativa
  unsure (1)..(390): unsure at all n locations
gactcccacagatatttcctcataccaaaaaaaaaaggtttacaagttcatgaatgaacattcttctgatagataattntttccccaaaaaaataggaggcccttaaaagcagttttacacaagtacatgaatgaacattcagatatttacacacaagctccaagatcattttttttcatcttggccacagttcaagatcgatgagcagaaacctcgtcattcccagtttgcagttaaaaaacaagaagaagatggatgagacggatagatggatcgatgtctctgcattacattacagaaaacacaatgctgcatgcagcttgctttcttgtttgtctgctagctgtgattcattcgtcagtccatatacatgtacctccaatccgatc

SEQ ID NO: 65306 - DNA, 403 bp, Oryza sativa
  unsure (1)..(403): unsure at all n locations
ctatctttatattagtacacgaacaccgaatagtcagactcatgtgtcacctctgttggcgaatactgaggcgaatgcgcgtttcgcctgcctcgcctccaacggaaatgcggacccctgtggtggtggccaacggtggtggtgcctccctccctaccccctctccggtaagatccaggcatctctccaacgcgagaggccaaatcccctattgcggtggtggctggcgatggtcatgatggtagcaagagggacgaccagatttggccccttctagtcatatctggcgcgtcccagttggggtcgggcaatgccaaaactccggtgcgaggtcgttcggcagagcttggaagtncaatgatgccaactgtatggcttcacaactcggtgcagctctgctagt

SEQ ID NO: 65307 - DNA, 433 bp, Oryza sativa
  unsure (1)..(433): unsure at all n locations
agcttganatggtctactctagtaaaaaaagcaatagctgactaacaatcagtaactagcacatctgtaattagccagcactaccaaaattcgcggcagtaactagcacccaatcctcttccatggagggggaaggaaaacgaagtggtgtatcaacgcactcacggggtgagcagctcgaggcgaaacggcgagccgtcggtgacgcangtgtacaccatggtgcccagcatgagagcgcccagcgccgcgaacaccgccctgtacacgcctatggatcccgccgccgccatggatgcgcccgctggccgccgcgcggtcgccgagggtatcaaacgaagtggtgtatcaaactaaactaccaaaaactcaccgcgagacgaaatggggaagcggtggaattcgtcggcggaagagtcgtgcgaaacagtac

SEQ ID NO: 65308 - DNA, 414 bp, Oryza sativa
gctccctctatagacttgatacaatcattaatcattttcatccaatgataccccgctctgcttttctaccaacttctgttatgggccgatagatgaattccacaaatttcttcatgtacttctcccaaaacaaccttggattgatcattcttgtctgttgctctaattatgttgttaattcaaaaaaaaatgatcattctctgaacactttatcaacaccccatttttattttcggtgatacaactcccatcaagcaaagtgtttataacgctcaccggcgaactttccgatcaaccctataactatgatctttcaatattctatcaaacgaattcctcattctttttctgattgcatggcacaaattgtctaattcacaattaattcaccctgtgaatcaattgtgatgtgcc

SEQ ID NO: 65309 - DNA, 373 bp, Oryza sativa
agcttccaagaattgattacagagcgatgctcaaatttgaggcgttctagccaaagaccactctcctccatacattcgcgaaggaccgactgcagagacggggacatgttcctgaaaacaacatcatgccgatgattccacaagcaccagaaacatagaagatagaacaccttgtaatgaaattggggcaaattcccatcaggtttcagattggccatatcactgacatgttgaattcgagggcttaaacctattgcctcccagaaaccttgagcgaatgggcaatttagtactgtttttgggttaccttttctgttaattgtccaaaaataagaatgatgcaaaccgtcaggccaacgaactggtaaagatc

SEQ ID NO: 65310 - DNA, 418 bp, Oryza sativa
  unsure (1)..(418): unsure at all n locations
gagctcattttctctaagtggtgtctgctaaaaatattttgtattttccaagtttctctactcggattagatgatattntactgactcagctatgatgtcttttcttgaccagttgatgtatattaggaatttaggatgcacgctaattatagtgatgttatgaataaactacttgtaaggcagcattaagtctgttggtttcctatatttgctttgtgctataatgctactaaaacaaatgcggctgatcttctatgctatccctctaatgagtaatcctgtcttttgttcctaatattgtgcagtatcttttaattttgctcccagggacataagcagtggttggcggaagtacagttccttggggttcttgagcacccaaacctttgaaagcaccttggatattgtgccgttgat

SEQ ID NO: 65311 - DNA, 373 bp, Oryza sativa
agcttgtatctatcattgtctcattaaaaactttgtatgggaaaaacgagatggtgaaaactcaccaaaggaaaaagagtacaatgtgaagcgtttcaacaaggtccatcattcaaagagtctccccctgaagcttgcaagtctctgaacagactcataccaattcccttaacacatctctcgaaagaagaagtaagtaatgatttactgaagagatctgctagattatcataagactttgtctgtaaaatgtttatttctccactttgctgaagctcatggggataaaacaacttagaagcaatatgtttggtgctattgctcttgatgtagcctgtttgcatctgtgtaatacaaacagcattgtcttcat

SEQ ID NO: 65312 - DNA, 417 bp, Oryza sativa
gacctcatctgtggagtggaggaacctcaattctaccactgtagatgctaccatgctaacttcttggcaagcacccatggcactgtgctcaaactagatggtgaggcaaccacaacaccaaaccctgtgcgcacactcttcttcgctcaattctgggactcgcaacctggtcgattcaatgaatcaaactcaaagaccatctgctgccctgttcaagttagcacatgttttggtgagtcactgaactctttttgtgatgctcctactatattttagtcaagtaatagacacattgtggcaatcattattgcttttgcatgcatgttaataccctggattgtaattttggcttttctgacaggtcgttgcaccttttgtgatgaagcaagcaaaattttacatccaccatgtctatct

SEQ ID NO: 65313 - DNA, 377 bp, Oryza sativa
agcttggcattcgctcaaggtccttgataagaattgaacccctgaaagcggaagtacgcttgaaggtcatcgtgctgttgctgcatcatgttggtgaagttggcgaattgagcatcagcagtctgttgccattcttgcatttgagccatgtattctgtgaggtcgtactagatctccctcgtctgcatgtcaagggtgttggtatttcttatgaccacagataaatccccaagcgcacggaataccgctgtagcacttcaccttcgggtgacccgtaaaggatatcgaacttagggaacgtgtgtaatctacctaaggctaagactatccaacgacaacaactgatgataggtaggctaggttagacaggactttct

SEQ ID NO: 65314 - DNA, 425 bp, Oryza sativa
tcctctgcttcccatctataacttcagtcctaagtctgaactccatttcagttcacagctcctgacaatacccttccctcgcaagaaccttgtcctcaaggttcaaaagtaggaaatgctgcttggatgtatgaagtagcctcagcaagagttaaattctgcttaagaattaaccattgtgttactgaagcatcattcctgggaaccgagcttcttttataaccatcctatgacaattgtgaagtcggttggttaacacccctaaccattattggcattgaatgagaagttgccatctgaagggccaagatgagggggccaaaagaggtttggtcaactctctagtcccacctatcggccactccttcggctgggatactgactggagggccctctacatgttgcaccatggattgactcatttg

SEQ ID NO: 65315 - DNA, 359 bp, Oryza sativa
agcttcagccccgtgggtggagatggttccaccaatgatgtcgtgaactccacagggctagccatgagtgggaatgcaagcacaacttgttcagtgccccgtttgacgccggagccagacatcgaacacttagcatgcgtcaccttggggtggtcaagattgttgatgtaagtggcaccgattgcgttcccagcagctaccaactccatagaggccacgacagtggtggcggacgtaaccactgcagccacagtgagatcaggctcgacggtaggaccggagcatttcgttgaacacatggtgggtgtgacctcgggtgagtccttggtgacgacgcatgaggcgtggcccttgtgctt

SEQ ID NO: 65316 - DNA, 406 bp, Oryza sativa
  unsure (1)..(406): unsure at all n locations
tccagtccttcttggagtgcatgataaaggtgtttcttggatattgtgaacgtntaattgaaaaggagcggataattgaggccggcatggttgacctataaatgaaatctttatgcaatttcgtggagcgagataaagcccacaggaaaagatggtgagccaacgtctttcacgtcggtttcaggtttgccgtcggcttgaggtaaatgggaacgctggagaagagttcacgaaactcccgtggaatcatcctttctttactactcctaatctttaataaacaaaataaaaaacaatatcttgtgggtgcatatgatatcaaagtctaggtcgtatgtgcgcaaaccaaatcttgttctgaaaaactccctactagtactacttgacattgattaacacttgcgtt

SEQ ID NO: 65317 - DNA, 68 bp, Oryza sativa
tcttacgaattctatcaattcatgagctcagctttacactggaatggccactcccattcgtttttttt

SEQ ID NO: 65318 - DNA, 371 bp, Oryza sativa
agcttcaagttccctgtccttgtttgcatgcaattgctcggtttggttttgcttcttgcctttactcgttagtctttgcacgccgtacgtataagacagcacctatgctatctgtccgtgcctatgcacgcaccgcagtcgcagccctcgtgttcactgtccataattctgtcgtctcggccctccacgtccgccgtgccatgccacgctcgccggtttcgcccttccgtcactggcctccctgccgccgcggatccgcgtttgcggcgtgcgtcgggtgcgccgtccatggcgctacccctccgatctctccggtcgccttcggccacgctcggccccgtcttccggtcacgttccgccatcgccagtct

SEQ ID NO: 65319 - DNA, 422 bp, Oryza sativa
tggccattgggccaaagactgtcgacagccacgtcgcggccagacccacatcgcataggtggaggaggaagagccggctctgctcttggcacacgcaagcatcgagctacctccggcggcaccggccgcaacggctttcctccaccttgattagctgaaggtactcgtctccctctgcaacggctccagcaacgacaaggctgatgggtggtacctcagacaccggcgcctcccatcacatgaccggccgacgggagttcttcatcgagtttgactccagcgtccgaggctccgtcaagtttggggacgcctccggcgtggagatcaagagcggtggctccgtcaccttcaccgccaagtccggtgagcacaggctgctcaccggagttcactacatccccgcgttgaggaactctatcatt

SEQ ID NO: 65320 - DNA, 374 bp, Oryza sativa
agcttggacttatgcagtgtagcatctatggaaggggtaaaaaagaaaaaagaatgatcaaaacaacaatcagagataatagtttaattaaaagagagtcaaaaggaattcttcttcaattgtttgcttccacgggctagaccggaccggaccggagacccgctccgacgtccaaccggcccggcctcacctaccacgccccggcgacggagaaacgaacctaccggctgacgtcaccgtgacgtcagtcacaccgcgccagtagcacggtagaaaaggcagaaaggtagcagtagcacgtatagtggcggaggacggatcgggtcggccggccagtgtccactcgctcggtcggtatggtccaagcaaaaaga

SEQ ID NO: 65321 - DNA, 417 bp, Oryza sativa
tgcaagacttcatctcatgtcttttttttgcttgtgtatccatcgctaaagattgtagcaatcagagttttcggcctgatcttttgttattctaacaggctacagcccatggattgacatgcactgatattctgtcatcctgcaaggttgtggttcattctcgtcatatcaagttgtcaacctgatgaagccatcacggtttactttatttttaatcttttgaaacgaaaatcctttttttttcgagaattcaagttttggccgctgtacttgctgaattcctgtccaacgggaagatcaaattgaaagcaatgcaatccaacagagcccataccgtccgtctaaggtagaaccagccgttgtcgagctttcgatatcctttcgtggtcacgcaatcgaacccacaattcctcccaa

SEQ ID NO: 65322 - DNA, 369 bp, Oryza sativa
agcttgaccgggttcgatatttctctcaatatgaaaagcaaatctgccactgaatgtccatgaactcatgtggatgtttctttctgcagatacaagctggtatttctgcactggaagatgccctgaaagcaggttatgaagacttcaaggtaaccagacaacaactcttttgcagtacagataagcattcttcatgactagtgacacattttgcttgatttcatgaagagaattcgcaccgacccggatctagaaaacttgaggaaaactgaggaattcaacgtcctgctgaacaagtacgacgaatcgttcatcaatgagaatgctatcaacgccatcaaatccttgttttggatcaacaagaaatga

SEQ ID NO: 65323 - DNA, 419 bp, Oryza sativa
tcaagtgaaaagtaaacaactaagtacgaagtatcactttatcatcatcagctaaaactgaagtaatacttcatacctttctacaacacctcatttaccttaaaagacataagagaatacatatatagttttgcacgtacataacagttacaacaaatataatgatgttcacctagaacaagttttcaagacagcaaggccccttcaggacaagtttcttgggacagggcctggtaggaggcagttaccaagctcagtccttgtcacatttcattttattttctcgtttttagttacaatttcaacagatttcgacatacaaagcaaatagagtaaaaaattgaaaacatctaaaatgggaggtctctaagaaaaaagcatttcccagtgacagcaggatcgccagttcccagcaacaa

SEQ ID NO: 65324 - DNA, 362 bp, Oryza sativa
agcttgcactttctaaggtttagtgttacaggggattttacatggttgcccttatgaaagggacatttacatgggtatgcagtgtcatttgcacatataagcctttaatgggctgataggctgggcctggtctatggcaaacgggcttaaaaggccaagggcggcctgttgggcctccttgatgccgaactcgtcatggcgaagtctttgtagttcgccgaagatgccttcacccgagatgcctttactttcaaaataccgacgcggctttccagccttcgccatcttcgcttatggctttcgccataaggcttcgcctgaatggccttgacatctttggctagaatccttgctggtactat

SEQ ID NO: 65325 - DNA, 409 bp, Oryza sativa
tcatcttggagccatcggtgtacttcaatcgttcttcatctatggccgattgaacctgtcgtcgaaacacattgcaatcattagtagagtgagaatgagaatcatgccacttacaatatgctcgacatttcaactcttcttgagaaggtatgacatggcctttaggtaatctaatttgtttctcttgcaaaagataataaaaaatcttatcacacttggccacatcaaaactatatttaacctcactttgccgatctttgcgaggagtcgggattaggttagaacaaacaaaagttttatttttgttagtccatgaccattcggcaacataaatatcatgatcaccctcttcctcactatcattagcttaagggtaatcaaccacattaacattaggctttttatcaaa

SEQ ID NO: 65326 - DNA, 292 bp, Oryza sativa
  unsure (1)..(292): unsure at all n locations
agctagactntttttttcgccggtatgtaaagtgcctagtgcggtagtgccagacaactttatcagatattttatcctctggattatattatgtcatgattcatgaccatatacctctagttttgtagtatatgcccatatgaacctaacaagcatagccatgcgtttactacaaaactgatgcgcatatgaacctagcaggcataaccacgcattggttgactcttctaccgagaagcacatggtgaatccttccatatcatctaacaaatggaatctataatttctgttt

SEQ ID NO: 65327 - DNA, 374 bp, Oryza sativa
tggcagtataccgattcgtatcctaatatcttatgatactatcaagctaaaacgataccgatcccacataggggcctaattttcataggatctcgatcctactattcattacttcaccatcctattaaatcttatgggggattccgagttttccaaccccttcgattcctttaaaaatttttttaaatatactgggttggaaaaatagggactctatttgcgcccaattttttggaaaaccaattaaattttctcaaacccagtggggtttctcgggaaaagggccttattggcgccaatatatacacaaccaaatttttttatatataaaggggctttttaattaaattaaaattttttaacctctaaaaaaa

SEQ ID NO: 65328 - DNA, 320 bp, Oryza sativa
agcttgggagaggcagataatttaatacttactctctccgtcccaaaaaaaaggcaaactctgggtttccgtgccaacatttgactgtccatcttatatgaatttctcttaataaagttttactgggctggttggctgatcatgaactatggcgaacagctttaaaatgccatgggctgtctggttggcctatattgttgcccaaattagactggcgaaaatatctgtcgtcaccgaaaaaaccgttaccctatatgtctttgtcttaagaaaaccgaagcgaattttcaaccttctgcatcttcgcttataggtttctt

SEQ ID NO: 65329 - DNA, 435 bp, Oryza sativa
ctcacgcttcggtctctaataatataggaaaactcaatgcctcaggagttgttaattttctttgcagttaagagcaagtataatagtgagctataagtctactataatcttaggtggaggagagatgtagtgaaaaattaagggtgttggctctattacaagctccaagacaaataaagtgagagatagagagaggagaacaaaattattgccaactatatagctaatctattatatatgttggctttaagacatgttaatagtagtaagtgagctatactattatccttgctataagtatgttaggagcatggatgtatgggacgtcaacgaattacaccagaacaaattcctgaaaatcatgttccaaacttgatgaatgttacatcatccgccccaaaatataacaactttagccctcaacatttgtcttaa

SEQ ID NO: 65330 - DNA, 342 bp, Oryza sativa
agcttgtggatttatattagtttatcaaacgggcgcaatagaactgaggtaactctgacttttgccgatatccctgttcttttttcacaccatatacaggatcttaggttggttttatgacaattttggcatgctgaatttatgaaaattttgaatatttgactttttagtataaatttaataatatatggataaacttatagtgggtatgatcaatgtattgttggagagaatgtgcctttctctttatactagagcgcattcctcaagtcaggaaacatgactaactacagctttgattgtccacctcaaatactacaagtaaaatctgagaattgtagt

SEQ ID NO: 65331 - DNA, 426 bp, Oryza sativa
tgccgccttacccatgcaacaagattttgctcccctgctgctctggtgttgtcgatagctcttcgtcctgtaatgatctccaacagaacaacaccaaaactataaacatctgacttgagagtcagctggccagtcatagcatactcaggagcacagtatccatatgtacccatcactctagtggaaacatgggatttatcgccaattgggccgagctttgccaatccaaagtcagacaattttgggtgatatccctccccaagcaagatatttgaacacttcaaatctcggtatatgactggaggattggctttgtcatgcaaatattccaaacccttcgctgcaccagcagctatcttcatccttgtattccaatcaagccgcgacttgcctggtggaggatctgggtaaaacaaaatctagttg

SEQ ID NO: 65332 - DNA, 378 bp, Oryza sativa
  unsure (1)..(378): unsure at all n locations
agctngtgacacttctataaactatatgagagagtacctgtttggtgcagctgcaattcagtgtctaaagaaaaagaagctgtatgaaacacaaattgagccgctagcaaatttccaattgcgagttcatgatcaggtgatgagatatatgggcgcatattcaatcttgacttttgaagcattctgatattccagaaggttgttataaattcaaattgacaggaaattgtttgttttggtagataataatgcttgagagcgcaaaggcaaccacagataccgttgatgctttgcgctctggatcatctgctgtcaaagctattcatcagtcagtgtaagtctctgattgccctccattcatggtttctgaaattgaat

SEQ ID NO: 65333 - DNA, 426 bp, Oryza sativa
  unsure (1)..(426): unsure at all n locations
tcaccgctntgagtaatccacgatgtcggatttatggggaaagaacggcgaaaatggaaatgaagatggagcgagcagcaagggaacttcattatccaagggagctactataccttttgattacagcaaacttaccattccccctcacaactttgtctccgtgccttccgggcgtgctcctcaatttgatgggacacattacgccgcttggaagcacaagatgaagttgcatctaatctctttgcatccaagtatttggaaaattgtttgtacaggtgttgatgtaccccatgatgacatggagctcacttcggagcaagagcaactcatccaccgcaatgctcaagcttccaatgcaattctctccgccttgagtccggaggagttcaacaagtttgatggtcttgaggaggccaaggagatatg

SEQ ID NO: 65334 - DNA, 375 bp, Oryza sativa
agcttaccattactacagccctctcaccttgagacaacgatccaagggtaacctcaagaaaccagctatctataggtggcaaaacggattaccccgcctgagcacgacgcgtgccccgatggcggcatggttaataagccgtgtcgtactgggccacgtggccttggtcgaaaaggctacgggtcattatgtgcaaaccgctagaggtgcatgggttgttgccaacccatccatatatttaaccctataatttgaaatattaggctaggaaaaaagataaaagcagaaaaaagttaggaaaaacatagcgaaattatgagaaatgaggggaaataggagaaaatatggacgagattcgctaaaaacgaaaaagaa

SEQ ID NO: 65335 - DNA, 423 bp, Oryza sativa
  unsure (1)..(423): unsure at all n locations
tcaagtattttcaattnttcaattcattagcttaaaatcttatatttaattttcctccattctattctcatggccctgcgacactcgcgtgttgcgcatttgtttggcccctcggtggtaagagcccaacctctctcccatctacatgaatgattcttcgctaagtgtgggggctaagtcttctagccttatcctagccttaagttgagctccgggtgccgtcgaagcccgggaccccctgtgctggctcttccgtagcggctggctttggacccgccggctggctacggtgcccggcccggctcaactgtggacggngattgctggctctagaatttttcggctctcacactcgtgcgaaagtaatcgtccatgaagaaggaagagagattggaaggaggccaccgaaaggaaagagcgaac

SEQ ID NO: 65336 - DNA, 117 bp, Oryza sativa
ttttttttttttttggcttccccccctctctaaatatgccaatgggggggggcttttttaaaaaaaaattttttttttttttaaaaaaaggcccctatttttttttccaaaaaaaag

SEQ ID NO: 65337 - DNA, 366 bp, Oryza sativa
agcttggacttctcttcatgcacaagttatcggttggcttggatagtggcctcaatgtccttacgttctcgccgttcggctagtcttaacttggctttctccagtttgaattggtgttgctcaaggtaaacggctagagtaaggatatcggctaactcatctgggattaaaggttgaatctcatgtagccgagccctgattgagccacagttaaccaccaagctgtctagcgatgatgcctctagccgatctaaaatgcttcctagagttatcttcacatcatcagataaaggagccaaggctttgcttgtggtatcttcttctccttcatcaaggtagtctctgatgtcaaaagagaaaagatcg

SEQ ID NO: 65338 - DNA, 418 bp, Oryza sativa
tgtcaactatacagcaaacacacgaagatgacatcacaagtgctccaaaccgtacccctcacatggccgttctcgtgctgggggctcgacataatcagaccaattccaaaaggatgaggcaacaaatgattcttgtttgttgccattgacaaattcacaaagtggatcgaggcagagcccacataagagatcaaagtagagaacgctatcagattcatgaaaggggtattctgtagatacggattacctcatcgtatcatcacagccaatggtcctcagttcatcagcgcagattttcaagactactcgatagaactagggatcaagatttgctatgctttagtttcccaccctcagagtaacggacaagtcgaacaagccaacggtcttgtgctccagggatcaagacccacgtcta

SEQ ID NO: 65339 - DNA, 420 bp, Oryza sativa
  unsure (1)..(420): unsure at all n locations
tagcagacaagtacatatgggtgattttgtggatgaatgcttctccgttgagaggttcaggaaagcatatgcagggttattcaaccctatgacatccaagcatctgtggccattggttgatgtaggctacaaaatcaagaagcccaaattgaggagaaaaccagggagaccaagggtctctaagatgaaggcttctgatgaggttggccaaaggaaaaaaagaaaatgctcagagtgtcatgaattgggtcatacagctaagtattgccaaggaggccttacagctagtcaaaagaggaaaaaaggcactcaagagagtagcagtgatgcacatgcatctaagtaagtgaatttttcctcactttagttcatctataacttttgctcanactaactttcttatgctcccatatacagtgc

SEQ ID NO: 65340 - DNA, 373 bp, Oryza sativa
agcttattaagagatccgcgtgcgataattgatttgcgttagtggatctgtactaaacaccatccaaatatattttttacaaatggatgttctttacgctcatccgtgatcgaattgggggtgtctgtaaaatttgttttattatagtggtttatggtgcagagaatactattattaacattgtatatagtgttttttatagcttgtacagcgtagtacattgtgtttttctgacatctaaaccaattttccatttcaaaatcagtcaaccattggtgatgagcaaaaaaggagacggtcgtctagactcatgtgcgtattctgtttaccaaaagttcagtgttttacaaccttaagtctacaaacagacatg

SEQ ID NO: 65341 - DNA, 418 bp, Oryza sativa
tcaagaagatgtcacacagtccgtgccatggccagatttacatagcagatggtgcatgcgacattttggggctaatttttatagacaattcaggagtaagagattgatggacctgttcaagaagttatgcaagcataatcaacaaagaaagtttgatgccatatgggatcaactggatcgtttgaccactacacacatggaagatgttaggaaaaaacctatagttgccagacaggaggagccggagggacttgaacccattcctaatgaagcaccaagtattactcggcgcaggaagcgtggaagggccacgaagtgcttcacggagtgggtagaatttgagccaagggagaaatggtcgttgttgtacgatacagatggatcgaggtatggtgtgatgacaacaaatcttgctgaa

SEQ ID NO: 65342 - DNA, 372 bp, Oryza sativa
agcttaagatcatgtaattagaactccaacattgtggtatcagagcctaatttttagtccactcaatccctcataatcacatcatccctgtgattagaagccatccttataaaaatacaagattgattcggcatgagcaattttgaattagattggattaatttctttaagtattaagcccttttatactggtggtttcggccatcagtaggagaagcaaattattgaagaagctgtttaattcaagttttcgattttgattatccatcagtggagattaagagaagaaaagggattgggataaacatattgaaactcccaatttcctcgcactcagaaccctaagccgaagctaagaaggggataaactag

SEQ ID NO: 65343 - DNA, 415 bp, Oryza sativa
tcgcagaaccctcattgatggtggcagtgcactctatatcctcttcgccaagactttggatgatatgcagatccctcgctccgagttaaaaccaagcaatgcgccttttcatggagtaattccaggattatccgcaactccactcggccagatcactctcccggtcacttttggcactcgggaaaacttccgcacagagaatatcagctttgaagttgccgatttcgagacagcataccatgccatactcggacgcccggcgttagccaagttcatggccgtcccgcactacacatacatgatgatgaagatgcctggtccccgaggagtcctaaccctacggagcgacatcaagcaagctgtcacatgcgacaaggagagttgcgacatggcccacacccgcgagatggcgtct

SEQ ID NO: 65344 - DNA, 366 bp, Oryza sativa
agcttacgtagattttcaagttggctatgatgcgctgttgtcagtttggtgatgtacataagcccaaaactggttgtgacgaaactaaactgctcttcgatttagtatgtgaaattgtaaactgctcttcacttcactcacatactctaagcttgagctgaattataagagactctattgtactatattgtatacttagaataggaagagaataaagtagaagaagttggaggacttccggagttgtcggtaatcctgtccctttactttctgctctgcttattactctggctataatagaaatatcttttgagtaatatagttttgttcggtgagaattatttcttgttatttcctaattagagt

SEQ ID NO: 65345 - DNA, 406 bp, Oryza sativa
  unsure (1)..(406): unsure at all n locations
ntgtatggtttaaaacaatctccaagggcatggtatgatagattggaaaactttttgcttgccaaaggttttataatgggaaaagtggataaaacactctttgttcttaagcatggtgatgatcaactttttgttcagatttatgtggatgatatcatctttggttgttcatctcaccctttggttgtggagtttgctgagactatgcgcatggaatttgagaagagcatgatgggcgaattgacttactttttggggcttcaaatcaagcaaacaaagcaaggcacatttgtgcatcaaacgaagtacaccaaggatcttctacggcgtttcaagatggaggattgcaagcctatgtctacacccattggatctactcctgtgttggatccggatgaagatggtg

SEQ ID NO: 65346 - DNA, 367 bp, Oryza sativa
agcttgtttattacgttgtggtttatatgaatgcgaagaagctaaagaattgaggtttttatgtgggcttaacaaagaaattcaggacatgcttgattgtcaaagatatacatctctttctcatttgttacaacttgcttgcaatgctgaaagtaaaatagaggaggatatgaaaaagaaacacgctatgtctttgcctccaattactaactatttgcaggaagtgcgtaatcacgaaaaggaggagagagacatgaaagagccaccaattccattgttcacactcaagttcgagacacctccatcatctaaagaggacatccaaggtaaagtaaatggtactgaaattaatcaaggtgagtgcatt

SEQ ID NO: 65347 - DNA, 406 bp, Oryza sativa
tcattaattaaaacactagaggcacacataaccttttgtttctcagacaagccatgcattttaaattcgctatcaaccactagctcccaattaatgtaagcatgaggatcataatttccttcaaaataaggtagtgcagatttgatcttacctagaacaacgtcacttacctcatgttgatcactcctcatgtcgcgacgaagatatcgatgttgagcatgattatcgcgtattcccttgcttaatcctgccattgttagtcgaaaacaagaaacatacacaaaaatatgcactctcttatcaacgactaggtagtggcagctaaattatcacacatactcaagcttttaaccaagctcttacaagatcttatcaatgcaagcggaatggtgacatacaccgactc

SEQ ID NO: 65348 - DNA, 376 bp, Oryza sativa
agcttgcagctgcgatgatatatgatggatgcatgcacaaatgcacatataattgttttggctgcctgcaattctgtttggtggtcacccggcgaaaacacaggagactcccttgtcgtctaattgttgttcgcttcttcccctgacggatctttcctctcttttcccctcccgacgacgtcagaatctctctctctctctgctcctgcctcctctgctatggcctctgcctctgtctctctgcgactctgccctccctctacgtagttacgtacgtacatgcaatcacaatgcctgcctgcctcatactatcatatacatactatactacgtacactccatccgttctgatcaaatactacccccgttctaaaat

SEQ ID NO: 65349 - DNA, 441 bp, Oryza sativa
ctacataatactcaagcttgaactcttcaccagtttctttgcagttacagcctcactaggtaaaactcgatgggaagagaagtttgatggagctcttcctttgtatcttccattctcagtattgtttagtgcatttgtgttgatctttgctagattcggcctccttgcacttacaccagttttgcggttcccagtggatcgtccctttggaacagcttcttgccacccttcatccgacgtgtactcttcagtaaaatcatcttgaggtatacggcttaaggtgttacctggtatttcttctttcagtttctctttctgaataaacgttccattctctttgacttcagaactttccttctcaattaatgaatggtcacttttaggtggtgggctcctttgatcttcatcatcgactacttcagatggattttgcccggcacg

SEQ ID NO: 65350 - DNA, 420 bp, Oryza sativa
tctctcaacctatgaaagaagattgtacctttgctgctatctactctaagagcattgctatagtcattcgtgaaggaaatgcatggggattaatgatgagatctggcctcatcccagtattagcagagaatggcatatcaatatcaggccacaactgcgaacaaactcccttttgaccatgtctgctgctgaacttgtcaccaattataggatttctcacgcgacgcagacgaatattagcctgacaaaaacatgcagtagtgaaaagcatgccaagatgacaaaaaacaaattagaacacactttcacaaacaataatcctactaacattcaagaaatgcattgtgtaacatactaaagttcattggttccaaaagaggctgggtttttttgtagtttaaagaaactgaaggtatttca

SEQ ID NO: 65351 - DNA, 375 bp, Oryza sativa
agcttagttaactattctctatagtaattcagcaccaataacaaagagaaagggtgaaagtggatctccttgcctaacccctctcatgcatttaaaagaatttccaggtaccccattgagaagaactgaagaatgtgccgaagaaaaaaccatttgtacccactgcagccacttatcatgaaaacccatacttttcataatggatatcaaggcagagtgctgtatagaatcaaaagccttctcaaagtcaagttttaacaaaattatttctctctttgactattgacattgatggatatactcaaaagaccatgctaaacagtcttaaattgttttacccttaatgaagccgtattgattctcatgaaccagctt

SEQ ID NO: 65352 - DNA, 442 bp, Oryza sativa
ctacccaatactcaagctctagcccctttatctgatgatgtaaagaaaactctggaaggttgatgtgactatggctaccacggatgcaaccattgctcacatcatggatgaacaagaagatatcaagatcacatcgtccaagagctggaatccgattcggccacatgctacactgctgacttcaaacggccgccgaatctacatacgacctccgttttcggcccgtgagtacttgatggaaagctctcggagccctctttccaacagatccagcctcatctccgaattccatcttgtgtggccggaatcacaggcacaaggtgctacgtcacctataatgggcctataggcttgtaacttcatttgggaccccggcccatgtggggcccatgtggggtgccccccaaccaggtggagcacgaccctatgcacccctaggtac

SEQ ID NO: 65353 - DNA, 377 bp, Oryza sativa
agcttgtcaacggttcggcaatgttcaattggcgcccgccgccgtgttgaatcctataatcaaaccatggccgttccgaggttgggctttagatttcattggtcaaatttatcttccgtcatcaaaggggcatagattcgtgctagttgctacggattacttcaccaagtgggccgaagctgtgccgttgaagaatatgactcatacggaggtaattgactttattttgaagcatattatccatagattcgatattccacaaacattaactacggatcaatgtgcttcttttatatctaaggaagtgaagaattttgccgaatcttatggtattaaattgttgagttcttctccttactacgctcaagctaatggac

SEQ ID NO: 65354 - DNA, 421 bp, Oryza sativa
tgatttcttttgtaggcatactcctccggtggtacaagttgggttgtggatagtggttgcaccaatcatatgactggagagaggattatgtttacaagtcttgatgaagagaacgaaactcgtgagaatattgtgtttggagatgatggtaaaggaaaggtaattggtctaggtaaaattgccatctcgaataatcaatctctctctaatgttcttcttgtcaattcattaagctacaatttattatccgtttctcaattatgtaagttgggttacaattgcttgtttactgatgaggatgtgaccgtctttagaagggatgactcctccgtagcattcaaaggcaagttaaagggtgatctctatcttgtcgatttcgatgtggatagagtgaatccggaagcttgtttgattgctaaat

SEQ ID NO: 65355 - DNA, 259 bp, Oryza sativa
cccgggatcttaagcaccgcggctgcagcttagcttaccggtctactcacagttagcggcacattttacacagacatcgcgagacgtatgtacggggattcatgtggccacataagagaggatctgatatcgatggtgatcaattctagagatgattcgaaactcggttatagtaccaacatgttctgtatgtcatagttggtcatctgtgtccagacgacttatggactaaaactggctataagtggctacccaacct

SEQ ID NO: 65356 - DNA, 420 bp, Oryza sativa
tctgataaactgagattttcggctaacccatctctaactcttcgatatatttcttgctgaaagtatccctgatcccactgataacgagtaggcccaaacaattcaattggggtagttgctgacccataccacatagttccggcaactacgaaagctgcaaaaaaaacagcagcgatactactggaaagtacagtttcaatattgcccatacgtaatcctttgtatagacgttgaggtggacggacactaagatggaataggcccgctaatatgcccaatgtacccgcagcaatatgatgagaagctattccccctggaacaaaaggatcaaaaccttctgcaccccacgcaggatttacagcttgtacttttccagttagtccataaggatcagacacccatatcccaggaccatacaaa

SEQ ID NO: 65357 - DNA, 158 bp, Oryza sativa
agcttcgagagagaacttcggggagactggagcatgtctcctggtggcatgtctggggggccgcgcccaaaagtgcatcttctttaagaactgttgtttggaatagttaccaccaataattacaaactgattcttgtgaaaaacagaaaaaatccaaa

SEQ ID NO: 65358 - DNA, 422 bp, Oryza sativa
tctggacgtgggaagctctgtagaagttgaagcatttagtcaggcatacacagttacacacaagcacgaagaacacaatcaacagaaaggcacggcagtctacagatagacaaaaaatattgtcaatttaacatcacgaggctggatggagatgtacccatatctcaagttctctgaaagtaggggcattctgaaatattgaacaagcacccaagacctctgtccagttccaaaagcacttctcaatacaaatcttcttcagatgatcaaacacacctgggagttgcatcgacaagcaccctttggatagatactgctaccagaataaaaccaatgagaattaccaataaaatttaatcagcatgatagttaaataaagcaaaactaataatatgttaccgtcaagaatgagccacttatag

SEQ ID NO: 65359 - DNA, 372 bp, Oryza sativa
agctttgggagaatcataacggaatatatctcccacttgaaaccatcatgatgcttcattagtgcagtaaggtggaacagagatacatgatggccgattggtgaaaaaaggagtccttacgttggttctctacaatggataatagggaaacaggaaagattatatcaagtgttgcttcttaaatcagttttattgcttttcattagttttatgttgcaccaacatttaccatacaactatgtgcaacagcagggcatataaataacaagcacagcgattctacaacatttgcacgtgtactatgttatttcagtgaagtataagcaaataagcaataccctgatccatagcataagctatctggtatacatc

SEQ ID NO: 65360 - DNA, 379 bp, Oryza sativa
tcgacacaaagcgtcggtgtcctctcttcctatgtatcctcacaagagctgcgccatcgccgccaccgaatcgtccagcgaggaggccggggacaccggatctggcgaccccggcctccccgcctatggatccggttggctggtcagaaccttcgttgctattttcttatccattggggtcgacaacgctatttggcttgtgttcatgttgttgatcccggatctagccaacgtggcgaaggagaaggagatcaccatgttggtggctattaatggctcatgcgcgacgatggatgacgttgggtgtacagtgggagatggcatggtagacttgggctgctggttgttgtgtctttcttccttgggtgctgccagatct

SEQ ID NO: 65361 - DNA, 64 bp, Oryza sativa
agccgccccggatcttaagtcactgagctgcagctggtatgagggcttaaattttttttattaa

SEQ ID NO: 65362 - DNA, 429 bp, Oryza sativa
atatacacaactcaagcttttatatggcaaccaaatcgcgattctctacgtgttataacgatattattttcttttctaagaataatatattcaaaaccttgcattaactagtggttgcaccacgccaatggcagggttctggtctcacgcgcactttaagtacatcaccgagaggggaagcgagaacccaacgcatcaagccaccgaaccactggacgccatggaaaccggtaggggaggccaatgaacaatgtgcaagcaagaccaatcttgtgtatataaggccataatgtacagctccttctcaaggcacgggaggtaatcgtcgttagtttgtaaatactttggcgtgggccaatggtaccgactaacttgactactgacctgacgcaaataggtgttgtttgtacatactgtatgtattttcaa

SEQ ID NO: 65363 - DNA, 139 bp, Oryza sativa
agcttcacaatgtgctcatattcttttatttataagaaccgccgcacatatcgagaagaggagaattgacatgggtacattaaaactacctacagctgccggttgattacttaccaattttgcccttgatttgggaaaa

SEQ ID NO: 65364 - DNA, 403 bp, Oryza sativa
tggagaatcatctatttaggcgtatgcatttaactctaccacactattttctaaatatatacgggttcaatatcttaaatttggcagcacattaaatggaattttctgttattttaggtggtgcagatcctttatcctgcggaataaggctcaaagttgctattggggctgctaggggtttatcatttttgcacgatgctgaaaatcaagttatatatcgtgatttcaaggcatcaaacattctccttgactcggtatacatgaaaatagctactcattcttgtccttcgaaagtttgaccttttgcaaatgtttttactttaacttttgtttccttttttcaccattataggagttcaacgcaaagctttcagactttggtctggcaaaagcaggcccaact

SEQ ID NO: 65365 - DNA, 324 bp, Oryza sativa
agcttattattatcttcatagatggtttttagtatgctcttgccttgctaacgtaagtcgactttcttgtactgatgggttcctattggttattgactattaaaataaattctaacattataaactgatttgtataatatacgtcactggatctggttattcctatatgcaaatgcacaacttcaactagaagcagctgtgtttacgttaatggtactgactgatggttatatatgaactttgctgaaattatttatgaaccgttctgaacttttgatgcttccttagatgtctgacttctttgtaatgcacttttatttttct

SEQ ID NO: 65366 - DNA, 390 bp, Oryza sativa
ttcggacgcatggtgagtagcataataaatccattagtttttctcctatcaccgtatcattaccataggatatttgcaatatttgaagcttacccatcacagcaagagatgacttcaaagcttccatataccttgccgtatcatgatcaccaagttgttcgctaccacgcaggtctatgtcaatcgcccttaggtttgtcaaccgcttcagctgttcaacaaatactacggaagcacgtgacagctgctgcaaggcttgtagatctccaatctcattgggcaattccacattataatctacaagtagacgcaccagatttttcaaacaacctattgttgatggcaatttttcaaccctactgctacgtatgtctagtgtcagtagatttc

SEQ ID NO: 65367 - DNA, 63 bp, Oryza sativa
gcttaaatatttctcttatccgttaggcctacttattgctttttccgaccggtctaaatacag

SEQ ID NO: 65368 - DNA, 52 bp, Oryza sativa
agcttttgtcaaaccttattgaccctaaaacccgcaaaagctattaaaaaac

SEQ ID NO: 65369 - DNA, 422 bp, Oryza sativa
tttgttgctcagtgagtttttatctgcctataactcggaaaatatccagacaaaaaaagttagtatcatttacctagccatattgtgccattgcattgttcttttcagtttttgctttgttgagtttgcgttgcatcgtctagtcatgttgctggtcttagcgtttagtccgtttagagtttcgagttctggtcacgtttagtaccactgtctctgccgccgtcgtgtctttgttgctgtcgggaccagcacgatacttgactttgaatgattattcaactttgcattctctgatttgagcattttctattcctttgctacatatttaagcgtacccagaactccacatatttgattgcagccatacaacaaggtttgcgaagacatcgatacatccaacctccattggggtgcttggttga

SEQ ID NO: 65370 - DNA, 378 bp, Oryza sativa
agcttctcttactgaagaggggaatgattgatctacaatgagtacaaccacagtactcatcaagccacaccggcggatgcataattaatgcaagggatgtacaagggaataataatatagggattaagttttgcagtaaacagcatttaaaagtcacttagttgcccaaagccattttgtaaagacgatcctagagctacacagtattattaaacaaggccgtgaaccctcacgaacctgtcttaacccaaagcctacgatgattcggaccgaactggcaacccgacctgggttccagctcgtcccaagccaacccaggccaaccattccacattttagttgttgagcaacatttaagaattagaacactgacttggg

SEQ ID NO: 65371 - DNA, 437 bp, Oryza sativa
ctacataatactcaagctttgtggttttacctaccacacggaatggcgtcttttcctgtatgcggcggtcatgagtgacctgatcttgcggctgtcgggtgtggcagccgtggaatctcaagctgatggtgtgtgagcggtgaaccacagagttaattccaaacgatagattaattcgaaccgtaattgaaaatataatcacagctatactatcctaaatcatgatcttcgtcaacttgaaactggttcttctcacgtgaatcgtgagttgcagagatgagaatcatgcaaaataagatctcaaataaaaaatagaaaaaaaaccataagacaacaagagtaagtaccaatagtcttgtctttttgtcatcctttgctctttttcactcaatgatggtgagcctaggtttcacatttcgatttcaatcgaaatttcg

SEQ ID NO: 65372 - DNA, 368 bp, Oryza sativa
  unsure (1)..(368): unsure at all n locations
agctctgcacgtgagaccacaaggattgtctatacttcctantggccagctcgatcagaattgaatgcccggagtatgaatccaaaaagcctagccagaatcttatcaagggagaagagaaaatgtagaaactgcttcattgtaggcagctagtgcgtgcccccttgccaaaagcccaaaacttctctcaacggtttgtgcgagttctctctaaatattttatccttttacatagaggccctatctgatataacttaaccatatcgacagtctttgtcccccttgttaaaaacccaaaacttctctcaacattttgcgcgtactctcttataagttttatactttcacattgccgccctacgtaatgc

SEQ ID NO: 65373 - DNA, 422 bp, Oryza sativa
atactttaattatgaacatattttacttgtcacttttaattattaaaggttaataattagccatgctttgtatgttagagttgtttaagttaatcatattatggttacagattatcccatcacataattttacaacaaataatcctaatttacagttgaactataattataattatatgaggtcaagatttataactagtatttatctaatatacatgtttgtcatacactcattagtttactatacacaaaagggtaggtttttgatataccgtacatctaaattgggatgtacaatgtatgtgggtgcaacaatatttaatcattggatcatttactgaataattgctatttactggaagctataagatatatgtgattaagatggcttctgtctgttaacttatggatgtcaaccgaac

SEQ ID NO: 65374 - DNA, 88 bp, Oryza sativa
  unsure (1)..(88): unsure at all n locations
agctttataaagggtatcttgcctttttttatatcncgctccgtcatttgcacattaaaaacaccaggtcgatgtgtgttttaggggg

SEQ ID NO: 65375 - DNA, 417 bp, Oryza sativa
tatttccttgccttttaatctgtgttggatgcatttggctgttgtaataaaatgcttttcaaataccattaggttggtgttttggttctgtttctgattttgtttggttatacaagctaacaagcctattttttctattaagttttattataaagctgtctttgttatatcgatttcaccctcctgccctaaatgaactaatagtgtgttttcttgtcgagcaggtaaatctattttgtatcactaacattttgtgcaatgttctgaatgggataatgccaaaaagaaatatcgttgtagttataagatgtatatatcacgtcattgctttttgataatttacctgattatgctattccagatgtactgtaagttttctggaagtaagaggttgttgatatcaagtgctaactatac

SEQ ID NO: 65376 - DNA, 417 bp, Oryza sativa
tctatttgacaggtacatctgttcgtgattctatcaagtaatgaactgagtagtagttaccttggttggctgttgaaaagttgaaacactaccacttgaatgccgaactgtaattcatatcagataaaaatacgtgtagatctgctatatttctttttaagtgtagggacttgtactattgttacgttttgagtttcagtttgacaatgaaaatttacggaaccatattaatcattttcacctatcatgcatgttatgtacagcaaagtactcaactttattttagaagagctattgtttaaatgcttgagaaaccatctttattactagcatttatcttgcacctatcatgtatcttatgtatagcgaaatacccttaccttttattagaagagttattctttaaatacttagttc

SEQ ID NO: 65377 - DNA, 369 bp, Oryza sativa
agcttgtccgtggcctaatggtttttcttctcaagagatacatcgtgcaagaattgggttgtttcatgatgataaacgagaacatcattatgagggccagagggacaaggcttaagcttgatcgagggtgatgagggacgttcagtttcatgaagatgggaaatagattcagaagaaacgaacgaagatacaaacatcaccttctcgaacggctcatgcttgggatgagccttcttttcgctggaataattcaaggtgttctcataattttcataaagatcacccctgaattggaatggaattttcggaggatgaatttcttcttcctccggctccagcgactggaatgaggattcgacagttgagtcg

SEQ ID NO: 65378 - DNA, 416 bp, Oryza sativa
  unsure (1)..(416): unsure at all n locations
tgcagcanatacatggaactcatacaagccaacataacgttggcacaagaacattacacagcagtatttgtacagtagacaggctaattttgacaattttgaatgttttacaggctttcactgggacggtgaaacttgctcggtccgaaccttaaacacgggcatcatcctcttccattcaaggtgaatgaagatggagatggcggtgtgcagttcaggcagcagctagcttgatctccgttcaaggaagatggtgatgcagcgtctccggcgacatggagatcatctgcagcaggctggagctcgagaacgtctcctcgagggatatctcgatcttgctgctgctcccgatgttgttcctcacgatctgcatcagctccttggcgacgccgagcatgcagagcccgttctcggcg

SEQ ID NO: 65379 - DNA, 367 bp, Oryza sativa
agcttgaagcttggatgatctcgatagaccaagttgtcgatgacgatgatggttccgatctagtccgaagatgtaagatggatctctccacggccgaagtcgtcgagtagcttgttgttggagaatccatctctcaaacccatctcgtcgaaaccttgaagcaccaaaacccccctacctggcgcgccactgtcgacgtttgatgtctcgactacggtatttgcatagtatggggatcgttggtgctaggatatacgcaagactgaggtaaaagagatggagacagggatttttatacaggttcgggcccctgaattgtcaggtaataaccctacatcctgttggccgaagccggtattgctcttat

SEQ ID NO: 65380 - DNA, 127 bp, Oryza sativa
  unsure (1)..(127): unsure at all n locations
ntactagttagcaaacttgtgaagacttaccatgaattagggagatgctaaaacatgggaacgtcgaaactgtctcctttaactccaatgctgctggtgggtgggtgggggtttggggggggggtaa

SEQ ID NO: 65381 - DNA, 68 bp, Oryza sativa
agcttctcctgtgaatgatacaatatgcagtcctatcacatcatcacagaaccaatcaaggatgatgt

SEQ ID NO: 65382 - DNA, 409 bp, Oryza sativa
taaagccatgaatcccttttatgcatatctagatctggatcctgcagaacaaacatataggatgagtaatatctgatgtaaatataatactcaagaaaaattcaagtattttaaaatgtttataaatatgtatttctcctcttgtcaatattgatttccccgagaagatgactctttacgtttaaacactctgcctgactagtcatagacccaagcaccgggagtcggcctaggcacttcccaaacatgcatatgagtgacatgagttcgtcattaatggaacaaagtttcacgaatcagaatttactactcgggtacttttgcaattgttaagagcagaaaataaatttatattaatctctatgcttttgatttattctgaataatacttattaccttgcgttactcg

SEQ ID NO: 65383 - DNA, 341 bp, Oryza sativa
  unsure (1)..(341): unsure at all n locations
agctttagctcccttatccgatgatgtgaagaaaacacttgaagatatctctcatcggctggaagcatcatcattagatagtctggtggtaaactgtgggccaattaggactcgactacatgaaatccaagctctaatcccagatgagctagccgatatccttactccagtagtataccttgagcaacatcagttcaagctggagaaggccaagctaagactagccgaacgtcgggagcgcaaagatatcgaagccacaatccaagccaatctgcagcttgtgcatgaagagaagacanacttgatcaactatctaagggtcccgatcaatcaatattgat

SEQ ID NO: 65384 - DNA, 405 bp, Oryza sativa
  unsure (1)..(405): unsure at all n locations
tcatctagattntggggttctcctgtagttgtctacagaccataccttaaaagtttcctcagagtataccttttgttttcttatacctcaatggagatgagtagttggccatgtaggctgagccacagtcggatccgaagtaggcacaaaggatccttcactgccatcgccatgattgctaggaattggggacgtgatagccgacgattgatccccctgctgttgagtaagcgaaccattgacatcctcgtcattgttgaatgagagcgcangcgagtgcgcaagtgaggcaggggtatcaccctcgggatttgagccatcagagatgttgtctccgggatcttctgtgaaatctggatctgctgcatcttcttcaagattttctgcagtaacttggttattcta

SEQ ID NO: 65385 - DNA, 201 bp, Oryza sativa
aggcgggccttaactttaaaaaaggggttgtttcaaccaaccaacttaatccttcttggcaaggttgttttttaaaaaaaactcccccataaggcacttttattttaaattacccccgtaacccttttgttcttttcctttccccaaccaaaatttccctttttttccctccggcctctctttttttttcctctttttttt

SEQ ID NO: 65386 - DNA, 425 bp, Oryza sativa
ggaagcatctgcagcatcaaacacctggcccggccaccatgggtgactccgcaccttgccccagacaagctctggcggtgcaaaatcatggcctccctcatcctgaaaagtgcagtcatagcgcgcgcttccatggtttccctcttcctcctcctgcggtggcggtgatggttggttcttggggcggccagagcgagggcttttgagaagctgaaacaacccacaattaattagattctaattaaaaattgtatatcttaattcgatccatgcgattggttaaacaaaagaatggcaacttggttaaaaatttagaagctagaacttttttaacccaaattatatacaaaaaattaattagacatgatactattgtctaaattatacaaattgtggtaatacactaaatcttcaccatccataat

SEQ ID NO: 65387 - DNA, 324 bp, Oryza sativa
gatccttaatcacctgagcatcaagctggaaaaaaacttagaacttacaccctctgatataatctcgatcccataaaaccagctcgacatagggggttttaaataaagggggtaaatttttaccgtttaataggtgtttcggtctaataaaaaactcatttcctttccttctaaaccccccaaaacgtttttaagggggggtttattccttaaaaaattttaatttaaaaaatatgagttttgcattcctcttactcttactctcttagaacactcttatcaccttacttccttacacaaatacatcgtctatcccactctttt

SEQ ID NO: 65388 - DNA, 426 bp, Oryza sativa
tggacaaatacaaatttgttatatgcttgagcacaatacatggtaggcatcacaatactgtaaatatggacagttgtgaacattttttaaaaaaaaagcatgattctttatgatggaatgaatgctggttgtggatcaatgaataagatcctctgaaaaggataagcagacatacctctgaaagataaccatcactatcagacagatcactgtttaattcacattcatcttccgggaactctaggccattaaccaaagctgcagcatcaccgttgttcctagaggaaaagaatttcgaatttatttagtaaattaaataaaagaaacactaaatgaactattgtgcagtattatcatgattaatgaagttgtaaagttatgaagttgaattgaggttagtctatcgcatcatttgagttgcaagca

SEQ ID NO: 65389 - DNA, 413 bp, Oryza sativa
agctttgggaagaactatcaatacctgtgtactcacttttggtccaaagcaagcattgcaagttcaggctctcttagcagcatgaccatcaatacgtatgtttcaccgagttttagcttcaaaccatcttttttccacaactttacaccaattctattcacttcaataattcttcctacacaacataaacctttcaaacttttcttgtgacactcgtactaatcttcacatcgaaactttcaaattttgacagtgaacttaaacaccaacctgtataaccttgaaccattcaaaacttcaaaaagagtatcttgctctaagagaacaaagaaatataccaaacctcttttaattttcctatggccctctccctccatatgagccttaggctaatcctaaccttccattccccc

SEQ ID NO: 65390 - DNA, 360 bp, Oryza sativa
  unsure (1)..(360): unsure at all n locations
tggtcgcgggaacgcgggaagaaaggtccgagcttggaatgtgaagaagaagtatccaagaacgcgagagcttggaaggcgagctgcggtggtgtatctagccaatgccggcggggaactggtagggagggggatggggggagtgtttcttttttatctntttttatttatttctctctattattttcttatttgactggtgcgattctttgtttcattttacttgtccgatactattttcctattttttggaatactttttgtcttcccacctctagctatgtgtgttttcctttatgtgtaatgtttatttttaaataaacattttccgttgtttctgttttaatcctgttttttttt

SEQ ID NO: 65391 - DNA, 348 bp, Oryza sativa
agcttcatattgaaatagagcagctcaatcgactaaactcaaagaagtgaagttaatttcattcaacaaaatcacacagcaccgggcaaatcagacagttacaaagtgattgataaaaataaaaactccgggccagctgatgttcatcagcaaatattttacaagaaaaaaaaaggttctggattattaagacaaggcttttagataaccacagatatattgtgctccagggttcgatctatcggaaagggaaaaattctgaaattccgatccgaaattgtgaatcctgttagagcctctagatatcaaaaccgcattatgtaaccgccccagaatgggaaatcgatc

SEQ ID NO: 65392 - DNA, 420 bp, Oryza sativa
ggagctgaattatatgaggctctattggactatattgtattctagaataggaagagagtagagtagaagaagtcagaagaatttcggagttgtcggtaatcttctctcatttcttttattctgtttttactctgaattcaatataatattcttcctcagtaatttagatttatctcgtgagaattatctcttggttagttcgtaaatagcatacgggatcattgttcactatagtccatttatttatagtgattgctttagtttttgatttgcactacagtagttattaattgcgtagacgcagtgtctaggtaattaatttccagtggttgctgcgtatcccgcagtacgtttgaggtaggtatagaggtggtgacagccctcaagagcacttaagttctccctgtccgggtatgtagt

SEQ ID NO: 65393 - DNA, 175 bp, Oryza sativa
agcttctttccccagaatactaaaattgaaaagcgcaagtacttatccccagtgacgaagcgcagaagactaactagctgtagcaatgaccagaccagtcgacgcagcttttctttctcaaaaagcccccggttagaaaaaagaaaaagtgaagctggcattaactttattaaaa

SEQ ID NO: 65394 - DNA, 419 bp, Oryza sativa
  unsure (1)..(419): unsure at all n locations
tatcaagagttccatactaagatgcgttgagatctcagaacttaccaaccatggcatttcaaggccaaagaacacatactcaatctcataagtattaacaaaatttattacaacagtgtacagagatatcctatgaacaaaaatagcagaattataagccatgagacaggctgctaagtacagcttaccttagataatatggacagctatcatatgtctcggagatttcactacgatcaatagttgcatttntcaaatcctcctccaataattgacaccaagcaaatggtgtgttttcttcagagttaaactggtcctccattgttttacatagactactgaccagatctggatccgatgaggatcctgcactaatgcttacattagcatctttttctatcaggtaaagtgcaatttca

SEQ ID NO: 65395 - DNA, 415 bp, Oryza sativa
tggagagctccttggtggatggggacgacgccttctcccacagtctccatgctcattagagacgccgtcgttggtgaggtcatcgttgttgtacctccttccacagccttgacgctcgtcatgggggacaccgccggcgacgaggtcatcgtacctcctccatatcctcaaagcttgtcgttagggatgccgccatcgacgatatcatcttcgtcgtaccttcttccatagcctcaacgctcatcacgaggggcgtctctgccgccgaggtcgtccactagtacaggaatgatttttctggacgtgactcattttggattgcagacgcaccgtaagtggtcgcgtctgcaaaaatcgtgctccattttggcgtgcggctctttaaaataaccgcacggaaaaaaaatcaattttt

SEQ ID NO: 65396 - DNA, 369 bp, Oryza sativa
agcttgctctcctgtttctcatttatctcgaccatcatatccaaaccttttacattcacatttcctagtgctctttcagctcagattgatctctggctctctgctatttattatacaaagcacactgtagggccatcattgtgttttttttcctggcagatttaggtgggaatagctccggagatgggacaagtatcaaagtcccaaaggtctactggaattttacacgtaaatctatattaactctagaatggattgatgggatcaagctcactgatgctgagcgcattggcaaagccaatctgaacaggaaaaggatgatcgatgaggtatcgcagaaatgttatacttactgtatattgtgactaa

SEQ ID NO: 65397 - DNA, 419 bp, Oryza sativa
  unsure (1)..(419): unsure at all n locations
ntatccacaacacagctgggtaaaagaaactgtgctaggtttgatatttctgatgaccgtggtttcactcacaaccgtagtagctgacagattgataggtcttgaggtcagatgcaattcaagaagttccacgtcaggcctattatcaggcttgctcaattacaataccatacttttatatttcaattagtaaggtgctaattctttgtttcgattctactgcaggatacatatgatcctatgttaagggaaatactttctgacagtccaacctctaggctattgtgtgttttcctatactgtgtgattgctccattgtcagaagaaaccatttaccgtggattcctcctaacagccctgtcatcctcaatgaaatggaaggatgccgtaattgtcagttcactcatgttcagcatagc

SEQ ID NO: 65398 - DNA, 366 bp, Oryza sativa
agcttgcccgcaggtacaccgaacacgcacttatcggggttcagttttatgcgggcggagcggagactctcaaaagtctccgctagatccaagagtaaggtctcttggttgcgcgtctttacaaccaagtcatcgacataagcctcaacattacgtcctatttggctacccaaagaaattcgagtagtacgttgaaaagtaggacctgcattctttaacccgaagggcattgtcgtataacaataagttcctatgggggtaatgaatgcagttttttcctcatcctccctagccatgcggatctgatggtaaccagagtatgcatctaggaaacacaaaaagtcgcaccccgctgtggagtcgaca

SEQ ID NO: 65399 - DNA, 415 bp, Oryza sativa
tgtagatataatccagatgatcctggccgggagaaagattgtcctcaagatacttatgcaggcaagtgttctcaatcgcgatatggagcaggagtaggccatcgatgacatcgtcgccaaccgtgcgtacgttggctgatgcaccatggcgtaagagcagcttgatcatctcaatagagaacctttcagcagcttcatggagcgggaagtatccatatttggttacgcagttgggattggcatgcaccccaaggagctcatgtgccctgccctccaatacaactttcgcgcatcgcagggaattgaaactgaccatgcacgttaaggtttgtgcggtgatggtgagattccatgacatggtatagcccttccagttcttgaataatcggaggaagcaacgtgcactatcctttat

SEQ ID NO: 65400 - DNA, 363 bp, Oryza sativa
  unsure (1)..(363): unsure at all n locations
agcttgntaacggatcggcaatgtttaattagcgcctaccgctgtgttgaatcctatccttaaactatggccgttccggggttgggctttggatttcattggtcaaatttattcttcgtcatcaaaagggcattggttcgtgctagttgcaatggattacttcactaagtggaccaaagccgtgctgctccagaatattacttgtacggaagtaattgactttattttgaagcatattggtgatagattcggtattcctcaaacgttgaaagagcttcttttatgttcaaagaagtgagaagttttgtcgaatcttatgatattaagttgttgagttcttctctttactacactcaggctaat

SEQ ID NO: 65401 - DNA, 408 bp, Oryza sativa
tggaagaattggacgtcgaagctcttcaccgagtttgtcaacccgcctagcaatcatacgccgttcgatgaataccctcaaataaccgaagcgttatgggaggaattctgctctctgaagaatacccaagagtttagggaatcaagcgaggcacatcgcctactgcaacagcggaatgagcacccgcatcggctgggcactacagggtacatcggcaaggagccaatatgggcccaagaggatgcagccgctgcagcagcgaatgtccctgccccgttttcggacatcgctgaacaaagagctcgcaactgggtgcgagcaaggggtaaggtcaaaccaaatgactctgtcacattgagaacaaaaatgatgccatcgtctatcaggaactggtgagttcactactta

SEQ ID NO: 65402 - DNA, 363 bp, Oryza sativa
agcttgacgttccggggcctgccgtcgcactttctgccggaccggctttgcgcccggccgcacggcgagacggtgctcaatcacctccctggggaccccgggcatatccgccggtctccatgcgaagacatcagcgtttgcccgcaggaaggagacgagcgcgtcttcctatttgccatccagaagaccaccgattcgtgtggtcttggacgggccgtcgcccagggcaacctccttgaccgggacctcgtcgcatgtgactatccgctgcctcggggcggcggagacggaggtgccaagcctctcgtcgccaccctcaggcttggacgcagcggcgaggtggtccacgcgctgctccataca

SEQ ID NO: 65403 - DNA, 402 bp, Oryza sativa
  unsure (1)..(402): unsure at all n locations
tatgacatgggtgacagtgtctatcaagaaaagagattctctgtagcaatgcagcgttacaagtaagttataatttcgtaggactgatatatgaaagtgtaatttgcgaggacttcatttgcacatcttgattttctgaatttgcacatgaagagatcctgaggccagggataaaatgaatccttttgctgaacaagaagcatgggaagagcaccaaataggtatagtgttctgcaatcacattgagcttcaaatatttgtgccttttaaggcattgttttagctctgcctctgtgttgtatatttagcaagggactaacttgatatacttgattcaggaaagtctaaactgcaatttggatcaaaagatangaagcggtcttctgatgattatcagtaagt

SEQ ID NO: 65404 - DNA, 375 bp, Oryza sativa
  unsure (1)..(375): unsure at all n locations
agcttggggagctccatcttgtgctaataatgatgttgcaatggggggagaaaaggaccttacctcatgtaattttctatgtccaaaccaaaacaaggtagtagcagtgccaccaacatcaaattaaaagtgccctcctaagaaaacgattgatttcggccgcgaaaaccatgcaataatacatattcatcggttaaaaagcgttgattcatccggggcttgtcattcgcgaataacatgaaaatttatgtatccatagttttgttttacacgtagacaggtttttcgtccgtctttagtacacgttaacggcgccacgttgagaacgaanaatctagagttaggtatttaaaatgcataattttggaagagtgg

SEQ ID NO: 65405 - DNA, 404 bp, Oryza sativa
tgccctcccgatgcatcgcaagactatcccggtttgccgagttccttacgacaacctgtcatagccatccaaccaaagcgggatacggaggagtattcaaccccaggaaattgtatgtaaggatataaactgcggggaagacacccgtactgagcttgtaccatcagcggcctacaaatcacccagagcatatacttcaaaataatgattagcggtaacctaagctgcatgcttaaattactacttactacttactgtcttgcaattcagtgtataaacaacttagccctgtaaccatagctcttggcttatcctaaacaaactaatgacctagtagttagacattataccaacatcaatgcaaatcccagaagtttaacacagattatatactcatgaataaa

SEQ ID NO: 65406 - DNA, 154 bp, Oryza sativa
tacatcgccctcagcagtaggcttccgacatatcaccgccataaaatctctggtcactgggccacgatactcccgtagttgacgtcgttgatacagccacgctcattaattcacgggtaaaacacaatctgaacagtaaaaagacatttccccc

SEQ ID NO: 65407 - DNA, 304 bp, Oryza sativa
  unsure (1)..(304): unsure at all n locations
ccgtgacctctaaatcnactgcagcatgcaagcttaaccaatagccatcactgaatagaacctgtacttctccaacttaacaccttctgttatttcctcttgaactgatcacaacctttcaaacttcactaaatctattgccccttatatctaaggaggaagcaccgatcaaagaactgcaacgtgcgaagaaagacaccgatatagggggtcggtcacaaagagctcatattcacataattcatttcttagatggcaaaacctcttttgggcttcttatagcatgatgtctttatcaaatgga

SEQ ID NO: 65408 - DNA, 409 bp, Oryza sativa
  unsure (1)..(409): unsure at all n locations
cagggtccatctaactttgaagngcttttttggcatcnngnattttaaacatagaatctggattggtcataacaaacttttgcaacaaaagattttggccaatttacatactgcagcagtggggggtcattcaggaattttggttacttatcaaagagttaagcagttgttctcttggccaggcctgcgcaaagatgttcaggagtttgtccaacattgtgatatttttcaaagagctaaatctggacatgttaaatacccagggttattgcagccattggaggtaccttctcaatcatggcaagtaattactatggattttatcgaaggtttacccagatcggcttcatttgactgtatactggttattgtggataaattctctaagnttgctcattttttacccctg

SEQ ID NO: 65409 - DNA, 354 bp, Oryza sativa
  unsure (1)..(354): unsure at all n locations
agcttccgagcatagactaaagccttgtttgtttcaatttaacattactgtaatccaaattattgtaatctttaacgacttgggaaaaaaaattcaacaacaactttgaaataaaatttcccttgcaatctggaccgttcagtctgtggatcagacggcaaggcagatacactcgtcgtcatcggctgctactagtagtagcaccttgagtaaaaggtgattcccgctgatggcgccgcctcccgccggcgtggaagccgtctgcgccgccgtcatcaaatccacgctaacccaaccccacaaccaccaccacctgctcgcgggctcgccctccctcctcgccgncgtccttca

SEQ ID NO: 65410 - DNA, 423 bp, Oryza sativa
tcaagcttcagttgcgtaagtggagacgtgtaaggccggctaatgcttttgtacaggaacaaaaaaatgtcatcagctgcttcccatcgcggcggcgatcatcaatagttgaatagtccggcggcttctctgtcagaatgttgaactcagcgctgtggatgttgtgggtggccatggctcgggcaacagccttgccaatggtgagacaatcatagtatctcaagtagaaacctatgctgagcttgcgaaggggaatatcttgtcttctgaaactgagaatgttgtcagttgcaccagccacagcagcgttcatgggaattgtatccttcaaggtggcatagccacaacggggcacaaaggaattgatccgaatatgtaagtttgagagcatatggcggagatggagtgtcctcttagaaagga

SEQ ID NO: 65411 - DNA, 325 bp, Oryza sativa
agctttgtggcttcctgtgatatactattgctatgtactgtttgggtccaccctcctaccgagttgggtaggatatactgagcttgcccttagctaaccttcgcctacgtggaagtgaaaaagtgttggagagagagggaagcggacgcttgcatgagagccggccaagcacaagcgcataggccaatgccccaatatgttaactgctgcatgtcagtattccaatatggcccaaagggagcaaacctggtggtcccccacatacctaagaaaatggggagtgtattctaatcccttgaggggatatccccctgtatattttttt

SEQ ID NO: 65412 - DNA, 418 bp, Oryza sativa
tagtttgagcaaacacagaatggtcatagagcataaacataattcccttttcttttgttcacttttcctaactacgagttgttcatctgatacaaaatatctgacaactataacatgaatgcaggacataatcaattctctgcattaaatataaataacagtagaactatttttcgaaaaaaaaaacagtgaaaagaatttagcaggaaaggtttacctctccccgatgtatttcagtagatcagaagtcacaaaattctgagcccaaaacgactcgagcttcccagcagaccgatccacagccaccctagccatcgcgcacatgacaccgatggtcttcttgaagatcaccttatggcgcgtcatgtcgagagatctccacaagtcagggaccttggcagcctccaaccatgagtgg

SEQ ID NO: 65413 - DNA, 77 bp, Oryza sativa
tattgaatataacttctattctgctatctatactgaatatatatcgacgacgcttcgtctttaatggtgcatttcac

SEQ ID NO: 65414 - DNA, 192 bp, Oryza sativa
aaagaaagaggtctttttttttcctccccccccggggggggtgggaaacccccccaaaaaagaaaaaaaccccttttttttaataaaagaaaaaggggggggccttcccccccccccccctttaaacccccttattttgtgtgtggagggcccccctccttctctctccgcttttttagaaaaaaaaccccc

SEQ ID NO: 65415 - DNA, 80 bp, Oryza sativa
  unsure (1)..(80): unsure at all n locations
agctngtatgaacctatggagaatatgcttatatgacagctgcaacagacatgatcatatatagcctagagaaaaaaaag

SEQ ID NO: 65416 - DNA, 407 bp, Oryza sativa
tgagaataagaatgctgatcatgtattttgaaactttaactgtatatatatgatgcaacttagagtggccaagtttcatgcttcattgctcattattaacacttctcttgcagggttcttaataatcttggtccagaattatcgacattttggtagccccctaaaacgctttggctctctgaaatttaaaatcctgttcttcatagcttcatgctggacagcttggctacttgcaagtatttaccaatgctaccttgatttttgtattcctacatatggtgtgatctctataaatctaaattacttgcttattgtgatcgtaagtatatattatggtttacgctccgtcagatatctgaatatgctgggatgaaatggacctatgtcacgaacactcctcaatctgg

SEQ ID NO: 65417 - DNA, 289 bp, Oryza sativa
agcttgatctgtatatttacatggttctcgcgtaaacgccctgctaattcttatttgggcgtttcccgcataatctacaccctccttaattcgcagcatcgcaggtagtactagttagtactgcgaaactaacagaaacacttgggttatacgactaatcaatcggctgctttatcaattaactactgccgttaagcctaattctatctgtcgatgaaataaaaaacgagcatgttcaagtacctacctgtattcagtggtaaattcatcctttaatagtcaatacctg

SEQ ID NO: 65418 - DNA, 350 bp, Oryza sativa
gcatccctgtttagaacacctatggtgaaagccgtgagggattgtccgctacgtattaaagactcattccagctctcaaaaagagaattatgcacagcaatgaaatgaattactgattagtgctcatatagctgttatgagtctcaactggaaaaagctgtttcaaattacatggtagaatttaagaggctctcatgatgttggttggttaaacattacccaagttattatatgcttcagcatacgcggaaattgccaatatggccttctgaatcatgcttgaagcagatccctcttttcctatatatgaagaacaacatatttaataagctataacatgatacaatcat

SEQ ID NO: 65419 - DNA, 417 bp, Oryza sativa
tctctctgtttaaggagaactgtctgttcttttttctgaaataagcccatttttcaacacgttgtgcctgctagaatgcacaagttgcctgtgctaattttcataccatgaacagagagtttccatcaacaatacataccctcatataactactagtatggctgaccattcgcctctttctcttactattcctttttaagaaatgtgcatagataagacaccggtgtacatctttcataaagaaaagtatgctttggtatggttgccaaatttgaacaccacatccagttttacaccacactgcacatgcattttgtacatcaacctgtagcaaaatcagcttcttgtatttggattcatgaaactttgccaaattgttgcgaaagctgcaccatatgacattctgggctctcatgc

SEQ ID NO: 65420 - DNA, 269 bp, Oryza sativa
cacctgcagcatgaagctttactctaaagctgagagtgagtgcttttgctcggggctagaatagtatggattttagtgggtggatttgtctaccaactggcccgtttttatgaggagaggccaacgatcgaccactgaaccatagctgatcaattgatattggtaaagggccaatatattgtcatcgatatgtacttaaaatcttgcgtgtgggtcttccgcccctcacaagcttttttgcatggccccattcagtggtttttttttct

SEQ ID NO: 65421 - DNA, 322 bp, Oryza sativa
tgaacggtggactcccggagatattttacgaaattttttacggcgggtcggtactgattgtcgaaccctagcttagtgcgggggatgctattctgtcctgcggagaggggaaaggggatagtcttctttggagaagattaacatacttatggagctttagtgcctaccaagtattgcaaggactaatggacctgggcctattctggcttacgccaacatgtttttgtggtgccttgaatgccaaggactaggcgctttcgctttgcaattgtgctactatgaatgaccgaagcgaaaatacttttacgcgatcggtgtattg

SEQ ID NO: 65422 - DNA, 76 bp, Oryza sativa
agctttccagccaaaccatggaacttatgaccctctggttctaaagccaccaactagcccaaaaactacaggttgt

SEQ ID NO: 65423 - DNA, 415 bp, Oryza sativa
cgcggaaaggctccgatgccaaggcttttttctttatggatgatcggattgattacgaacgattccttataggaaaattaaatatcgtggatattgagttgcaaaacatgatcaatcacgtttatgagacactaactggagtacattgaggtaaatgttcagaaatcctgattggactacataatgtgctttttttcttgcttttatttttctgtattaactgaacttttccataccccttcctcactttaatagaaaattagcagatcttctggtattcctacaaaaatacaatatttttttggatcggtaatgagaaagaaataagacagcatacgtttctgagcttctgaaagaaatgtacatgtcctatcatccaagttagataaaccaaatctaagccgggacgaccgag

SEQ ID NO: 65424 - DNA, 421 bp, Oryza sativa
gcttccctgtgttcatctccattgagccatagagagtaaagcttattgcgtgtgcgtcgccattgtcgatctatcgtgtgtgtccactacaatttgctactcttgcgtgtgtcatcgcttgagttcgctgcttgcgtgagtttgctgctccgttcgtatccttgggcaaagctgacaatcggtaattaatgatgggggaggatgacttaaaaggtggaagcggtcttcacccatcagactagtcttttgggttgtgtaggcccataacctaaagttgtggctcttgttgggcaagtggtacagcagacccaatgtgacctggatggcccacggttggtgggccgagctgcacactctaacaagtggtatcagagtctaaggtttgaaacccggaacaattttcatgggttacatggtgggg

SEQ ID NO: 65425 - DNA, 285 bp, Oryza sativa
agctgctggttttaagctgaattgtattttgaggtcactttaacccgcctttcgaactttcctgaaacaacactcgaaaatgcacagccccacaaagtttgacaaggtggaaagaaagaagattgctttttttgttaaaccataaaaatgatccacagatgaaaggagctccctttgcaaaaggctgcggctggttttgctttctggaaaaacattataccagaacccaattaattatgccgtcttgggtcttgaccaacaaaacacaaagctttcttttattat

SEQ ID NO: 65426 - DNA, 416 bp, Oryza sativa
tgcaggctacatcaaggaaatcaatcataactaatccctgcactgctgttaatattgggtcagctgactgtccacggtatcgtgcaattaatatggaggtcattgagctcgatactggtaccttctaagtacatttcaacttgtgatttcatgtcttgttttttttttcagaataactatattgaaaaatatttattttagattttggtagtgcattttcgggtatattgacggatgagcaaggaagagttcaagcattatgggcaagcttttccacccaggttagtttacattacagttgctttgctttagcctgtttcctaagtaatgatgcttgcacgttctcaggaacatttattcaaaagaaaaaaagaaagaacaaaacgccgtcttacacggaaggttagccgtttgat

SEQ ID NO: 65427 - DNA, 321 bp, Oryza sativa
caagcttgagttgattcttgccaacatggctgatgtgcttggctttgggaccattaacccattgttgtctccatttgcctcatcctaatgggacctatgtcttgttacattttaaagagaacaatagcctcatcaaatcccgtggcatccttcacttgatgacccaccggctgcatatgacagatattgatatgattgttgagattcattaacattaaaagtgttttattctcgtttcaactccaaggcgaatatcctgtttaattaatatgggacaacattgatcctggacatcccataaaaggattagatctgctcccc

SEQ ID NO: 65428 - DNA, 170 bp, Oryza sativa
agctagcgctactcacaattggcttttttggcgacacctccgggcatgctttggaagcgctagagggaatccccggcgcacccggcgtaagtatgaccccttcccggaacttattgagggagaaccttattggtcggtcaatgatgactgttgatggacctctggaacgg

SEQ ID NO: 65429 - DNA, 404 bp, Oryza sativa
ttatgaatactagtacgcttgttgtgcagtatttgtcctagctccacatacaccaagaaaaaaacaatgtttgtaaaatctagggtttgcaagggtgcagtgcggacaggaacgaaactgctcacttctgctatcttgcgtgttaacccggtccaggcccctgtgtgaagaacggggctgaaccagtctccagctcttgcgcttcttggactccgtcacccgagcaagttctccgaggccaactatggtaagggattccagcttcatcggcatagctagtggggcaatgcaacatgcagcgtcgtggctattgtggctgacaaggatacgccgacaaggaggagcagtacatgcagcatcgatgagcaccggctgtcatatcgtgtgtgcgtcgacatattgct

SEQ ID NO: 65430 - DNA, 391 bp, Oryza sativa
tgactaatgttttatgaaaaagcgcgaaaatatttttagacatgtgctcaatagcctctgaaatcaaaatcagatcaccaaacttaatttactgacacgagacaatcacgtgctatacgcatagctaaattagaaatagtatatatgcacaattaacacgttctgtacaaaatcatgtgcctgaaggcaaaccagctgggcagtcaaactcctttaaccataatgtttggccgaaaccgttgacaatttggcaggacttttagaaataaaaaagacacaaataattattatgaaccattttaaaaagtcaaaacaataaatacatgaggctgtggacggacccaaaggagtacattgacaacgtttgacagacttctaaaattataaaaac

SEQ ID NO: 65431 - DNA, 125 bp, Oryza sativa
agcttgagcacaataatagggcttatgggaaatcgattatcagatctaaagaccggccccatgaccatagagctccagtggggagtgccgaccgacagaactcatgggtgttaatgtggaacttg

SEQ ID NO: 65432 - DNA, 448 bp, Oryza sativa
  unsure (1)..(448): unsure at all n locations
gacactatgagaaactcgagcttaaagccatgaatcccttttatgcatatctagatctggatctttctgaacaaacatataggaggagtaatatctgatgtcaatataatactcaagaaaaattcaagtattttaaaatgtttataaatatgtatttctcctcttgtcaatattgatttccccgagaagatgactctttacgtttaaacactctgcctgactagtcatagacccaagcaccgggagtcggcctatgcacttcccaaacatgcatatgagtgacatgagttcgtcattaatggaacatagtttcacgaatcataatttactactcgggtacttttgcaattgttaagagcataaaatatatttatattaatctctatgcttttgatttattctgaataatacttattaccttgcgntactcggtccatacaacgagccg

SEQ ID NO: 65433 - DNA, 287 bp, Oryza sativa
aactttagaaatctaatctttatacaattatttctctcacatcgcatattatttttgagaacctgttttaccataacgctggaaaacgacgctacaacgagacaatagtcatgttactacacgatgatcgacaccaaaatgattttattacacttgtgactggcggaactagtcatgttaccgcacattgatcgctgtgtactacgccctttccgtgacacgagaactaaaaaagggaattcccatctttaagagcaatatctctcacgcgatataagatttttcta

SEQ ID NO: 65434 - DNA, 289 bp, Oryza sativa
ccggacctaaacacccagagcaacctcatacccttttgtttaccccccagaaataaaagccaccccaagggcacggtcatccgaaagagatgccccccccgaaaaaaaaacccccaaaaaaaataggggaagcaaaatcttccccccaatccgggggggctccagaggccacccaagaggggagcttctccccccccccaagaggccccccaagacccctccctccgcgggggacaccacataggaacaccccccccccttttattcccggggtacccccccaaaaaaa

SEQ ID NO: 65435 - DNA, 373 bp, Oryza sativa
agctttatgttcggcgcagtactaatactggaacttatgagcaagaattgctctatcaatcaccatctactttagacatatcttctgaaacttttttcaaatccaaaagtccagtatcttcctacaaattagtgaattaggaggagctctttgtgccgaaaaagaaagagcagggcaatatttcaaacttgcattcgaactgcgaaatatttatacaaaggaggagagatcaagataatgcagcagggttggttatctaattggctagtcaaacatgaggtggttcatagatctttgggcttcgatcatcgaggaatagagactttgcaaataaaagcagaggattgggattccattgctggccatttatatg

SEQ ID NO: 65436 - DNA, 417 bp, Oryza sativa
tgatcaaccattaacaagtaatccttatgtgggttggtctggtcagggggatgcagaaatagtgcttcatgatccattacgcgttcaaggccttttgttcttcttcgcatccgttattttggcacaagtttttttggttctcaaaaagaaacagtttgaaaaggttcaattgtacgaaatgaatttctaggtcccgggatttcttaccatcaagttggtaaaaagccgcgatttattggcgattgctagaattctctatgatccattttggaaatcttttttttgtttagactattttttgtttgcgagatgtcttgtctgcaattccttatttctatcatctcatgcaaaacgaggagaatgcaaggcaagggcgagaacaataaaaggaacacatccttttacgagggattgctg

SEQ ID NO: 65437 - DNA, 370 bp, Oryza sativa
agcttaacaagacgggaagttaaatcgaacgaaaatttgcgtcacaatttagagcaacttgttcgaaaaacaaacagcaacgagagcactacttcgaatagaaaataggcactattaccagccaacttgttcttgccatgcccatgaacaaaatgtgagaggatgccggcagagattccactacagaaactcagcgcacattcagctcatctccagtggaggaacaaagcaaaccatgtaatattgtcactgcaataatacttttgctctgtgtccaatggcacgcaaaaaaaggatgcagtttgcaactttgcatcagaccaaaatagtttcatgaactcaggatctgattccgacaatcaccatggac

SEQ ID NO: 65438 - DNA, 418 bp, Oryza sativa
tttcctctcgtctctctgtgatggtgttgagttgttttgagtaaatgcttccagccaggttcaggtggcccctaaacctgcagagaaaaccatcctgataagttaagtcattttcattctggataaataaatttcacttgtgcacatgcaaacagcagaaagatgactgaagaacagtagtgtgctgtttgtacttgctgttttggcatgttttggacaccctctctcaaattaatgcaaatatgcaatgatacgcaactctgttgcgtattcgagagaatagcagtgacaatgttgtggagaaaacccaagtggctagactgagcagtattacagattttagcagtgtccaaatggcctttaccaagtcaaggtggctagctaatctggttgctcaatatgtggccaaatttgactt

SEQ ID NO: 65439 - DNA, 357 bp, Oryza sativa
gcttgttcggataggccgtctaattgtctaaaaaggtattagtcacatgcacagaaccagccggaaatttattttaaaaaaaaattggccgaccaacccctattattatggacataaccccctccttccttcccccttaacacacacccgaccatcgaaacataaattaagacatcatgagcacacaggtcaataaaatcagtttttcctcagtctgtctgtctgtcttgtcaagactagctagtgttgcacattgcagctacagatagagtatgggccaagtgagatccaagtagaaagaagaggagagattgttgcaaatgcagaagtttgatagccgtttttttgtcttacatc

SEQ ID NO: 65440 - DNA, 367 bp, Oryza sativa
  unsure (1)..(367): unsure at all n locations
agctntgcgagtctaggactatcggtttggctaggaagttaacttcctcaattctaaggttaacttccgggcatatttgagttgcccttatattccttccaggggaatgtattatcattggtacacgtaaattttgggttttccaaccatttcttttcacaaaagcttgtgatatgatggaatgggaagctcctgaatcaaacagaactatcgcgggtacggagttgacagagaacatacccatcacaacgtctgtagcatcctgagcggtttcagcttgaatgtggttcacccggcctcgaccaaagttgttggaaacatgtgaaccttgtccacttgcctgagagctaagacgagactgagctgc

SEQ ID NO: 65441 - DNA, 409 bp, Oryza sativa
taaggcctattcgtttttgaagaatttcaaatgattcagattcttgaggattaattcctctgaacgctatttagttcataggaatgtagctatagaaaaaaccaagaaattttcctttcctacaagttgtaaagagaaggtatagtgaatttttcatccactcagaactcatggaaaagttcatatggatagaaatgtgtatgcattcatattccttcatttttcttttttctatgtgtcataattccttcaaaacagatctacccttaagggtccataatgtgatgaaaaactaggtattaagcattgaatgcactcttgctaccaggtggcaaccattgtaaaagtcataagcaactaataccttatcatagagctactaccggtacataagagataaatatcatca

SEQ ID NO: 65442 - DNA, 163 bp, Oryza sativa
attttagccccaccccttttttctcaataaaattaccctgggggacaaaaaaaaaaaaggaggggggaatgtgtttttttttttttttccaaaacgggcctttatttttcccctttcttcccccccccctcttaaaaaaaatattttttttttcaaaattttt

SEQ ID NO: 65443 - DNA, 422 bp, Oryza sativa
cttcagtgacactataaaactcagcttggactttataatagaagcacttgaaatgagaatgagatagcaaacttctacactggataatttttttatttcatatgtctttactatactacgtgtcagatcagtgcagattaatgtactcttaatttcaccctatctgtttgcagttgcttctttcttcattatttttctttacccgatgtgtctgcagttgccacctcttgggaaaaggtttggtcaaacatgtcaaggctatattatatgaaggacctaacttgtaaattactaccatgaggtccttgttgcttaataaataaaatttaagaagacctgggcaagaagatttcaagtcatgtgaaatacttagaatatttaacattatttattttctggaaaacaatttttaattagaataa

SEQ ID NO: 65444 - DNA, 285 bp, Oryza sativa
  unsure (1)..(285): unsure at all n locations
agctcacttaccgagcaaggtagttggagctgattngtgaatggctaaaatggcctatatgtaagtgaggatttgatctttctatgtggcatgaggtaaccctgggtcggcttgtgaaaggctttgtcgtgaacctttgacaccggccagcgtctgtagtaagttcttgtcttgtgggtaaagtgtacccctgtacagaggctaaccaactgtttgaacatccgtgcccactgtcatgggcagatgtgacgtgcgtcccgttgcgtagatttgcttgacaatgct

SEQ ID NO: 65445 - DNA, 401 bp, Oryza sativa
tccataatatgcatgctcttgaatgccattatttgctctgcattgtatccaagctttatgaatcttggaagcacctcatccctaaaagttgcatacgtgttgatctttggctcctgattgcaatattaaaattaataccaaccagcatagtacaggaaaatcattaaattaccaacatacgccccaaaaaaaaatgtatacaaatggtaggcatggtgttattcgctattttttattatggaataataaccgtacccgtttgtagaaatacaatcatagattaattaaatataccctatgttagcagaaaacattaatcaaaaattatatcagtgtaaatatcagtaatttgtttcacaacatcatagttgaatcaaccatccagcataagttatataaac

SEQ ID NO: 65446 - DNA, 373 bp, Oryza sativa
tcacagagaattggctgcattactggaagaggagctgtatcgtacgggaatttcaatggcatcatctggcgagttctttggaatctggaaaggattgcgagaaaacactgatcgtcctatagtatggcccccagtggttattattatgaacactcgattggaacaagataaggatggcaaggtggtgttttctatttcttgctcgagctaaaaaatattttgcttttctatatcattttctgttgcattgtatctggaagttttttgttgtccaattggaagtcatgttgtttatttactgactactggtgttgattacggcccaatatttatctcttcgaatgttatttgaattttagggtcactcctatat

SEQ ID NO: 65447 - DNA, 361 bp, Oryza sativa
  unsure (1)..(361): unsure at all n locations
ntataacgatctcagtatgtttgcatgcatactgtaacaagaaagatatggtagcacatctgcacagcgaacaaaattgcttcagggaaagtaaagcactttgcttagaccaaatgttattacatttcacacatttggaccaactcaagcatacacatgttcaagcatacaatggcatagctatcctctatatatttcatattccacgagaaaccacaggagaatacagattattgtgtaactacagatatcttgtatgatggtttctatctcctcccagggaggatgtgattacagctgctgcttagccagatttttctttgctcaatagaggggagaactcttttgtactggagtatgg

SEQ ID NO: 65448 - DNA, 244 bp, Oryza sativa
tagcgtacgattaaactctgatggcgcggtataatctgtaacgttaacacgagcggttttgtgacttttgtgtgaactcgacaaggacaaaagattatgcgcattggctggggcgttgcgaaagcgaaaggaggaggaggatagatcccgtggaatgatgcctcatgagtttcgttctctgcagtccaaaatctaccgggctttataggtttattgtgggttaacacttgaaccatactaatct

SEQ ID NO: 65449 - DNA, 397 bp, Oryza sativa
tcccgactgcaagtgggaccagatctccttcattcatgcagaaggtattatactactagttgacagtactagaacgagtagtattatacaatttttatactgctctgctctgctgcatactacgtatatatgttgccatgtagggatatgggcgatgatgatgtatgtgcctgtgtcatctacaaagcggtcgtgtggtgattacgtcacggtggaatggtatatgctggcggtgtggagacgcggagcaatgcattgcgatctctagtccacccgaatttcgtactaacactacttactaaaccgcccattagactttcagcggttttttgcggggttattccatcgaccccatgtgcttgcatgatccccggaatcgcatgcgatgcttcccaat

SEQ ID NO: 65450 - DNA, 400 bp, Oryza sativa
tgctgaattaccgatcgaggtggttggagtttgatttgtgaacgcctaaaatggcctatgtttatgtgaggatttgatccttctatatggcatgaggtaaccctgggtcggcttgggaaaagcttggtcgcgaacctctgacaccggccagtgtctggagtaagttcgtgtcttgtgggtaaagtgtacccctctgcagaggttaactaactgttcgaacagccgtgcccacggttatgggcggatgtgaggtggttcccgttgcgtagatttgtttgcctgtgctttgtgaaaagttgttgtggtgtgggaatcgtaaccaaaatcaacctatgtggcagatggatgacctgagtgggcagaaaccaatctgtgtgattcgggatgtctgtgggcatca

SEQ ID NO: 65451 - DNA, 371 bp, Oryza sativa
tatcccttcctgaaagtagaactcaattcattttcagatgcttttctagaactcgggatcacaagctagccgagctgaaggcgacacacgaaacaaagtgatcaagtagatgcatgtgaagaaattacaagaaagcattggacacgaggtcgaccagatctctgagttaggcttcctgcaagccataagctcccaggaagtccgtgataaaggcagggaaaactgaagccaaagcaatctgtgtacattttttcacgtccttctgacaacaagatgtttctttttcactaattgtcacatccagttccatgatctctctggaccctgcaaagtcagaaacaagatgacacgtgaaatgatccaaattatcc

SEQ ID NO: 65452 - DNA, 369 bp, Oryza sativa
tgtttagatcttccatgaagtaaactcgggccatctgttctaacaggacaagcacacaacacaacagccactctacaagtgaatgaaaagacgaggcatttcatcaaacaggtggcgctcagcgcgctgaccttcgaagtggtaagcgttccggacacgcgcaaccacctctgcgcgcggcggcgcggtaccgcccttgggcctggagaggcggagcaccaggccggcggacatgcggggctcaccgaaggccgggtggcagtagggatcctcggggcggaagcggagctcgaggcgggcgccaaggtctgagcccctgacctacgagggagcaaaaaaaaaaaagggcaaagcccgaatcagtcacgc

SEQ ID NO: 65453 - DNA, 379 bp, Oryza sativa
tgtatcagcagccttaccctgagtggttcgagagagttcctcttcccaatcggttcaaagttccagacttatgagtacattagccgatttttagctcagtgtggtgaagcatcggctgtggacgctctgagggttaggttgttccggttatctttgtctggatcggctttttcttggttttcctctttgccatatgggtcgataaatagttgggccgatttggagaagcagttccacagctatttctacagtggggttcatgagatgaaattatctgacttgacggtgattaaacagtggcatgatgaacctgtacatgagtatattcagagattagggagatgaggacaaatgcttagcttgagtttaactgacccca

SEQ ID NO: 65454 - DNA, 391 bp, Oryza sativa
agacccgttacaacgcatgaacatgtaactagtaaaaatgaatgtaggaggtttggtgataattggcttcgtcatcctctgcagctgttttagaagatggatcaatcgacagcaaggctcccaaaccactagtaaccgcacataaagtgggggtacggtgagggttactggtgctagggtttgacaaagaaaaaaatttgaccacaaattttagaaaaaaaaatgaggaaaaaatccccccaaaaattcctagaagtagtgtatgatttgtaatgatatccggtgataaaattttgtgaaaaatactaagctaactccatgtgttggctggactataaggtggcattactttgaaacaacgttttgatagtcgtgggcattattttggtag

SEQ ID NO: 65455 - DNA, 402 bp, Oryza sativa
tgtgcgctggcatgccgaagaacggaaagtcgatactatgctgaggcacccagcagattcagtgcagtgaaggacaatcgataggatttaccaggaattctcaaatgacccaagaaacatgcgtttcgcaatgtgtacggacggcattaatcctttcggtgatttgagcagtcgtcacagtacatggccagttctgcttgttaactataaccttcctccctggttgtgtttcaaaagaaagtacattatgcttgccatgctcattcaaggaccgagacaacctgtcaacgatatcgatgtgttccttgaaccgataatcgatgacttcgaaaggctatggaatgagggcacacgaacatgggacgcatatgcacaagagtatttcaacctccatgcgatgct

SEQ ID NO: 65456 - DNA, 406 bp, Oryza sativa
  unsure (1)..(406): unsure at all n locations
ntnntatttgtttggagttgacctgaaaccctgctaagatcttataaactgagacagctttacagattttccacatgaattaatgagcgaggctactaattaattgattccttctgtcttttttatgtacatttttggatgaatttcattctacaccaacacatatagctcttgcactggcataggcaatgcaaggaaacagttgtgagttagtaaaaaaacatttttttatgccattgctattatgagaatnggacaatataggacaattggacaatcattcttagggggaaattcgagcacctttatcctgagagtcaaaacatgcttctttttttctttttctgtgttaccagctaataccacttaaaacttacattccctttgataactgtgaangctatca

SEQ ID NO: 65457 - DNA, 401 bp, Oryza sativa
acttgaaaacgattggaaattgtgattaatatcactgtacgtgcattttatgaaactaacaagactagattattagtgcattaaattttaacataaattttgaaaaaaaacaaatgtagtaaattgaaattttaattggacaatggattttttttattgtgagcaccatagaaaaatgaggggcatccattaaaaaaattatcataaacattagtagcccctatgaatgctctcattgtttatgactttttaataaataaataaatacatattttctttattatctaaaaataatttgtcattaataatgtgtcgcacaacaaattcgtaactataatagtctcatacgataaacttttatattttcgataatgtaattcacacaattttatgtttattca

SEQ ID NO: 65458 - DNA, 387 bp, Oryza sativa
tcattccttggccctacaatgagccagacatggagaagacagtggcctacctttttgagagtactgccactgcacatgctcaccgggatgtggcatacaagcattatgtcaatgagatggactgcttacagcctcaacatgtaagtacttccaatatcacttctagttagacatttacttctttaattgagatactaaccaacgacatctcttcaacttttgcagattgaatggttaccataccacacaaatgaggcttcaagcctgaccctgaactcgatgtgcaatcgagactctgactatttcatgtaccagtgcccattgatttgtttctgggcagttgagtaccaccttccgcaccgtgtcatgcgatagttcgggaaaaac

SEQ ID NO: 65459 - DNA, 400 bp, Oryza sativa
ttcttctacccctcttctttaggaagcaggcaatctacctgatgagtgatgaatatgcatctttaggaagcttactctaaatagaggttgaacagcaaaaatctttgtatgtccgtacggtttggcttgcatgtaatactgcagattgtagcaccttagtagacatgttaaatagatgtccgctgtctgtcagcattatctattaatttcttctgatctttcttcttctataggtacacgagagcaaaagagaaaggagaagaggatagctaaagaaagggactaaatgacaacgttgtccaactactcatcattgtaggcactacattggtactggtgggaaacaaagtttgggggtgttggatatcatttttgcaattgaagatagggttataatcaa

SEQ ID NO: 65460 - DNA, 400 bp, Oryza sativa
tgacttccacaggcatttgatacggtcatgtgggacgctctgcttaatgttcttggggtaagagggtttccggataaatggatttgttggatgaaatctctactctgcacaggaaaagctcaggttaattatcatcaacagagaaaagggagaacaaattctatacagaaggggagtctgtcaaggggaccctttatcaccatacctattcataccagttgcagacgttctacaaaaaatgatccaacgggcatacagcacagtcgtcttaattcaccccctagatattgaaggtgaatcaccaacacagcaatacgcatacgataccttgattctcatataaggagatgcggatcatgcaacaacactcaaagaaaatctggattccgttgcaagcttt

SEQ ID NO: 65461 - DNA, 278 bp, Oryza sativa
atactattgggaccctcgcccgagttaatgcctgttatcatcaatatgctataaatttaggacatatgttcaaactccaaccatattggaacaagtcttaaatgaaaatatattaatacaaacattatattcaatgattcatccaaatggaaaacacaaagcatgcaacgataaactcttgatatatgcatatatcacatgacacatgatttataaagatatagcaggccacatcaacacattgttctgtgtgtgtggggggggggggtacctgtcat

SEQ ID NO: 65462 - DNA, 369 bp, Oryza sativa
tcagctgtcgttcgggcaaaatacgacgatcattataccgcaccaaagtatgggacagaacgtcatccaacagaccatccgagaggcatcagactcagttgagcaccataaaatatctagcgcgacctcatactagcagcgtagtcgaggggacaatctggggacggacaatgcttctcctatcactcgacgtacctaggatgccctactcagtaggtaagctacaccctgcacctgttgtccctcaaaaaacctcgtacccgaatggaacatctatgaaacccatgagaaaggtagaatatctcctcaaaggcgagaaactacggaccccggcctaattcaaaaaacgaccgctatcaaaacaaaccc

SEQ ID NO: 65463 - DNA, 380 bp, Oryza sativa
  unsure (1)..(380): unsure at all n locations
tcatagagatggacttctacactcgtttgattntgaatcatttgagacatgtgaatcttgttaacttggcaaaattacaaaggcacctttcacgggtcaaagtgaaagggcaagtgaactattgggaccagtacatactgatgtatgtggaccaatgagctcaactgccagaggtggttttgggtactttattacctttaccgatgactttagtagatatggttatgtctacttgatgaggcataagtctgagtcctttgaaaagttcaaggaatttcaaaatgagatacaaaatcatttgggcaagacaatcaagtatctacgatctgatcgtggtggagagtacttgagccttgaatttggcaatcatctaaaggagt

SEQ ID NO: 65464 - DNA, 396 bp, Oryza sativa
  unsure (1)..(396): unsure at all n locations
tncccgcatttncctctcccttttccccttatcgccgcgctctcccgtgcctcctaccggtcacgcgccgctcgccactagcgccgccgcatgccgccacctccggtcgtgcgccgcagccgctagagccgccgccgccattagcattgccgccgcgtgagccacctcggccgccgctcggtttccgctaaaccccaccggagcccggttctcctcgcacaccggtgagctatccattctccttcgtctccggccaacaatgctggccgccgtggtcactctctctactcctaatccttctcaactccctccgtaggtgccgccgccacccgtccggccctcctcatcgctaggtcgtcgccgccaccttcatcctccgcttcggccggcatactc

SEQ ID NO: 65465 - DNA, 402 bp, Oryza sativa
  unsure (1)..(402): unsure at all n locations
ngatgatgtatgctngcacactntatatgtttttacgcttttctctggtcaagaacttaggataaaccgaactgatatgcaaagtttccttcaacagtgtaattttcagtacatgctccttctcacatttcttctaaataaaatgctgatatcacaaactaagcttattaaatcatttagaatcttgaattacatctgctgcaaaactatccacaaataaatatcaactttattggcggtcaaggcaggtcgaatttaactggacaaaaattatagctttgatacacagttaaaaggctgaaggtaaaagcaagaggtcaactgagactcttgtattaatcctgttcgttgaaattaacaaaagcttgatcccatcacttatttgctgcctcttaagacatg

SEQ ID NO: 65466 - DNA, 388 bp, Oryza sativa
ggcagagttatacatggctagagttggatgtttgcatggtgttcctaagaagatagtgtcagatagaggtagccagtttacttcaaagttttggcagaagttacagttagagatgggtacccgtttgaattttagtaccgcttatcaccctcaaacagatggacagacggaaagagtaaaccaaattttggaagatatgttgagagcctgtgttctaaattttggtggaagttgggataagaatttgccgtacgcggaattctcatataacaatagttatcaagctagtttgcaaatgtctccgtatgaagcattatatggtcgaaagtgccgtacgccgctcctttgggatcaaaccggggaacgtcaatgttttgggacagacatt

SEQ ID NO: 65467 - DNA, 399 bp, Oryza sativa
ttcttcgcaacgtcgttgatttcttaaccagggccctgtcattttcgtaccagatggagccgctcttttgcttggctatttttgtgaattatggagcgggcaagtgggtcatcctgaaggacgacgagagtgagacggcaacatctatggacgccgattgccgacgtctccgtgaccggagcaccacgcggcgcgcggcagaccgtcggttgcccgactgtgctggtgcctgcccgtgccgtgccagctttggtttaccgtgccgggcgggtggcgtggtgaacgcgccgcgccatctgaaaaaggatgcgggttgggcgtcaactgacatagtgacgctgctggacctgtaatgcgcccttgtagcgcaaaattttaaaacacaatgataaaaaaaca

SEQ ID NO: 65468 - DNA, 395 bp, Oryza sativa
tggattgttaatatgtgtaaagcattctgtgttgaatgtttcatgtcagttatgtccagttgctttgtttcgtgtgagttaatatgtccagttgcttacgttaatgtgtaaaacttttgttcatatatctgtggatggatggaatactttcagcatgcaaacatgacaatttgacatcaccttcaaccaacttcgtccaccgaccatcagtatttgggacacaaatttgttcgataacactgtcttcaataaaattataccatgttggaacatatcatatatcattgcttgcttgcttactaacacgatgtaattcaaatgggtaaaaaacaaaactccgatatagtttcaattagtacatttttggtgacattttaccttatgtccgtgggtga

SEQ ID NO: 65469 - DNA, 391 bp, Oryza sativa
tgattataaaacaatggctacctacttacactgtatgatattctaattcgtccgaattatgcatcgaatatttggctggtatatgtatctaccaaacgttcatatagttacctattttcatatatagctagatatcattactctttttttttattattttggatcaccccttctccatctctcttttcctcctcgaccatggtgatcatggcttgatcactagtgccagcagcggcaacaaatgtcacgggacagatcgtggagtcttctgtatgcaccaacacgacccttttgggctatccgtgatggcctgtgcagcaacgtccaacgtgttgtattatgcaactcaatgaccttcgtcgtcaccaacttaatttgtgtagaacatggc

SEQ ID NO: 65470 - DNA, 367 bp, Oryza sativa
ttccctagacactgattctcaccagtaaatcctctctatcctggcatatcttttgcttggtgtccttggatgaaccggaggaagatctgaccacacacgttcccttggattcgataccctttggaatactccgtaggggaagtgctacattggtatatccatgcgcttgtggattttatctgtgaccgtaagaattatcaacaagcatttctggcgccgttgccggtgaacgggtgctgatcatttctgaacccaattcatcctcgtatctctttttcactcatttatctagctttacccctgctacccaagaagtactccagtcaaactcttctcaactatggagcaatctcttttcgaggtttct

SEQ ID NO: 65471 - DNA, 407 bp, Oryza sativa
tccctgcacctcagctccttgcccggcgggagatggacgaagcgcatcgcctgcgcgggggcgaatgggtcgcatgtgatgaggcaccaggagaggtcgacgaaccagagcctcccggagtgcgagacggcgccgttgggggccaactgccggggagggaacgggtaggcgacctccttctcgacccactcgccgacgtcggaggagaagcagaggagcgtggcgtggtcggcgtggaggatgggctggagctcggcgaccacgtagcggccgccgccgtcgggggaggcgaggagtcccatgtggcccatgtgcatgacgagctccgggtcggggagagcgaccgcggtggccgtggcggcgtctaggaccaaatatcccgggacgaactggcgccacatgaactt

SEQ ID NO: 65472 - DNA, 398 bp, Oryza sativa
tgcaatccaagttgatgggcacgtgatgacagttaactattacagatcgggatcacaactaggaccacctctttccgaagagatcacacaacacacgctgcaacaatccagattatactatggagatggagctagaggaagagaaagatcccccaaaacatcaatccaaaatcaagatgaattcagcagagatcaagaagagaaagataggcttaggaaaagatcaaggttcataaaagaaagaaatgtcaggaaagaatatcaaatatatcatagaaactggtactaaaggtcaatccaaagaactccaaaaagaagaatcgaagagcagattgagcacaatagacaagttccagaagaacaaaggtgagtgaacagaaaattctccaaatatacct

SEQ ID NO: 65473 - DNA, 343 bp, Oryza sativa
ttcatgacaaggcatttcgaaagccgatactggtttaccatatgccgacgagaggggtcccagaccaacaacaggttaggtcccagaccatactgtgccaggaagcccaggggtcctccccgacaccaccccggcgaatccacatgtttctcagcatcaaggctcccctgataagctagaaactcagccaggggtgtcccattccacccatgtggccgtacttgtcttatagtatgaatgaaaatccaagggaatcggtccttaagtgcgagagcgggataccgtacaccacgaacagtctccgggccgaggttttggaaattcatttagatcgaagtaccga

SEQ ID NO: 65474 - DNA, 402 bp, Oryza sativa
tgctgtttcagtctattgtttaattaggggttgatattgctcttgtttccctgccttttccccttcctgtcagttcggtctgcctttgtgctgaaggtattttcttcttctttattgttatacattactatatttctctggttgtttaattctttgcatgatattatatggtatatgtgtgccccagtaagtttatgtgtgtgcaactgcagttcctccctagctttgtcatttttttatataattagatggttctgtgctgtgtgcatatattgaaagtgatcccttcttccccctatacgtttgggtattagtagcaaaagagagacgctacaagttacaattgtcacaattgttataacgaccaatttgttccttttactatcttgtaagtcgatgggt

SEQ ID NO: 65475 - DNA, 274 bp, Oryza sativa
  unsure (1)..(274): unsure at all n locations
aaaaggtggggcaagagcaaaaacttacattccaattggctggtaggccaacataaggagatagcaatttccagcagaaatctgtgcaacaagaacaccctcaagtggtccagagagaagacgaggcttaacatctgaaggatccgaactatggccagcctctcggntcgcccccacgagatcgtgtaaacctgaccctctctagatagaaacgcagagaagtaaccaccaatggctgcttgaactacaaacacaccctttagcgactccacta

SEQ ID NO: 65476 - DNA, 398 bp, Oryza sativa
tcgtcgacaacaacgccaacaccagcttcggtctagttcttcccacctcaaccatgctggtatggactcaagtcggcgaaaccgtctacccggtttacaccacaatgccgatctcaaccggtcccccaatgaccggaaacgagaacgcggtggctacgaaccaagacgcctccacatcgaagaatccacccgttgaaacggaaaacggattaccgactacatccaagttcgtgaaggattctgatgcggccaggccttgtccctccgacacaaaccgcgggccagcaaagatgaattccgaaactatcaggtcttggtgtcctatccataaaaccaacaaacatactcttcaagattgcttgggatttcgcaacgctcgtgctgagatccgcgcctgc

SEQ ID NO: 65477 - DNA, 389 bp, Oryza sativa
tgctcgcacgtctctgcttccactcagatgaattctttcgatctcgacgtctgtctagtgacgttctcgatcgtaatctcgttgtcaggcactaattaacctgttccaacttgtcggaagctgatatacaggaacatagtagtactatagactacagtgtatcttgttgagatatcagtctttgattgtttcggagctcggcgagatcgaccaatcgatgcaagatggagtagtagtaatagctgcacgaatgaataagcttcaatgttcaaaaaaaaaaaaagaatatgcttcgagtactggtgaacgtcgtgtcactctccactggagctagattactgctgacagctcccggatagggcaatttggctgcatgggcttcatgtctt

SEQ ID NO: 65478 - DNA, 403 bp, Oryza sativa
tcagagcacaagctccagctacatgattccttccgttctggacaatcaaactaatgcacagcttaaaatttcagacattccaatcacaccacagccacaagctaagcacattgaccaaattatccccccctcctatctccaaccaaattatccccccctcctatctccaaccactccaatggggaaaatgtttctaacgccaaccactccattgggaaaaaattttccaagacagcgaattcaacggccaacatttcaccacaaaagaagctgcacgctcgctcgctcgaagtcgtacctgcagcacgacggagttgatcacgtcggcgtacttgacggcgaggttgagcgacatgcaccgggcggtggcgagcgcgtatcaccgtatctggctcctcgggat

SEQ ID NO: 65479 - DNA, 142 bp, Oryza sativa
tgacgcaaagatataggaactatcctgtgacacaatagacctcaagaatagctttcataacaactacggaggaaaaagggtgagaaaaaacatggcggcgagaagaaactgaaaactgcacaaatacccttcgagggtggaa

SEQ ID NO: 65480 - DNA, 406 bp, Oryza sativa
  unsure (1)..(406): unsure at all n locations
ttactcaganaagctaaaggatgatgatgttgcttctaaacagcgccaattccctgatcagaggcgtctgttaaccacaaacggtttctgaaaatttggcattgccaaaataggaacagagatcaaagcgtctttcattgttgcaaaagcttcctgatgagtaacagaccaaacaaactgttggccctttttgagcagagttgtcagaggtttactgataatactgaaatgacgcacaaatttgcggtaataacccgccaaacccaagaaacttccaacttctttcacttaaacatgagttggccattctttaacaacttgtatcttctcaagataagttggaaacccttcagcactaataatgtgaccaagataagccaagctaggctaagccaaaaaacacttt

SEQ ID NO: 65481 - DNA, 395 bp, Oryza sativa
  unsure (1)..(395): unsure at all n locations
tcgtgcaaggagcgagaagatcagttcatagtcgtcgttccgcgaagatcaagggaagttttctcggagatgacctaaacccaatccttcccgggagggtagtttcgttagcttctagatcgtgtgttgtttgcttgtgtgtaggggtatggtttgcatcactggtggggatgcgaccatactaggttgtttgcttaaacaacttgaatcataaaatccattcacaacagatcaataggcaagtggtttagtacctcctctctagtaacccctcccatttccccctctctctggtgcctgcagcagatggtctgcatgagggacaatntcatcggatcaagaccccgtcagtttcatggggcaactcaatgcaattcttatagtattccacgtca

SEQ ID NO: 65482 - DNA, 394 bp, Oryza sativa
tcgacaaacatgcatggatctgtgtttctcaggactactccccagcctctgttttgggacaactacttaaaaccatcgacgctcaatgcaaacaagaagaatcagttggcgagctacaaagcaagcttgaatcggctattaaagataagagttattttcttgtgttggatgatgtatggcagtctgatgtgtggaccaatctactacgaactccactgtatgctgcaacctcgggaataagtttgataactactaagcaagatactgtcgctagagaaattggggttgaggaaccacatcatatcgaccaaatgtcaccggctggtggttgggagctactctggaagagccattacattgaggacgagaaagaagtggcaaatctgcgaaacat

SEQ ID NO: 65483 - DNA, 226 bp, Oryza sativa
tggaaagattcgccctctgcttggattattttgatctcaaaggtgagcctggagcggtttattaatggtcgggcgtccacccccaagggtcaaattctcatcattaggtgggtgtgggatagtgtatccaacccaattgggcttcactaagtccacctgaactactggtttgctggctagcagctgccctctatgcacttatgttttcagggtatgctcgaatgct

SEQ ID NO: 65484 - DNA, 395 bp, Oryza sativa
tggatggttaatatgtgtaaagcattctgtgttgaatgtttcatgtcagttatgtccagttgctttgtttcgtgtgagttaatatgtccagttgcttacgttaatgtgtaaaacttttgttcatatatctgtggatggatggaatactttcagcatgcaaacatgacaatttgacatcaccttcaaccaacttcgtccaccgaccatcagtatttgggacacaaatttgttcgataacactgtcttcaataaaattataccatgttggaacatatcatatatcattgcttgcttgcttactaacacgatgtaattcaaatggtaaaaaaacaaagctccgatatagtttcaattagtacatttttggtgacatattaccttatgtccgtggttga

SEQ ID NO: 65485 - DNA, 360 bp, Oryza sativa
caaaataacttggacagatttggatttattttaactgattcgggaatctcaggattggacatgaactgtggcacctacatgcagcagcacgccacggcggcgatccatcaggggaagctgacggaggaggacatcgacaaggcgctcaagaacctcttctccatccggatgcggctcgggcacttctacggcgatcccaggagcaacagcgagtacggcgggctcggggctgccgacatctgcacaccggagcacaagagcctcgcgctcgaagcggcgatggacagcattgtcttgctcaagaacaacaccggcattctcccgctcgatcggacggcagtggcctccgcggcagtcatt

SEQ ID NO: 65486 - DNA, 258 bp, Oryza sativa
aacaacacaaggtttttttgatacgcccaacaactttcggggtgttaaatgttatacaatgggaaaagatacaaaaaccctttttgtacctaaacacggcgataatcaactttttgctcacaattatctcgatgatatcatttttggttgctccactcaccctctgtattatattttctgaaaatatttccaaaaattccaaaatagcagatgggtgattatccaactttattggattgcaaattaaacatacacctt

SEQ ID NO: 65487 - DNA, 380 bp, Oryza sativa
tgtttattacgttgtggtttagatgaatgctatgaagctaaagaattgaggtttttatgtgggcttaacaaagaaattcatgacatgcttgattgtcaaagatatatatctctttctcatttgttacaacttgcttgcaatgctgaaagtaaaatagaggaggatatgaaaaagaaacacgctatgtctttgcctccaattactaactatttgcatgaagtgcgtaatcacgaaaaggaggagagagacatgaaagagccaccaaattcattgttcacactcaagttcgagacacctccctcatctaaagaggacatcctaggtaaagtaaatggtactgaaaattatcaaggggagtgcattgttaccaaataaatttg

SEQ ID NO: 65488 - DNA, 396 bp, Oryza sativa
cggtttggctctgatttcctaggttctgatgtcatccttgattttgtggagtaagtttgataatgtgcagtttttttgctgaaacacattgtcattccagcacaagccgcgaagtagataggccatctttgtccttttttcgaacggctcacctaatttaattttgttctaaccgttcacttagagttatattatttcgcctatgcttataagccaaaatttaaattttccgttgcaaatatgtcatttcgtttattccacgaataagcgaaacgatggcccccgctaattatttccctttctccaatctctacagtgtgcatttgcgaaacgggatctacagtggttaatagacactcgtttttttgcacgggtggagaagcctttggagttttt

SEQ ID NO: 65489 - DNA, 386 bp, Oryza sativa
tgtggggtgtggtggcggataagttgtgatagttcttgcagccgaaaactctgaggtgtgtataggaggggtgtgcaccataaagggagaaaaacggtgtgtggtgtgtggagagtcttggtgggatggcggttaatgagatgggtagctgtgtggagggcttccacccaaaagggcggtgggaggctatcctgaaacaggagggagcgaactatgttattgatggaacatatcatgcgctcaaccataccggtttggggggaggttgtgtggcataacaaaccgagagagacaccgttgtgaaaaaaaaactttgggcgctagagttgtcatactcacaaccttgttcgcctggatgcttggatggtggcggagaactgggtttt

SEQ ID NO: 65490 - DNA, 395 bp, Oryza sativa
gacctaagaaactcagcttgaacaattatcaaccagaccccttttgacttttaacagccttgtaatcaagtatttcatttggcacatactaattaaggtatatattaagaccatacttgagcttatcactaacctcaccagaagtaacatgggcaagaaacttgtcttcgaattcacggcaaagctccaaagcaacagccctgtgtacttcagcgcttgataccatctgttctcccaaccttgcaagttcattttgcactatctgagactttccctgaagcctgccattgtagcaaggtacatatatcagcaatttaactagaaaataaaaacaacttattttacagaaaggcagagtggccatgattcattgtgtgatgataacaattacatga

SEQ ID NO: 65491 - DNA, 405 bp, Oryza sativa
tgctgtgtcaatctcctagatctaatggttggcacagcaagtttataacacatattttggtttgttcacctagatctgctttcctttactgttccatgtcaatattgatccttgtggaacatagaatataaggggcagcacagatcttgttaaattacatagtgtgcttgatctgtggtaccagcttgattttttctgatacatgggaatctcatactaaatgccaacgttacttttcctttccaaaaatcttgctggttcacgtattatttacatatcatgtgcacttaacatgcatgtacgcttgatctaccaaagatgtcttcagcaagtttattaccatctatcataaaaaataagtatattacatgatgcaacaaagcataagtgccactatactgcata

SEQ ID NO: 65492 - DNA, 355 bp, Oryza sativa
tgtggatggatctggtgagccattctttgtcctcaacattgacgtcataagtgaatacccttttgctgagctcataaaatttcacaagaaccatggtggtgaggcaacaattatggtcaccaaggtagatcctttctttgaccactttcttggattataaactcgttgattgtgtatactgactattatttcaatgtaggtggacgaaccatcaaaatatggtgttgtggttatggaggaggccactggaatggtggaaaaatatgttgagaaaccaaaaatatttggaggcaacaagatcaatgcaggaatttacttggtgaacccgtctgtcctggaccgcatcgagcttaag

SEQ ID NO: 65493 - DNA, 366 bp, Oryza sativa
tgatggacagtgaggcatcaaagcttgatggaccgtgatgcgagctgcatgatcgatcaataataggaccaaaaaacacacgctgaataatgtttttccacgaggagatgagacagccttcgtaaccgtgaaggaaagagccaaccgcgaatccgcaatgtgctgcgtgtcatagaggccactgggatcgaattatggacaagaacgctttttctatggccctagctacggatggagctttgaccacaagttctgcaccgacaaatgagatcttcacttctccggccactacacttggcagttggcaccttttttctgtgcccacgcccaaaaaagcaagtgctagatcttccctgttttaacaaa

SEQ ID NO: 65494 - DNA, 405 bp, Oryza sativa
tcaggaagagatgggttctaagctgaactttagtactgcttatcatccgcagacagacggacaaaccgaaagggtgaatcagattttggaagatatgttgagagcttgtgctttagacttcggtggaagttgggataagaatctaccttatgcggaattttcgtacaacaacagttatcaagctagtcttcagatggctccttacgaagcactgtatggtcggaagtgccgcactccgcttttgtgggatcaaacgggagaacgtcaggttttctggacggatatcttgagggaagcagaagaaaaggtgaaaatcattcaagatagattgcgtgtggcccagtctcgccataagagttatgccgaccatcgtcggagagatctaagttttgacgcatgagattt

SEQ ID NO: 65495 - DNA, 407 bp, Oryza sativa
  unsure (1)..(407): unsure at all n locations
tggaagtgtgtgttgaagtgagtgaagtgaggtctatttataggacaggtatgacggttatgggaaggggaattgtcctaagtgctccttaaccgccatcaggaagtgatctggagcgtccacaccaaaccccacatccaacggtggagagccgaacatgggctgggcccccaaagcctggcttttggcccatcaactctcctggtccttctttatctatttctcagaattttaagatgattctctggtactttgatcaagttcacaacccatccttgtatggatacatgtttctcctcattttagtctaaatttcctcccaactttggggtttaacacatgcataccaatatacaccaacactttgtggaatatgtgaaggttaacncctatcactatggtggata

SEQ ID NO: 65496 - DNA, 402 bp, Oryza sativa
  unsure (1)..(402): unsure at all n locations
ttgctactatgtatctctgtatggacaaataatattgctnttagcactttgtgcaaacttgtgactatgcatatgcacatgcattttattcagcacttgtattttgcacaagactgatatgtaaaaggttagctatcacaagtagtggtacttgaaatattactataactaacatatggttctctgttactataatattctcaggaagttactgcaaaaatactcacgtacaacctatatatttcacagtagcaccctataaaattctcaaaacataattgtgtactgcacttctgcgaagatgttactaccgaaatcgtagaacaacgtatgattcaaacagtaaacataactgaggtgttctcacaaaatttgacaaaccttcataacttatcatacaat

SEQ ID NO: 65497 - DNA, 404 bp, Oryza sativa
tgtacagtttgggaagaggttttttgagagaaattatgaatctacttcaaccgatatgcccttaggcacggccatacataacatagaaatcacacgtggaaggggtggctaattatctagagcagcaggtgttgtagcgaaactgattgcaaaagaaggtaaatcggccactttaagattaccatttggggaggtccgtttggtatcccaaaactgcttagcaacaggtggacaagtgggtaatgttgaggtgaaccacaaaagtttgggtagagccgggtctaagtgttggctaagtaaacgccccgtagtaagaggggtaattatgaaccctgtggaccacctcccatggggcggtgaaaggagaagccccaatggttagaataaacccacaaccccttggg

SEQ ID NO: 65498 - DNA, 422 bp, Oryza sativa
tatcaggacctataaaactaagcttacatgttgctgcaccccacgatggtagtggacacacacgtacgcactgaaacgttgttacctgctccaatgagggagtactttgccgatggttagctatggcaacctacctttccatcttgggaggtctaccaccggacgaccagtaactgcaacttacatccaagaaatatcatgaatatgtacccaaataacttatgtgattgaaaaaatatgtattgatgtatgttacagtatttaagttcattccaaaaacaatattcatcgctgtattatacattctgaaaaacaaatgcttctataatgtagttattgaaatcaacctcaaaggcatcatccttgttaaccacatatttggttttatcagctttaccacttgagggtctctcttattaaca

SEQ ID NO: 65499 - DNA, 381 bp, Oryza sativa
tgcaccttctacacctactggatacgcttctgctatcttagccgcactcctttcagcaaagaaggatgtgccgacacaagttgggatgcccattcctgcagtctgtggttggttgaagcagcattggaatggtaacttaaaagatgttatcaagccaatgatgcctcctgcacgattaatattcactgggcaaccaaaagagtgttcttctgttggtcgtgttaactacatcaagaccattgttcgagaggggggtgaatggatgtcatcatcacaaataccacccatggtgacacaacatcatggatcatgccgtttagctttcgccaagaattcatgctgtggaaatgatattggtgactcgcactctatttaataaca

SEQ ID NO: 65500 - DNA, 367 bp, Oryza sativa
aacgataggagtgtctttgtatgccaaattgccaattgtcaaatggcatttgcatttttttagtattatgtattttcctctctttttttttcttttgcaaaaaaaccagttgtgtgcccatttgatctcagaaatcacaacctgtcagtactcaataggttgtaccaaggtgggtgttgatgttggcaacattgtctcaggtgaaccacagcaacctattgaagctggagggcttctgcatcaactcggaaacctgcgactgctacctggtgtacgagtacgtggataacggctcgcttgacctgtggctcatggaccgcgaccgcgcgcggcggctggacttgcgcgcgcgcctcacatttccctg

SEQ ID NO: 65501 - DNA, 393 bp, Oryza sativa
ctgattcccgaagatttggccgatgtcctaacttcagttgcttatctcgagcaacatcagttcaagctggaaaaagccaagctaagactagccgaacgccgtgagcgcaaagaaattgaagccacaatccaggctaatcggcagctcgtgcatgaagaaaaaaccaaacttgatcagctatccgaaggtccgatcaaatctaatattgatcagctcgaagctcgcaagattgagctcttggcacaacttgaagaatgcaatgccgaattaaatctggagcacaagaaactagccgaacttccgcggtctgtcgaagagtaaaaagcaagactcaaatccggtatcaagaatgtggctgaactgactatagtctttgaaaacattcctggaact

SEQ ID NO: 65502 - DNA, 388 bp, Oryza sativa
tcacagagatagaggcactgattactaaaccactatttaaccctataataacttaaatgagtctcaagaaattaaacagtgaacagcaataagcacaccctctaatacaaggtcagatcaacattaaatttatgtttacaggtgccagaaatattttaagtgctacaatttaataataacttggaccagcagcaaacgtgctcgattcagcgcttgtagtgtcataacgccatctttcgtcactttggctaagtgcctaaacgaacaaagacccatcgcagcaactctaaatttaaaataaaatctgacgtaaatcgcctaatgttaaccaaataaaaaaacgcatagctatagtgaactgtggttacttaattgcgtgaaaagtgta

SEQ ID NO: 65503 - DNA, 401 bp, Oryza sativa
tgtacaatgtataggactagtaaagttctatggatgatcccactatgttggtgcatcagccttacggcctcatcttttcatttatacttatagttatcagctaaaatttatttttttaatcttaaatttagagttgattttgggattttctcatcgaattttatttttcagctcttgcttttaggtcactaagaacacgcatataaaagttttattcacaaattatttttcgtttacaaatatgccgaaacgatggggcccttagataggtgggctcggacatactttctctcccctagagctaagcactttgactagcatctaaggcatggttagttcccaaaaaggtcttcccaaaacattctatatatatatatatatatgtatatatgtatatatac

SEQ ID NO: 65504 - DNA, 402 bp, Oryza sativa
  unsure (1)..(402): unsure at all n locations
tatanatactcagcttggcaacatagagtttccatattatcgcttattttcttacacacagagaatatttgatgaatggagtgttgtttggtgtgactactggcttgtgaatgaattgaaacctgccgaatataattacgtgttatgtatccatgtacttctttctaataaaaaatataagtgaagctcatgatgtactctttgccgtatgttgaaacttatctgcgtagctatcgaccttatgagtaagaatactgaacacgatcattaatttgtgagggtataattctgagcataaactcgcttgatgttgcagttgttgtataactactaaagctgatgtttcagatcttggacctaaagccggcctactgttctttcccacacataatatttggatgc

SEQ ID NO: 65505 - DNA, 404 bp, Oryza sativa
tgaggaatagaggtatttacaatgcctcgacttccaaacatattattggtgggaacaacaataaattcaagatagcgaagatgatttggcttgaacaaattgtgtgtagagctgatgtcagcagctgtcacataaatctttagtaaccgtaacctttttgactccttgcatatagtatttaaggaccttaataacattatactattttcaccgaagaacattaatgttctcaactttggcaaagacccgatactctgtagtatgttctcaaacttctccctaggaaaattgcaaggttcttctctatcataagcagtagttattattgataaatgctgaagacctggtgaaattttcttggattccaatccatctacagtatcacactcatttgatgaaacttc

SEQ ID NO: 65506 - DNA, 407 bp, Oryza sativa
aggatttctgctctggctctcgtaacgggttgttctaatgggcaatactcatcgctctgcgccttgggggactcttcctattattcaaagacacacaaaaccaccagcaggaagacaaataacctttttacaatcagccctaaacgaccatgtccccatacccattctcattgatccctatgatgcaacaaaacagaacacgctccctttggatgaagccaacgggtcgtggacaaggagaggatgtgtggcttcatcgagaactatcagcccaaatccacatagaatgcatgatagacccagtatgaggcttcactgggaactacataagcaacatccaactgtaacctgggggcctttgcgcacaaaacggacgatatatcagaggagaaaaccgcctctttaca

SEQ ID NO: 65507 - DNA, 264 bp, Oryza sativa
cctgcctgcttacacattgctagagtactatactctagtttatataattcaggcgtgaacagcttgcctatataatctcctactcatacaattctgatggccttacaggacatctttccatgtatgggttgcttgtgccattgccatacgtaccctgtatagacaaatattatgcctgttttctcagctaggtggtctgtacctatctattgcagtgctttctcacgaactatgtttaaggattgcctgccgaatcaagactgt

SEQ ID NO: 65508 - DNA, 398 bp, Oryza sativa
tgctgttggaccttggtgttctgagctgccggtttaactgtttagtgttcgatggtaatagcggattgagatgtgggcagatacgcctgtttcacagcttttctctggtaatttctagtccagtagtcctaagggacacattgaacaggaggcgcagtcaattagctgttatggaagataactcaaatttcattggaattggaaaaggctaggtctatctgccatgttacaccttcttattcagtgttaaattccttgcttcccctgtaaatgttggccacttggctttttttttccccaatgaagtatgcaataacccttcttttggatattttctgtaggcatttttactgaactggtgcaacaaatgccactgaagggtcttcaaataagttatc

SEQ ID NO: 65509 - DNA, 398 bp, Oryza sativa
tgatcatgactacctttccatggctgtacttgttcaagaaattgtcaatgcagactatgcctttgtcattcatactactaacccatcatcgggagattcgtctgagatatatgctgaagtggtgaaagggcttggagaaacacttgtaggagcctatcctggtcgcgccatgagctttgtatgtaagaaaaacgaccttgactctcccaaggtaaaagatttcttattaccacttgaaattgtatgttaaggtctacctgagctaaatgcattccatttgataggtactgggtttcccaagcaagccaattggtctcttcataaagagatcaatcatctttcgttcagattccaacggtgaggatttataagggtatgctggagcacgactgtatgat

SEQ ID NO: 65510 - DNA, 388 bp, Oryza sativa
tcggtagccaaaatcacagaggaagatattctgttctcaatagaacagatgtcatgtgacaaagcttcaatggcttcaccggtgctttctacaaacactactgggaagatattaagcacgacctcggatgcatcatccgcgctattggaaaccaaacagataacaccctacggatcctaaacacggaaaatgtggtactactgccaaaaaaagaaggcgtcgactcgcttgccgactacagccccataaggttgatccacgggatcccgaaaataatctcagagggtctatccatacgtgtctgttaacgccaaaattgtggatggccctaagaaattataacatcgccatagtccgattcctgcatattcggtcagggaataatcta

SEQ ID NO: 65511 - DNA, 390 bp, Oryza sativa
tggtttcttggaaacaaactatatctggtttattctcagctagggattggaagataagagctttctttttatcgcagccaaggccgcgcacattccaagtggcaatcttcatagaaaaaacagagaagcaacttggtggaggaatcccacccaaaaccaaggcataatcgcatgtttaaaagtctgccgcggaaaaaaggaagaacagataagcaagaaagctgaaacggttaaaggagttttgcaagctgaagcaagagtctgctcattgtgcatactgcagaatggatggacagaaagttcaaagatgaacaagtacgccaacttctggcgaagtcgaacagtttggtacgatcttgcgtttggtggttcctcccctcctctttcttc

SEQ ID NO: 65512 - DNA, 391 bp, Oryza sativa
tgttatgtgcccacatcatctgacaacatggtcatcaccttcagaaactggttcagaaagtactgtaagcatcatatcggctgggcaaccccaatggctaatcagctgccaccaactcctaccaaagatcaggtcttggagaggtgataagttgatcttcacactgacccgaaacacgttacaagatcagcttcatcgaaaaatttcattcagaatttgtgggctgctgtgatgctgatcaattaattctctggtgccatcaacaggtacaggtcgcatgtcatgcagtgcacgagctgcagcgctgcactgaaaaagataaagcgctggaggtcccctgcaggtggcgccgtcgccattcgccgaatcctctccgtccccaagggagtct

SEQ ID NO: 65513 - DNA, 406 bp, Oryza sativa
tgtcattccacacgggcacaaccggactggccatgatgacgaagttgccggtgtcgatgtacgagtctccaagagaaaacatcgaggtgaaaaactgcgaggtagagctcacacgagagagacagaagaggaaggcaatggggaatacaagtttgagctccatgatgctctctctgcctgctagaaatgtgaaagaaaaacaaagacacagcacaagtagagaggaccttctagctatttataaccgtaagacatgacagatgaaaaataacccattgtttaatacttaaattagtacttcctccattccataatataaggcacaactactcttttttatggtccataatataaggcatgtatacatgcacacaattaattaggacctcttctccattagattatt

SEQ ID NO: 65514 - DNA, 405 bp, Oryza sativa
agcacctatgaatctcagctaggcaatgaaatttatgatgattgcggcataatatgttcaattatttaaatatctgctccagcttctgtagcggcgctgctacaatagctggagcagatatgttcattagattcggcagaatacccctcacacgttgtaggcttggagcacatccaaacaattcatttgtggttaggactggaacagtacgattctgtgtgtgctcaaaatatttggtggagaagtctcagtcccttgcttttccaaacaggttattctcactttataacatgcaaaatgcgtcaatctggaacgcgaaccacatcacgatgcaatcgatgtattgacattctgaggcatgaaaccaactatgcgttcatctacgaagtacctaccaacgatact

SEQ ID NO: 65515 - DNA, 396 bp, Oryza sativa
  unsure (1)..(396): unsure at all n locations
tgtacagttaaaacgtaggagtagtgctagtgtgtatgttcatnttaaactgtgccatgataaataaggaaatcattcaaattggcgaaagcatttttgggatgataatgaaattatgttactgattattttttcatctatcactggtcaggaattgctaaaaaaagtgtttgataaaatactactagtagtaacttgcaatcttgccaacatctgaaaaaggattgtgtaccttgaccgcacaatccagaatgcaaaagccttgcccaatgatcactacaactcttgttcatgtcacactctcactgaactgtctgactcataaaaatcacagggcaatcttcaagaaagcacagcgggtgtctcatgctgagcccaacttttattcctggaaaa

SEQ ID NO: 65516 - DNA, 403 bp, Oryza sativa
tcttttatatcgagaatggcctgattaacaattcaccttctagacattaccaggacagataattaacaggagaaccaacatatttgatggtggccgtagtactctgttctaacatactgggacaaatataccctgcattgcattcaccaacccgagtccatgaacaaattagttacttttgggccatttgtcgcaaattaactcaattttgtaagcgcggaaaaagaaagagaatgtattgctaagcaaaggctacaagttattatgggaattttgatggataactccacacaaaaagaacaattaatgggcaaattcaagaaactgcaatcaagaaactgtcaacaaacagacatacgcattcactatgaaagatcggcatctatgacacctatctgatggg

SEQ ID NO: 65517 - DNA, 384 bp, Oryza sativa
tatccagaggagactgagttccagagcatgctgcatgtcaagcgtatctattaattaagaataatttgctagtttccttctatctttaaaaaaatatgtttaatgtccgataaggactttgcgagttctttctatctctaagacagtctatttcttgggctactaggactactttctacccatggggttaaatatgtacacccggggtcattgtaatctatctcgacgatcaatacaatacgacgcatcgccgcctgttaccttttctactgtattttatcgtccggcgggacttggcgcctaacgtggggctgcatcagtgttcgatctacggcgaaagggtaagttcaatggtctggcggccacgcaattgtttttttacgt

SEQ ID NO: 65518 - DNA, 352 bp, Oryza sativa
taaagccactccattacaaagtggcagaaattaattggtgaaacatttaagcaaaagtatgatgtcctactataccactgaatgattcagttttggtatatatcacaaaaaaaaaacccagttcattttaataccagaaaaaaaagatactccattactattggtgctgaatttaatggatagcagctaattgtgtccaccctccattactattgttgctgaccagcaccctatgttatcatctcatctgttcttagcaatgacgctaccacaaccactaaacaaaatgagcactgccagccctgcatctgccatgctccctttttatgttgctgctctgcgccccaacctc

SEQ ID NO: 65519 - DNA, 363 bp, Oryza sativa
  unsure (1)..(363): unsure at all n locations
tccacatattattatatattaggccggatggcctatgtaaatatatctagtagtaatctgagttntattttctatttatgtcctatttctgtttatcattgcttagatgaaaatgtgaagctagtgcttgtcctatgaactagtttcacatgagtatgagtttagagcatttgagatgttgtatagctccagcgatttgggcaagtctcctgagatgtataacacatctggtcgccatcttcgagtggtttgtcgggcatgtctcaggctgaagttgactggcatgctgagccccagccatatctcctatgctctctacttgatgcgttcgggttcataagatgtttggctattgacttggta

SEQ ID NO: 65520 - DNA, 411 bp, Oryza sativa
gcaactttgccattgaattgtacctgctttgcccttcattatgatgacccccgtgtccaatacctgagcttgtcccgtgtcggaggagctcacattattggcccacacgatctgttcattaatcatgtgagatcatgtacccatccatattcaattatgactctagatccccatgtgtacagacggggcaaattatttgtactctagacgacggttctatcggatgacttatagaaccctatggtaaacgtggaggcatttgtggatatgcttgcaaatccacatgtgacagtactatctggtgagtatagctcattcaccctgtgctcgatgcacactttcttaataggaatgtacaggtgccttggagactgtattacccgcttatgcagaagacccaaattgtccttt

SEQ ID NO: 65521 - DNA, 389 bp, Oryza sativa
  unsure (1)..(389): unsure at all n locations
ntagatttagtgggctttaactttatagaaagcatagatttagaacccttaacccggcacaagctatgaacacacagaagcgatacttaaaggagttttactgtctcaagtgaaaattttaaccaaaatcgacactacacaacattgntaacattaaccatcaagattaattggtatcaaaacagtcaagttaatcaagaatttctgacgacaagtgtaattataaattttaaaataaaagtctaaaattggtagcgtacctttggctccgatcgaaatcgaaagtcgattaaacaacctagctcgtgactcgtgagttgctgtaatcttctttgccttttgtatcggtggcgccggtgccggccgggctagcccgaacttatctgccg

SEQ ID NO: 65522 - DNA, 357 bp, Oryza sativa
  unsure (1)..(357): unsure at all n locations
agctntatcccaacaaagaaaattatatatttgttgtattttttgtgggcgggagtacatttagttttctctaactaatattttattatagtaatatacgatatcaatgtggctaggatatttgtttcgatcatagtatatagtatattgaatttgtctgacgattcatgaagatacttttcttcttgcttattttttccttttctccttttattcgaggcccaaacgcctgtaattgggctgtacagcccagcttcgtggcaaacaagagcatctgcaccaaagggctattntcccttctttctttatctttttggatgtcttttttgcgcgctggtcagaactcccgaatgggcg

SEQ ID NO: 65523 - DNA, 396 bp, Oryza sativa
agcttcaccttaaccgaactctcatgggcgggtattttaccttcttgctggaggagctccctgctctgacaacaatggagataacaagaacataaatattgtggcccaaagatgacataattacagcgatgctatggtaggatgcccacttatagcgaggtaatgccgaagaaggtgccgtggcagccctgggttatggcccataagtagtgacaatatggaccaagggaacatagttgtagcccacagtttgatgacatgacgcatacttgaagacaggcaggtcgtcacagcatgggaagcttgaccatattttctggtattaaaattagtaaccatagggaataagcttgacagggttatgtggaagagaaaagaaaaaaagtggggagtggt

SEQ ID NO: 65524 - DNA, 429 bp, Oryza sativa
atctaagaagaacaacaccatgatggatgatttaacactacgaacacatcgttatctaccaaagccccatttagaataaaggaatttcatacctttttcataaaaaaataatacttctcaggtcaaaaatattttatatttaggataagatttactcaaccttttaaaacattgactataaataatctattgattaaatgcttagtttaaaaaatggtatgtgtacctttactctgcaaactatttttataataaatcgaacatagtattagattttataaacatgttctagtgtagaattaattgtcaaagtttttaagaatcattgctaaacgtcaaagatttgataactagctcgagtatatattattctccgatggagataaaatttaagagacactaaagtctaaaaagacctaactggagaaa

SEQ ID NO: 65525 - DNA, 372 bp, Oryza sativa
agctttcatcgaagtcgtcgagatcttggtcgttgttgtgaaagcccaactcattgtggtccacgatctctgtcggacgccagtccactgccggagagctccattagccattcagctggtccgtcgaaactgagccgagtggctggaagatgacgccaactttcctggaactatgcgatatcggtgttgaagccgacctccgtctaagcctacgggatggggacgtcatggtggtgaagacggccgccaaatcgtctgggagctttattagaatctgtgggtaagccccatcatctcgatctgatgacgttggagaagatgcgatctcctccgagtggtttgaagccgactcgattgagatggacttggagt

SEQ ID NO: 65526 - DNA, 342 bp, Oryza sativa
  unsure (1)..(342): unsure at all n locations
gtgatgaggctggtttaaagaagactgccctgctttcattatgtaagagcaactttgtcatatacccgtggacaattcaaggcatattggccttgttctctacaatagngacaaaaagggacattctcttctgtcataggaagctcattgacctgggtgacaaatgctcgatcaaacacatactgatattggtctcgacttccaaccaatggtagctgtgaactaaacggcatgcttggaatggaccaacggtgtgccctggataactctcttgatgccaacggcggaatgagttgaaaacttgatgtacttgaagcatacccgctgacaattctttcttta

SEQ ID NO: 65527 - DNA, 349 bp, Oryza sativa
  unsure (1)..(349): unsure at all n locations
agcttcttgagatgaggcttcaccttcttgatgtgaacgacgcagcccaaggtcttgaaataatggcaccgcaagcgttcgttcgtgccacgccttgtaaggggtcttgttggggacagctttcgtgggccaccggttgaagatgaagacnggggtcctcaccgcttctccccaaaacttcctgggcatgtgcttcgccttcatcatgcatcttgccatggacacaaccgtttggttgcggcgcttgatgacgccattttgttgaggcgagtacggcgccgttagttgccgagccacgccctcgttcgcgcaatacaagccgaactcaatggaggtgaactccccccca

SEQ ID NO: 65528 - DNA, 379 bp, Oryza sativa
  unsure (1)..(379): unsure at all n locations
ggcttacatcgtaagcggcaagcggtaatgatgttcttatcatcagngagtttggaatctggattctacttatcttctatatgcctaagggaattcagatgctgattttggaggttgagaattgataggaaaagtactagtggacatgtcattttcttggacatcattgattgcatggctttaggaaacaatctagtgtactcatcaactgctgaatctgatatgttgctgtgtagtgttgtcacagattcttggtttatctacttgaagatatggcttactttgaaaagtccttcttttggatatctagcgtataatatgctaaatctgtcaaactacgccaagacatgatttctttactttgaggacatgtaaaaga

SEQ ID NO: 65529 - DNA, 374 bp, Oryza sativa
agcttgttatggctgataggaccttgatgtcgcctagagggcgggtgaataggcgttcctaaaattatcacaacttcatagcatattagagtgatgagaacttttgattcaaatcggaacttccggtataggattggaagttccgatctcaaccgataggttcggcagataacgggataaaacactagctatgaacttgtagcttgaataaacaaaatgtatatgaatcaaaaggtgacaaataaggtatttaagcaagatataaggtcaccaactaaatcaattaagcatgcaagtagatcgggtaaaaacaagctcaagcacaatatgagagaaggcaagaatgagccaacccagagaggagacacgttgat

SEQ ID NO: 65530 - DNA, 403 bp, Oryza sativa
  unsure (1)..(403): unsure at all n locations
tctccattcgtgtcaccagctacacaaatcattcattgtttngatgattttgatctatatgcatgcaaagacacaaccgaataaatgtctaaataattaatgatgcttaacttttcactgatttcaattgtaagaagaagtcctttcctttaatttcaccattgttgttgatttatgaactacaagaccacacatgcaaagcccctgccgcatcaaatattttagagtgcatgggtgtgtgtgtgtgtgtgtgtgtgtgtgtgtataggaaattgaagtatatatatatattcccagtctatcaatgtgattgatggaagtgtctttctctggtttttagttctattctataggcttcacttcactaactcatataaagtattgatagatgcttctcctctca

SEQ ID NO: 65531 - DNA, 399 bp, Oryza sativa
agcttgccaccagatgcttcatattgttgccaggtttttgcgggatctttggaggcaagaattgccgctgctgtcgccgggctttctggcttgataaccccaaccaacaatgttcttaattgcactttgccagaatctacccacgggcgcgcctgctgccagaactgtttacaatatgggcagaacggatcggcgaagacgtagacaatgaccggcgcatcttttttaccgtcgaggagccagtgggattgttccatccgttgccacatttcgcgtccggctggtgcgtaaatttctttttcgataagtgtgttactcaggttttcacctttctcgttgtacatgtaaccagagatagcgtgcttaccatctggagtcaggtagatggtgacgcccata

SEQ ID NO: 65532 - DNA, 380 bp, Oryza sativa
ttaatctaagagtacgctctgctgggctgtttcttttgctgactgaagtcaatctgtcggcgaaaccattcctagtggatcgcattaactgcggtgcgcacaaagatatggcgctggaagatttccaccgctacgcgctggcgattcatggctggctaccccagttcattgtatttggtgcctgtagtgcggatatggcaccacaagcggctctccacagattacgcccaattgtgatggctcgcgaaggtgatatgttcctcgccactgcgggcgcaaacactcataatggcagcattttttctttatggctgctatgtgcggcaattggacgattgcttaacttaaccatactgtaactgcaacaatcgttcgtttac

SEQ ID NO: 65533 - DNA, 359 bp, Oryza sativa
ccaacaatgctgcctaacccttgtgccattgtcagctttgtcctgccgagaaagttgctaaaataagaaaatggatggttatgcttccactgggcaggcaaccttcttttcaaaaattaatgcccttctcgtcgctgacctctaaagtgctcgcagccctgaaaagatcttgcttatcggttgttggtcttgagttcaccaaagtccaaggccgccccttctgctctagtctttgtgctaagccatttagtcgaagtgcttggccgaaaaacttcaggttcattatgcccaacccaccacattcaatcgggctacacagcacaacccaagctactagatagtggccaccattcactttc

SEQ ID NO: 65534 - DNA, 404 bp, Oryza sativa
  unsure (1)..(404): unsure at all n locations
atccctgcctnctgaacaggccacatgatttattatgcgatcgcaaattgtggatctatgcgtagtgcttcaatgtaacaatagcatgccttcaaatacaatgaactaaaatgtcaaatcatagcatatgtaagcatgcatgcttcagggcaagattcttgctggagttatcaatcgtacaaattaaaagcctaagtaaaatatgaatgttcagcatggtccttatgtcagtataaaacatatgcaattggccaatcaacataaaaaggtagaagaacatacaatacttaattgataagataagcatgggaacaaaagttatgaacatatgcggtctaaaaagcagaatggagaagagcatatcagtgcatacgatgatacaaataatgacggacagtgtaaac

SEQ ID NO: 65535 - DNA, 399 bp, Oryza sativa
agcttgtctctctgtgtgtcaattttcttttgggataagaggcctgaacgcccagcttttatatgaaagctagataatgattacggcatcagttcaacagctgggagaaccagcttttacaagaagcattctagccaaaaaatggccttacacagtatctaaagagccaaacaggagaagaaaaccagtgagcaaaaggcaatatctatgactacttgcttttttcataccacgccagtcctgtactcctgtgttgaggtccttgaggagatagaagttgcacagcttctaagatcttgcctgccatcaactcagcttctgcttcttcattttccttcatcagttagaccactgtcttagataaaacatcacactaaaagcaacagttagaggagtgga

SEQ ID NO: 65536 - DNA, 465 bp, Oryza sativa
  unsure (1)..(465): unsure at all n locations
ctataagactataagatatgcatgtaggatttcattatttgtaaanagggnctcgntggtgttcgcaattgggaggtcgaatacgtctagttatagtaggtataggcgtatagcagacatgtctagagccctatcgctcgtagatgctccttctccttaaaaaaaatgattcgcagtatttaaaatttgtctgaaaataggttactgcagcctcttaattatgggcgcagctaattaacgcgtacggcgttgccggcacagatgccgccaaggaccacacacgcgctagccccggtacgacgccgccaagacccatgcacgcgctagccccggtagtgtcctntttttcgcttcttattttatccgggtttcgctcttttatgtgttaatcactcccttaatttcttcgcgtgctcgcgtgattnttttctactatatgttatacattcaattttcacttctaat

SEQ ID NO: 65537 - DNA, 413 bp, Oryza sativa
  unsure (1)..(413): unsure at all n locations
tcgccccggatcctaatcacctgcagcctccactggtgggtttaaataattcttaaaccattggcgcgcggtgattttacctacctggaggtatttttggtgattgatgttttttatgctacaaaggaaattcctctcaggtggaaattgttaaatattgtatccgaattttgggcccacaatatattcggattaatttcctcttaagagacctattaagtggctttcttttatcccctatatatactcttgtaagccgtacgggaaggggtgatgttcccattgtgattntcctatgtttgtagtcatcttctctatagtgatcattgccgggtgtgcatctattttcataacagaatgacccttcgatcacccttcattagaagctgctttcttcctgccttacaacttat

SEQ ID NO: 65538 - DNA, 474 bp, Oryza sativa
  unsure (1)..(474): unsure at all n locations
aagctggggtttctctcaaggtagtactatgataggttactttgtataccgagacataaacaaacgcatcgacggtgcatccctcttaatagtatggcatttctatactcaaatataaataggaatagaattataccaataggaataccttctttccatttccttcctttgtcttaagggacgccaacgccaaaaccatttcaccgtatattcttcaaatgattgatgcagttacttgtagcttcaaatggtctcgcacagtccatcatgacaaagccgtcactcgccctttaccaccggatttggttcttcggagccaagccccttgcttgcccttcaccgtcgcatggtccatcgcgaccgagcatcgcttgcccttcaccgtcttgccatagtagccacttcgtatcccacatcttcaatatcttcgctttggtattcttgggattntaggtggaatcatatcacttgagc

SEQ ID NO: 65539 - DNA, 408 bp, Oryza sativa
agcttggagtgtgtgtgaagtgaataggcgaggtctttatataggggcaggcatgacggtcatagaacgcgaaaagtccattttgcccaacaaccgccattcaggagcttatccagaccgtccacgcaaaacccttgatcggacggctgcaggggtggttcggccaaacccatggctggcccaacaggcttcaactttggcctgttgctcctccatttctacgagtggaaggcccatttgaagatgttttctcgtagtttctggcccactcattatatggataggaattctccttcacttaagtctatattccatccaactttggtggtttattatctgcattcaaatatacaccaacacttgtggaatatgttagaattaaaccctattactatgttggacgtttta

SEQ ID NO: 65540 - DNA, 465 bp, Oryza sativa
  unsure (1)..(465): unsure at all n locations
cactctctcatgaagtagagcattcgtcacctcattattagcgagagactctctgggttgctntgtaagccgtaccaaagcctcatttttctctctctccttagcaagctcacccttgagttcatgagaccgctctntctcacgaatgagttatgcctcttgcctctcaagggttgcatatagatcctcaattctcccaagccactcactcaagtgtggtagagactccttggttatggacttgaacaattcctcatccataacctcattctgaacatcatcctcctcatcactaacaagatcaacattgaatgacttgagggaggaaggtaccttatgctcctttgccatgaggcaaatgggagcatcctcatcacttgagtagttgaagagcctctgtggtgatgaatgctcgacagcgaacgtggatattcctttcttataacttgagcttgactccggaga

SEQ ID NO: 65541 - DNA, 402 bp, Oryza sativa
agcttgtcgatcatctcgagtaattcttcttctcttgccttcgaattgctccgagcattaatgccgacaatgagtagattaggacagcacggtccgattcttaaaacatccgtagctgccaaaaacttttttaactagacccgtctatgtgtcattatattggttttttatgtctcttccttaaactgaagagataaatccctaaagtcacgaaatttcttaaagaaacatcctttgtaatgcatacagttccaaaatttcatgccatgggtcatcacaaccgcaaacatctctcctattatggattattgaggacctccaaagatcggggttcaaaccttcacagaaattcgaaatgaacaacgggtatgttattgcagaaacctatatactttttttttt

SEQ ID NO: 65542 - DNA, 389 bp, Oryza sativa
  unsure (1)..(389): unsure at all n locations
aagaagtgcattgttggaactggatttgttttattatggtntntngtngggangatngtgagaaatatgtgatgcaatctgggatagttnattcatagatggantagctttaggggatgaattggagtatgtggaaatggagaaaaagttaataccagagcatgaatctgttatattttggatcaataagaaatctattgaatgccttttagcattggactcatttatgtgtattgatgagtaatatgtatgatactgtcagattggataaagagtacacttgtttgtaactgagcgactctatattctatagctatcncgctcaaaataatatgcgtattctgagcgatttattttacattttagatatagattatgtactactatat

SEQ ID NO: 65543 - DNA, 378 bp, Oryza sativa
  unsure (1)..(378): unsure at all n locations
gcaagctngagctgcaagataaccctgatctatagagggtcacttcaatgcctaggctgcagaagctcatcatcataagctgcccgaagatgaggacattggagggtgtgcctgagctacagaagctatcgctggaagattgcgacatggaacaacttccgagatacctacagcaaggtgtgagtcctatgcatctggtgttggactgcagcttaaagctgctcacatccatagcccttggagaatctggtcctgagtggggcaagttgagccatgtccagcatgtcaaggcctatgctgaccaaggagacgataaaaggaagtggcatgtgttatacacaagagaaccctacagttcgagaacaatatggtgacagc

SEQ ID NO: 65544 - DNA, 397 bp, Oryza sativa
ttttttttctttggacaacgaaccatcagcaaggggatgttatgtgacagaataccacttcgcttaatattgaaaagctatattaagattccatgactaaagttctggtgtactgacgcttgtttattcccagaccactcctaatactgtccgttgcaatgggttgctctgaatccttttgcttctgatagtccaaactgcgtattgtgcagaattgatgctctataccttccagtcttttacaagtatgatctgtctgtttggaatccactcttttaagaaccctgtaattttttctttctggactatatataaaccggtacaactgctctctctctaaatattatgctagtaatgtcaatacccttcgctgtgattggggatcttatgcatgatc

SEQ ID NO: 65545 - DNA, 336 bp, Oryza sativa
agcttcatggatgcctttggatgaatttcgcactcttcatccggattttcagctcgaggacgagctgcttctccaggggggagagatgtcatgtggggattgcaatacaagcgtcgcaacaacaggccggcgacggcaaagcgtgacgaagaatagttttttacttctgttttgattcggttcagagtttgttagatagtttgttagtttcttattccgtaagttgttaggagtctatcctttagaattgctatataatctgtaagacagtttggttttggaatcaatcaattacgtgagattaatctgcagacctattcctgcctcgccggtgcg

SEQ ID NO: 65546 - DNA, 480 bp, Oryza sativa
  unsure (1)..(480): unsure at all n locations
agctaactngggattatatattttttacaatccaactatgtggttcttctattgtagatattgatgaatcttcccatcctatgcccccttctcttgtgccagagactaacgcccttcacctctcttagtcatgccactaatttgctttggcaaccactgctcctatcacccactccctttcgccggtggtttttctcacctttcttccacaccatacatcatattatggtttcccttgccctctaggatggaattcatgcagtggttcttccaaagaacaaccaacgagcgttgctggtgggaatcatcgatctagagggatgatttagtcggctgctatgctattaacccataacagagacaaggttgtctactttgtggatggaactctgcaatcctagtcacttgtctagttgccatatgttgacatacccagacatcatagtcgccataacctttgcttcctctgatatgttctat

SEQ ID NO: 65547 - DNA, 342 bp, Oryza sativa
gccccggatctctgagcacgcagctgcagctatcaagtagaatatgtgctgatttactccggagaataggtcctgcaccacatccttggtattggtgctgaagtccttctttggaccttctagacataaaaattgcattgtgcaggattcaggagattattctaggggaatatatccaaacattagtcataaatggataaactgcttagaaataagctgatcttctgttattcaacaaagtagcttatgggaattcacggaggataggaacatagtcaaaacgcagtttcgaaacatagcctatgcaccatacttacaatcttgcactattgaatggatatg

SEQ ID NO: 65548 - DNA, 478 bp, Oryza sativa
  unsure (1)..(478): unsure at all n locations
agcnnatccagccatcactctctctgaagtgagcattcgtttcctcaagattagcgcgagactctttggtttgcttgtgaagccgtaccaaagcctcatttttctctctctgcttagcaagctcacccttgagttcatgagaccgctctttctcacgaatgagtaatgcctcttgcctctcaagggttgcatattgatcctcaattctcccaagcaactcactcaagtgtggaagagactccttggttatggacttgaacaattcctcatccataacctcatcctcaacatcatccttctcatcactaacaagatcaacattgaatgacttgagggaggaaggtaccttatgctcctttgccatgaggcacatgggagcattctcatcactagagttagtgaagagcctccgtggtgatgaaagcttgacggctanacgggctattccttcttcatcacttgagctagactcggagtc

SEQ ID NO: 65549 - DNA, 398 bp, Oryza sativa
  unsure (1)..(398): unsure at all n locations
agcttggagttggtgtcaatttgatcagcctccaattgaccaaggcgatcattggcgaccctaacatcctcatcaaggccttcagcatgctccctcacttggcgctcaaaatgttgtatgatgcccctcgtacgtggtgaatgttgagggtgctcccccgatcctcctgtcatggttaatgggaagaaacaattcacaagaaatatgtcctatcaactattggagctaggtgttgtccatctccacttctaccaaacttgtgcaaacgagttcttacatgttcttactntgttatgtaaaaggcgttggcaaacagcaagaacagcaacaacgattagtagtaccggagccgacaacaagcacgatcctgtgatatagtagataaaaatttgtggagc

SEQ ID NO: 65550 - DNA, 278 bp, Oryza sativa
  unsure (1)..(278): unsure at all n locations
ggctacatatatgagaatgtcaaggttggtctgaagtcactacctgttgcagtcaaggtgctcaacaaagatggacatcaatgacacagaggatggctcgagagttgccaacttgttcaatattcactatggntgccatcataagcccaccacatgtggcnntgtttcgatcttatcctatagaattgttatataatctgttacaccctttggctttgaatccatcaattactttaaactgatctgataaccttatctgcctcttctgtcctgtgcca

SEQ ID NO: 65551 - DNA, 462 bp, Oryza sativa
  unsure (1)..(462): unsure at all n locations
gccatatgcanggactgcatggccacagtacttaactttgtctatagagatgaaataaccagcacttgtcatcacacatgacggagaaggcagagatccacgactgcaagtattgattccctggaggacgcattctcgcaggagttctctcagctgatcgacttagcaagaagacaaggtcgtgaaacggatattgattcttcgtcagtcctgccgcaacatgcgtcgtacaatgcgacaccaagccactctcaaagatggcatgcttcagatgacgagagcgacggccttaattatgttgattctgtgtttggtgaaattgaatcaaccatcagttttggtgactatggtgcggattcagacacctccatagaggaacatagtgtatcggcaaggaggaggatttccattcaacttgacaatggaagctacatgaacacagataccgatactgatcccatg

SEQ ID NO: 65552 - DNA, 371 bp, Oryza sativa
agctgacctattgcttttattattatatgcccaccatttctttttcccatcaattatgccagcacctgacccaataaaaacatgtagtacgtgaatcaattaaaacatgtacatacgtgacagcaaacctgtcgtcctcgtgccgttgtgcatccttctgacggagtacaccctactgacaaatcaaacgacccactcgaccactcctggtgcatgtgccaccgctaccgactttatactatctatacccctaataaaaaaaaatacacgaggttatcaatttttctttccatccaattcttctaaggcttctgggtttctggctggtgtttttttcacccggtttttttttcgatcagatgttttttcac

SEQ ID NO: 65553 - DNA, 448 bp, Oryza sativa
  unsure (1)..(448): unsure at all n locations
tcatgtgaacttatgggctgacctgtttccaataattctatgtaangcatagatcccttggtgattcactcagattcttactgttaaaataacacatctgtacggtggctggataaatatcttctagtgttcaattcatctgaaccattagttagttctcactaaaatttcttcattagactcctgtctgactggaatgaacaatccgttatcatgaaatatcacataatctcggccattttgtctggcatcttgtatgcaccagagtttggcggcaacctagtgccaagcccctaagcgccaccgaggcagacaaagtggctgcgaatgggaatactggtttacgcatgctcatgccacatgatgcttctagaattattcagactaacatgtatcttgtattcctgtgtggttagagtttggtctcttgcagctattgcagttaaag

SEQ ID NO: 65554 - DNA, 405 bp, Oryza sativa
  unsure (1)..(405): unsure at all n locations
agcttgccgccaagcgacataacaactctgacttcaagatgcaacatcgatatctagcacgctgccaatgatcaagaggcctcgacatcccacaatggactgccagaatggtcaagcgaccttgataccaaagagccaactagagcttgagcttagcctgctctgctttgctcagactttgtttggtctgagaggagagcangaagagacctaaaagatatggataacaggttgaaatagaaacacttttgttaacttagctggttgaaagtgaaaagtgttgttaaacactagtccaagttaaaacattagtaaaaaaaagttgtccaatatgcaattcaccatattcatatatgttatgagttgtttagagtaaatctttnttttttcttgtcatgcatatgc

SEQ ID NO: 65555 - DNA, 446 bp, Oryza sativa
  unsure (1)..(446): unsure at all n locations
actaagctgcacaggccacagttattcctggcagcccaaaacattttctcaggcaaacctaatgggttttctatcatcgcgcaacgcatatttggagactatgattccctaacgtctggccaaaggtatgggaaaggcccttaaccagttgaaggaaagaaaagcactttggaatggccaatgtctgctttataatataatttcgcaagctggcgaggctctttatgattacgttcagacacattcagaggtaccactattgttggattcagtgccatcagatttcttcctcttacagntaaatttatattggcattagtattttcactagttacttccaaaattccattgttccctaatatgagcaagaagaatactagtgatttgttgatttccatggccacttttcattatttgtactactatagtgtgcatggggtagcata

SEQ ID NO: 65556 - DNA, 391 bp, Oryza sativa
agctttcacctatacatatatacataggaatacattcttataccaatagaaacaaaagaatggtcctggaggttggaggtactgtcaccagtcaccaagcggaatttgtgaaattttcctcaccgaaaaatttgccgtagtgacactatattcatattttccagctcttttcgaccacacaattagtattgcctgagaacttgttagtaatgtcaatgcaagtgtaacaatggacctgccacaacgcattactaataaatcaattgattttcacaagtatgctatttgatgacaaagattgcaataattaagtcttactttaacttccaactattcttgccctttgaagctcctgctgtgctaagactggaggttgtgaaactgtaatggt

SEQ ID NO: 65557 - DNA, 349 bp, Oryza sativa
gctgacctgttccaattatttatttttgcatagtatccttggtgatgcggtcatattattactgtctaaataacacatctgtctggcggcaggataaatgtctatcagtgttcaatgcatctgaaccattagttagttcgaactaacaattcttcattatgactcctgtctgactggaatgaacaattcggtatcacgaaatatcacatattctccgccattatgtctggtatcttgtatgcaccatgttgttggcggctacctagtgccaatcccctaagcgccaccgaagcagacaaagtgggtgcgaaagggaatactggtctacacatgctcatgccacatgatg

SEQ ID NO: 65558 - DNA, 385 bp, Oryza sativa
agcttgtggacaaggctatccgtcttgaagagcaacgcaacaaaatggaccgaaaaagaaaggcagctcagatcaactttcctcaggggaacaatcagaagcctcgcttcatgacgggacagctaggtgggccttccaccctgatcgtctgtcagcaccgtccctatcacccgagtaacttcaacaacgactacaacggtggcagtcacaacaacagtaagcagcacaaccacaactcgactccacccccactaatggcaccagctcagtcagatccgccagctgggtcagctcagtcagaacagcccaaaaagggggctgtaggaaagccaagaccctgcttcaactgtggcaagcacggccactttgctggcaagtgtcccaa

SEQ ID NO: 65559 - DNA, 440 bp, Oryza sativa
  unsure (1)..(440): unsure at all n locations
aagctgtctggttaactaggaatgacttgtttnttccttagacgnctctttggtatgttatatgcctgttctcattatggtaaatagtcatagcctatgctattagacttatttattaccataatttttataattttttgggggtaatcttagagttttctattcggatgcccgtcaagtgtgttcattcgtgaaccttttatagtgttaaccactcggattctttttattatggctaaaaagcagtcggctagaatgcctctttgggcgtcgcgtatgcttttgtcatatgatgcatgattgtgctattatattgttctcaactatatgtgtagcttgttaactaatcacatatgtgggggctacacctaattatgtgcatctattcgatgcaccatattctctattctttcgctcttacagtctttgacttcgatact

SEQ ID NO: 65560 - DNA, 326 bp, Oryza sativa
  unsure (1)..(326): unsure at all n locations
agcttggtgccctcggccaccgtgtcttcgtcggtgtaccttgcccgtgacatcgctacaaggtgttccccaacccacgccacgtcacgtcagcggtggcgcaggcggagcgtgtttcgatgacaacctgtggtaatgaaggaggcggctatagagtccattgtgaaattggtgacagcgagcaactgaaatagtggtgccatgttagatggcagctctccgaagagcttccatatgcatggtgcgactgccgttgaccaccaccaaagttcagtggagctcctttgtacggcggttnggggtgaggtggtcgggatggggattgt

SEQ ID NO: 65561 - DNA, 432 bp, Oryza sativa
  unsure (1)..(432): unsure at all n locations
cgagacggngacgangatgtcngcgggagccgtggtctgcgttttatgtcttcccggcgttgggccgaagtaaagatgcaatgtgatgttggcatggtacacgccggtgtactggtcgtcaatgaggttgtcgaagtagactgctagggtggagttgtcggctgcgaagaaggactcgtaccttgtgacgtctttggagacggaccatacaatgccattgggcctcggcttcgccttgcagctgctgaggagctctacttcgccgtaccaaacttcaaagatgcggtctaactggacgccgccgcatgtggcgcgccactctagaactgcaagcgagatggcctgcgcgccgacgtccgccgtggcgatgctatctggcggagagtactctgctgtgaccggtggcttggtgtatgtgatactgatcgagct

SEQ ID NO: 65562 - DNA, 369 bp, Oryza sativa
  unsure (1)..(369): unsure at all n locations
agctttaattcaattcaggtcatatatcaaatatgtttaaaaatataataatattttcagtgtcactgataagatatacctcatttatttgtatttgtaacagctgaaaaccatgtaactagttttttaccgaatggtacttttaccgataagatggaaattcattccccgttaagagaagatgtttgactccgatcttcttatctgctcgtacctcacttacagnctccaaagtttacttgattggtcatctgcatgtaaaaatactatatatgtagtggaaattacgagggaaaggtattgaattatgggtaaaaatatattgcacaccacaaatatagtgaaaacttataaattactggtggatcc

SEQ ID NO: 65563 - DNA, 472 bp, Oryza sativa
  unsure (1)..(472): unsure at all n locations
cccagccacatctcgctacacacgcgcacacgcatgtttattatctttcttaatcttataaagnntgtatggaatcatgataggtaatatatagacgcgtaactttactatcacaggaaaggtgacacgcaacgccgaatccgtattcggcagatgattgggtaaattttgtcaatttcctagtacccaaacttcagaaacttcagaaggagacaacctaacccacatgtgttatgctataacatagatcggctaagatttcgaaaattatgctgagccgatctttccaatatcatgttccataaaattgaaaactcctaaagaggggttcaaagagaaagcgacataaatgggcgagatgagcttgctttgcctgactagtacctgcacttgtctgttctactagtctgaccacccgtttactccattggagagaaactgttatgagagggttatcatgatcaccgatctg

SEQ ID NO: 65564 - DNA, 418 bp, Oryza sativa
  unsure (1)..(418): unsure at all n locations
agcttcataatagttgtccatgtcattntgtctgggatatccaaagtagttgtggtattgcaaagtccacggaccatcattttgtgtacagatttcctgacaccttagaaggaaactaagatcattgtcatgcttcagttcccatgtcatctgaatcatataactcattgaggaaccaaacccgtagtcggtgctcattatcgattaatgcatagtgcacacccctcattgatcttccgagaaaatggtttttatattgacatacttcagtattcattggtaacttaattacttggtacttgttatcagacaaggatattctgcattagaaaaaaaaacaatatatgggttataaaacccattgaaaaaattaagaaagaagatagagcaatttaagcacattaaaagaatgatgacc

SEQ ID NO: 65565 - DNA, 460 bp, Oryza sativa
  unsure (1)..(460): unsure at all n locations
aagtgtaccaatgagaaagattctggatntacctctttttctctacgagctgcagtgagagactgacaggcctgctgtcattatagtatgtgcggatgttaatatacacaatgtatgtactgaactcataattctgaatggtgtcccattaaaagggctgagatggcatgtttgtaacagtgatttggagcaagatgtattttattttctttgtaatatgaatataagctggtaaactttctagtttgaactacttgtgagttctttttgtgctaatcatggcatggttatgtccaaaataaataagacaagaatgtgagggctagttgctcgttcaaagaaatatatacttctttccagagtaattgtagttctgcagttggaggaatttcgttatgtntcaatatttctgttctgcctacattgtggaatttgtggcactgattggaatctaatctct

SEQ ID NO: 65566 - DNA, 408 bp, Oryza sativa
  unsure (1)..(408): unsure at all n locations
agctttgtgtgccactcttggatggtagcttcaaagtcacctgaactgtggcggttcggggacatgacacgccacaaggtgattttctcaaagagaactggcatactgtgcgcgatggcaaaagcagcgatagatcgctccgatggacaaaatgagtcattctgggcccanaagtttgtcactggtgaactcttggattatattgtgagaaagtattgttttccaaatactatattccgctctgggtttgagggggtgaacttttaacgaattacatggaccatgttgagaaatcacaattaagtctcgtaacttaatatataaactgcttgcatatgtacagtatgatgctcaattaggctttatttatcacttgcaaggtaattttgcatgtccatttctgcaaaa

SEQ ID NO: 65567 - DNA, 457 bp, Oryza sativa
  unsure (1)..(457): unsure at all n locations
atgtttttgagaatccatgtaatgtgttttgtcgctccttancatggatggtggnttaaatcttttcccttaatacgaagatatgcaaatctttttcttagtttgggtcgcaaaattgtttgtgatctttttgagaatgttatgcactgatcatgattctacttcagttattagaattggtatctttagtcctctaaccttgaccaaacaattgtgacctattcagctctttgactaggcataatgacctagccagggttaaagagtttgctggttcgagctcaaatcaagatatctgagaacaacctggccttgccctttctcagcctatattggcctttactgggaacacaaattgcttgngtagcattagtatttagctagtttatatttatttcgatttttgtctaccatatccatgaactgcaagttctctacacaacttcatggcgctgaa

SEQ ID NO: 65568 - DNA, 464 bp, Oryza sativa
  unsure (1)..(464): unsure at all n locations
cgtacaagcatggcaaatagtagtggtttctttttatacaaggactgcacttcttaccagaaccaaaccgaagtgtacaatccctccagggtttttgtcggatgcagcaacaaacattacgctaaacacttgattaggagtacttgaattcttgaaacatcttgcccacgattccacaaaccacattgacttaacattagcagattactgagaatgtcagacgactgtccaaggtatacgtaatttttggatgcaattttggcgtttgatggtaaccacacagtcacgccttcttcgaggtttcaaaagcgaggtttcaaaagctaaggagggaggagaacaagggccagccagccactgctaccacaccatgacaaatgtgcctctgcttttagttgtctccacttggttcgtcgtcctcgtccagattgatgccagagatnactcatttccctatatttact

SEQ ID NO: 65569 - DNA, 412 bp, Oryza sativa
tagcttcacagatggcttctagctattcttaccagcccttgtcggatgcccagccttctaatatcaagtcacacaaccagcatagtcttcctgaggcaaagatgccttataatccttccgtgcaaaataatcttgggaagggtgtatcaagatctggctatgcaaaatcaaaccaaagtttttcaggacctcctgctatggttgctaattcaccatcgcaaataaagaatcaaagacatcctggtcagcgccacacaaattatcattctaacaatttcagtacaaatgctaggtgggatgaagttcaaacccaaaacttgtcaactccagctatgtatacttggtctggtcacaaatctcaggcccttgcgggaacaataaagagtcatggtggatgacctcaatctaactt

SEQ ID NO: 65570 - DNA, 476 bp, Oryza sativa
  unsure (1)..(476): unsure at all n locations
ctaagctagtacgtagatgtgcgcatctcagannaaaaagattcctatagcaaatggtattgaaaccgcgtgcgcacgatttcgtttggcggcgcgtatgcgcggaacaggaatctcctacaatatatgttgcatttacagcccttatagtcaaaagaagtcagctgagcatcctcgaatgtcaaatagcaaatcttgaaaccaaataaatntgtgcagctattctttaactggtgtgaaaaaaaaatttacatctcttgaaaatagtcaaaatcaaagtagatggtttggatgtcaaatttgtatagaaagaaacctcaattagttcctttntttggattttggtaattaagaggtaagaaaaaaaaaggactntgcatatataggacgacagaaaanaaaacagtgaaggggactattagaaaacanaagagatgaactttgcatatataggagtcaccatcaaggcatactat

SEQ ID NO: 65571 - DNA, 449 bp, Oryza sativa
  unsure (1)..(449): unsure at all n locations
acatttanggcatggtancatgtatgatatcagagttttttctatgtgttncttggatataagaaggagccttacctgcttatggatacttcactacgaacaatggctggaaaacttagccgaaaaggggcacagcatcatttgcttactccagtacccgttttctcccttgtctaagtcgactgaatgagaatctgataaacatgagaagcagacaacaatggcaaacaggcaaacatatagagatattttttcacttcaccagcaaaaaagtacaggatgaacagattacagggatatggcaagctttatccacacaatgtccaacattggcaatgctcttgcctcggtgtaacagaagatcaaaatctcacgggtaccatgatcattgactggngtggccacangtataattatgggcatcgccaggatcatgcagtctcgcacca

SEQ ID NO: 65572 - DNA, 394 bp, Oryza sativa
agcatgatgctttatgattccacaacaagctggaacagaatgattgtggaagcgaagaaaaggctaataatcatcaagagaatgtcacaggctagcatagctaactttgtgtcttttttctctatctttatatttcctacaccaaactcatggttgcatgattaagtttggttggtgcaaacatttgcttaaatagcaccacacgcccaacatttgatcatctcttgagtacgtcagttcgcagcctgcaaagtttctctgcacaaatttcgaaactctgcttaggctcctacgaactagattaagctagatagatggaattttcaggtattaattgagatgcatgtgtttggatccattttggtgtttgtggcacatttggagctttgccgtc

SEQ ID NO: 65573 - DNA, 444 bp, Oryza sativa
aatagggttagcaagaacatgttctttacatattttttcctatctaaacaaaagagagataacataatctttaaaacatgaaactattatatcttttaaaaaattagaaatagacttataagtttaccattttgtaacagcactcagaaaaatctttaactgtgcttttgccatagacacctttgctgattttatcatactctgaaattattttgatcattgaccctttccatacttctatgcttggaacatgtgtcagtactaatcgcataccaaaattcagataatccaaataattcacctattacaataaaaattaaaatgaataagttactggcagacaatatagttttaacaaataattgaataaagagagagaaataatactaaccaccagacaatagaagcacctccaaagttttgacttgtcagcttgtcagatgt

SEQ ID NO: 65574 - DNA, 398 bp, Oryza sativa
  unsure (1)..(398): unsure at all n locations
agctttatatagtaaaagttgacctaaagttgatcaaaatattttctcaagaaaattgatcgaaacacgtccaaatttacaaaaaaaaaaagttatatcatggggttcaagatctggcaccaaatcgaataagtgagccttaaaaagtgtgagaagagaattacaagattgcggttatcatacggttattgtggttattacgtgcggtaaccttctcagtttttaaaaaccatggtatacctcacggtaaccacgtggttactgcaataaccgctaaaccgtggagtggcgaaaaccccacccaaaacagtttggtgaaacctaatttatacttggcctttgaggaatcaattacgtttttccttcggnngatctttttaatgcanagagtgcatata

SEQ ID NO: 65575 - DNA, 447 bp, Oryza sativa
  unsure (1)..(447): unsure at all n locations
tggaaaagtgtatcatgggtattcattctttgtcataaacttctgaaagttgaggggtgtgttaggatgagatttccactactcaagagcatagcactggtgttattgttagtgatattagcttggctagaccaaatgatggtcttggctgaccgatttaagatgacaagatttccatcatggaagattgttagctctaatgaggtgggatcattgattggattatccctatttgcaacccaagcaggagttatcttcggaacctgattgaaccaaattcctaagtaccacttgctactnttctgggatacttctactctntctgtctcaaagaagccaagtgcatacctgccatttttcgagacgagcttgtcctttctacccaatgcgttgcccattgagatggtgtccgtcatggcagcatttgctgagatgcatanggagaac

SEQ ID NO: 65576 - DNA, 286 bp, Oryza sativa
tcactagccggctggtgctggttcctctacacatacctttacacgagcccctgctggataccttacgcatccctatacacgttttctttctcgaaaagaactggtttggatcctcgtacacctcttattgattccaggactggctgcttacctgcgcgattgtatcgtacaagatctgttttcatatcggtcagccatctgttgatacaagatacatctgctaagtcacgatacatatatgttttaacaaattaagtaatgtatgctaagtgtaaatgtcgtacat

SEQ ID NO: 65577 - DNA, 369 bp, Oryza sativa
agcttggacaaacattactactcttgttgcattgtatttgaactcggctatactacaagaagttgctttctccggaaaatacttttcattgaccagtttacctagaaacaaaaaagtgtagaatacagtatgaaagcattgttgatgacatgaaaggtacagatgagaaactagttgctggactagctgttggtacactttagtgttgtttacattatatatgacaagttagttgtcaacaatggtccattgcgcacttagtaacaactttacaagattgctccaagtttcttaatctacgtcacatacattaacaccggtgacccaaaaagcaggatgagggtccgtctgacctctttctttaatttg

SEQ ID NO: 65578 - DNA, 482 bp, Oryza sativa
  unsure (1)..(482): unsure at all n locations
gaaactaagcttgagtcanaggctgaaaataaaggtttttattttcagattctcacgagctactcagagtctcagactcttaagctcactaaataatgtttcattattagatacaagccaaagatactagtcggaatattaggtagatcattttgagtgacagtctcatatgatcgggatcttattagattttaaaaatacttcacattattacgtaggatcgggacattacacaagaacttgatcgtatggatcggaatagtgaaaaaaaattaagatactaaatgagattgatattatttcggcttggtatgattgatactacaatacttgcggaaccatcattttgtttatccttatacttattcgtacaatttactagaaaaaataatttatgggtaagaatttatatatgttntcataacgacgtaaaagcaaatgttggtaaataaaccacaatgagaaaaccacaaaatcaactt

SEQ ID NO: 65579 - DNA, 325 bp, Oryza sativa
  unsure (1)..(325): unsure at all n locations
gcagcttcgntcctacgtactcacttttgggggtttcgtgtcttctctgggacagttatacattcttctcttagaacagctggtgagccacctagctcccacgataatgggcgatatctctatctactgaacaaaagtggaaattctaagccatttgaatcttgaacctgaagtgtattacatgctcaacgaagaagcagcttgggtagaggtaaatggacacttttttacatgctaatgcttaatttgaagacagctaaacttaatgtactgccatgtaccaccggagcttctgctgtgtaagctccttttgaattgcaaagct

SEQ ID NO: 65580 - DNA, 417 bp, Oryza sativa
  unsure (1)..(417): unsure at all n locations
agcttgtttatggcaaataataacagagctagtgtgattaaatcacctatatgaaattaatcaacgacatatcccatataatagcatatagtgggagaggtgagcaacccttaattaaccaagccgtaaatagaaactattcaaataaatgattcaatatattaagatattgtgcacacatatattgtacatcccattatagatatatggtatcgtattaatttgcttgttgcatatattaatttagagggagtatgtgacgaacatgaatattagataaatactagttatacatcttgtcctcgtataattacagatncaactgtaaattggattattcattgtaaaattatgtgatgggataatccgtaaccataatatgattaacctaaacaattctaacatacacagcatggg

SEQ ID NO: 65581 - DNA, 469 bp, Oryza sativa
  unsure (1)..(469): unsure at all n locations
gtacacggagaggctaactagactttcggctgttcttctactnncaaggactgattaaaggagggacatattgcatactttgggatagagagggataggactgcatgctgataggagactgtgcctagagtgataggactcttcctaattcagcccgataaggaataggtgaattttaattacttttccagataaattaatcactgaaatgatctctgaagtggtaaaaatacttatattgctcaaataatttcaagataaatcttgaagatacttggaccctcaaagtgtttaaacaaattataatcagaccatttaatgattaatctaatatgtggataattactgaaattttctgtggttgattaatattaagaattgagctctgaagaatccgagataattccagagagtataattaaccatggtggatataattatatataaatccatccatgctttatattta

SEQ ID NO: 65582 - DNA, 385 bp, Oryza sativa
agcttctttggttaggtccatacttttccttgggcactcctttaccttagtttactgcttttgctttgttggtttgccggctctttgcacactgctgtctcatgctgcaaagattgataatgtacaatacctgtgattacatggaatccttcttttcaatacgtactaaacattagctttaattagccctgtgggtactagaaaattttatttagtacatctgtacataagcctcacgggaattttgcataaactgggatgcatcttactggacgactttatcagtgcgtacaacgtctaaaaccatattgaaccttgatatatggttgctatagctaatcttacaatcactcttgctccttttccggcctttcactcccatgga

SEQ ID NO: 65583 - DNA, 260 bp, Oryza sativa
ctcatcattacctcatgtgtctctgtgatacttgattgactgcgaacaactataaaacaaaagtatttgaacactgatataatagtattatgggtgcttctgactatcgctaggcttatcaggtactgtatttgctccaatgaccacttggcgaatgacatgtctgcttccttaacaagtactacaatgttgtatcatacaataactatcttacgctcgggttctacattttgtactagatttctttggctgctgtgcac

SEQ ID NO: 65584 - DNA, 370 bp, Oryza sativa
tgttgtcatgacgcgatatatgctcattctctctgatacacatgacatctattaactatgaatgtcactacagctggaacaatacatttaatcctatctcagagtctataggtgctatgtgctatacttatttagctggctatctaatatggtgagcatttgatgcgactatctgactactatcattgttttcccatgatgcgttcttgtcagccaatgttggtctccatggtgcgtgagctgcagagcaagcatctatctctgtgcaattccatgtatgattcagtgccttgaatgatgcttctattatcgccatcacataggatgaatgatccatctacttcttcatacacttgtgcagggcacttac

SEQ ID NO: 65585 - DNA, 361 bp, Oryza sativa
tgttcccgcccaggagctcgccgaggagtcggtgtatgagcctgatgagtctaattataaagctaactaatctattttaaaactctaataatcatgttgtagaactcttatactctcttattggaacttaagtagtcatatttgctgagtctaacggtcgtatatttgaacccctcacactcctatatgcttaggctaattaccaatccaatcatcttgttttaaaactatcataattttatactagaactcaagtaatcttggtttacaactctaataatgctgctcagtctaaacggcggataataaactttatagacgtaattgcccataaatcttacatcatttattcacatcactt

SEQ ID NO: 65586 - DNA, 390 bp, Oryza sativa
atacttttccttggtgcgcgtgcgctgcattagtactcctctgcttcgattgcttgctcggcttttctcctctgcacgacgacaagaaacactgagtcggtctgggaatcgacgagacgacgggagccgccgccatcgccgataagatcgatttattctatcgagatacaatcgccggtggccgggaatagtataacgatctccgatgctctgatacctcttgttatgaatatagatgcccaacggagacacatatttttacgtggaaaacccttgctggatataaccacgggcgcctaccggctatgatcactatggaggaaatgattacagacgtatgggaatcacaataagaacgttcccccttcccgtccgcttacaagatatata

SEQ ID NO: 65587 - DNA, 472 bp, Oryza sativa
  unsure (1)..(472): unsure at all n locations
agctnaanagcgaggtggtcctgccgaaaggcgctattttacatcctcactaggcgctcggaaccaaagaacatactggccggactcggggaattggcagcgatgtgccctgaaagcacggactctcgcagtacaactcccaatacaggaaacggaaagtctccaacgaagagagggacgctcgtttcaaggccgagcttaaggtggaggtcattcaagaactacaagctagcatggaagatagggtggaagaaagggttaacaacgtcctcgccgacatgaatataccccgaggcacaacacctgctgtgcatccaactcctcgtgcacaacacgacgcgagtctgtcatagcgtatgagtagttgtgcatccacagaggtgcctgccccaggtctcccgatcgcaccactagctgcagtggaccacatagaggtaattgatgttatccgatccatatctaatcaaaaaca

SEQ ID NO: 65588 - DNA, 462 bp, Oryza sativa
  unsure (1)..(462): unsure at all n locations
atactaagcttcctgatctggaagttctcttcacggattgggatttttgatcgatttccttgatcgctacttatgggcgtgcgctcaaaggatacaaacagggattcgcaaacaaaaaggggaattcgtagtcactttttcctgtcgcgtaaaaaaaaggctttacgcgagagcaatagaggttgggatacatctatctcttctgagcaacctcttttggattcttaagaccacccttgcagtaggataccgtctgctttgggttctttattatattatctccttcgagggatttttaggatcgttcaggctatatttagtctattttggcttttactgtctccttttctcanggaagtggttaaggacctcagaagatagaggagagcgccaggcgcagatttccggaatacttctacggggaatgctcattgaatgcgcattctccgtattatgccttga

SEQ ID NO: 65589 - DNA, 365 bp, Oryza sativa
agctttatgtcaagacaaagcaatctatcagccaacgagttctatagaatctacctcgggagtcatcagtttcatcttcgcttcagagcagacgttctacttcagcaacatcaattatctttataaatcaagtttgatggattattgtcactgacatcatcatcagcacctctacttcattggtcctaacatctccgccgttgctaatgggtgactacgtctttgcctccggttgcttccgacattgccgacttgttatttcgccttcacggttgatctattattggcgatgagcgtcttcgtcaatatcatcggctgctacaccgctattgactggattaccgacatcgtcatcttcatcaata

SEQ ID NO: 65590 - DNA, 461 bp, Oryza sativa
gagaagaagtcttaggtggagtcttggcttataccctagttgagcgcctgtgaagatggagccgtatgcccgctagtccgctgctgtatatttttgattgtcaggccttaagtgcctttgtaataatgtaaatattatcgatataataaagatgtgtcttttatatcatgtttgtatggtgtaccccggcttttcctgggacggtgattaatacactagcgttcgggaaaatgcaattgtcccggtcgcgacagccgcctccgtccaaactgccttgactgtgtgccaggcgtcggcacaagccaccggtggtacttgccgccgtcgatccgtaaccctactcttcccctccacaggttagttctaaactccattgctccgcatcctccatgtccctcttctctcttttaccttggaggcaggtgcaaggagcatttgattttgttctttctcttcacaat

SEQ ID NO: 65591 - DNA, 269 bp, Oryza sativa
ggggaaataaacctgtttttattttcttggacaccagtaccctctttcttcgtgtgaagaaaaagaagaaattaatcaatccaattaccagaagcctcattaaacgcttccttaggggttaaactttcattggtccatatttctaaaaaaaggattctatattttgcattttcattcccacaagcaaaaatactaataattacatttccaacacgcatggataccgcatctattagataaacttcattttgaggggtttttctgacttt

SEQ ID NO: 65592 - DNA, 450 bp, Oryza sativa
ggcgcaatactaatactggaacttatgtattttatttgctctatcaatcaccatctacggtagacatatgttctgaagctttcctcaaatccaaaagaccagcatcttcctactaatcagtgaattatgaggagctctctgtgccgaaaaagaaatagcagggcaatatttcgaacttgcattcgaactgcgaaatatttatacgctggacgagagatcaagataatgcagcacggctgggatctaattggctagtcaaactgaggtggctcatagatcgttgggcttcaatcatcgaggaatagagacttcgcatataatagcagaggatcgggattccattgctgtccatttatatgtatatgggtacaattatttacgtatccaatgtgcttatgacgttgtccccggtggatctttagctagcgtgtttatcctacgagagtactg

SEQ ID NO: 65593 - DNA, 383 bp, Oryza sativa
agcttatagtgcctcgtaggcgccatgttagctaaaaccgtcctccatatatactaccttgggatattatttgcactgattttaggagatgcgttgtactctattttacggttgaggggcatgattcgaactcaacccttacatgagaaacccaaattgaactttttacctgtcaaatatagcatgtccttaggcccttggccttcacttcaactatatagtgttttattattttactcaatatactatatgtgatgtgagaaacataaaataaatgataatgttattattttatcttggcatgtgttgttagggagtataaatgctttttaaataaaaatagaagcataaaaaggttattagaaaactgacttaagccaaat

SEQ ID NO: 65594 - DNA, 428 bp, Oryza sativa
gaatgcaactcctactacacctatccatgagatgcattgccatggttatgcagagccgtgcatcgcgtcggactgctactcgtacgagcgccacgccattgagatgagggtgtgcgacaaggatgtgtctcctgtcaccaatgatcggatgccaaacaagacacttgtgcccaaccgctctctgctcaccgacatcactgcctggaagttccacggtggccgctaacccacaaataaatttgttactacttctccgaatcatttgtgataccatcatgtaagatcagctcaatattgtcttcatatataggagtacttgttacttgaactcctagtttggtgaatgtatacatgaggaggaatacatatacttgctcagggaatgaatcgcgtatcctgcactgtacacctgtatcgttttacaatca

SEQ ID NO: 65595 - DNA, 233 bp, Oryza sativa
  unsure (1)..(233): unsure at all n locations
catctggtcttaggtgcgccttgcgctgtctattttgtntactaagcagtcggctatacttgcgtggagattggacgaccgctcatgcccatcgccatcttaatcatgtgcacatactgatgttttcatctgatacatcagctgaatgtgctctaaggtcttatgatacccggacgctttcgtcttgtctccgttgcgccaggcttttataagattcaccgacacctgcgtgg

SEQ ID NO: 65596 - DNA, 407 bp, Oryza sativa
  unsure (1)..(407): unsure at all n locations
agcacctcggctcaacttgcaacttttgaaacctatctntgcaaactaatgcttcggttagttagtacaaactgcttggctacttgctagtagttgcttgctataactcactagttactccagttgccatagatctgatttgcactattatgtaattctggttttctggtgaagagtaccaccttcaaagatggtgtttcaggcattaagccactcacttcgaaatccgtttctttaatggcatacgtccttaatttgccattctatggtagattaactgttntagacaaacggcacagagtatattactcctaattgtaccatgcgtgccagacagcaagagaacattttctgaaactacttcactggttgagctctgcttcaatattgttggcccactggttggg

SEQ ID NO: 65597 - DNA, 205 bp, Oryza sativa
gtcttacattcatatacctcgtatataccatgtgaaaatgttcgaaagtagcggttcacattatacatatcaatttgggggatttaacaactttccttggtttgatgcctggaataaattgagtaaactgcctatcatttaccattggaatattgtatggtccgcttcaatagttcacatttatgccagccacattatttgcaat

SEQ ID NO: 65598 - DNA, 391 bp, Oryza sativa
  unsure (1)..(391): unsure at all n locations
agctttntgcccagaaattttgcgtgttttttttattctttccaaaataaattagtaaaattatgaaacatttttttcttaatttccgtcattttttttcttcttatgttctctacagtctaccatctcctattccatgaagataataaattatttttaaccctcccttctcttatatatcgtgtattaaaacaattacaatgtctttgtcggactactaaaacttataatttaattgccataaacttatcgcaaacttcgcggcatataattttaattacagcgtatgttttgaaattaatagtgtaaaactaattcaattatttttagaaaaatatggcgcggcaaatatgggtctatttagttccaaaaacatcacatccaatatttg

SEQ ID NO: 65599 - DNA, 322 bp, Oryza sativa
ctgatcgcacactctcagagagtggcgctttatccgagagaaaaggctctcggccgcacatctaaacacacaagtaatcgacgtgaggcctaacagatactactatcaggctacccacagagatgttggtgcgctgaccagtaagacctcgcagactctaacccgaagggcatctgagtataaccatagtggcctaagaagagtatgaatgcagttgtgctcgcatgctgcctagcaatggcgatctgatgcgaaccacgagatgcttctatagaacacaaattgttccacctcgctgtggagtcgacaatatgatctatgt

SEQ ID NO: 65600 - DNA, 401 bp, Oryza sativa
  unsure (1)..(401): unsure at all n locations
agcttnagctgatttacttgccgagtggaccgagtgccaagaagacatgcccgaggaaaagatggaatattggactatgcattttgatgggtcgaagaggcttacaggcactggagctggggttgatttaatctccccgactggagaaagattgagctacgtattgcggataaatttttctgcgtaccataacgtggcggaatactaggcgctactccatggactaaagattgcaatatctctaggtattcgccgactaatctgccgtggagactcttagttggttgtcaattcagtcatgaaagagtggtcatgcctagatgattatatgaccgtttatcgactacaagtactcaagttgcgaaataaatttgatggactctagcttccccatgttcttc

SEQ ID NO: 65601 - DNA, 395 bp, Oryza sativa
  unsure (1)..(395): unsure at all n locations
atgatngatcacccaatatgatgtaccttgntgctagcatgnaccataggctatgctgacatttatgcattgataggtcttcctattagataaanaatcataaatggtgattcagattaatgcatttagcatttaagtgcccagttgatggcgaaattcatactatgacattaaaccctgtaagagctatctgctgtactcgaatcttatgatccttctgtcatattaaatggatgcatgctggtaaacatatacttgagaaggcagtaaaacgacctttgtcacatataaaccgctacacgttcacctttcacagatcacagatgcacgatgagttgcataaatcactccaagaagcggctatgctggagtgtgagcacaacaatcttataatc

SEQ ID NO: 65602 - DNA, 189 bp, Oryza sativa
acctacacgcgatcgctagaattaattttttaatttttaagaggaaaccgcttaatcaacagagccatcactagcggattgttattcagagaaccctatgaagagcgcaggaatggatcttctgagaccgcatgaagagccagagaactgccaaatggagccaatcattgaacatagaacagttaaaaa

SEQ ID NO: 65603 - DNA, 408 bp, Oryza sativa
  unsure (1)..(408): unsure at all n locations
agcttaaagatgttgtctcaacagtctggctgtacatagtttctgaaacgttcttatcaatagcatccttgttttggctttgatagacaagccatgctccaattaaagcaaatactggtccctgttctgagttttaggaagcagcatttatgtacacaccattatatacaaacatgccgtctaaaatgacttttctctaacaagacaaatttgaaataccataataagatggatccatttcattatgatggatctgcaatacataagctatatatactcttctctgaaggttgcaagatggtcactacatttgcaattcanattcctttcatatagaaattattagcatntacattcatatattctagttggccatgtagttcgtgacagtctcattatgaaaccaat

SEQ ID NO: 65604 - DNA, 470 bp, Oryza sativa
  unsure (1)..(470): unsure at all n locations
aattgacaaatcctttactcaaaaatggatgtatttaatcgatcagctaggattttgtgaattggcagatattactatctattgtaaagctctctntacaacaattntgatgatatcctcatagtaactaaaggctaccacaagcctcataacgagcacataagacatttcagagtccatatggacactaacaacactatactagtacaagaatgccatatgccttggtgtagctgaaggcatgtttcatgaatgaaactaaaatgttgctcaagacttggtgccatgttctccaagatgttgggtgttatatactaacattgctatatggcatatttagcgctaaagggaaacattgtatatttagtcagaccgacaacatttatgttaccagttaaacaatgcacaacacaagctatagattttgcagtctgatagacaacactagacattatcaaaatactagcatg

SEQ ID NO: 65605 - DNA, 401 bp, Oryza sativa
agcttctagatcccattgaaaattgttataaaaatgaggaggtcagagctcaagccacgagggatctttctaagtgcattgttgaccacaggatggctgccaaatcattacccacgcctgagcaatatgctgtaagttctgtaaccatcacccttcttttttgtgcactctaattaagtacatctatatgtgctccataaatttcagcacacaaataatgcatcataaacatgtctgatattgttgtatgaccttttgcatcataaacatgtttgataggactttttgcatcataaacatgtttgatattgttatatgtggatatggtgagatgtagaactgtggattttagagcagaaacagttcatggttttaaaatgcactttaatagatgcatattc

SEQ ID NO: 65606 - DNA, 463 bp, Oryza sativa
  unsure (1)..(463): unsure at all n locations
taaaagatttctaaaaacatatggagaatttgctttgttgaacacataggacatttggtagaacaacaaaattatgcaaatatatctctacgttctcttggtcaacaaacagatcgaatagagacaatccttatggaaggctacaaaacaggaagacctgaggtaaagataaatattccctctaattctcagtcttctagttctcagtctgttagtcctatgtttgtcccaacaattgatcctaacatcaaacttggaaaacaaaaggcttttggacccgcaatttctgaagaactagtcagtgagctagccttaaaactaaataatntaaaagtaaataaaaatatcaatgagatttctgataatgaaaaatatgatatggtcaataagaattttaaaccttctactcttacttccacaactaggaattattaccctcgaccaacttatgcagacctacagg

SEQ ID NO: 65607 - DNA, 330 bp, Oryza sativa
atttgtctaacttaaatcaccaaattattggtcgcgcacagcaaagccgtacaaaccctacatgaatcggaaaaccacagcgccacaagggagtctaagggaagaaaaaaaaaaacatttgaaagccggagcaaaacgccgcgaaaacttattccaagatccagttgtcctccacgcacctgatccgaccctggacaccccgcgatccgcggagccgtccttgcgcgcgtacttggagtcagccccgggcttcttggcctcccccttctgggccgatccgaagcacaggaagcagctcatccaagcagaaccttcctctcaaaaaaaaaa

SEQ ID NO: 65608 - DNA, 465 bp, Oryza sativa
  unsure (1)..(465): unsure at all n locations
aagcttcatgtggcgcgttntaggtggcatccaacgttcgatacttattagattangagacgccattaacgacggctcgctcaaccataccaccttttcaaattcatttttcaatgagtactaaaaattttaaaaagggtaaaaacttgaagaaaatttatggaaaaaaattgtaccacatgcagaatctctcgaaaatgtcaaggcccaaatggcgccacgtaaaaaaaaggaagtgttcgcctcgtcacaaggcaagcaaatccgctttctccattacaaagcggagaccccgccgcaacgccaagagccaaaccgcctcctccttcccaaaaggccaaaaccgcccacctcctctcgccccttctcgccgcctccgccgccgccgtcgccgacgaggaggaggccgatgggctccgatgaggagccgtcgcagatgcggagggcgctggtggacgcgctcgc

SEQ ID NO: 65609 - DNA, 465 bp, Oryza sativa
  unsure (1)..(465): unsure at all n locations
ctcagctctcatttgctttgcaagcacttaagaagtagagtttgttcacaagcatcaatatcaatatccttacacctagcacatggttcattgcttggaacaattttggaacaaggtgcctcgctagggagagagacactattctttaaggtttcgaacttctcttcaagagagagataagcttttgttgatgtaaaacatgaggcctgngagatctgcttaactctagtgcaggtccaaagctcgccttcgggtgtgttagcgtgccagttgatttgatcctgcaatcaacaagaaatagagacaaagaaaccgcggttaaacctataaatgatagacgatcggctaagtgccgatgacatatcatntatctttgagccgatgtcatatgtaaatcgatcggcggttataaatagataataaagtactaaacctactcgatcggctgtagatatcaacaatata

SEQ ID NO: 65610 - DNA, 414 bp, Oryza sativa
agcttaactctcatttgcgatcactttgctctcagcagtcaatataggagttcacctttaagcagacaaggccaaaggatatacaaacgctacacaaccctccctgttaaactgctgcatcttttaaatgacgccgactttaagttagatggttgctacttgctagaaacaacaagaactatacattaaagagcaaacaagactggatctactttgatgttatctctgaacaatgaactggtttaatccactaacattgtaacacatgaactaaactaatgtcctgtaaggtatatgggtgtccattgcaaatgaaaccatgctgaatcccatatcttcatatggcacttcagtcaagccatatagctcaatttggcacccaagccaactgcaagcacaacatgccagtcgatg

SEQ ID NO: 65611 - DNA, 467 bp, Oryza sativa
ggattagacaatatgcatctcggtgggttatcctgctttttttatataatggacattctgagctgtatgatctttcaagattcaacttttacagatacaagctttcacataattagttacgaggcttaacttataatggcatcataagtggctggttactttaaattaataaatgaagcatacagagaaaggtatcattcgcggcctaccttgttaaattttcataaatacacccaataatgaattatatctatggaacacctttgatactcatagaactatatcgaatgagaacctttgaaactcgtagattcatatgccactcggtgaactgaatacttaaataaattttatacctacgaaaagatgcataaaaaattattaacagactgaatgatatatgccttgtacacggactcatagaatcagttagtattctaggaatctgcatacattgtaggcacaac

SEQ ID NO: 65612 - DNA, 395 bp, Oryza sativa
  unsure (1)..(395): unsure at all n locations
atatgangncgctatactgttcctaatctaactgcatcttattatgatggcaagctaaattcagtcggaggaatctcacctaacgctagctccggcaatcctgggacgagtccatacgctcgaggttagaagagacgagcgctatccctgttattctaaaatcccaatcctagggtcaaacctatccttggtttatgcaatgccaaccttttctttctaacaacggtacttactgctcgtcaacagatccggacctatgctcggactccgctatctctaccgtataccccgaagacgaatcacaattagtcgacttaacagatcgatgttttgcggtcaatcaagagcatgattcaattaataactcggctttagagtgctatcctactcggctc

SEQ ID NO: 65613 - DNA, 427 bp, Oryza sativa
  unsure (1)..(427): unsure at all n locations
tggtaacccatatagnctctcactgctagtgccagttctatgtaaatgaggggtacatgcatctttcgccaaccttcttattntggatgaacagtgtccagtcccatataatgtgtgtcggtgatatgggcccggcggtatcagatttagagcgaggaggctgccccacgatgccacgtggtcctccccggaggggagtcatgcccgaggtatggtggcggccactccttcccagagactggatggaggatgctgccccccgatgccacgtggccctcccccgaggggagtcaagcccaatgtggggcggcggtcactccctggccgagactagagggagaaggcttccccaggcgccacatggccctccctcgagggggtatcgggcccgaggtcgggctgcatcggccccctcctgtgactaggg

SEQ ID NO: 65614 - DNA, 394 bp, Oryza sativa
cctgcacacttgacgctgcttctgaagaattttcttgatgttcaaatgttctttaccagctcgaccttcttaaccatccgcatggtgttgcggaagattgaatccagtcttccagcaacctataattcgcctgtcatttcattagccatgctcacttgatggattcccacaaaaggaaaagataaaaaaatggtgtgtgctcttaccgtgaaaactcctcctatgatatcacaaacatttgtgatgaaatgggagaaggattttggaagttcagtcaccaataccttggaagtgatgataaaataagaactaatttttctttcagttatgaacccaactatgaacatgtgatatgcccatcctgctcggagaacgttcaaaatggaattccaca

SEQ ID NO: 65615 - DNA, 320 bp, Oryza sativa
ctagctgaaagactatgttgaaacaaggcttacagatccatcgaaaatcagatctgtcgaaccggattgcaattccatgaaccactcggctggttctgtaacatgatctgttaacaaacaataaaagcattcacaacctatacatggttaccgttttgctaacggttttcatgaaaagtggatatattgaccgggagtcctttgattgcgactagacgctatcacagtacacatacttatctgttatctcaacctgcccattaaagattcacgcatatctgctcttcatttccatggagatgggaagccagctagaatgt

SEQ ID NO: 65616 - DNA, 288 bp, Oryza sativa
ctagaaatgccaatttacttttccatgatgttattatctaaaaataaacttttctgtgatgtactccctttggtttaggttataagacgttttgactctagtcaaaagtcaaactgttttaagtttgactaagtttatagataaatatagtaatatttataatactaaattagttcatcaaatcaataattaaatatactttcataataaatttatcttgggttaaaaatggtactattttctttataaacttggtcaaacttaaaatagtttgattttgagtcaaaa

SEQ ID NO: 65617 - DNA, 461 bp, Oryza sativa
acattacggaccactgggtctagtaccatggggtacctttctctttggaccactcggtcaggatgatccgagcggtcaaacttgattgcaatctctgaccatcgaagatactgtggcgtgtcgggctgaacagcattgatctcccgttcagtcaacttctgcttccgtttagactcataagccagggggccgccgaagatatggttgagctccttgcggtggtcttgaaatccagccggggtgtcgccgtcgtccttcttccttgacgtgctttgttcctcgtcggagttcttccgagtagacttggtgtactgctccgcgaactgcttgtagatgaagcactctttggccacgtggttggagtttggatgatgcgggcattgggagttcatgatcttgtcgaaagtgttgacgcgcgaacgctgtcgagaagaatgagcggcggttgcaacaagttcctc

SEQ ID NO: 65618 - DNA, 383 bp, Oryza sativa
cagcttgtgttacctctgaccataatgattctagattggtgaaagcagcaagctgcttgaaagaaaaatgagccacgttttccgaaattgctagcaccatctgatgagactggtgaaacaaaaggaccgctggatcaatatatgagaatagaatccattgggtcaatctggaggcttccagacaaaaggtcacaaatacttcatctttgagaactcacatgtctaggatatttaaggctctcatcggttgccattttggtttaaatggcttatttggcttattagaaaattaaaattaatttataagttaaacttttgtagatttatatcgaactgacagagcgtggggctcctcaccgggagaccgagcagcccccctttgt

SEQ ID NO: 65619 - DNA, 480 bp, Oryza sativa
  unsure (1)..(480): unsure at all n locations
ctcaagctnctcccaagccaccaagctgcacgagcctgcagcatcttcttcattcttccaaagaaaaccccggcatttcttttcgatttcgttgattgcccaggttggtagttccaagacggacatgaagtagagtgggagcgccattaacacatgcttgatcaaggctaagcgggcatctggagataaaagcttgggctttcagccaaccagatttttggtaagcctatccatcatcggttggatttgtgctttcgtcggtttacgcacagaaagcggcagccccaggtaaacaatcggcaattgcttgatcgggcatgtcaacacctccgtcacctcttcaatttgtgcatcggtgcaatggatcaattcatctaagatcttgttgccctctcataacttcaaatgacctacaaggggaaaatagaattaacaacgaagtgacaaagatgaacataattatcttatcatctgatggac

SEQ ID NO: 65620 - DNA, 391 bp, Oryza sativa
  unsure (1)..(391): unsure at all n locations
agcttcttgaacagcatcatcagctttttgtcagcaaaatgggcgaacaagttttcagcaaggtgttggatgcaccagcggctttgtacatccttccatggatgtgcttcttgtggaatattccttagatcttctatagcattgaacaatgcccttttgcaatcatgtatgatgcagatatgagatcgctccttcacaacagcatgtttcacattcctaagaaaccatagccagctttctttgctctcaccctcgatgacagcaaatgctactggaatggggtaaccattagcatcaaatgctagagcaggtaacagaaccccttcatattttccacatagcggcattcccttaacacanatcacangacgacagtgcagaaaggcctgcg

SEQ ID NO: 65621 - DNA, 450 bp, Oryza sativa
  unsure (1)..(450): unsure at all n locations
ctaagcttcctgacataggagcctgttgggataatcatgctatctgaaactggcccagatgtcataagtgcaggaactcgagcagaatttgcagcgagtgtaattggctcattttcaactaatattgccaaaataagatccaggccttgcttcaaccagaaaacatcactcactgcttcccagtcctgggtctgtattataaactgcaatctagcaaataatgtttttccgacatagtcatggtaaagtttgaagaatcgcttcctcatttctgggtctttagctctaagtccaagcatgtattgcctctccaccttatgaaaatactctggcctcanagccatttgatacctgcataaaaagaccgtcaggaacactacaagatactaataagagcttgctgtatgtatgtacttacttagctgtatctccacagagtgagtaaagaag

SEQ ID NO: 65622 - DNA, 349 bp, Oryza sativa
gtctggtatttgtgtagcccccgactctttggttaggtgagaaacaactgaacattgagtcgagaactggtgcttcattgcatcgagtagccctcagttgagtgaaaatacgtttgaaaatgtcccagtagaaatattgaagattggaacaccactttgtgtagtagaataacacgacattgaatatgggagtgcatgccgagatgtcgaagctcttgtggaatccttggtggtgaagtagcacaacttgcgaagtagcggtaattatgtctgccggtgccgaagataatataaatgaagtcgcttcaccatggcgacaaagtcgcatatctgggatgaagtgaacact

SEQ ID NO: 65623 - DNA, 448 bp, Oryza sativa
  unsure (1)..(448): unsure at all n locations
atgnncggcgcagtactaatactggaacttatgttctttattngctctatcaatcaccatctactttagacatatcttctgaaactctnttcaaatccaaaagtccagtatcttcctacaaattagtgaattaggaggagctctttgtgccgaataagaaagagcagggcaatatttcaaacttgcattcgaactgcgaaatatttatacaaaggaggagagatcaagataatgcagcacggttggttatctaattggctagtcaaacatgagggtggtcatagatctttgggcttcgatcatcgaggaatagggactntgcaaataaaagcagaggattgggattccattgctgtcattttatatgtatatggttacaattatttacgttcccaatgtgcttatgacgtngcacccggtggatctttagctagccgtgatcatctta

SEQ ID NO: 65624 - DNA, 397 bp, Oryza sativa
  unsure (1)..(397): unsure at all n locations
agcttgtactgttgatgggagtaaatgactgcgattatcactaatcactcgaccccctgtgctgaaagctgattcagatgagactgaggtgatgggaatagtaagaatatccttggccaactttgccacaattggatactntaattcattcatcctccaccactgaagtagattgaaactttttgcaggaatatcctcaacaggatcatctaagtacctttttaaatctgacttaggaagactagcagcattctttgatttcatatactcatgaaattggctagcagcagagaaatgactactagtagtgcccagagatgtactagtagattgaatggtggcatcattttcctttgatgtgctctggagttcactttcatatgatgcatgcaaagat

SEQ ID NO: 65625 - DNA, 380 bp, Oryza sativa
  unsure (1)..(380): unsure at all n locations
gacactgnganccactnactacttcttaatcattttctttancgcnggccagagagccctgtgcgtgctctctggaggtgactgagcaaccctggccaaccaaagtcctgtcttctgcataaacgaatgagctcctctcaagttctacccaacttataaagtaatataacattctattcattcatatccaaactacgaggatttaactgtacatcaatatacaaccaggacatcctatcatgccaggctccaatcttcacgggaccttataaataaacaacgcgagagaaaatagtatgaataattaaataagctgggcctggagcgctcacctctatttatctgaacaactcttcttctgcgtccggatcgaggtgaac

SEQ ID NO: 65626 - DNA, 118 bp, Oryza sativa
aatggggtgttcacagttcttgccaaattttcttaagaaacccaaccctagcccttttttgaagccttcattaaagctgcagaacccatctttgagcagttcatccgttattttgccc

SEQ ID NO: 65627 - DNA, 404 bp, Oryza sativa
agcttctacaacatgctaacaagctatcttttaaatattggagatcatatttacagtaaccagatgatttggttatgaactagtattcattattattttttcactatctctaagtgctgattatgcagccaatttgtttttaagatgtaaaccctgctgctttcttccctatattctgaggatgattatagtatggagaacattatagccaactgtttctgtagtatttgatgtacatatcacagataatacgaaacttgacctacaaggttactacttgattacggattacctgtagaagttgcatgttgtttccgcttattgggatgtatttgtgaaatttgaaatatttaaggtgacatggagacatcaattgttttcttcgagttatactaataacagat

SEQ ID NO: 65628 - DNA, 453 bp, Oryza sativa
gctcaacaagattgatgaggacaaggattgattcatatttaaagccaaagcggctagggctgagcagatatgcccttaactacccattatatattttcagaatttctattgtatttttatagggcctgaattggattgcagagtttggcctataatttaagcactaccagccctaggcatgtcttggcccctggacgaggataaatcatatcatatctacggtggattttcacccaccactttactctccattatatataatgatgattcttgccgcatcattgcctcctagattctccatttcttacctcctaataaaggccagagctcctcacctttcgccacttgattaattgaaatggctacatcgatcctacgtatattagctaactaattgagcactattcaacgttcaaaggcaggtcgtgttcttggactcgtccactgatggac

SEQ ID NO: 65629 - DNA, 168 bp, Oryza sativa
cgcccggaacctaagcaccgcgctgcatcttgggatttttccctttttaaaaaacaaccctggctggagctacctacaactgtgtgggcaaactagaatatcctggcatgcggcacattggcatttatgccttatctcaccccgacgcaaatacgctttgcggacatc

SEQ ID NO: 65630 - DNA, 374 bp, Oryza sativa
  unsure (1)..(374): unsure at all n locations
gctcttantggntcaaggcataagaccagcggcggattctcnctctctactagggcgggcagttgcctaggctccctatccacgacccattgagatatagtgacttttgtgcaacaatctgctatcttcccggtcaaagtgtgtcgacgagtgatactcgcggaccggatgaatagagtatcgtggtacgttggaacaggggtctacgtattacgacatcataacagacaaaatgacaaggattatactggttcaggcctcttattaggtaatagccctagtccagtttatatgggattgatgatgatgagaacagattacaaagagagtaaccgaaacaggcgatactgacgagatcgtagttgaagatctct

SEQ ID NO: 65631 - DNA, 340 bp, Oryza sativa
actctgaatgccaaaaactatataaaagaccttatgttacaaactaactctagcttatactcatatataagggaaaccaccatgtgtccatgttactctaaacatatcaaagtcccttgttgaaaacgattcttgatgcctctgacctcaactagtgaatattgaacagatcagggacctaagtcagagaaagcagcccatgtggccatgcattcaaagtttcaagttggccagatcggctaaatttcaacggaccctgcaccctcgtgcgcgcctgcaggccccgtcgacccggccacataggcgatagcgctcgtacgccgatccacccgttatccgc

SEQ ID NO: 65632 - DNA, 306 bp, Oryza sativa
cccggaacttaagccactgcgctgcacttcaggagacacttcttgtaaagaagctccaggatccctactgctaaccacccatgataacatgatacacaaaggatttttgattgcgccaccaagaggacatctggaagaactggacaaggcacgtatgatcaatcattcaacatacattgattgatgcgttcacatcaacatacccaaagtgttgaaacactctgctgctatctaagatacgaacagatgtccgtgagagggatggtcatctccgaagtattggctactgaagaaccggcatttgta

SEQ ID NO: 65633 - DNA, 295 bp, Oryza sativa
tcttcagctttctggtaaggggcctgtatctcttgtacaccagtgggaacttgatatgtgacttgtgtaactgcttactgatgtcacgcttgcagagtttaaagtggacagtagcagtcttgatgatctgaatgcaaaggaatcttacacggtggcgggaagccatgtcagagtacatctgcttaacggcaccattgatggtggtatcacggtactccttgcacatgttgtggtagccagtctctactcttgttacgcagccagatgccatagttcttgatagatgttggagtct

SEQ ID NO: 65634 - DNA, 218 bp, Oryza sativa
cgccccggacctctaagtccactgcggcctgcaagcttgtgtggaggttggagcaacattgtctcaaacgtggaatcacaagcggtgagcggctggtgaaaactcagtcccgccttggttggaccgactaccatggatatcccccccctcttgacggcctttttgtgctatctcaaccctccagggtggttgcctgacgaaagcccagtcttggaagc

SEQ ID NO: 65635 - DNA, 328 bp, Oryza sativa
acacattgacaaccataatcttcatcttctcattcgaatgagaggatacacgcacggcgtacattctgttatatttgaataccaaactcgcaaagagctaaaagatcgagaggaacacatacatgagttgtagacaccatccagaaaacccatgagataataccgtgctgatcacatttgcaagcatataatatatatacacctacgttgctaactgcttgccattcactggcataacctttatcctgaacggggattccttagatgaaaggcttttatcacctcggcccgatcacagagatgttctcctgacattgtagaatgctat

SEQ ID NO: 65636 - DNA, 371 bp, Oryza sativa
tgtgaaagatcacacaaactattacgcataatatttggtcaatcacctctccagacgctgcttcagaaatggaagccactctagggatgggctccgggccaataactcgagccacttcccgaggagggggaggcccctcgaccctggcggcaggctgcacgcaactttcatcagatttgcatgcgcggattatcaaccaagcaacttctgctagcacagccgtagcggcagcgagggcaaaccacgggatggccactgccacaagggaattcctccattgacggcaactgaaaactactactgctactcactacccacagtttgttggatggcaaatcttgcatgatccgcccaatatttaaacatggagc

SEQ ID NO: 65637 - DNA, 282 bp, Oryza sativa
  unsure (1)..(282): unsure at all n locations
agccaagcactaagctatgtgttccaggaattagttattntgagtcccttanaaaagggacccgaatctaatccgtgaccctcaaccacaaaaccggataggatgaatccccgaactattgaaaccagtgcaatgtaactccgttatcgcgtttggaggtgtattcttttgatgtggtaaagacagtgcgatgttcaacaaatcttcgtccctatggcgcttatgtggtatattattaagagaaaatatgtggacccatctgtgtttctgtaataaattatt

SEQ ID NO: 65638 - DNA, 417 bp, Oryza sativa
agctttgttatgcgacggccttcagcagtgtattcactataaaacaatcagaggatcatgaaacaacaaacattagactataatttcatattgaacatatacatatgctaaatgtgcaagtgaaaaaaactaataaacatcagtatgggtttgctaagtgatttcctagatgatacattaatttggcaagggtgatggtggtaacttcatattcagctaataggaataaattccaccattaggtccagcattttattaggggactagtgaaacattgcacatcaacagatcatatagatttcagtcatggtatataatcagatgacacaaactctaaaacacgctcacttcagccccttctgcaagatggctcaacaaccatcattatgttgcagtatatgtttgagatattttttg

SEQ ID NO: 65639 - DNA, 373 bp, Oryza sativa
  unsure (1)..(373): unsure at all n locations
ccttgctaatagtacaccccttacgttatatgggaggcttcttatgccgtggcacatattctttgttatgctgtaataattgagcgattgataggtggtccccttgcatctcttatgatggtggcaaacgagttgcctgtaaaatatcgacatacgatattttgcaatgtcctgtctataaatggccaaccctgatcattttataagtggtctctgcaaccctttgggagagctggaaggagttgcttgcataaagaccggatattcttcatcactcnatgtgaccgttaccatgtgtcaatggacgtgtgccacatcataaaaaatgcatcttgtatgggagaggaattaggtatatagaattgtaaacttg

SEQ ID NO: 65640 - DNA, 404 bp, Oryza sativa
cagcttgtatcgatcttcgagatgatcttggatatcatgcttccatgtatggcttggccgggcagtttaggatagttggttgtgactccttgtaactatgactttcagtcggttatccctaattaatatctcatcacattgctgcgggaaattaagttgcatgatatgtataaatcaaatacagtatgattattaagacttaaacaaattgatacttatgaattttaagttcaaaaataattgatattgcatgttttatgagagaagaaaaaagagatgatttgaaccaaagatctatcacccaaaaactataaataattggggtgatgtggcttactgagaaaagagagaaataacatttactaattcttagtggggatgaacatataggattctgcatcatt

SEQ ID NO: 65641 - DNA, 312 bp, Oryza sativa
  unsure (1)..(312): unsure at all n locations
agccctangcctactaccaggagggagatgaagactattttcgttcagcacgacttagtacggacgctgcctgtggcaatggcatgccgctgcctgaatttcgctgccttatctatttctgcttttggatgtataccagaccgctcggtccgatgatttaagacaatgcctgcgggcttatgatgtaatacttagcactacactctcatgtgtgtgctcttggtatttcaactatgaactcgtgtgtaccacactacttgatccaaggaaatggtactgtgtacacgaatgattcctgtcgtaaaaacgggg

SEQ ID NO: 65642 - DNA, 317 bp, Oryza sativa
ttataattataaggtatatatgctaaacataattaatgatcagcaagaataacatacatcttaaccaaaagatatattagtcgatcgtgaactctatcaaccttattggaactataggcaagtagtcttacattgtatacacttattaacaacccattgatgagaccaaggataataaattcatagctaacacctgataggcttttagggatggacataatcattaaatacaatttttagaagatcacctatatatgaatggtactggataaaatatgtgcttaattagcatgatatataatacgcttacctactgg

SEQ ID NO: 65643 - DNA, 326 bp, Oryza sativa
actccgctcttctgggatcagacaggggaacgccaattgtttgttacacaaggttctaatgaggcttaagaaaaagactcagcttgtatggaaagattgagaatagcgcaatctccgcacaaaagccttgcagacaaccggcgaagggagctcgcttacgaacaggggatatgtgtatcttcgtgtcactccgtcatgggagttcgttgttgagaccaaagaatgtggcccacgcttgtggaccatactgatctggaactgagggaagtgtttacacttgagcttgtcccagatgtgggcatacacgaagtagaggctcttatgga

SEQ ID NO: 65644 - DNA, 177 bp, Oryza sativa
cagcttgcattaaacgctagagatctggtcttcctttccacactggagtcgctttaaagcataactatttctgcctcgaaaaaaattacagggttttctaccgcgattaagaacaaatatagaattgctagactatccttcattgactgtttcgattggaaaataagtggggctttg

SEQ ID NO: 65645 - DNA, 467 bp, Oryza sativa
  unsure (1)..(467): unsure at all n locations
ataaaactccagctgcatacaattgatgttgccgcaactttcccaactctcttctgagatggngctgatggccttcctctgattgtgagtatatcagaatgtcatcgatgaaaaccacaacgaacttatccaagtattccatgaacgctttgttcattaagttcatgaagaaggcaggagcattggtcaagccgaacgacatcaccgtgaattcatacagtccatatcgcgtagtgaatgcggtcttctgaatatcttcttcacgaatacgtaattggtgatatccggaacggagatcaatcttggagagtacagtggcacctttgagttgatcgaacagatcatctatcctgggaagaggagacttgtttctgacggtgacttcattgaaagctctgtagtcgacgcacatcctcttcgtcttgtctttctttttacaaaaatacacgagcacgccatggcgaata

SEQ ID NO: 65646 - DNA, 410 bp, Oryza sativa
agcttgtaaagaagacagacacattttagtggggactcgaatcacaaaaagcctttgaagacttcaagaaacttttcactactccaccagttctggcctcaccacactcgcaagagccgctattattgtacgtatcggcgacttctcaggttgtgagcacggtcctggttgtcgagcgtgaagaagaaggccacgttcagaaagtccagcgaccaatctacttcattagcgaggttgtggccgactccaagatgagatatccccaagttcagaagctgttatatggtgttctaattaccgtcaggaaattatctcactacttccaaggtcactcggtcacggtggttacatcgcttccactcggcgatatactccataatcgtgaagcaaacgggtggatcgcaaaatgg

SEQ ID NO: 65647 - DNA, 453 bp, Oryza sativa
ctaagctgggctcatatcgccgtcctctgtttcgggcatggccactttcttctagctccaggtttgacggaggcaggacaagccatgtacattggcagcgtaccactgatggtggagtgactgatgtgaggatgtctggtgagcatggcgcacaagaggcggcaagcgggtatccgctgcccgctggacgctggtggccatgaacgaccgattggcgtgtcatccgcagcgagtcagaacaaagcagagtggcgccgagcgcgtgccaattgccaattgttcggtcggcgcgcggtctcggttcatcaggtcaacaggaaggaacgaggcttgtgcgcagtggaggggaatgactacggcgatgtgttcaaacggtgtctcacacgcacgagagggttgatcggtggcggctacaacgcaagtagaacagtggtcatggactcacggctgatc

SEQ ID NO: 65648 - DNA, 401 bp, Oryza sativa
agctttagctatatatactaccactgtatagctaggtcccatgttgcgttggtgacactaactgctgctgtcatcacgcattccgaggaaacacatgtttttaattattttggtaattacaacagctttgatacaatttcgatcattttattcgttttaagtcactgagcgtttcaagagttgtccttccggctaggacaaattaaaatggtagtataagatattgttttttaataaaaatgaaacaatctattatttatttattaattgtctttttgttagatttctctggagatcagtacaaacttcttttggtctatatcctcgtattatatactccaactcaatattttggaaactggcttgtgggtattgattaaaggaccaataaattcattctt

SEQ ID NO: 65649 - DNA, 405 bp, Oryza sativa
agcttcaatgcttatatataaagtttctaagtgtttatgtgcataaacaaacaactttacatgtatgccaatatggcgtcaatgcacttagaactactaacctacatggttgattgaggcttagtggattataagaatacattcgccaaaaatacttcaaataatatgcaagacaaataattacattcaatgttagacatataattcacaattttattccacaaaaggttaactaattactacaggttaaaaaaaacaatatatgtaatgtgagatgacctatataaaaaaatattcaattatctaatgcagaaacttctatgcctaaagcaaaagataaagaagctctacatgagcttaaccatggttcttatattgaacttaatctaaactataatgtcactc

SEQ ID NO: 65650 - DNA, 337 bp, Oryza sativa
ccacacggccacgaggaggcgagcggtcatacttgattgcaatctctgaccatcgaagataatggagcgcagcaggctgaacagaatagatctaccagtcgagcaacttttgctttcttgtagactcataagccagggggccgccgaatatatggatgagctccttgccgggtgcttgaaatcctgacggagtgtcgtcggcggccttcttacttgacgcgctttgttcttcgtaagagttcttccgagtaggcttggtgtattgctcctgcaactgcttgtatacgaaacaatctttgagcacgtggttggagttaggatggtgcggcattcggag

SEQ ID NO: 65651 - DNA, 342 bp, Oryza sativa
ttaagtgctggtctatcttaatatttggccctctgttcaaaacggtttgtccctccgcgggtgctgcttggtacatgcgtacaacgctcatgaccaggtagacactactacttacttccttcggttcacatataagtcattctaaccttttccattttatgataatggtaatgaatctaaactagctgggtggcccgcgcaattacgcggctagcacccatataaaattatatatttttaatatgactttacttcaaaattattaaatagttatctcattgtcctaagatttttaaagactacaccttattatcctcgtgtttctaattttttaggttttaa

SEQ ID NO: 65652 - DNA, 466 bp, Oryza sativa
  unsure (1)..(466): unsure at all n locations
aagcctcatacggggtnttgccagagagggctttggntggttcttttttgangaggaagacagccgtgctgacaggcttctcccaaaactccgcaggcattcccttctgtttgagaagggcgcgcgccatggacaccactgtctgattccgccgctcgaccacgccattttgttgtggggcgtaaggcgcgaagaaatgacgttggatacccttatcagtgcagtaggtggcgaactcaagcgacgtgaactcgccgccgttgtccgtgcgatatacacacagcttgcgcgcacagtgagtcttggctgccatctgaatactcttgatggcgtcaggtgcattgctcttggctgctaagagcgccacccacatgtatcgtgtggatcggtgacagcagcaagaagtaacgccgccacctggcgtggcagcngtgataggcacagatgtcgcatggacagaatctac

SEQ ID NO: 65653 - DNA, 404 bp, Oryza sativa
  unsure (1)..(404): unsure at all n locations
ctcaagcctcatcttttcaagaattccctttgtcaatgattactctgctattcactgncgntactacgggtacagagtgatgcctcctctatattacaggggccaccgngttaaagaggtgaacaccaactttaaccttaacactcttaccactttagcaaccactggaaatctggtggattgcacatcaattcaagactggggtcaataaagtgtttcatctaccctacgtgatccagcttatctatttccatggaagtacaaaatagctggacctataaatagggatgaaaacggatcagaaacggacagaaactagctttatcatattcngttntataatttttttttcggaatcggaatcggaatggaaacttcgattagaaatgaaattgaaattatcg

SEQ ID NO: 65654 - DNA, 369 bp, Oryza sativa
agcttggtgcttacacatctgatgtgtggctctctatcacactattttacagtaagagatctacaaactttagacatctatttttaattttgttccattgcgttcattatgacaatatctatgggactagacctatgtaggatacctttttaaacaattcacagggtgataaattctagtgcgtatttgtgcaaaggtccaactgtgatagaacaaagaatctgaactgggagagtaaaggggtcattacaaaagttatgcaatgtgccattataaagttcctgaattttatgggtgaagtatgcaactactaagttttaaatcttgagatacgatggccttaattatgagtataatgctactaaattc

SEQ ID NO: 65655 - DNA, 385 bp, Oryza sativa
  unsure (1)..(385): unsure at all n locations
cttcacgtttagctcgcctgatattntcgactgtatttgtcatcttttatatnttggcgatacgtggatctgtatgtcaacaattgtcgtttgtgtaccctggctagtcctggacaggggtttaatgcacattcagcttagaaattctggtttgtgaatttttgggcgtgacaagttggtatcagagccgaccttgatcataggacaagccaactggaaaccctaaaagccctctgaaacctttttcatctgcatatgcctttttgcacttggatttgtttcagggaaacttgggattttgctcctttggtttgtgggaaaaatcttgatcgatactttaattggatttctcaactagggacagtctacggtttcagtaaaattt

SEQ ID NO: 65656 - DNA, 367 bp, Oryza sativa
  unsure (1)..(367): unsure at all n locations
agcttgtattcatggtacatatttcgatattttctcttcatcgntcattcataaaggaccaagattgtgttcattgatgtaggctgaattcaatttcattattgaaaaaaaaggagcaagagtgttatacagtatattcctcatgtattatcaatgttaaatcatactagcaagcagagtatgtaagaacacaaatactataaagaagctgaaaagtttttgtcagatctagttaagctatattaacatgatttaatctactttaatactactccatccgtcctattttaagtgcaaccatgagttttcgtgtccatctttgattgtccgtcttatttaatttttttataattagtatttttgtagt

SEQ ID NO: 65657 - DNA, 386 bp, Oryza sativa
tgctgattataacatcatgaccaactcttctgttgacctctatgtcactgatgctattcaaatatctgtaaggattccctctgttggaaagaccaccaagctcaatatgaggaaatcgaatagtattgctgacatcaaggcggagattgaacaggaggaaggaattcttatgaacgaacaaatcctgatgtatgccggtcaacagcttgaggacaaccagttgttaagtcagtgcgatttgaggaatgatcagacatttcatgttttggtttgcccaaatgacaagcttcatgtctttatcaatgttagaggagagaaaactataggccttgaaactaaacgctggtacaccgttgctgatgtcaagttgatgattgagaatttgg

SEQ ID NO: 65658 - DNA, 359 bp, Oryza sativa
agcttgcattaaacacctaaatttctgtgacttgctgagaacgaaagtactcacccttgctctatataaatatatatagttcctccgtcctgaagttgaagatgaagtaaagtgaagattagggtttcgtcctggttcccagccgtcgcctgtggtggtgggtattagtccgttggttccgctgctgctgctgctggagtttcctcgtacgaatcgtcggttgtattctcgggctgtcttgagctgcaacctaagttaatgtaaataagtcctctatttattttaaggattgcaatgattcatatttgtcaccgtgggtaccaacgctatgtcctacgattggtactgagatcgcggtt

SEQ ID NO: 65659 - DNA, 371 bp, Oryza sativa
tagctctacagagtctgtgaccgactttattaggcttttgctgataactgcctgtagctaaatgcaagtggaagctctattttgtatgcaccttatagcggcatgcagtcacattggagggaatagaaaagcaaccattatccttccacgcggatgttctgattaattcctttcacagaaggagatatatcccctacttcctgatacacaaacattgctaggattcaagctcaccgaaaagatgatgatgcgcttcttgtatatctggggataaaaatgcaagaatagcagctcgttcatgattggcatcattcacagcttctgcaaaacattgtcggtagtgttctctataatatgataataatgcagct

SEQ ID NO: 65660 - DNA, 359 bp, Oryza sativa
agctttgctctgaatggcgccttcgttgatgatttctcctcagctgggcaggcccctccttttatagaggtcaggggtggcgtcgcctgtgcctcctgcttatctcttcgctactgtggattcacgagagcaggctaaagttgaggcctttcctgccgaaagttctattcttcacagggatatgtcattcaccgccgaaagtggccgaaaattatattcttcacagggatatgtcattcaccgcaccctatattgttcctttatgctttatagggtgaccttctggattccttcttctggattccttcctgagtagtcttctgaaatcttatctacaaaattattcccagattagaaga

SEQ ID NO: 65661 - DNA, 383 bp, Oryza sativa
tacttgtacttctgccctcccttaatatagaatctgtcccaactatcagaatgctctgccttcacaccaaaacgctccatcaatctcaatgtcatttcaacgtaaggaatggagattagtttgtcaatgatttcgatctccacattcccaatggccaaaggagcagccatcagcaaggcactcaagtactgactgctgatggaaccagagagcttaacctgttgagtgtaattcagttaaatgctaattcaaaagaagacatcaagaccaaaaaggaatgcccaaatatacaaaaatatggtaccaaattcaaacaaatattgctcgcttgagcttggcaggaatatggcatattgattaagcatgaaacatttcaagttact

SEQ ID NO: 65662 - DNA, 372 bp, Oryza sativa
ctgcagcatgcaagcttgaagagttttttttgttctgctactacctagtagtcaataggaactcacatatttttgagtatgtttcttcttttctactaacaatggcggggatacgcaggataataggggaatactgtgctcaacatcgacatcttcgtcgagacatgaggagtgatcaacatgacgattacgaggcaagtgacgatgttctatgtaagatcaaatctgcactgccttatttcgagggaaactatgatcctcatgcttacattaattgggagctagcggttgatagtgaatttcaaaagcatgtcttgtctgataaacaaaaagatatgtgtgcctctagtgttttaattaaactcgcttcta

SEQ ID NO: 65663 - DNA, 381 bp, Oryza sativa
  unsure (1)..(381): unsure at all n locations
ctaatttttacacgataaaggttatgtgactgttaattcccctctttcttgatggatctttggttatatcatcctttcaggacacgtctataagaagtaataaaggaaatcgattaaacagtcgatcttaatgtcgtaaaagagaaaccggctacatagggaagcttattataaaggtcattgatatagggttttattccttcttcttctagtaaaaacatagattcgatcgatccgctgcacaaattaagaatacatcacatagctaaattttttagagctacgtacgtactaaccggattccaggatttaaaattgcggaatgaaatttcgtccgaaactattctggaccccctcttncccccccccccccacccaccc

SEQ ID NO: 65664 - DNA, 360 bp, Oryza sativa
agcttgagtgtgtgatttttgatctgctactacctagtagttaataggaactcacatatttttgtgtatgtttcttcttttctactaacaatggcagggatacgcaagataattggggatagctgtgctcaacatcgacatcttcgtcgagacatgaggagtgatcaacatgacgattacgaggtaagtgacgatgttctaggtaagatcaaatctgcactgccttatttcgagggaaactatgatcctcatgcttacattaattgggagctagcggttgatagtgaatttcaaaagcatgtcttgtctgagaaacaaaaggttatgtgtgcctctagtgttttaattaaacttgcttct

SEQ ID NO: 65665 - DNA, 378 bp, Oryza sativa
ctaattgttacacgataaaggataagtgactgttaattcccctttttcttgttggatctttggttatatcatcctttcaggacacgtctataagaagtaataaaggaaatcgattaaacagtcgatcttaatgtcgtaaaagagaaaccggctacatagggaagcttattataaaggtcattgatatagggttctattccttcttcttctagtaaaaacatagattcgatcgatccgctgcacaaattaagaatacatcacatagctaaattttttagagctacgtacgtactaaccggattccaggatttaaaattgcggaatgaaatttcgtccgaaactattctggaccccctctttccccaccgccaacaccca

SEQ ID NO: 65666 - DNA, 357 bp, Oryza sativa
agctttgatcgcttttttgaaacatttttttagaagtctcgattgtttttgagctgccaaggcaagtgaaattcattgatgttgcaacttgtgggaatggcgaaacagctatatgttccttcccatgaaaccaaagatttgtcatattaaggtccatccttcttaatataaatacggtaagatgtgacagaaaaaggagtttagtattgtttggggaccaagagctttcgtcaaaccatcagaatcccagttttataacttcaccataaaggaagcatatagtataaacgaaatggaaatacacatggatgttcatgtaaaatacgcctccactgacaaaacctgatgtatcagctc

SEQ ID NO: 65667 - DNA, 375 bp, Oryza sativa
gactctatctaaaatctagctctacagagtctgggaccgcttttatttgccttttgctgccaactgtctgtatcataatgcaagatgaaagcgctattttaatatgacccttatagcgcgcagttatcatatatgaggtaattgaagagcaaccattgtccttccacccggatgtctgatataattccttccccgagaggaaatatatcccctacttactgatacagaagcattgctaggagctacgctcacgataaagatgatgattcgcttattgtatatctggggattaaaatgcaagaatggctgctcgtacatgataggcctcatttacagattctggaataacatgccggggagtgttctcctatacat

SEQ ID NO: 65668 - DNA, 358 bp, Oryza sativa
agcttgcagatatgtcttattttattttaagctgctagaagccatagtatgtaataactattttgatggatgacatcatacaaacttctgagaacctagcaacgctactaatacctattcctatactcatggcaggcactcactcagaactccgttatactattctcctcatacctagccctcgtggcacgcaagcagctaaaagagccatactaatcaggcaaccctaagctattcccactcacaaaccaaagtaaactaccaagcgtaccactcattgaaccaatgactattgctgttcaagaacgatacagagtaaactaacagctattgtcgctcctcctacttgtagcacctc

SEQ ID NO: 65669 - DNA, 355 bp, Oryza sativa
aacttgatgataatattctatctatcaagccttttctttaaaagaaaactgaaaggggatgtgctctatgtaaagactaagatatcaacactgttagcagtaaaggttgcacaattctcgcaatgtctaacaaaatttctgtttgtgtataatccacagtgtatagacaaagctagcgcgagacaactgatctatttctgaattcattctcagtatctgttagtttaattacaaaccagtttacatactattgcgtttaacaatttttttcttctatggagaatgggaaaaaaaatgtgccaaatatggtctttatcaatgcagaccatgcatgattcatccgaattttcccagc

SEQ ID NO: 65670 - DNA, 325 bp, Oryza sativa
ctggggatcggcactcctaacaggctgatatggctgcgcgaactacgattgtgatggcccatcacgagacagctaccttgaatagtgctagacataccgccccatcaactagtgacggtgcacccccaacaggaatatttgtagagaaagctcaacgggatcttcttgtggtgcaggctgatcttgagccctagcgctaacttctgacagggagcctgactacgcataatggctaactcgagctattatgaggggactgcggtggcgaatcatctctctgtgactgcggaacacagatttgcccaaacagacaactttggctcgg

SEQ ID NO: 65671 - DNA, 380 bp, Oryza sativa
tcttgttgtgcacagctatttttcatgcttatctttggcaccaagtgctcgcgatattttgatgtatgagcagctgtctttgttccttcatgctcattttatccgcggtaatagattccatcaaaaaattgccaaaaaaataaaggaacgacgaatatagctgttcatatgcacgtgcacatgtgcggatctttcagcttaaatgctactcatttaacaaaatgtcaaggagaatagatagggatcttacagcttctaattgatatcttctaaagccatcacagggatctgaggactcagccggattcgatgatgatgatgatgatgatgatgggggcagaagtatcatccaagaatgcgagcgtaccgcatgtttctgt

SEQ ID NO: 65672 - DNA, 75 bp, Oryza sativa
tcatgcgcgcacccatggctgttttatatgatttcacgatttcgaacacgaatccgcccgatagggacatgctaa

SEQ ID NO: 65673 - DNA, 368 bp, Oryza sativa
agcttgagctccagatctttgttattgcatctcaacctgcaattccttactcccaacaggtttgcatgcctccaccacctacgttcctcattgcccatcacgacaagctacctcaaattgtcctagacatactgccacatgagcttgggatggcgtagcgcaaacaggaagatttagatgaaatacgtacggggtcagctctgttagagtttgatcttgagctctagcgctaactcaggtcagggagcctacctaccggcaatggctagcttgagctataatcatgggatatgtgggggcttctcactcctcactgcatgtagggcacagggtatatgctcaagcaggtctgctttggcgcagtgatg

SEQ ID NO: 65674 - DNA, 386 bp, Oryza sativa
tgtgcgggttgtgggcttgtggctgcctgcactgcactgcggattgaatcgggaccagtgcgcgcgttgaaaacatgagacgtctaggtcacgaggccaagaggcgccccagcacgacaaatcatcagcgattcgtgaacagcaaacaaacgtaacaccttaacacgtcatgcagtttgccgacgaatttgagcatgcatacgcatacgcttcactgctggtccatagcatagagatcattctttctcctgtgctggtcaggcacagctgtaataacggatgatagttccagcgcaagaaagatactaatgccgcgggcgataggagtacgtacggtgctacatacgggtgtagaactagcgtgtttctcgtgtcgagctcaccaa

SEQ ID NO: 65675 - DNA, 364 bp, Oryza sativa
agcttgtcgaattttgagtctgttatttgtgtatccctagactctttgggtagttgagaaacaactgaacatagagtcaagaattgtagcttcttgtcatcgagtagccatcacttgagtgaagatacgtgttgaacatgtccgagtagaaatcttgaatattggaacaccacttgttgtagtaaaataacacggcatcatatttgatgacgcataccaagatgtcgaggctcttgaagacgtcgtagttggtgaagtagcaaagcttacaaagtagagacaatagagtctgccggtgccgaagataataaagatgaagtcgctccaccatggtgacaaagttgaatagtcgtgatgaagtgaa

SEQ ID NO: 65676 - DNA, 388 bp, Oryza sativa
  unsure (1)..(388): unsure at all n locations
nttcggtcacggaaaattgtgtagtaaatgggtacgaccgttcaacgtcatcgatacctctttgcacggggcaatcacactccgcgacaattcaggtaatatattcaaggtaaacagtcaacgcttaaagattttccttgagccaaatgaaactttagatgaagaagtggatgtcattgaattaattgattatgaactatgatgatttcatctaatgcatgcttaaaaccctgtatagttgtcatttttgtgcttagattaggttttaatgagcctagggaaaaattggcagctagctggacccactagggttcgtccgaacctgctggttcggctgaaccagggcggcgcccgatcagccccaattttgaacctcagtctcccccgc

SEQ ID NO: 65677 - DNA, 355 bp, Oryza sativa
  unsure (1)..(355): unsure at all n locations
catgcaagctcgcatagcatggaactattcntgattataattaaccaacaaagcttacaggcacactgaaaattaatcaagcttattatctcctgtaaacccctacagctacaaactactggtctaaacaaactatgggaggagaatcttaaggttcacatacgctaccaattctctcactagaaccagctggattccgagtactacgccagaggtagctgaatggcgcctacgtaaaccacgaggacacctattgtccgttgaagatataacagatactgaaatcctgtgcctccggaacgggtatgtaacattaatagcaatgtcgtcttatcatgaaaaaattttccgttat

SEQ ID NO: 65678 - DNA, 384 bp, Oryza sativa
acatgccaatctgcgacccataacattgactggttctttactatttcaccacaacatcacggatctggcgatcaatacttgcatgtatgatcatcccagccgattcactttactcccgataatgcgtattccgaaaaccacatcgcacatgtgcacagcagcattcactggaatatagtttacaaaaccactggatgtcggaacgaagctcattttctgtgtgatgatcgcaatataacgacagcctttaaaagaaatggacatgtcctagtagtactattttggttaaacatgtctatcatttcactgatgcgtaattatgagtattattctagcaatcaggacacaggtaaatcttacacttcatcaggctcccgaacatca

SEQ ID NO: 65679 - DNA, 362 bp, Oryza sativa
  unsure (1)..(362): unsure at all n locations
agcttgactnggtgtgaggaggctggtttatcgatgtctgccctgctaaaccaagggaaggggcttctttgacatatacccatggacaattcaaggcatagtgtccttgctctctgcaatcgtgacaaaaggggacatcctcttctggcattggaagctcattgacctgngtggcaaatgctcgatcaaacacatactgattttggtcttgacttccaactaatggtagctgtgaactaagcagcatgcttggaatggaccaagggtgtgccctggttaactctcttgaggccagtggtagattgagttgaaaacttgagttacttgaggcatacccgctgacattctttcctttttctctg

SEQ ID NO: 65680 - DNA, 380 bp, Oryza sativa
tctcttactgaagaggggaaagattgagcaagatatgagtacaaccacagtactcagcaagccacaccggcagatgcatgattaatgcaagggggtacaaggggtaataatataggggttaagttttgcagaaagcagcatttaaaagtcacttagttgcccaaagccattttataaagacgatcctagagctacacagtattattaaacaaggccgtgaaccctcacgaacctgccttaacccaaggcctacgatgattcagaccgaactggcaacccgaccctgggtcccagctcgtcccaagccaacccaggccaaccattccacatattagttgttgagcaaattttaagaattaaaacactgacttgggtacatt

SEQ ID NO: 65681 - DNA, 350 bp, Oryza sativa
gagctttggactttcttaaaaatttttacgtttttatactcagattaccagtgtgtgtggatatattgatcagatttcggtagagctgatatttcctcaccgaggattgctcataaaggcaaatacttatcaaaattgttgaaacaaacacacctacctactgttgccacttacgcttgtggacggccacgctggcatatagctggacagcctctaacttgcatcggataaccttaaactacaaccttatcgaacatgtgctgcgaactatacactaacatcttgagctagttgaatcgaagcttggcgcttttatcactgagcgcccattgctagctcagggccttcat

SEQ ID NO: 65682 - DNA, 363 bp, Oryza sativa
agcttgtattgcagtttttgtttttgtgctgcacgggtacctgggcatgaaggattttttgctgtcagcacctgctgatggaaatttgtttgtgtatgacaaagtaagcccaagcccaaaacttattctagaatgttattgctaaggatcatacttaattaagaagagtttgaactgattaattttcttttacatgaccagaccaaggatgtaaatactgattggacatttccaactgtagaggatcaaagtgagatgaatatttcatatgcaaagtctagtaagggatcttacgtatctttatatatttctactaaaaatatgcatttacatgtcactgacactctatatattttactgaaa

SEQ ID NO: 65683 - DNA, 398 bp, Oryza sativa
ggacctatcaatactcacttggcgtggcacgtggagctttgtgtggaagattctgtagccaaagctcgaggatggagaagccttcactggctcttgggggcaaaggagacgatgatcgtggcagccagagcttgaggtaaatgcggaaggaccgcggtgctcgcgggtgggagagatgacatgaccaataccggatccagccactactgcgttgggggcggtcaaatccagtgtccccccgacctcctgacctcgaggaggctggatatggcacccctgtggctcgatgaaagaggtggtggcggcggtggcaaaccgagcttgtatgtggagaggttgccgccggcgcttgggggcggccgaagctcaatgtggatgtggtggcgatgctcgtgagt

SEQ ID NO: 65684 - DNA, 361 bp, Oryza sativa
agcttaagcttgcttaattaatttttcgctaatgtaattcaggctcaggccttatagatgtttcatgggggataagatatgcgggtgtacatttatggggatgagagtacgtgtatttctgcctcatcggatggcatattatatgaatatgccaaatggcatatttacaaacgaaaaataatttgtgaataaaacttttatatatgtgttcttagcgagcaaaaagcaaaggctgaaaaataaacttcgataaaaaaaaccccccaaaatcagctccaaatttaacattgaaaattcaaattttggctgataagcatatgaatatgctaaacgatggggacctttatgtctgctctggaaa

SEQ ID NO: 65685 - DNA, 379 bp, Oryza sativa
  unsure (1)..(379): unsure at all n locations
ntggaagttgacgcagtgatatatgacatgatttgtcatgattgaatcatgcttggaatctaatttactcacacaaacttaggatgaagcgataacagcatttagcacagtgataggagcagctgatcttggttctctctgtgtctgtctctgcttttgagtttcagtagcctataaagttggaacttatttttccctattcattctctaatattattttttctgtgcccttctcaaatatgatccatttttcttgattgtgcagggaagatctttcatccgggagggaggacatactgttagtttatgttgttctggcgttatggacttatggtaatgctattgctattcatgcttagttctattatcacctttcaca

SEQ ID NO: 65686 - DNA, 293 bp, Oryza sativa
gcaatcccaccacccctattcctccttcgatagcacccacactgacctagaaatctgcttgactgtttagatggggaggactatatcgtttataatcattctaccaagtcccgaaccagagagtccacttaaccccagaaacatgagaaacaatctgtcacttgccccatttcatcaacgaaacctctattctgggaactttgatgaaaagatacttgctggagtataacacacatcgtctttgctcgaaaggtctacgcggctattacaacgcactgcttgtcctgacccaa

SEQ ID NO: 65687 - DNA, 353 bp, Oryza sativa
agcttctgccgcggtctcattctagttaccaacggggaggagggcatgtctgagacattgctgccatcatcgccaagctgctgccgctgctgagctcaacagatccggcggccttgatctgtcacatccaacttccccaccggctctggatctagattacagagagagagagagagagggagagcccgaacaaaaaaaaagagttagggaggaaagtctttccccatagagaaaacgatgagcattatgtgctaaaccatcccaagcctccgggtgatcggatctgccggcagggagatcgtggttgccggatcatgcgggcacgacctccccttcaccagaacctgcctcgc

SEQ ID NO: 65688 - DNA, 373 bp, Oryza sativa
  unsure (1)..(373): unsure at all n locations
tatntgcatcttaaagtgaattcaaccaggactgagaaaagaataatgtttgctccaacatagatggcaacatgtcatatagtacagaaacatgcttcacatgatagtctagttagggttatagtaaaacatatctacctagattaaagatgcaattttcaagtatcacagcttaagatgcagctaaaggggaaaggcatccagccatccagtcagttatcttaccaagtgctatccacatgtgttgacttgatgaccaaatcaatatacatttcgttggcacaacatgcctcttcttagggcaggtatatacttatacggcagaacgaatgctaagactagaaccaatgatgttcagacttcattggcacct

SEQ ID NO: 65689 - DNA, 357 bp, Oryza sativa
agctttaacacgggttttaagatattacgtgcatatgagcaatagatcaagtattaatgatgctattattttaagataatagaatagaatcccggtctttgctcatagagctaattatgtaaaaaaattccagacacaatcacacctcaaaagaatacataaagacataagggacacattcaaactgacatagccacacaccggcactaacaccaattgaaaaaaaataaagtacaaacttattgaatattgtttgtgaacttccaaccaaaatttgtgaaaagttgcataaacgttgactccagtttgcaatgtgcaacttttattaacttagggtgttcattacatgatcagagc

SEQ ID NO: 65690 - DNA, 353 bp, Oryza sativa
accttgaacttttatccatttttttcttcttatagtcccgcaggagctgagtctactaatcatagacgcactagttccctttgtcttcaacatgtgatcagaccaccagtgcctctagtattatgagaaaagtgttcgaaaaacgtccattataggaatcctgaagactttaaaatatgctttacatatactgctctgcacattaccgtaaaatcaaatataatgaggtgcgcttgcttagctgtgaacattacatacatctatattgctagctaggtgtggaatatgatacatatgactttgactttacaaatggaactacatataacggtgattgccactacgctttctca

SEQ ID NO: 65691 - DNA, 375 bp, Oryza sativa
  unsure (1)..(375): unsure at all n locations
tgtcaacttgaccatatcttagacatctttccttcttcaaagatccactagcccaattgataggaaccaggacaatgaatgcccgcacaccantcggcacaaatatttttaacctgcatagcaagagaactatgcagtgagcataatacaccgaatatgttctgacatccaatccacatcatatagtcacatttatcagttgaattcaaccttttcggaaactcttaagacaaaaaaaaagaccaattgcgaaacacgaacagcatgctcacccaagaagatatatgccgacatataccgcggagtcgaggcctgcgtgctcaatcaactctggctcaggcatttgcagcgctgcaggcattcaattcacgaagc

SEQ ID NO: 65692 - DNA, 352 bp, Oryza sativa
agcttgcccgtttgcacgctttttatcacacggagaggggggcatctgtatgcacgcggagcggagactttccaaaggtttcgctagatccgacagtaaagactcttgggtgcgcgtctgtacaaccaaattgtcagcataggcctcaacattgcgtactatctggctgcccaaaaaagttcgcgtcatacgttgaaaagagagaccggcgttatttaaccccaaaggcgatgacgaataacaataagttcctatggaggcaatgaatgcagttttttcctcatcctccctagccatgcgaatctgacgatcacccgaggatgcatcttcaatacacaaaaggctgctcccc

SEQ ID NO: 65693 - DNA, 368 bp, Oryza sativa
cgggctgcggatctataacaaggactaggcaaatgtggaagctagtggagcttgtgctacggatcttgcagtcacgtacatagcaggctcctcaatgctctcactgccttgagcaccgctttcaactgccacagcggatcttggttgagagcttttgatgcacgtgatctcctctttccgtttatcctaaaatcggagcgaattataaccgaattgaaagaggaaatcgagaggaaaataataagagaagagtgaggaatcgatttttgcaatcaattggaaaataaacatatcgacgtggtggcttcgctagggtttgggcggtttggcccggcggcggcaggaggcgtgctcggcgcacatgcaac

SEQ ID NO: 65694 - DNA, 368 bp, Oryza sativa
agctttgttgagcctaaaaccttttaagctattaaaaactttcagtcctcgcagactaagtagaaaaatcgaacaaggcaatgataaaccaagtaagcaaattgaattgataaaaaatcacactccattattatgataatagcccccgactgacaacttcaagaagaaaacttgatgttgacagtcaagatagggaagtacaatgataaacttaagcgtagaaacgacgaagatgttcaatgttccaagagttgtcgacgagagtaccatcttctcgcttgagtcgataggaacctggccgggtgacttcagagatgataaatggcccctcccataaaggagataacttgtgccgatcccgtgtagtt

SEQ ID NO: 65695 - DNA, 388 bp, Oryza sativa
tgaacgacatactaatggtttaatcttgacattatatagataaaataaacatataaaatatctagtgcattttatcatatcttcattaaggtcacctagcttatcttattgagccaagtaagccggcctgggcccgctgtggctccaccactgtataacacctaaaaagatttatcaacaaatttaaatgctatttatttataactaaatgtgtactcgataacgcatcaattctctttattcttgaattcattcaaaactgagctgtttactcttgaattatatataattaacatttttttgcgatcgaacaatttgaactaattaaggatcttggtaatgtatccatttttaaatactccaatcactatacatttttgtactttga

SEQ ID NO: 65696 - DNA, 358 bp, Oryza sativa
tagaatctactctacacgcctgcaagcttgctagctaataaaagatttatttttttttaaaaacaccggctgtctgatgtagaaccagggccaatcatcatgcactcaggcatacacaaatcgaggcaacatccctaatgctcacctttagacactgctttgtacaaagcggagacaaatactgaatctgaccacacactgtgcattcgataatcatcacgcactataaacccaattatgttgtactcgagaacactacattgcataggaactacattgtgtgctagccagagcccatacaggctcttattagctgcaggctcactatacgagggtacctaatagtatctgaccaatt

SEQ ID NO: 65697 - DNA, 404 bp, Oryza sativa
  unsure (1)..(404): unsure at all n locations
acactactagaaactcaagcttatccctaagtgaccgagtttaatgaggacgctcttgtcagtttatctatcaatnaggaatagtttggtagtttccttttatctttaggaaagtgtgtttagtgttcgataaggactttatattttccttttatctttaggttagttcctttcttgtccgacaaggacttgtatcaacccatgggtataaatatgtaaaccggggtctatgtaatcaatctctacgatcaatacaattcggtgcatcgccaccttttaccttttgtactttattttatcgtctagcgggacttggcacctgacgcggagctgcaccggtgttcgatctccggcgaaggggtaagtccaatgttccgtcggcccatgcaattgtatcgtctacg

SEQ ID NO: 65698 - DNA, 357 bp, Oryza sativa
agctttaaggaaaaacacacttctttgcattccaataggaagagaacttcaatcttctggtgccgggttattacttcaatcccttttctggcatcacttgttgtgaagatctgttcgttgctgaatgcggagtctgtatggtcgacagctttcctgctgacacttctgtctgaaaaaacccaaccgaacaaaaactctttgtggacttgtttatgactaacagttgacaggaattataatataaaatacacagtttatattagtgaggataaattttgattgagagttactcccgcttgttataaatatttgtcgtttttctcacctacttaatttttctaaagaagagtttaagta

SEQ ID NO: 65699 - DNA, 373 bp, Oryza sativa
tctttatagctattttgctatatcactcatcatattttacaaagcagttggtatatcacccggatcatgttatttggaggattcacaccgcatatgctgtatattgatatcaagtcacttggttgattacgattatcaaaaccactcggttggttggattatttattccttgactatatgcttggtttgttcaattaaccacattgtcgggggctacacctattaggtgcatctagtcggtgcacctgactttattttccagccctccacagtcttcagatttggtaaaagtactcgggagaccatgacaaagatgattgaagcactcggctttggagtaatctggttcgagagaagattatcttttcgactg

SEQ ID NO: 65700 - DNA, 274 bp, Oryza sativa
agcttctcccgtgcccggcgctttatgtccttcgactcgaatgcgcccaagccccactgccacaacctcaatgttgcaacggcaaaaggtgcccggaggtagggatgcaagtggatagtcccgctacctatataaaaacccgcttgttaggtcatttcccatatggtagtacaaaatttagaagaaaaactaaactagaagtgagataagcggggtaaaaaacccgtttgcccaccccgcttgcatccctagccggaggaggaggggtgtggag

SEQ ID NO: 65701 - DNA, 382 bp, Oryza sativa
tatggtgttgatgcttcgctgcttgctgcctcatatcccctctctccccatgccatggtggcaatcgaggaggccatagggggagtgaggaggcccaggtgagaagctcctcgtcgccttgccgaccaccgctttcaccttcctgtcgaggagctagtaagctcgagctcatcggccactactattgatgatgtccatgttgagataaataggaaaagtagagaaagggaagagatggaagaagggatgaatgttccactgacacgtggggctattgtaatttttttatttattttggtaggagtgccacgttgatgccacattagctaaaaccggacataataatgttttgggatctcaagtgcaccagtattgtaagctg

SEQ ID NO: 65702 - DNA, 365 bp, Oryza sativa
agctagctaagtagctagaccatgtatctttatggatagtagcgacttgaacaatccacaaccttaataaccatacccttttgttcaaccgcaacatggtcatccctcgcaacctaaaacatcattgacccaaggaaaacctaaacacacatgcatttagtgactatgtcattgtcttttaatttataaatcttccgataattttgttcttgttattcccctacaaacctacatataaatagatagatggcccacttgcaacatttcactgttgaactaaaagccacaagggacattatataggatttttgacatttggttgtcactctttagtgaactcctaagatcccaatatcacatctaag

SEQ ID NO: 65703 - DNA, 367 bp, Oryza sativa
gaagctcgtacaacgttatctcgttattaaaaaatcccagccggctgaggctggagcaagagcaccgccagcgccactgatggctccacaactcgaggtgggttgtatgaagcgacaacactgacagacatgaatggttcacccgctactagacaactcctggatcagacccgggacgaggcggtccctaatgttgcagtacatccagtcaccattcctgttaatcgaccaataggcacagagtgcgaaattatttggaggtagccccagctcgtactttgactcgagcggagcatgggagcatgactatggagaccactgttgtcccctaccataagagagaaaacttgcgccaacccagagtatt

SEQ ID NO: 65704 - DNA, 381 bp, Oryza sativa
ctgaaatactcaaatacaagctttatattctaatcgctagttataatgaaatcaagtcggaggcccaaacgtgatggcacaggctacacctactggaggacggataccggcgagtactttcgggtgacggaggccccgtcatcttctccatacagcatcagccacggtcaaaatttgaattttaaaatctgattttgaagttgatttttaaaattttaactttattttttacattgatatttaagttgctaagaactcatatataaaagtcttacttataaattattattattttactaatacactgaatgacgtattatctatatttggccaaacgacgatgggggcgaccaagatccgcgcaagaagagaaatgacgat

SEQ ID NO: 65705 - DNA, 361 bp, Oryza sativa
  unsure (1)..(361): unsure at all n locations
agctttgacaaaactctgcccttgttacctccgntgcatctagacgggtcgccacgtagttatcccaccaggcagaagcgggaccttgcaactggtgtgtagcaaaagcaactttctctcggtcgttgcattgcaataggttcagcttcttctcaatagcacggagccagtcattggcctccattgggttggtggtgcttgagaaagtgggtggctggatacgaagaaagtctaacagtttggacacgtgtgatggtggaggaccaaactgctggttctgttgcgcctgctgcaacatctgatggtaatgttgctgcatctgttgcatcatcattgtcatcatttgagtgactgttgggtt

SEQ ID NO: 65706 - DNA, 382 bp, Oryza sativa
  unsure (1)..(382): unsure at all n locations
ntgctgagcctaaaacccgcgatagctattaataaactttcagtcctcgtaaactaagtagaaaaaacgagcaaggcaatgatagaccgagtaagcaaattgaattgataaagatcatactccattattattatagtagccccccgactgacaacctcgagaaaaagcttgatgttgtcagtcaagacagggaaatacagagataaacttaggcgtagaaacgacgaagatgttcgatattccaagagttgtcaacaacgtttgagttgctaggaacctggccgagtgacttcggagattatgaatggcccttcccataaaggagataacttgtgccgatctcgtgtagttggaattttcctcanaaccaggtcgccgacta

SEQ ID NO: 65707 - DNA, 351 bp, Oryza sativa
agcttgagcaaaattatattatattcatctcaaggaagagataatatcgaactctaataccggatcatcaccacatcaatcaagcatgtgctttaatttgcgccaaaaaagttccttcaaatatatggacaccgtatcttctgtgcgttcaaatagcgctgcatatatatatacctgtctgaactgaagaaagtttttatccaactggtcataaaatgtgcaatatttcgtctacatcatactagtttgatgaaaaataaaggggcggatattatgtccggccgcatgcgatcccatatccaggatgtcattagattctaagaaactttctacagaaagcaacactacttt

SEQ ID NO: 65708 - DNA, 372 bp, Oryza sativa
tgctacaccggctgacatatgatatgcgtagactaaaatttctgaaccaccgatcaacttataattatctactaatctggccgatttgaacaaaactgaacggtatgcctatggaattcctggtgaaacttatccccgaacatgctcgaaagcaatgcccgtttgtacgatggtgatttctgaggtcatcatgaaaactatttcagaatttcttcaccgtcctccattataaagcagaaatgaaccctgtgtgcagccatttgggaaagctggtgcatatggaagtggaactacatttttttgtccgagattctgacgccgcgtattcttttcccccctcccactttgctgctgccggtgtaaccaaaaaat

SEQ ID NO: 65709 - DNA, 352 bp, Oryza sativa
agcttttcgggaattttttgaatgctgcagaaaaacaacactcttctgttcaagaaaataatactctttaacgaaaaagaaagcccaaaccttcctctttaggtgtcttctccctctcttactctccgcgagagagagagagagagagagagagagagagagagagattttgcttgaaagggaacttgctaaagagactagagcttacagaaaaggggggcttatagagagagaaggcatggaacttacagagaagccagggagctcttatgtcgagttgagaagaagctggcagtatcaccctgttgatgggaagaggaggaggaagaataaaaggctgctatatatacag

SEQ ID NO: 65710 - DNA, 373 bp, Oryza sativa
taacgtcaactccaggctctgctatatcatgtcttcaaacaggcccaatgattttgctcgggggtaactacagcgtcctcagcatctccctgctcgagggatacgtacgtgtgactggccagaccgtatactcctcccagtgccataacaatagccagggaatcatcgacctcactgccacaaactacatgttctcccacacgcaaaacaagttcaccgccgttggctgtgatgccatggcaatgataagaaacagcagcgatgttgtcggtaacaccaacagcacggtgatgagcagatacagcggggggtgcgtgtcgttctgcgcatcaaatggaagcatcatcagcggcgaatgctccggtgtgggctg

SEQ ID NO: 65711 - DNA, 358 bp, Oryza sativa
agcttgcaacatcataaaaatttctggttaagcagcgaaagaaaacataataagcacgccataaaaacactttgaatgaagtaatggacaagatcatatgcatgcctgataatcaattatcagtatctcagcggcatttcacagaaggcattccacagaacgcttgttatgcttaaactatgcaaccccaaaaagtgtgatgcatggaactatgaaagcacctcgccctgctatcgagtgttgacaatctgacatgctgttaagcaaaaatgtatcaagaacttctgcgttaaaaaaacataattagcttgaatctttgagctattgctgatttttgatgtattcaagaactcctgca

SEQ ID NO: 65712 - DNA, 381 bp, Oryza sativa
  unsure (1)..(381): unsure at all n locations
ccccggatcttaagcacctgcagcatgcactgccggttaaactttttcttttgtggcgntcccactaagaatttgtcaaccttgtacctggaatatatcatgagtaaggtcatcctcaaacaactgaaatatccccagccacacttggttttttactgaaccaagacacactgcttgaacaagaagggatcgatcaatagctcaatttgatgttagccatgttatgtcaatagcaccaaactgtacatttagcaacaatggaagaggatagcactttaaatataccttatgagacgagataacagctgtgcatcatttacaggattcttcttgtgaaatggagattaagacctcacgagactgcataataatgtattatat

SEQ ID NO: 65713 - DNA, 374 bp, Oryza sativa
tgcatgccggacagcttattgttgaacgagtgatctttgaaaagcgagacttcgccccctgacgcactcactacaggggggactaacgactccccgttataaacgatgttccatacactatatatatatatgtatatacagagataatgatatctgcataaatatacctgtaatatcaatacatatattgctatcgaatgtgaacttacacatttagtcatggaaacaatccttggtgcaagactagtatagcttcactaacctctcatcaaaagtggtctttgctgcacagttaacgataacatccacttcttccgcgatctctctggctaactcacgagcaaagccaatgttggcttccctgacattaccaa

SEQ ID NO: 65714 - DNA, 355 bp, Oryza sativa
aagcttcggatgttcatgaatttttccgaccttaacacggcctgtcctaaggatccataccccctgcctctcataaatcatatcgacgactcctctgtggggtgcgaccttttgtgttttctatatgcgtactctggttaccatcagattcacatggctagggaggatgatgaaaaaactgcgttcattaccccggcctgaacctattgagatacattaatgcccttcagtgtaatgaatgcacgtcctacttttcagcgtactactcctatttctttgagtagacaaatacgacataatgctgttgcttgtgtctatgactaggttataaaaacgctcgaccataacaccttac

SEQ ID NO: 65715 - DNA, 367 bp, Oryza sativa
tcggatgtgcatcgactacaccgaccttaacaatgcatgtcctaaggacccttaccccctgcctcgcataaatcagattgtcgacttcacagcggggtgcgaccttttgtgttttctagatgcatactctgggtaccatcagattctcatggctagggaggatgaggaaaaaactgcattcattacccccataagaacttattgttatacgacaatgcccttcgggttaaaaaatgcatgtcctacttttcaacgtactactcgaatttctttgggtagccaaatatgacgtaatgttgaggcttatgtcgatgacttggatgtaaagacgcgcaaccaagagaccttactctcggatctagcggaa

SEQ ID NO: 65716 - DNA, 347 bp, Oryza sativa
cctgcagcatgcaaccatcttagaaactgggactttcttttaacccagcactaactcatcaaaatatttcttgcttgaagcaggcctaaacccactgttaagtcatacgccaaaacaagatcaactggggtactcgctgacctataccatatactaacacacactactagagctgcaaagaaaacaccaacgatcctactggatagtacccatgtaatattgcccatacctaactgttcgtatatacactgaggaggacgactctctaatggaatacgccatgtgcaaagaccactgctccccctcattatcatgagaatctattcccaagggaacaaaaagataaa

SEQ ID NO: 65717 - DNA, 386 bp, Oryza sativa
tgtaagcttttgagattaatagaaactggttactatttgatttcgaccacaagaaactcttatttggcattctgacctgttgatacttgcaagaagagcttcagtcttcgaaaccgctgcgcgaaactcattatccggaatggccccacggtgttgatgtctagtgctacatcatacctgcaagtttcaatacttttattgctatggaatgtgaacttacacatttagtaatggaaacaatccttggtgcaagactagtatagcttcacgaacctctcatcaaaagtggtatttgctgcagagtttacgataacatccacttcttccgcgatctctttggctaactcaggagcaatgccaatgttggcttccctgacattaccaac

SEQ ID NO: 65718 - DNA, 363 bp, Oryza sativa
agcttggccacccatatcttttatgtttttagtttgcagcagagatctggagataccatgggcccacggcaatgagttatcctaggctgtccttcaccgtcgtcacaatcccaactctgggatctgcccacagccgcctcagaaaagtaaattgcagtttaagtttccatgtgagtagcaagtcccttaatctgagttttttttttctaacttggacggctggacaggttgtttctgtacttctgcttcagcatgttccaccctgctgcatgccttaccaagatttatggacgtctggaactcagattaagctcttgttaacaccttaatcacaccgacacggtaaatttattatgcgtcttc

SEQ ID NO: 65719 - DNA, 380 bp, Oryza sativa
tcgctgcccttgcttgcaaccagcggccgccatctaatggcatcgttcacgcgtgctccaaaagccgcccacctcagttggagccgggaaaagttggcaaaaagccaataaaaaagacgatgcgcattgcccggattcccacttcgatcccccctcaccttcgtcttcctctcgacctctccgctgtctctccgatgggctcagcttcaggtgagcgagtacacctcgtcgtctcttgtgcgtcagcttcgtgttccagtgtacgtgctgacgacatgtgcgtgtgatcaacgatcgaatttgaagagcatgatgtcagggagcacctgctggacgtggacagcgtccgggaagaaggggcggcggcggcggcggggccg

SEQ ID NO: 65720 - DNA, 361 bp, Oryza sativa
agcttataagaaatacatctttttaatgattgtaaaagatagatttggggccggtccattcagtgactctgggcccacttttgccaacatatgtatcacccttcttggttaaagaggaggttgaaacatataaaatctacaatgactaaaaactcttccagatgactaaaaactcttctagaaagaaccttgaacgacttatgtcctgataagcaaaggtctttctcggacctagccctgtcctaggacccgggctcacttttgcccttgtaagtcctacaatgaggagcgtggagaactacaagatatatatcttcagaatatgaggagaggtctgcctcggacctggccctatctcagg

SEQ ID NO: 65721 - DNA, 379 bp, Oryza sativa
ttagacaatttaaaaacatggttgggaaaatcatgattttcaaaacctggtggttttttgacataaacttcttcctgtataaaacgatttagaaaagcactttttacatctatttgatataatttaaaaccttttgaagcagcaaaagccaacaaaagtctaattgcctcaattctagcaacaggagcaaaagtttcattaaaatccaaaccctccacctgggtaaaactttgagcaacaagtctagctttatttctcacaatcaaaccatcctcattttgtttatttttgaaaacccacttggttccaataatattatgtccagaaggtggttcaactaaagtccaaactatgtttctcttgaaattttcaagttctt

SEQ ID NO: 65722 - DNA, 364 bp, Oryza sativa
agcttgcaatttccacccgatttttctccatccaagcatgaatgaactgtatggtcggttcaggttgcgttatcggcccgccacttgaagtaactctgactgtgtcaatccattgtacgaattgacatttccttacatcctcctatgtacatccattttgggatagttaagttaatgatagtactgaggagtgatgaaaagaatagttgtaattaccacgaaatcatcgtcgacaatatttggacacacgaaacacctttgtcctcgagttcggtgccttacggaccttatgacctgacaacggtcaccacaacgacactccggacgctcacgccacgtggggagtcctaggggatttacgtgc

SEQ ID NO: 65723 - DNA, 362 bp, Oryza sativa
agcttctgataaatttgatattttttgctaacccatcactaactcttcgatatatttcttgctgaaagtatccctgatcccactgataacgagtaggcccaaacaattcaattggggtagttgctgacccataccacatagttccggcaactacgaaagctgcaaaaaaaacagcagcgatactactggaaagtacagtttcaatattgcccatacgtaatcctttgtatagacgttgaggtggacggacactaaaatggaataggcccgctaatatgcccaatgtacccgcagcaatatgatgagaagctattccccccggaacaaaaggatcaaaaccttctgcaccccacgccggattt

SEQ ID NO: 65724 - DNA, 377 bp, Oryza sativa
gtggcttcgactgctgacatacaatcatccctttccatgtcttcggatacaacccagaaaggcttgcctgttcttagtgcataaacccttgtgatcatttcgcgaactttgtgtaactcttccacttctagtaaaaaatctggtgttcttgcccgataataagcactatcaggttggtgaagcataatcctcgcgtgggggaatgctatacgcttggtgggttctcctccaagcagaatgaaggacgccatggacgcggctattccgaggcatattgtatatatatctggtgtcaccgtctgcatcgtatcaaaaatcgccattcctgagattaaccacccgccgggggagtttataaacaaaaaaatatcgctaat

SEQ ID NO: 65725 - DNA, 361 bp, Oryza sativa
agctttagcgaagttcaactttgttcactgccggtgggagcttacgcttgtgacaacattgaataagctcagttgcatatatgaagttttccgagatacttctccccgtcaagaaacttgtttggtcgccgtcaattagcatagggagaaacttttgcagccgatttgtaaacggcttggcaatgatcttaacagagcaattttgcaaggaaatgggtctatagccgtccggcgtatttgttttgccgggtttagggatcagcacaatctacactctattaatcctccccaggtcgtctgtttttgcatgaaaactgtgcatcatctgcattaccgtgccagagatcgacgcccaagctgg

SEQ ID NO: 65726 - DNA, 380 bp, Oryza sativa
tgggattgcaactaggttggagagatgctacatatccaaaacaaccgagaagaggagagcgatataaggcgaaagaaaaccgatctgaagcgaagaaagagatctagccgatgggtacttacctctgcgtattcggtcgatggcgcggcggatggattggcggaggtcgacatcgttgcaggcggagatctggtcggagatgaagtcgcctggggatcgccttgtgcgtcggagaaatcgccggagagagaagaagcagggttgacttcggcggtgaaaacgggagaagacggtgtgaggtttctcgggggtaacgattagtatttaaagcaatggaataacggtcgggaaacagcaagagcggatttctctcggaatcg

SEQ ID NO: 65727 - DNA, 356 bp, Oryza sativa
  unsure (1)..(356): unsure at all n locations
agcttcccaagagttggtgtgttgggagcangaatatactgtctcgggcaatacagggcagaggacttgactggagaagggaaggaataacattactaagcttttctttttaagaagaccataaaaaaaagaaactcacgtttaagaattttggtataaaagaaacttcttataaaaagaaaattggctgaagaatcggcacgatgctgagattgatatcgatctccgaccttaactatggaaaaaacccaagttgttacattgatattgcgaaccactgggtctagtaccagggggtactaccccgggtggaccactcaggcgggatgatcctagcggccaaacttgattccaac

SEQ ID NO: 65728 - DNA, 370 bp, Oryza sativa
taagcatccatggctgtgctgttaggtcattttcctgtcaactaatcgctgcacaattaattcccagttgaatggaacagtatgccattttattttctctcactctttaatcaattattggtcatagaagagaagtacaaagtcaaattttcagccggcaagtaagaggtcggtcagttctgcttggcggccggaactttccttgaacaaaatttgaattttcaactttaaatttaaagttaatttgaggtttttatcatcgaaaattatttttcatcctttttttttatactagttaagaacacgcacgtatataaaagttttattcataaattatattccatttgcaaatatgctgtttggtttattt

SEQ ID NO: 65729 - DNA, 353 bp, Oryza sativa
agcttcgacgatggttttgtcttctttcacccatcgcgtagctctgcgataaagtattcaacgggtggtgcaaccagctgatccctcctgtgagccaagaagctgacatgatgccacagtttacctctgaaaatgacgcaggcggccatcaaaggcttgacgagatcatactccgctccctgaatttaatttaatttaatccgcgaacaacataagcacacatctacgtataagtaaagagcgaagaaagtgatgcacacacatataagctgcttaccggatgattggcattgtaatggtgaagagcggcgcgagctttccaaatggaatagccgtcgcgcaccctgcaatta

SEQ ID NO: 65730 - DNA, 370 bp, Oryza sativa
tgagacaccaactctagaggattaaagtccacttatgagcatgaaagaggctctttcaaagttgctcagggttcatgctcacataaagaatcctcatacgtccggccgattagtttcacttccttgtgccagaaccgtaaccggcttaggggccctatctctatcatgtttagaaggttggttgtggatgcttttatttatcataaatattgcaaatcttgcatgtgtctgtggcactaatcttgcagcgagatgtctccatggccgagcttgtgaccataaacaaagcaatgccgggagatatcccggattatcttggtaacttttctttccaatgaaagtaagaatcagtttttaggatatgatgcac

SEQ ID NO: 65731 - DNA, 356 bp, Oryza sativa
agctacgcctgcatatctattttgtttcacttttcttcttcaccattgtccaaagtctcctgcatattggacattttatctgtcagcataaccttctgtgccttcaattgttcacattcctcaataacagaacgatgtagctcctccaggtttcctctttcgaacttagccccatcaagagaacttttaagtttgagaacttcgtcttgaaggctcattattttctgaacttgaagtttcagaccagatatttcttcaatcatttgctgcttctcataatcattagctttaagcttcaattctagttcaccagaagatttccttaacttatctctcattggatttagcatcttcca

SEQ ID NO: 65732 - DNA, 356 bp, Oryza sativa
agcttattcctctcagtattcttccacaaagatgcacaaccggctcacttattactagcagccttaatcatttgagcattagaaaaatcattctcatcaaatcggttttctactgctagctcccaactaatgtatgcagcgggagcatactttccatcatagactggtaacttacatgcaacttgtgcaaaattatagtcatgtacctcatatgcatcacgtgaagaagtcgacatatctcgtcgaaggtgtagatgttgacgatgaacataaccatcttgtttccccttgcgcaatcctgccatggttagcggcgcacaagagacatacacacgaatatacacgctcctatcaac

SEQ ID NO: 65733 - DNA, 279 bp, Oryza sativa
tgaaaaaccatcactaggcacatatacctattgcgtttatgactctttctcaaatgaactgtagcacacgataaccaagagaatttttggaatttttaagcctttttgctcatatatatctcttttattccgggtatgtccctgtcgtcaatactgtttctagggattccgcacccattattttgctcacatcgaatacgtccttgacgttaagactgttttcaaggattccgtattcattttttcatattttttatgctctttttcacagtgagcaat

SEQ ID NO: 65734 - DNA, 367 bp, Oryza sativa
tagcttagcttagctttagctcaagctgacaatctgcttgctaattatgcagcagagcacaactgcacagggtgtcgtaagctaggttttataatggcgatttaagccttaaattttctcttaaaaaattgggagattaatctcagttcgtgcggcagttcagagcgattttataatcggcgctacattaattctcatggacttagtttaaacggttgacatatagtactcacgtacagctggtttgtgtgagtcatgtagctacaaaatgaacacaaaaaatgtttgaatgttttaaatgctgcactgttcctggcacgtaatataatcatgccacgacaaactttagaactggtgcaatttttat

SEQ ID NO: 65735 - DNA, 367 bp, Oryza sativa
agcttggaagactccttctcaacaccatgtagcttgacttcagtgcatccttcccaggcgcctgctcaactctgacctcgcccacctcctctcgaagttctacaggcagcaatgacggaaagagggaggagaattgatctttgtagccagagggaacaccatcgaggcaaaagtcttcatcactagagaattgaaggaggtccaaggtattggtggaaagagggcagggcaacattgtcctagagacacaactagatatcctaagttcacctatgtcttggtttactacggggaaggtaggaaaacaatagggagacgaatggttgaatggcgatgaagaaacaacatattcgaaggcacaataata

SEQ ID NO: 65736 - DNA, 388 bp, Oryza sativa
tcagattgagtgcttttattaactccatcctctgtctgtttatttgctgccttatcatcttgctggggagcagaagatgaaaacccaaacctttgaaaggttgaagttgagtacagcctcggctgattcagcagaggcaaggcctgagcgtagaaaaaagggaaaaattatccaacagtccggaagatgaaaaacaagaccaaacaagaataccctgagcaatgctacaaatacaatggatggtgtcagcttattatgcctgaaacacctaatgagccgatgaatcaacataacacgctgcttccagctttagattttaatagctagcttatgccaaaggctatcagaaatcgttatgtcatcagcaacacgttactaatgagaattg

SEQ ID NO: 65737 - DNA, 362 bp, Oryza sativa
agctttccctgacactggttcttttagaaaatcctctctatcctggcctatcatttgcttggtgtccttaaataaaccggaggaagatctgaccacacacgttcccttgaattcgatacccttgtaatactctgtaggggaagtgctacagcggtatatccgtgcgcttgcgaattttatctgtaatcgtaagaagtaccaacagctacatagttgtatactagcagatgtaaactaaaattgactttatactagaagtataggaattgattgcttttctatttcttcttccacatagtgtaggattgattaatgagagatatgagttctttgcttcgtgtcactctactcttataaatata

SEQ ID NO: 65738 - DNA, 389 bp, Oryza sativa
ggttgataaaaaaagatcacagaattgtaaattgttgaacaatattgacttctcagcatataactccaggcccagcgagaaaagaaaatcattcattagtagtagatactagtgccaactgaattcacggttgattcctttggagcattgtgcctaattcctactccctccgtcctaaaaaaaaagacaaaccctggttttcatgtccaacgttttgaccgtctgtcttatttgaaaaaattatgaaaaaaattaaaaagataagtcacatataaagtattaatcatgttttatcatctaacaataatgaaaatactaattataaaaaaatttcatataaaacggacagtcaaatgttggcacagaaacccagggtttgtctttttttg

SEQ ID NO: 65739 - DNA, 351 bp, Oryza sativa
agctttttattcggtcattctatatctatattatgattaatttatgatgattaatttatgtgtgcatgcgtacagtttgataagtgattttggtattcgggccttggccgtatttagttcctccaaaatttttttgacaccacagacacacatttaaagtattaaacatagactaataaaacaaattacagattccacctataaactgcgagacgaatttattaagcctaattaatctatcattagcaaatatttactgtagcaccacattgtcaaattatagcgtaattaggctttatttattcgtctcgcagttattcggaaaaatttgaaaatgagttgttattattt

SEQ ID NO: 65740 - DNA, 379 bp, Oryza sativa
ttggctcagggatcctcagtccgatccccctttctcgctaggcatggtccaacttttatactctaaggggataccacatgtgctgcgagtgctacctagggagaagggaaaatattctctatattcattacatgtcttgtgccttagcccagaagctatctgcacgtcggttactgcgcggggcccatcaaatcatgcaaggcgcccttgtcattcgccatttaatggatgagaacttccgggttctcgttcacaccagaaaatgggaacccgggttagttcagagtggttggaccagctctgacccgggtaagaggctgtgaagcccctcatcattatgatgcgacgggacgaagcacgccgctcgccgcgtgacaca

SEQ ID NO: 65741 - DNA, 361 bp, Oryza sativa
agcttccgctgttatctgatattattatattttgccaggtggcccttgtaactattaataattgtaatttcaaattattttgctatgtatctccatgcttaagatgaaagtgtgaatctagtgcacatcctgggaactagaattcacatgagtatgagttaaaaatatttgagatgttgttgatctttagtcattttgtcaagtctcctgaatgtgtaacacatttggtcgccgcctttgagtgatttgacggcacatctcaggctgaagttgactggcaggctaaagacccagcaatgtctccaatatttttctctctaggtgtcggatatttcattatgtttgtttgatgacttgaatt

SEQ ID NO: 65742 - DNA, 378 bp, Oryza sativa
tgtgaccttagccttgccggcatacaccatgaagtgtgcttatgcgctggcgtggtggcggtgtagcgcgggcgttaaaaggtttaaggcatctatgggtacagcgacatgcctctgcagagtgtatgaattgtgatatgtcactccctgtttcgggtagaaactacgaacgcggcaggaaaggaacctaacagaggttctaatacctgtagtgccttatatgcagtagattttataattacttaatatgagattttattatactgttttatgaacatgcataaaattccttgttggattatgggatttggagatatacgtattatgcaggtagattatgggcatatatttgttggattgctatagttggacttgttg

SEQ ID NO: 65743 - DNA, 362 bp, Oryza sativa
agcttgacgagggacttatgttctggtcatttttgcacatcaacctatcaaagcctgagatttaagtctatcttactctgttctgatggttggtctgaaggctgtgatctcaatctgaagctccctggccatgtcgaattctgcacctcctcataagcaatcggtggccagctgatgctgccttcatgaaaccttggtgctgtcctgatctgtgcttgctggcttgccttctgaatcactgagctctggtttactctcagggagtgcacaaaggcagcatgtgcctcatgaggcagccccatcatcatcctctgcgcatggtaggagcgttatgcggcgctccgctctcgcttgtgagcgtt

SEQ ID NO: 65744 - DNA, 320 bp, Oryza sativa
agctttgcatacccgtgacaatttctatgttctttccctctgagcatccgtccaaagcgcccggtccacaaagaccccgcacatctggcccaccaatgatacgcgcaccaaaagtccgaccgagggaggacagtcgcactttggcaccagagggttcctggcgagagcgaagcccttcctgactataaaagtcatagaggtccctagcactgtccgaaaaaagtcaaaacgacgtactgcaatagcctctttgggatcatctttggaaacgaaggtctttttactcgagaggggacgcccgacaacaatcctttcattaa

SEQ ID NO: 65745 - DNA, 375 bp, Oryza sativa
tgcctgcttcgcaccaggtttcgagtaaattgttacgctggttgagctgctttttggtcgcgttgtttgtacgaggaacattaccctgcttcgagaagttcacctaatcgttgtgtaattttctcatgtaaacgtccttaggatttcagtaatgagctgtgctcctataattatttactgtactcgacttaccttttcccatgtacactgatatcggcagtcagatgagaaaattgcatgctttgggcactatagttctacatttttactgctctctgatgaagcactaatagaggataaataatctcttgtgatcgtcgaggacctgctgaatgcgcatcgcattgctgcgaacctgcgatgtttggaacatgg

SEQ ID NO: 65746 - DNA, 370 bp, Oryza sativa
ctgagcagcggctttctgcactgaacattctaaatatattactttaaccaggcctatcatttgcttggtgttcttaaataaaccggaggaagatctgaccacacacgttcccttgaattcgatacccttgtaatactctgtaggggaagtgctacagcggtatatccgtgcgcttgcgaattttatctgtaatcgtaagaagtaccatcagctacatagttgtatactaccatatgtaaactaaaattgactttatactagaagtataggaattgattgcttttctatttcttcttccacatagtgtaggattgattaatgagagatatgaattctttgcttcgagtcactctactcttataaatatatt

SEQ ID NO: 65747 - DNA, 375 bp, Oryza sativa
  unsure (1)..(375): unsure at all n locations
ccgaganncnacanagacgcactgcagcatgctatctcggacaaaattanttttctttttgtccagaaccacgggcagaccgcacgattgcttcgccaactcacaccttttctcttgggtttgccaagcttaccaggaggggaaatcatctccaccatatcctgtgcgctacctttaacacgcctgagattaattaagcccggacaaaccaaataaatttcggattccagctaatatctgcgacacaacctcagatttcccggctcaaatactatgatttggagtcccatctctctaatacaaggctataaatagcatccctttggcgttctctttagtttgtcccaactcccgagccttatcgttccccgtagc

SEQ ID NO: 65748 - DNA, 371 bp, Oryza sativa
tgtaggtataccttatcgtatgtgttacacaaatttatgctgttctcattcgaaggttggttatctgttgcatgaactgcagaaaccttccaagatgaccaagcatgtaacatttgatcgttttgctacctaggatgcatgtttgatgataaatatgatagcaagttccttgatcaagaaaagaaaaacaacaagaagaaagcaagttggggggccatgcatcaactgttgtggtgaaatgatgttcctgtatttttctccccattatctgataagtaaagagtataataaaaaaaaattgtgatggaagatttgacaatctgtctgaaatcttggtgtgaaatattcatgggctccaaattcaaccttgg

SEQ ID NO: 65749 - DNA, 313 bp, Oryza sativa
cggatagggtagttgctgactgccataaaaaaaagatgatctccatagagactgctggggaccacaccagataatctgcaccggtcaaagccagctaaacggaacgcgaggataatatcttaagggtttgcattgtcgctgagcaatatcctccttcttgatcacctaaacacaagaaaaacagtggaattggtcacttttttgacctacggcgcaccataagtccatcttcagctgaatcgtaaagccaaacccatgattcactgcccacaaatataaagcctcgcattcagattagggtcaagagcataca

SEQ ID NO: 65750 - DNA, 350 bp, Oryza sativa
tgtgacccgcgtatagcaaattgaggcataagtctctgcgttggcattgcgaattgcgcgtacggtactaggtagtacgtaaatagggagagaacatacgcgtctctgaacaaagcaataaaggtgtactagccctgacatgtgaaacataaccatactaatgtggcctactgcgagccgaacccctgcccctatactctatgacgaaacaaactgaattgctaactcaataggctgtgtacgaagtgctttatctacaaattttcaacccttataacagcaaagtgtggatgatgaaaaaggatcatatctggtgaccacatattatgaagctactattgactatgtat

SEQ ID NO: 65751 - DNA, 355 bp, Oryza sativa
agctttgcctgcatagctattctgcttcgtttttcttcttcaccattgtccaaagtctcctgcatattggacattttatctgtcagcatagccttctgtgccttcaattcttcacattcctcagtaacagaacgatgtagctcctccagttttcctctttcgaacttagcctcatcaagagaacttttaagtttgagaacttcgtcttgaaggctcattattttctgaacttgaagtttcagaccagatatttcttcaatcatttgctgcttctcataatcattagctttaagcttcaattctagttcaccagaagatttccttaacttatcttcattggatttagcatcttcca

SEQ ID NO: 65752 - DNA, 350 bp, Oryza sativa
agctttaagaatgaaaggtttttctcctcaatggcgtagctggattgatttgattgtgagaggaggaagtgtatcagttaaggtcaatgatgacgttgggaacttctttcaaacaaaaaaaggcttgagaaaggggacccgttgtcaccaattctttttaatttagtcgctgatatgctagccattttgattcagagatcaaatgaacaaggaaacttccatggagtaattccacatctaattgataatgggctctcaattttgcaatacgctgatgacacaatccttttcatggaacataatctagaagaagccaaaaacctgaaattagtgctaagtgccttcgaaag

SEQ ID NO: 65753 - DNA, 363 bp, Oryza sativa
cggtaataaagattgttagattatcgaacaaagaattgagaagaaacttactagttggaaaggttaacatatgtttgctgggggggaagattggttttgattaattttgttctatcaagtttagctatgtttatgatatctttttttgaaattccaaagggagttcttcaaaaaaaatttattattatagatcacgtttcttttggcaaggtgatgatcataagaaaaaatattgactaacaagatgggatataatttatcaacccaaagaccaagagggtttaggtgttcataatttagagatccaaaataaatgtcttttgagtaaatggttgttcaacttaataaatgagcatggggttt

SEQ ID NO: 65754 - DNA, 364 bp, Oryza sativa
agctttgagctatatctgccatttccatattagttctttctggagaatgaggtactgacaatgccggtccacggggagcctcaattgatagcttagacttgggaggtgtaagctccgtcggtcgacttggacgaggagtcatcttcacaactatgtcttctttaggccattgtatgaacgtcttgcgcgcatcgcccaaagtcatgatttcatcatttgggggcacgggcagcggatagcctgaccaggtgtcctttactgtatcgatggacaccttggcatacccagctagcaggtctgcgccgtggaccttgtctgtaaccgagggcttaaaagccatgccctcagcgacttcaagagcgaa

SEQ ID NO: 65755 - DNA, 383 bp, Oryza sativa
cataagctcgagctcgagccaaggataagttgagctcgagcagctatcgtttctcaagcttcttttgacatgcctaactccccaaacaccctcctccaaaaaagaaacaagcacatccactcgagcttctcccattaccaccctcttgctggcgtcctggctcgtcgacgtgaccttcatcagtcgcccacaccctctatcgctccgtctcaatatgttttcggtggcaacaaaaaagccagccccgagtcccctatccctaaagaaaggggaaatctcttacacaaatagcatttttttcagtgccaaccaactaactccatccaagctctcttgccggtgcatccttcgatggccctccctctccccgtggcccgacctct

SEQ ID NO: 65756 - DNA, 384 bp, Oryza sativa
tgatgacccattcggcaatgcatcatgtgacttctttattgagaacaacttctcagatatggtacaagtagaagaccacgaccttgtggccctggaagtattggcgcaactttcagcatgtcatgaccactgcatatagcagtttccggacatgtggatatttggtcttgtcatcgtgaagtacttcactgacataataaactgggcgttgtattttgtcaccctcgacaatgatgacggtgctgatggagcaaggtgttgtggcaatatagaggaagagttcctcctttggctttggggcaacgagcacgggtggatttgcgaggtatcgcttaagtgcgccgaacacctcctcaacctcagatgtccactcgaacttgtcct

SEQ ID NO: 65757 - DNA, 365 bp, Oryza sativa
agcttggaaaggacatcaaattttctgagtgatgaacgtccaagtaaaaatgaacggttacatttgacaaatgtatcagttgttgagaaatggcgaatcagacaagtaccttcataaagcaattggtacacatctatcactcaaatacatcttccagaggcccaaatcagaaataccgcttgatgcatcctacacagacaatcaccaatcacaactgaaccactcatctgcttcggagcaaccatcccaaaaaagtaaaatattcgaaaatatgatttttgtctcgaactacaggcagtatgaggatatgacaaaaggctctccaactacatctggctgacagagtcgcgcgtaacctgaacaaa

SEQ ID NO: 65758 - DNA, 378 bp, Oryza sativa
taagtgcaagatactctccaggcttgatctgattgcaaaagagcaagaagcgcgaagaaaccggcacatttcgctatagcctatttgatgcatccagagtgtagaattcagctgaccagatgtccatgacaactgataagctatcatagtacccttaaaccagccattaatttgattcatggagaaaaacatgttactacagtgcaaggcttctttaaggtactgtcacatactccaaggcttatgatcatcaaaacatagaacatgacacaggacactgattgactaaaaacctgacagtaatatgctactacagaagcatttggacaaggcatcttgagcagcggcgactcaagcactagatcactgaactgatta

SEQ ID NO: 65759 - DNA, 363 bp, Oryza sativa
agcttgatttgcctgtagattttggggttattcccacatttcacattgcaaatttgaaaccgtatttgggagaagaagatgagcttaagtcgaggacgactccaatgcaagaaggggaggatgatgaggacatcaacaccatcgatacatccacgtccccacaagtacaacttcatgatcctattacccgcgctcgtgcacgtcaactcaactatcaggtgagttcattcttgaattcatgttcttcttgtttataccccggagatgcgtgcactcttgttttactcaggaacgatggggaggatccaaacggggagaggattcgcgcggggtggattcggactgcaggatagcgccaacatt

SEQ ID NO: 65760 - DNA, 339 bp, Oryza sativa
agagtcacctgaggcatgcgagctttaagactttatcacttttggattattctactcctcatatacctccaatcaacccactgcatgagaattgcccccttcttatgggcaatcactgcctcataggcatcctgctgtaaaaggtttcaaaaccgaggttcactggacaactgttgaaaattcgtgggatctttcttacgctctttatccacttcagtccacatgcgggtcctccctgcgactcttcgatgataattacgatctcttaagggatcattgacgaacaaacgcccttctttctaaacaggttgctgaacggtaaagtcctcttctaactga

SEQ ID NO: 65761 - DNA, 358 bp, Oryza sativa
agcttaattgtaaaatcttcgttttatggttatactttaatgcatgcttgttatattatagatgggttcatcttctttttattgcaacacatgacatgatatgctatatgtatgctaagctcttgaacattaaagaacataattcctatgcttgatgaaatcattgtcaaaagggggagaagagatgagtttttgagaagcaaggtgtatttttagagcatgttttttggttaaattgggaatttctttcttttaaaaagggggagaagttttcttggttcaattgggaatttctttcttttaaagtttacttttggatttttgagcacgatgtgcacgtttgtatgaagtgtgcttt

SEQ ID NO: 65762 - DNA, 376 bp, Oryza sativa
tgttcctattcttttgggccgaccatggcaatatgatagagaagttgttttcaatggtaggaccaatatatatatatatttatattcgatggtaaaagaattgttttgcattgtatgactcctgccgctgtcgacggggaatacccgtagaccggatatagagggtattggggtacgctggtatgaggatttacgtagtacgacatcaagcaaacaaaagacagggattataccggttcaggcctcttaataggtaatagccctaatccagttgatatgggattatatgacggaaatcacagattacaaagggaatagtggaactcgataataccgacgagatcgtagttgagttggttcgactagatcacccggt

SEQ ID NO: 65763 - DNA, 348 bp, Oryza sativa
atccctgaaggaatttcactctttctctagacattacaatggagattggaaccccaatcttctgtaggaagatgatcacttcaatccgtctactggcatcgcttaaggtgaagatcagttacgatgttgacagccgtagattctttggccgacagccatcctgcagacacttatgctagaaaaaaccctaccgaacaaatactctttgtggacttggttatgactaaaagtgacgtgaattagaatataccacacacaggctatctcactgagtatacatttggactgagagttacgaccgctcgtatagataattgtcgctgttcgtacctactctgtttttttaaa

SEQ ID NO: 65764 - DNA, 363 bp, Oryza sativa
taggtttcacgatgcttgggtaccaaacaacctatgcagctgcaacaatgatatttgatgccactgcatcctgacttgttcctccaatccaagatagccactcttgattttcaaatgattccaaccatgagcttatctcagaagtatcacaatcttctctcccaacatcttcattatccgcttttaactgtccataactagatacagaggcactctgaattgcagtaataatattgtccatctgatcagatgtaggcaactgggaatcaaatactttgattttctgcaaatggaggggtttggggatagaacgtggagctgcacagtgaaacagggagcgtgcagccattcgcacatgttcag

SEQ ID NO: 65765 - DNA, 352 bp, Oryza sativa
  unsure (1)..(352): unsure at all n locations
agcttcctttgcattctccactctttctagagcctatcttgngagattgagacattatatgaaagtgtaggagtgttttggagatggcttgacgattagatttgtttgagcactttggataccttgtgggctgtcacttgggcttattactcttggagatcttctcctaaacggataggtgtcgcctgtgagcttccaaagatcttgtggatgtcccgggaaagtttgtgaaggttttcctcacctccgcaaggaaacgaggtaagtgagtaaagattcttgtgctgagttttcagacgttgtactaagtagagcaacttgcacttgtggtcttttctagaaagaattttga

SEQ ID NO: 65766 - DNA, 373 bp, Oryza sativa
ctcagtcctgagactcgaacattatcacactttctcgcttggaaagaccgtgcaagattagccttgccattattatactctttcttgaattatctggaatctattggaacaccacacatgatggtagtgagaggatataccaaaagcagagtatcatgattaacattaataaaaatagaagtaccttgcagtttgccaatattaactttcttccagattaaagagcagttctataaaaatctccaccatatattaaaattttggtccacatcacatgctcataagcgcaaggttgtcagcttttgaaatgtcaaaatatttatagatttgctacaatgctctttctgtaattattggaaagacacatgacttt

SEQ ID NO: 65767 - DNA, 320 bp, Oryza sativa
accccgggcgtcccaagatagtccaatagccttaaggataactcttgggggccatcatgagaacaaaaacctatgatccacgattctgactactgctacgcctaggttagttcttctgataccaacagctggcgcgctccattttgatcccataacagaagtgtgcggctcctccggccatataatgctttgaatatagccttttggccactggcttggcagctgatgtcgtaagagaattcacatatagcctactcatgacccaagctccgccaaaattagcgcacaggctggcctacatcttccaatattgactgacc

SEQ ID NO: 65768 - DNA, 364 bp, Oryza sativa
  unsure (1)..(364): unsure at all n locations
tgcaagctttggagaaaagncgaatttggagtctttttttataccccaaaaggcacctgtgaagatggagccgggtgcccgctatttcgatggtgttaattaatgagtgtcaggccttaattgcctatggattaatgcttaaagaacatatataataaagatgagtcttttatatcatgtttgtgtggaagacaaaggtttttgaagagacagggattaatacactagcgttctgtaaaaagcaattgtatcggtctctacaagcaaggggcagagccatctctactgtaagataaaatatttgttttaaacctaaggacatagtttatatgtaaaactatttgccaaaggtccttttttttct

SEQ ID NO: 65769 - DNA, 363 bp, Oryza sativa
ctgttgctgtcattatatatagtgtatactttaatgaagatgcaattgtaatgaacaaatcatcccttgaccgaggttctggtcgctgtatcgcaatgaaaaagtaatgttatactccaaataataatgttcttttactttcattgacgtgcttgagggaacatgcctgttggattgctcgaatcatttatgcagttgtatttgactatcatcttgcaggaacactgtgacaaatgacaactatgaaagaggttattcagacaggatcgttaagcaccagacggataaagatggtgctctgttcaaacagaacatgcgggcataaatattatttattctaatcactgtcctgagaatttctta

SEQ ID NO: 65770 - DNA, 341 bp, Oryza sativa
ttataaaaagaccctaatctatcgtgagaaattttccaagcaaggccaagcagatcaataccggagggaccagccgcaccaatttccgcccaaaggtgaggactctgacttgagcagtccaaagattgcaacttctttcggccacacccaatgcctccttcttcttcaagcgccgcaacacgatcacacgcttctctcccgtagtctcatcccaaaagcgaatacctgaggcaaccaccaatgttcatcataaacggggcattttgtggaatcccaaccgcggcggccatgggggaaaaaacccaatgcctccaagtgctctactaaatggcgaagtgggg

SEQ ID NO: 65771 - DNA, 361 bp, Oryza sativa
agctttggagaagaggtcttatgtggagtcttggcttataccccagttgagcgcctgtgaagatggagccgtaggcccgctagtccgctgctgtttatttttgattgtcaggccttaagtgcctttgtaataatgtaaatattatcgatataataaagatgtgtcttttatatcatgtttgtgtggtgtaccccggcttttcctgggacggggattaatacactagcgttcgggaaaaggcaattttctcggtcgcgacaagctggtatcagagccatctcgactgtaggataagctaagtggataaaacctaaggacatattttataaataaaactatttgcgaaagttccttttttttc

SEQ ID NO: 65772 - DNA, 385 bp, Oryza sativa
tgtggctggacagaatgcaactgttgctgtcattagttatagtggatacgatattgaagatgcaattgtaatgaacaaatcatcccttgaccgaggttttggtcgttgcattgcaatgaaaaagtaatgttatactccaaataataatgttcttttactttcattgaggtgcttgagggaacatgcctgtagtattgctgtattcatttatgtagttgtatttggttatcatcttgcaggtacactgtgacaaaggagaagtatgaaggtggttattcagacaggatcgttaagccccagagggataaagatggtgctctgttaaaacagaacatgcgggtataaatattatttattctagtcactgttctgagattttcttatg

SEQ ID NO: 65773 - DNA, 384 bp, Oryza sativa
tgtgcctgtttggagagatcatcataaattatttatgtatgccgttcgcggtacataaaatactcagccagggctgctcccgtataaggagcgaggtattgtaatgtagcacgggaatccgccatttcagctactacaatagtgtattccatggccccctcttcatggaaagtagttactacttgagctacggaggatgctctttgaccgatagctacataaacacatattacatcttgccctttttgattgagaattgtatctgtagctactgctgttttgccggtttgtctgtccccaataattaactctcgctgaccgcgcccaatatgaatcatcgaatcgatagcaataagccccgtttgaaggggttcatatacagaa

SEQ ID NO: 65774 - DNA, 364 bp, Oryza sativa
agcttttgctttatagaaaaatgtatgaattttttttcttcaggtatttgagaacattcagcaattgtacttttcaggttctgactgtgtttagttttcttcaaacttccgaaaaaatccggcacataaaatgtttgaacacatgcatggaacattaaatgtggacgaaaaaaaattaattgcacagtttacatgtaaattgcgagacgaatcttttgagcctaattacaccatgatttgataatatggtgctacagcaaatatttgctaataacggattaattaggcttaataaattcgtctcgcagtttacaggcggaatctgtaatttgttttgttattagtctacgtttaatacttcaaa

SEQ ID NO: 65775 - DNA, 361 bp, Oryza sativa
agcttgaacaggaacttgggatactccgatggaaaggccacaagatgtcaaagaaaaaggaggatgaagatgcagagctgtcaagactgaaggcggagaataacaatgctgaggaagcacacggtgatgctaaacgacagtttgacagcatccgggctgagctgcggcaacacttagcaattgatagtcagtaaccatcctgatgagtcccaacttatgcactgtatgctgggtgcttatctaagactaggaaccctgcctgttgaatgtgtcagtcctgacctattatttctagaccatctatctgtgctaatctgatctacctatctctgtacttatttcttcctaaaatttgccagct

SEQ ID NO: 65776 - DNA, 158 bp, Oryza sativa
tagaacacattacggatggccgaccgggcatgttgcttctctggtaccctttgcgtaggccatgaatggcttacgcacccccaattacccctacgtcgggattacggattgtaacacctaaaagtgtccgcctacaacacgggttacccctgcgtgat

SEQ ID NO: 65777 - DNA, 364 bp, Oryza sativa
cagcttgtacataagggctcattgcatgaacttgtggttggggctctcgatattgttttctggccatgatgttaccgattggcaatagggaggtgttctatgaccaattatccatcgacagcacgattgctcctccaagctatgtttcttttaaatcaaaagcttttgcgcagctttttactaacaaagcataacgattggtctcctccaagctatgttggaattctattggccttttttgccattctatttgccttcaaatatcgtcatgatgttaacttatatcctacacatgaaattaaaatataagccgcttttgctgtttgtacttcctccgtttcatattataagactttctagcatt

SEQ ID NO: 65778 - DNA, 391 bp, Oryza sativa
ccctagagtctacctacacgcacgcaagctttgcagcataagaaccttttcttaattttacccacacgcccaaagtctaacctcagaggaaggaacctatccgaattcacacacattacaatggaccattaacagaaaatcgcttgtcagtgaaggaatattgtactgcttaaccgaatagataagaatgacttccgtgacccatgcgtcaattatacaacaccagtgttaacacttactgatggaaatacattattataatataacatagatcttgactgcacatctaccgctcgttatgaaagacattgcctgtgccagaataagatcgccgcttcaaactaaagacataatcatggggctgacaataccctatgaggacaatctcaac

SEQ ID NO: 65779 - DNA, 361 bp, Oryza sativa
gctagtgcctcggccgatagagactgccgccgcacttttttatacctttcacgggacggaagatgcctttgccgtgctgttgccgtcccttgaccgggttttgccacgtaacagtgtaattacacctgtccatcttactcgctagagctgtgatctattactttcatttaggagctagatggaacatgccctgaagaagaatgtactcgatttattacaccgcatatgcatataatcttccgcgctcgttgaacaaatgagtatatggacgtgtgatgtttacagatcagtgtgccccagagtaaactatgctgttctacctaattaatatcccgtataaatatcataaacctgtcagtgg

SEQ ID NO: 65780 - DNA, 359 bp, Oryza sativa
agcttaacatgcaagtatatagtaattatatccataatttatttctttctaaaactaaacatatacatgataaatcatcattctcaaatcatttttaaaatatttcaattcaaatcatttcatcatttcttcattatataacatatatttgcagcaaagcgcagggcatcacctaatatataccaatgaagaaatttttatcaaggaaatatagggtgtgtttagttcacgtcaaaattggaagtttggttgaaattggaacgatgtgacgtttcgatgtgatgaaaaaattgaaagtttaaagaaaaattttggaactaaactcggccacaataccattatgaagcgtgcatgcaata

SEQ ID NO: 65781 - DNA, 363 bp, Oryza sativa
taatagtagcaggcggcagactttcacagcctttggtttggcttcatgcatacatctcccatcgcatattacactgaaaatctacagtggccattaattggccgttgaaattttctcgccgcgaacgaagataagcattggagacggaaatttagaaagggatgaagaaatcaacgcggaacaaagtaataaactcttttagttagaaaactaattaaaagagcagcatccatgttcgtttaatttggcaggcatgttcgagtgaagaatattctaaaaagaagccctttcaaagctagacctcctccactccaacccgatggatgaggaagtgtcaaacaatgggaaaaggagaatgggatc

SEQ ID NO: 65782 - DNA, 355 bp, Oryza sativa
agcatgcacactatcacaccctttctctgttttctatacccccacaagcgacagcttgggggcctccaacattcaacgctgtgcttacatcaagcggtcaaaggcaatgctccaaacgctcaggcacatgctcaaatactggcgaccaaatcccgggccgtccatagcaaactgtgtggaatgcttggtgggaaacacattctctgtattttaaccggggcacactttcctttcttaaatattcaacacactgaactccggacatggtattttatttctatcctgaagatgaattaaagcgccttacacatcatgaacgtcatggatgtctacgaacgataaccggaacccattg

SEQ ID NO: 65783 - DNA, 355 bp, Oryza sativa
aacttgcatctttaaccattgttttctatgtcactatgagccctttggctgatgctgcactatagctctgctagatcatcatcttcaaagttggaattggaatttgcttgggctgaaccgtcaaaattttctaaagaagatcgttctattgcaaaactcctgggagaatcaaccgtcccactgtttgaacttgaatgttcccaataagttgatctctcaaattcaatgtcagtgtcgctcctaaagctcgaacaaggtgatgaatggataacagtattgtcgctgttttctccatgcagtgaaaaggtgaaaagaatatttccttgttcacaaccatacaaaaaacaacatatca

SEQ ID NO: 65784 - DNA, 366 bp, Oryza sativa
ccagcttgcgactcgacggaggtttttggcttgttttatatccccaaagacatgcattctaagcccgacttctccatccgtccgtatgcttcgcggctctgaggtataacccctagtggaaaccatgcgaccatcgcgacctagtatccctgaaagtagcgacataacgcctggactgaccttaaaactccctatgataacatttgtacctgaggatatttcggcgtggaaagggcacgaacctcgctaacgaatggctgagatggatggactttacgaatgtgacgcttacgtattacgctggagatccagaaccgtgctgacaacctgcgaggccgccgacccatttagaagcagccgctcttg

SEQ ID NO: 65785 - DNA, 288 bp, Oryza sativa
tttatcaccggttgtttttctcgggagctctctaataccacccctctaaggaggcttggttgcctcttgtgcaatattcacagtgtataataacaagttgccacgcattctactaaactccagccctggattagcccatactcccggtcatatatatatactcgactggaactaattaaacaatatattatcccgcagcccaatacttatcatgcttatattccaaccatgcctaagaattgaaaactggactttattaccactcataataattgaatacatgacctt

SEQ ID NO: 65786 - DNA, 364 bp, Oryza sativa
agcttgtgactcgatggaagtttttggcttgtatgatatgcccaaagacatcaattctaagccccacttctcaatccgaccgtttgcttcgcggatatgaagcatatccccgagcggaaaccatgtgaccatcgtgaccgactaaccttgaaagtattgagacaattccttgacggccattaacacaccatataataacttttgaacctgaggatatcttgtcttggaaaccgccaaaacctcgctaacgaaataaaatggtcgatggactttttgaatatgggcttactattcacgctcgacaaccagaaccgcgctcacaacctgggaggtcgccgacacatatgacagtagcggctcttgt

SEQ ID NO: 65787 - DNA, 376 bp, Oryza sativa
ttttccccatctctgcgggttgaaatcgcaaattaccgacacctcaaaccaattataggtgccgattctaaataagaatcgacacctattctataggtgctttttttataaaaactggcacctttaatatattataggtgtcggctaattaaaaatcgacacctataatatattataggtgccggtttttttaaaaaaccaacacccacataaatcgagccgagccgagccgaaccgacccccgaccacatcgatcttatccattaatctcctctcctctcctctccttatacattccctgcccccctctctctcagttcactctttctacaacgaataggctctctctctctctccctcaatcaaataggtgtgc

SEQ ID NO: 65788 - DNA, 359 bp, Oryza sativa
aggcttacatacaccaccaaagtttctagtttgatctttcacacaaattcaacacaacagtaataattacataaacggcgggatccaaaccaccgacaatgaatgctgaacaatcaacttgaactacgcaaggaagacatgaggtccatattcgaaagatgccgcctctcataggagggcgaggtcttctctgccgatgtgaagaacattaccaacctcttggggaatactaaaactaacacgctcttgagaagcattccaaacggatactccatcaccctgcgtttgtcaacgaccacatttgatagatcctgtcccctagagcgttcacccgccaacgccatctaatggaagcagag

SEQ ID NO: 65789 - DNA, 379 bp, Oryza sativa
tagcctaaccagtcaacccatctaagataatctatcgattgattcatcggtcagaagaccagaataaatcaatcgcccagccgttgacatctatgatcaacattaattaatgaacagggtttgagctagtcagacccaaattatatatgctgaaactggtggagcatccctgaagaaaactgacaattgcaaggctgatgaccactgcatgcagactgtcggcctgtctataaatactggagtagcagctagctttaaagcttgctactgcagctactcaagctcaactcctctgcgttgcaaaattgaaggattctcagtttctcactttgtcaaaagctctagctaaggtgccttaagtttcagctcaaattaagat

SEQ ID NO: 65790 - DNA, 227 bp, Oryza sativa
ggctagaatgggccagtggggtttaggctatgtgggtaaatccgggggaaaactttacgggttaaaaaaaaacgggtgcattgaggtgtaaccccggtttttgaaattaattcgaccgggcataacgggggcgaatttcgatacgcctttgttactatctgcatcgtccgtgcccccttactctaatactggtgatggggctttaaaatggttggttaaacccccgg

SEQ ID NO: 65791 - DNA, 348 bp, Oryza sativa
agcttcggctttatacaattttttgtacatccaccatacgccttcaagacacatttctgcacggcttgcttgcgatatataccacgcctgctcctatcaacacacattatttcataccgatgcacttgtgtgccttgagcaacaactcgatgtctccgtgcctttttgattttatcttccatgtactttgtcactacgttgccaaacactatgttgttatcggccatggacggaccaattttcttgtatcgatccctaaagtacgcttgcgtgccgtgaaggatgaattcaacaatagcaaccaatggaagtaccccaactcctcgcattaaccagatgtatacctct

SEQ ID NO: 65792 - DNA, 333 bp, Oryza sativa
ggggccctttttttgggaattacctttgaaaaccacctgggaaaatatttaccacatcccgtgtggcgtctccatcttacgcgagggttttttttcttacataaaaaaggcaaatttttcattcctgacatcttcctggacaataaatgaccttctggttccccccaccgaagaaaaaaaaatttttttccgtcggcgggaggcccccctcacaaaacacgaaggggcggtctctctcctagttgtcgccccccctctctataaaaaaatactacttttcctggcccccaatactcggtttaaaacccccccctttttctctttttgaaaaaa

SEQ ID NO: 65793 - DNA, 358 bp, Oryza sativa
agcttgtgataatgtatctcttttatgagagccaacattcttaatttttcactacctctcttctccacctaagcttatagtaagcttatagctcactattatacttgctcttagcgtgtgcaaggtgttagcgccaagtgcattggcgctgaggccctgccacgtagcgcctcgcccgccacgctggcatgatgttagcaccagtcccgttggcgcagataagaacaacctcagcgcctggcgctgagccgatggcctatttttggatatagtttttggtaaggactactttcgaaataagttttctacaaggaccaatttgtcaaaaaaacgggtgagtgctatacagctccggcaa

SEQ ID NO: 65794 - DNA, 378 bp, Oryza sativa
tctttgggtgcaatactacactattgttaacatttgcaataatcaattaagcatgcacaaaaaatagtacagagcagaatcttctgcaaacttacatgatgaaatatatagcataaaccttctggaagaaatcgtacgttagcagcctctccccaaataaggtagtataagcacacatatagcaacttcttttctttcgtcaatgactcggtgctaagagaaaatcaggtaaatctcttggtgataaataagatatagacaggaataagaaattaaatatgttgatcaacatgacaaatcatacttgttccagacagggggaagcggcaaataattacaccatttgatgtagttatcaatggacttggagaaaacaac

SEQ ID NO: 65795 - DNA, 336 bp, Oryza sativa
agcttgtccaacttatttacttttttatgtcacccgccgagttttgaggaattatcactgcacgatctgcacttatccgatgcatggtctgttaaagataaaaaaaatattgaaccggatgaggtaccataggctacatattcgatgaacggctatggttataagcagacgacctcacaattttctgtgtgggctccactaccactctattgatatttcacaatgcgcaagatatcaagagaaatgcttctccacaggtcttcccacatggtgtacatggactatactaaacatccaagaaaagcttccattttaggcaaggacaccctaatgaat

SEQ ID NO: 65796 - DNA, 368 bp, Oryza sativa
tgtagaagggtaagtatcacatttttttccttcctcgattgtttactcagctgttctttaaatatattagatgttaactctctttgtacacattttccagttgctagatcaacggcagagcatgaatgtgtggcgcttcgtacagacaatgaacatgtacacattctacacttgttatcattttcaataactgcagggtcaacttccacgagactgagctctaacaaacctgggaacgatttacaggagatatgacttgacagaagacctgaagcagcttcagtgtaggacccttatttttgtcggcgagtactctcagttccatactgaggctgttcacatgacatcaaagctggacaggagatact

SEQ ID NO: 65797 - DNA, 355 bp, Oryza sativa
agctttgcctccgctgtcggcttctctagtgagcgagagggagagagagagaacagggattagggagaggagagggatgacagctgggtccacgagttcttttaattttatttgctgactggattgccacgttagcgccacgtgtgcaagtttaagtcgaaaacaactcaaaacagtacttatgagggttatttgtccggtttgtatagttggggtgagatgtctggttttatgttttaagggggtaatttaatcgaccgtgatagttcgggagggggtaattaatttgtactttttcctattataatactccctccgtctcataaaaattacatttctagctaatttaggacaa

SEQ ID NO: 65798 - DNA, 354 bp, Oryza sativa
agcttaagaacttggcgtgttcttacttcgtctttacggagatacagtgtatccatgcgatttttgccgaatcttgttacgaagtactaacagttttcgtcttctcgtttgtacgctatctggccgtcgagtgactcgccaccactcgacgatgtgtgtggatcgaaacggtcgtctttgccgcatgccgaaacagttggtggcggcatgcggcgcatcgcctatcaaatcgcaatgttgcgtgttggaagaggagttattgccggctccatcgtccgtatcgttcgttcgttcagtgaatcttccttcaatcccccggtgcggcgctgctatttgccgatcgcgacgcgggcg

SEQ ID NO: 65799 - DNA, 354 bp, Oryza sativa
  unsure (1)..(354): unsure at all n locations
agcttaatcatttgcaatattttacgcctggttggntggttgcactattaactcataaatctaaccaagatataataatatacctgaatcctcgcatatagaaactgtctgtgtattctgtatacataactactagttccacaaaatgagtgcaaggtaccaatctctgtttcagtacactcaaaccatgtatttcacaagagttctttacttgaacagtttaaaagaacagaaaatgcccgctgctcctaggggcatcccctcaactccaacgttggagaattgggaaaactggataagttccctaaaaagcaactctatggtgcaaattatgttatgtgcgcataccaagtt

SEQ ID NO: 65800 - DNA, 212 bp, Oryza sativa
ggctcgcatagagaacatacatctccacatagttaattttcacagtctaacctatatgaactggagctacaaacacctctattattgtaaaactatacgaccttgtgtacctatatgggtatgttaatggaagggaaattaatacataatatattaagcttttaatcaactataatctgggtgggaccatgatgggtagttaagaagaaata

SEQ ID NO: 65801 - DNA, 139 bp, Oryza sativa
tctgtcttaacatttcttgcgaagtatgcgatataccataccccccggtcgactgctaactggctataagtgaccttaccaaacaagggatccctctttttatagggctaatgcccacgccgtttacgcatgggaatgg

SEQ ID NO: 65802 - DNA, 342 bp, Oryza sativa
tgacacacttcagcccctcatcaagaggagagtaaatactgtcagaaaagccagacaactgaactaactacgcaacgcaaatgcaatgcgaacgacaggaacaagtcagggggccaaaaacttcgggatgaatcacagatcaagagcctacaagacaagcacaaaaaacacactatcaggatcaaattacgccccagcaaaacaatcagtggcaacaaccaagaagaagaccaaagacttcgcctcaccttacactcacagacatacctcggcggatgagaacacggagtgcggaaatcggagctgaacagcacgaggccggcaaacccgagcttgccgcca

SEQ ID NO: 65803 - DNA, 381 bp, Oryza sativa
agcttggatcttcctcgggtactgatgtgaccatggctactacggatacaaccattgctcacataatgcgtgaacaagaagacatcaagatcaaggtctccaagtgctggaatccgattcggccacctgctgcactgttgatttcaaacggccgccgaatctgcatacgacctccgtttttggcccgtgagtacttgatggaaagcctacggagtcctctttccaatggatccagcctcatcgccaaattccatcctagtcattcgcggatgaacaaacaaggtgctgcgtcacctgtcatgggcctttgggcttgtaacttcgtttgggaccctggcccaagtggggcccaagtggggtgcgccccaaccaggtggagca

SEQ ID NO: 65804 - DNA, 471 bp, Oryza sativa
  unsure (1)..(471): unsure at all n locations
actcagctatatattcctttgaatattatatattgtgtaagtcttgctgagtactatttgtacccatgttgctatttttaggtaaggataccggtgactttgatgtgtcctactactatccagccaagggtggcgagggtagtgagtagctgagttggttgccttgtgggctattggctgaccatgggttgagacttctgccactatatttgtgatgtatgaagggcttatgaaccctattgtgtaatatttaccttgttgtgtgtttaattttattaaatacttgttatgctatcaattgcttgcagacgaaagtgccaggctagtcgctttttcctgggaactagctaagcatgagtaagtgttttgagtaattgagatgatcgtggaatatagcgtntgaataagtcctttgagatatataacacatttggtcgccaccttcgaatggtttgatggggcatatctttg

SEQ ID NO: 65805 - DNA, 395 bp, Oryza sativa
agcttgatgaggagttaaaatcctgtattaatgttcttgatgcatccaaggaattatcacagaaattaacaatggaaaataatctgcttgaccacaaggttcaaaggcttgaaagagcaaaaagtgaagaggttttattttgcttatcctggatcccctaattatagttcactgtgagcattgcatagtttttcttgtttcatatttttgagtatatatggtttcttcaactatacagaaaagtaatatggaaagagtttatgatgatgaatgttgcaagctgaaatctcttattgctgaataggaacaaaaactggaaagcagaacacgttccctgaatgttactgaatcgactctcgccttaagaaatgctgatgtggattcattgcaaaaca

SEQ ID NO: 65806 - DNA, 476 bp, Oryza sativa
  unsure (1)..(476): unsure at all n locations
ggaccacacgccacaaacgactgcaccgaatggcattgggcgttgtatttntgcatgcatcggcaaccacacacaaccacaggcgaacaggtccagctatgcagtgcaggcgtgaaactttntttcgtaccagtccaagtgtacagtacacgtacttttctctgtatactgtagtactccgatgtgcgtacgggcgggcactgtttcggctgcagtcgtttgtggccgtcggatggtggatccaacggctcgccgtcgccgtcgggatgcgaggattttcggtcgggcatgagactgtcgtgccgtgtctcagcctgcgagacgacgacgacgaagagaacggtgactgcaactgtgtgtgatgagagggtggggccgggttggcgggagcagcgggagacagaatcccgggaatgttgcggtgggcggtgcccacgccacgccactcgggagacaggacgtgtcacatgacgtca

SEQ ID NO: 65807 - DNA, 450 bp, Oryza sativa
  unsure (1)..(450): unsure at all n locations
taggtgtgtattcctataaccgaatcccttattatttctgaattntctctatttaatatttagcacatggaaaatgacaattagaattgctgcatttttacgttgaagttgaacaagctgtcaaacgaaagagagttagcacctatgatgccatttacgcattctagtattgcaatttgcattagattttcattagttgtggcacaacatgatgtaaaccgaatagatatttattacagcaagtggactagtgctgtggtgcagcgaaagtgagatcatgtcagctaggacagacaaaggtgaagcctacaataataatacgctggctaccagatttcagaatcaccaattaagatagaagtgcgacatcaactgataccttgtgctaattctctgaaagtataacatagatgctctgctttgttctcttgtttagacaaccacatccac

SEQ ID NO: 65808 - DNA, 468 bp, Oryza sativa
  unsure (1)..(468): unsure at all n locations
tctactangaccttacgccatctatcgcacacattctctcctatacatacatgtgttgaccttctcctaattaattaataatagtcccaattaatttaatcggttattgatgaagcatacctgtgcaggtagccgcaactgcgaggatatattgactagatagattttgtgggactaatttattggtttgattttatgtagtgataaatttaattaaattagtttggcttcttcttgctctgttgggccacagctgcgaggattcaacgcggggccggagaacggaacgaacgcagcgagtttgcggccgaggcacgacgcacgcgcgttatagcttcaactgtggtgtcgccacgtaggagtcattaagagggtcactacgtaggagacatttttccttctcttcctgtcgattttctggttcggcaatataatttataagatgcataanatcaaaagtatatagat

SEQ ID NO: 65809 - DNA, 361 bp, Oryza sativa
  unsure (1)..(361): unsure at all n locations
actccgtatgaagcacatgcatgcatgtatctagtgaaaacgangccccaaagcagcatgcagtagcagcctaagcacagccgatggtcagaccctgccgacgcgctacccccatgcccataaccaataanncnnngggaatggaaacacgagagcctggtcttcattatatcttttgacctcgacctcaagcgagccacctgttgccgccggtgagctcgagatcgacctcagccatggctagctttgctgtgtctagagcaaagggatgacttccgtgaatgagactaagcgcatggatccgttacaattgtgaaaacacactgacatatgggcctaggactgctggttgaattctaaa

SEQ ID NO: 65810 - DNA, 474 bp, Oryza sativa
  unsure (1)..(474): unsure at all n locations
tcanatgtgccatacctcatctcaataatctttttgttggctctccaggcctttgcatagcttatggtgtacttgaatttgttctcgatgtgcctaataattgattttggttcaaagccaatgttaccaacaacactgctgtacatctcacttgccacaaaagctgaagtgatgtttcggtgatacttctccaccccttgtaagtagcacttgtgctcggtcacaatgctaactttccaattatcattccatttacccttatatgcatggacacgccacggacaatcttccttcatgcacctcacttcatacacataatttgttgacttgaccaccctaaactctctctgcaaggaaactgcccaatgcttcaccgcctccttcatctcatccttatgagcataccttgcaccgtcaattacctcgttctccttatactcccagggtacatgatcaccctctgatataacaagg

SEQ ID NO: 65811 - DNA, 430 bp, Oryza sativa
  unsure (1)..(430): unsure at all n locations
agctnttctattaacagagctgtggttttttgcttttcttgctctgtatatattgcaattcaatatttttatatcagctactggatgacaatgattttcgaaaactgacatggcacctcacttggtcgcattaacgaatctagagtcatgttctatttaatttcagcgatatgtacagttcattatgatttctctaatatatgatgtgtctcagcctgtgagatagttgccagacacttataatcggtaggtcacccaagatacaagtacaaagcaagagatattcatcaaagggtacacaacaattttgtaggtaagtggctttcagttttgttgaaaaaaaacttatgggacattttagatgtgctactctattcgctgaagtgttatctgtatagattagtttcacctcattatacacgagatcatg

SEQ ID NO: 65812 - DNA, 460 bp, Oryza sativa
  unsure (1)..(460): unsure at all n locations
ntacgtgttaaagagtgcacatctttatataatattgttttatgtcttctgcatggtctgtagctagcttttcgaggacagcgtcatgcctcttgatttttgcatcactaaaattggcagtgtctttgtccaacaactttaaatatgtcttatacttatccatcctagttagttccttctttgcttctgctgatttggtaagtgcttatgcagatatcagcaccgcttgtgctctcaatatcagctttgttgaagagaacaaaatattgagatggttggtcccacataggagatagtgcaggctttttttcctttacctttaaacttggctttggcttttttctgcctttcagggtgcttctcttttcgtctagtctcctcctcagtctcttggttggatgatgatgtatatgcacctgattcataaatcttaatcctcttgctcttgctgtccgcttca

SEQ ID NO: 65813 - DNA, 436 bp, Oryza sativa
  unsure (1)..(436): unsure at all n locations
agcttcatacattctctcaagtttagtatagtctctagagtatagtggaatagaaatagaatagaatcttcagtcctcagagtcttcggaggagttcggctatgcctctagtatcttttccttcttttgtaagacttgtactatttatagaatattcttctcaatatatttacggtactttccttcattctgattattcgagtaccaactttatgaaatattattcgagttataattgtttagctaacttactcgggagatgcaatgctgtgggtataatgttcatttatatgattactctatgtcatgatgatgatggtagagcagtatttggtagcataagcgaggtgcttaggctatngaatatcattatttagagttatatgctgcagatatgtcgaggtgggccgctgatggtgacaactcaatacgagta

SEQ ID NO: 65814 - DNA, 429 bp, Oryza sativa
  unsure (1)..(429): unsure at all n locations
aactgcatacattcgtgtgcttcagcagaaacaatcacgttacaaggatatgctgactttgttgacagcagagcttgggagatattgccatttaggtcatgaatgtgataccttgcgctatgctgtggatgattctcactcgtctatgttctggaaatttaagttctagaaactagaaagttgcttttcctggtgtactgcagaaactactgttcttttggatattcttttgacaagtcattttgggactntacctccaatctgccgacgtgtcatcgcacgcagtaccaatgcctacctcgcttaaacatactcctggtgtgtgcaaaacaaaccggtggattcatgtcctaacctcattcaaggtgcgactggtggcccgtgttctccaatctagtgtaacgaacgagaacgagcacctcactagtc

SEQ ID NO: 65815 - DNA, 461 bp, Oryza sativa
ggccgatcatccgcatgcgagtcatactaattagaattggctatattgttgtgccattcagcataagaactatgaaattatactcaaagtacatctgcgctgatgttggatggatttttattgttattttccgtatagcagtacgatatgtaagagtaggtgttttctattattagcagaaattggttgaaataagttttctttgaaccggtatcttaagcttcattgttaacattgcaatatccttggttcttacaaagttgcttgtgctaaactgcagattccacacctgagacctgctgagtacaagaggtccagattgtcaaggaatcgcaggaccgtgaaccgtccttacggtggtgtcctgtctggtactgcagtcagagagaggtaaaccatccaaacacattacatgctcctttcttgcgatcagttggtgaaccaatctatctgcacctcgc

SEQ ID NO: 65816 - DNA, 445 bp, Oryza sativa
agctttatgtacgaataatgcataacagatctttggtggtttgatttctcaagattgctcatagagtgttttgaatgagttgaagttgaaagatgctttaaagcgtattaaacacatgaaagaaattgttaaacaagatgaggtgtttttttgcttaacttgttgaaaacataatggtatttttgatgcttgcaaaaattgtgctattcttactctggaggtttcttatttgtaaagttttttgcaaagattttctgatggtaaaaagaacctcaacatgattcttgatcaatctaaggttagcacacaaaatcgtggtttatgttttgatccttatgcttatcatactagacattcttctactgttttgggtgctgctgggagaggtgaaatctttattgatactgagcttaagaacactgtggtaaaatctgttggcctcatg

SEQ ID NO: 65817 - DNA, 398 bp, Oryza sativa
  unsure (1)..(398): unsure at all n locations
agctggaatccttgaagcgctcgatnntcttttctttattccagttctcgttattatctgttccaaaaaatactgtgaaaaaaatatctgcacttactttttttccgcaccttgctagtggggccaacgttattttctgttaaaaaactcctattgttccaacaaatactcgaaagagatatttccttacttttttccgaccttgctagtgggccacggtatttctgtaaaaaaactcaaaacatatttggtatgcgcaggatcacccaaggcttactctcagctatccgtgaagcactacaccaacattcacagatctacttgttatgctgtcgagttacaccaatacggtgaatattgagggttacccaacaaataatctcgaaatacaaaccact

SEQ ID NO: 65818 - DNA, 477 bp, Oryza sativa
  unsure (1)..(477): unsure at all n locations
tacttgtcttatagtntaggcgctntatctgtctttggttttatcgcttgttgttttgtctggttcaataatacagnttatccgagtgagttttatggacctactgggccagaagcttctcaagctcaagcatttacttttctagttagagatcagcgtcttggagctaatgtgggatctgcccaaggacccacaggtttatgtaaatatctaatgcgttccccaacgggagaggttatttttggaggggaaactatgcgtttttgggaccttcgtgctccatggttagaacctctaaggggccccaacggtttggacttgagtaggttgaaaaaagacatacaaccttggcaagaacgacgttcggcagaatatatgacccatgctcctttaggctctttaaattctgtgggtggcgtagctaccgagatcaatgcagttaattatgtttctcctagaagttggttagcgacttcc

SEQ ID NO: 65819 - DNA, 217 bp, Oryza sativa
  unsure (1)..(217): unsure at all n locations
agctttaagccatgaatccctctttcttatatctggatctggatcctacagaacaaacatatatgatgagtagtatctgatataaatataatactccgaaaaaaaataagtattttaaaatatctattaatatggatttcctctcttggcattttgaattccctgagcagatgactctgtacgtntaaacactctgtccgactagtcatagccccta

SEQ ID NO: 65820 - DNA, 455 bp, Oryza sativa
  unsure (1)..(455): unsure at all n locations
ttggtaaanaatctagacagataggaatgcacactgttctgttaataattacttacgcactaagcagacctctgtgcttatgtaagcacagaggcatcaacaagagggaccatttgtttcttgctcacagaacatgcagattgaacaaagagataactaccattgttcatgagttagatgggatattaacatattaagcattagggttaactgccgaatgacattgtcacatcccaatgccgtgacaagataaacaccatcgggaggatagccgggcggcatctgctgctagagaaaggagacttatgatggggagaagaacaccagggagagattngactatatctgattcattgcttaatcttgaatgatgatcaattacatcgattatagatcggggaagtctcagttcctaaccactgagctactatgtaacatcataggataggatttct

SEQ ID NO: 65821 - DNA, 434 bp, Oryza sativa
  unsure (1)..(434): unsure at all n locations
tccatagagncacctgctgcatgcaagcttgcatacaaaacggaatcattcatggtctaagccaaacacacgattattctagcgctgacgaggtcatttgtttttttttaacgccgngccacggaacaaaatgtccatgtttgcgcgcactgactggtcaagattctgtaaattattttaaaacaaatagtgtgtttatgtgagataataacaagagaatggatgggttttgtgagaagtgaagtactcaaattattgatgttgtaccgagtgctgaacagtttaggtaaaagcgtcctgatgacctacaattgtcgggtttaatattaatgtgatcatgcgaagattgctgcatatatgctcacttggaatgtgctttttgcgagcatgcgcatttcgcatattattgtagtaggtgtgttttggttttgttt

SEQ ID NO: 65822 - DNA, 469 bp, Oryza sativa
  unsure (1)..(469): unsure at all n locations
ntacaatatgaaaacggataagggtggattggccttaagtttgttaagcgtcaacattggttgataataaatgcagcatttattgttttttcatattcctgtcctggtaccagtatttgcttgaattattaaaatagttcatagatccattagagcaagtttaatagtatagcccactactaactccaaatcatctatagccaatgtaatagccaattcatacaatagttgcttaatatactattaatacctggtcccacctgtcatgtgcattacgtcttggagtccgtgctgcagctgactacagatctgtagcccgctacttttttctctattcatttatctctttaaaatatgtttatagctggtaacctgctattgtacctacttttactatagctgaaagctaacaaagtacatagtgatgttatcccaccatattgtatgcagggatatttttatattaata

SEQ ID NO: 65823 - DNA, 302 bp, Oryza sativa
aatctacttctaacacgagactgctcttacagcactcgtcatacatacacatataaataacacgtgacatgcgtgtgcaatatctagagcagcacgtgctgtactgaaatgatcgcatacaaggcatatcacccaccttaaaaacaccatcttgcgaggtaccgattggtatctcaaaactgctctacaacattcggacaagagggaaagttgggtatccaaaaatcttgggagagcccgaattagtgttgccacgaaacaccccgagaaagacgtgttatatgaacctctgggaccacccc

SEQ ID NO: 65824 - DNA, 467 bp, Oryza sativa
  unsure (1)..(467): unsure at all n locations
ntagctgaattataagaggctctattgtactatattgtatactataataggaagagaatacagtagaagaagtcggaagaattccagagttgtcgtaatcttctctcatttcttttattccgtttactactctgatttcaatataatattcttcgtgagtaatttagatttatattatgagaattatctcttggttaattcctaaatagcatatggaattattgttcgctataatcaactaaaatatagtgattgctttggtgagttataaacactaaagtagatattaattgcttagccatggtgtttaggtaactgttatccagtaattgctgcgtatcccacagtacgtttgaggtaggtgtagaggtggtgacagccctcaagatgacttanatcctccttgtccgggtacgtagtagagcgacatctangaacagcgggtngccagtacctgaagtattgcg

SEQ ID NO: 65825 - DNA, 221 bp, Oryza sativa
gccgcagcaacacacgcggagttttttagttatggccagaacgaaaggtttatataggctgctaaagaccgtgggaaatgttagcactaccctccaaccatcattggcgatcaataccagccggtcaaccgaaaacctggatcgaacggagctgcagaggaatcggtcgaaccatgggctggaccggcctggcccaatatcggcacgtggccaactctctt

SEQ ID NO: 65826 - DNA, 475 bp, Oryza sativa
  unsure (1)..(475): unsure at all n locations
tataatactcagctntntaactactgaacgggatggttcgtgcgataactntctatacgaaagttgttctaaaatatcatattaatttattttttaagtttgtaataattaaactcaatcaatcatatgttaatatcacctcgttntgcgtaaaaaacttaattttcatctccatctttatttttaggagaaaagaacaccacctatgatagagagtatattattatctcggttccagaatgttccagaatgcaagaatatttaaggttggacacggttattaaaaatgttggtagaattaaatggaagaatgttgtgattggataataagtgaaagtaggtgggaaaattgaatggtggagggttgtgatttgttgggaagagaatgttgatgaagaaaagtgatatatttgggacaaatccctagaggctaaatattgttatattttgggacggaaagactagataagctatt

SEQ ID NO: 65827 - DNA, 390 bp, Oryza sativa
  unsure (1)..(390): unsure at all n locations
agcttcgctcgtgtgatctatggtgcatgtatattatgctttnttttacaaacacacgtttactcacccttataaacacacgtataccatatttctacgtgcatatccgaaaaactggaccgacacatatttagattgatgaagttatcatgaatgtcttgctaacgacgggtacgtcgcctatcactgaaaaaataaataaccataaatgcgagcatccgtgtcaagtctaggagtttgaaatcgggtagattgattctaccaaaggaacctaacttaatgagctatgctcacttcgttaaactggccaattatttttgttaacgaaccagcaccagataataccgacctattatatagagtaagagtgaaactatttacaagcatgtt

SEQ ID NO: 65828 - DNA, 453 bp, Oryza sativa
  unsure (1)..(453): unsure at all n locations
taagtgaaatatagaggtacaaactatctagttgcagcgattcccagattacgaatgagaataatatttatatatcataacaagacacaataacactttcaaaaaaggcttgaattataccataataacatagggtatgtataaaactacattatatatacataaaagttacatctaaccatttaaacatttgattttgttggatgacaaaataaaaattcccgtggcaaggcacggnggttccaactggtttaatctacatcagtgaaccaaacaataagcactggacaagagttgcaaatcatcaatacaataagactaaatataaattctagttctgaaagaaaactaaatataaataccactcggttaaaatcaggaagatgttttgattattcacatcttgcatacaactantttaaagcccgtacaacacacgggtaggcatgcaac

SEQ ID NO: 65829 - DNA, 415 bp, Oryza sativa
agctaacatgcaagtacgtcacattatctcctactattgattatgaccaaactaaagcatgtttactctcatgcaagcctgattcgtcatattgaatataatattgcggagctcaacatataaatatggcaaatgaacttccctacacccttttcacaatatttaacaattaagcgttctattatattttatattcacccctatattccacaaccaaagccgggtatatctacaattgtgaagaaaaaaaaagtgtagccccacatgggcccccctagaagttttaaaaatcctggggattttgggtacacttgggactttgtataacggttgcctcacaaaatataaccccttgggggcccactggcggggggttttttttgttttcccccccccctattttttaaaaaagctc

SEQ ID NO: 65830 - DNA, 486 bp, Oryza sativa
  unsure (1)..(486): unsure at all n locations
taaactcaagctgggtgcggcgcacggccggagtggatgccgcgctcggcgctcatgatgaggcagagagatcgatcgacatagaagaggatttctcttcctttcatctgacagtgggcccaggggcaaaacagtccacaaagtttgagaagaaatacaaatgggattaagaaatgagaaataaatgaaaaactgagaaagtggtaccaaatagagcaattagcagtcctaatgacatattatagagggcacgcgaatcgngtggtaaaaaagttgaggcatacgaattaggtggtaaataatctaaattctcattttgtagtaaccttcctgacttatttgcctttagtaatgaaaattgcttgaaccttgtggcctgttgaaagcatgtgacctgatttttttgcataacaaatgttgttagtatgtgagcttctggacaaccactatttatatatgtataagttgctctgacctattggtcta

SEQ ID NO: 65831 - DNA, 348 bp, Oryza sativa
agcttcacaaagcgagggtgagtccgcttcgtataggcgcgaagatgacatcctcacaaaggcgctcggaaccaaagaacatcctggccgaactcggggaattggtagcgatgtgccctggaagcatggactccctcagtacagctcccaatcaggagacggaaagtctccaaagaagagagggacgctcgtttgaaggccgaacttaaggttgaggtcattcaagaactagaagctagcatgaatgcaagggtggaaaaaagggttaacaaggtgctcgccgacatgaatataccccgagtcaaacacctgttggcaaccaactccttgtgacaaaacgacccgagt

SEQ ID NO: 65832 - DNA, 476 bp, Oryza sativa
  unsure (1)..(476): unsure at all n locations
ntactccgccagctganagatgctgtctacgatgccgaggacatcatggtatgaattgattacatgtttctgaaagcgaatgctcaaaagagaaagctaagaagcttaggctccagttctatctctattgccaagcgtttggttggccatgacaagtttcggtccaaattgggaaagatgctcaaaagcttgagtacagtaaaggaatgtgcccatatgctcgtcagggtgatgggagtagaaaactttagttcacacatgttacctgagccccttcaatggcgtatctccagctcgatttcaattggtgagtttgtagttggtcgtcagaaggaacgggaagaactagtgcaccaattgctggaacaatctgacaaacctgaatctagaagcaaaggagcaaggtcaacatcattagaggtaattactatagtcggcaatggcggaattggaaaaactactntagctcaacttat

SEQ ID NO: 65833 - DNA, 448 bp, Oryza sativa
agcttgaatgtctccaacgctctcagatgtactgcactgcatcagctgtttcaggaacacttgaaatgcttcaccacttgaatgtttgggtgttatatttgcatatacaacaggcacatgcttggtgaagatcttggaccattgagcataaaggaactgcagcagctggagaagcaacttgagtactcactgtcacaggctcgacaacgaaaggttatatcaccacacaataaaataagtgtagttccttcaattaccttgttaattaacatacaataatatctgctattatctagtacaatactgtatgcattattctatatatacaacctatatcttgacaaataaaagggatatatactgcaaatatatccatctgatgaattgtaagaaattaaccacttaagcccgaaatggtgctaaaaaagacaacgcagccgtaatatat

SEQ ID NO: 65834 - DNA, 479 bp, Oryza sativa
  unsure (1)..(479): unsure at all n locations
gggcgtacaaatggcgcaagtagttaaaacactaanagtagcttacgttggatttggttgccacttcggttcttacctaccgcacttggacgcttgggtttgaactttgaacgaactcggagctttccctgtcagtctcagacggaaacacagcgtatgctgctaatactactctatttactcgtactacgtataccaaaatatttaagttatcatttccacccatcaaagtagtccgtgtcatcttccctgccaagtgccaagaggggaaacaccgaanaaggttgagttctgatccgtcatatcatgatccagcaattcatatcagggctcacctaanagtcccaaacatgcccagatagatccagagatatttctctgagctacacactgagccagggaagacgatgaaggcaagcaggttgcacatgagcacatcgtaaggatcacaatgcgagaaagcacaacttcactgtctt

SEQ ID NO: 65835 - DNA, 450 bp, Oryza sativa
agcttcagtgctgacagcaaagtttcaatataaaatatgcaagcccttttaggaagcaaatgttcttgcttctcttaaagcaaaagagagcctcacatatataattagtcaaatgcagtaactgaaaatagactgtaattcagtatgtgtaactagacctcaacatttgagaaaaagtgatggagcttctctatcattgacttgtacatagcatctctttgacatattactgcttccaccctactttttgagaaagtgaatgaattcattgaagactcgatggacgtatcaaaccatgggagaatttcctccagatgaatgatgtgacgagatgcatgagcatctcctccagtgtcagaaagattacacgattctagaagcttcatgagcacttgaagttgttgtccagtgcgcataagaggaccacatacatcttttagaaagcatggg

SEQ ID NO: 65836 - DNA, 474 bp, Oryza sativa
  unsure (1)..(474): unsure at all n locations
tggtagctctactcatatgataatcatacatatggagagtgctntattatttcangctctctgcaactaacatgacactcatggaaaagagtattcgtgtattctttcgtaatgtttcaaataatgtatgttagtttaatgtgtcatctggtgatcaccatgcaatattttgttcgtattcacaagtcatggcgtaggctcatgtctcctatagatatgttgtggttatgagtccataatccgaagtaaagtattgtattggtcagcggggaggggagtaaataaatgatttangaatacttaagtggttctgagatccaacacttttccccaagtacgctcccttgcttttgtttagtcctgagttcagttctcctaggggattagatacttcttctactcctgngatggtgccccttgggtaacttcttgtccgcagtttaatcgatgcgtctnnctcgtgaaatcttgact

SEQ ID NO: 65837 - DNA, 424 bp, Oryza sativa
tgaagcggatgacggacttctgcttggtattgtcctccggatgttgatagcccttggctcggcctggagtacgtccgggagagacacaacttcttccatctacaacaattgtttgctgaggctgtcggcgcagagaatcggtgctatgatgtattgccgactcatgtgcagcatgaggagccttggtgcattgcttgtgctctgggttatgattaacacgaggcctcacgggtatggcgtttgctccagtgaccacaaggcgagtgacttgtcttcttcttgcataatggccggagtgatgacgcaagttacgctatggctcgggacaatctctggagaaatgacctggctctttgcagctgcaacaaatcaacgtcttctttgctgagttgtccgtctgggaacgatcgttctgactatgagt

SEQ ID NO: 65838 - DNA, 461 bp, Oryza sativa
taattaatccgtcattagcaaatgttgactgtatctcaacattgtcaaatcatggagcaattaggcttaaaaaattcgtctcgcaatttacacgcaacctgtgtaattaattatttctatatttaatactctatatatatgcctaaacattcgatataacagggtaaaaagtttctgtttgggaactaaatgggggccttaattcagaaattccgatgttcatttgggctgagagacccatatggcccattgggctttccacggtggtggaatattccaccatggaggaaaggaatattcccccaccctctccctctccgcccgctttggtttaacctcctctctccggcgagcgccgccttatcaccaccggccgtcatgagatctcctgccgtcgcggagatatcctacacgctgccatttgcgacctctcccgccgtgacgccatcccacctcatgtg

SEQ ID NO: 65839 - DNA, 440 bp, Oryza sativa
  unsure (1)..(440): unsure at all n locations
tgtgcgctgactaaagatcttgagttggttgcaaatggtgattngacggagattggtgaaagaggaattaacatgagtggtggacagaaacaacgaattcagatagcaaggtcagtatatgaagatgcagacatatacctttttgatgatcctttcagtgcagtggatgctcatactggaagccaacttttcaaggtttgttctgtttgtttaaaactttcaataaatgctcaagtatgaaggttatgtcttaactccattcttcgtggcattaactccattcttcgtggcataacgttaataaaaaaaagggcaaaacctatttcgttacttttagaccaataatcgttagactctaagcaaatgaaacaaattgccttggcaggattgcctgatgggaattcttaaagacaaaacaatactgtatgtgacccaccaag

SEQ ID NO: 65840 - DNA, 427 bp, Oryza sativa
  unsure (1)..(427): unsure at all n locations
agcttgccatatgaagttttaaagatataatctctattattaaatattgtntatctctggtaaaaaaaatacaagtaatcaatccgcgcactgcgacctcaaagcaaaagttttgcttcttgcctgttctcgcttttcacaaattaaattgagatctaaataaacacccagtgatttggaacatggaaaatatactcatgtatgatggagtttatatgatggctaggagagtgggagagtgccagggttccttgcaagacatattttcccttttgaaacaaaatatatctattttatatagtgcaagatatttattcagcgagttgacagaaattcagtttgctgtgaaggcttccaaatggactaattttgcactttaattaggcatttgtttttatatataaactccttttaacaatctttttct

SEQ ID NO: 65841 - DNA, 472 bp, Oryza sativa
  unsure (1)..(472): unsure at all n locations
cttgagctgaggctcagtgaaagtggggtatcacaatctggtttaacctggtgctatggcattatattatggtttgacactggctntacgaaccgattctgcaaggagaagccagtcaacctctccacctctcctttctccacaccgactcactggtctcaaactatcttcacctttgaagagcccatcgcaatggcaaaggaggaaatcagccgtgtctcatctgcgtcagttggcacagatgagtgcccagctgtgatgatcagatcccgcatcagcattgtgagggcctctgagcaccgcagcatagacatatcgattgaaactacaggaatcagctcagatggcaggaagcgtagctggcctgttcagatcttcaacctgtgagcaaggagccaaggatacctttgggtataaattntgtttcgtgctttgctcctcactggttntgagcaaggatactacccacagc

SEQ ID NO: 65842 - DNA, 207 bp, Oryza sativa
ggctaaacaccatacagactgaactgtaaatcccactgaacgcagactaacgacaatttactactataactgaagcatcctatctcgttacgatatgaaactccgagacagtcctacacatgaatgcacattgcaaaaatgctaattcatcatctcgattctctagaccataagccgaggaataggaatactactgccttgaaaact

SEQ ID NO: 65843 - DNA, 472 bp, Oryza sativa
cttcaacaaggttaaggagctccgtcctaccccaacttcaatctcaaagccacccaaaggctcctgatcgttcctagagaagaggatgtcgagggagaagactagagagaagaagaaccactcgtccctcgagcaaacccgaagccgactttcgagagtgccaccgaaggtcctacagctagatgtagaaagaggtagagacaggacctcctccaagatgatgcctccaaggagactacgacactgagagtgtcactgccatccatccaagaactagccagacttggttttcacccggatgatcctacctatgggacgatagaggtgtattgataatgcccccatatataaaggatagtgacacccaaagacgccctcatcgtcgacccaaaattctaagctacgctttcggctacaacctccctttcctaacattggaaccacaacacctgccaccaaccttcgctggcac

SEQ ID NO: 65844 - DNA, 480 bp, Oryza sativa
ggcgacgtcattaatcgatgagtacgccctgctgtgctggcgcgccatgctgactgaagtcaatctgtcaccgaaaccaggcctcgtggatcgcattaactgcggtgcgcacaaagatatggcgctggaagatttccaccgcagcgcgctggcgattcagggctggctaccccgtttcattgaatttggtgcctgtagtgcggaaatggcaccagaagcggtactccacggattacgcccaattggtatggcttgcgaaggtgatatgttccgcgccactgcgggcgtaaacacgcataaaggcagcattttttctttagggctgctatgtgcggcaattggccgtttgcttcaactcaaccaaccggtaacgccaacaaccgtttgttctacggcggcaagtttctgccgtggcctgaccgatcgcgaactgcgtaccaataattcacaactgacggcaggtcaacggttgtaccaaca

SEQ ID NO: 65845 - DNA, 426 bp, Oryza sativa
  unsure (1)..(426): unsure at all n locations
tagcttggaagagaggcaatgttgncttttaaanctctattagaagacattttgaaatcactaagggtattatttctttctaagtttgggccgaaaagagacttgcgtctcgattcgacattaagagatgtttttcaacagctcatttagtaatgtaccgacctcccgggtcagatcattacttctcggctcccagagccattccacttgattaatcggctcccagagcctttttcattttctcggactcccagagtccagctgcccatcagcacaacaatccgcttccactcgggaagcctagtctatgatgcccgcagacatcccgaatcacacagatttgtntctgaccactcatgtcgctcatctgccacataggctgattcttgatacgattcccacactcacacatctttttacaaagca

SEQ ID NO: 65846 - DNA, 460 bp, Oryza sativa
  unsure (1)..(460): unsure at all n locations
tcgtgaagaccttaagcaaggcaagtcaccctttgatcaattgctcctataattganaagtcattattatttcgtttgcaacttgcattattagaatcacacacttaacttgcttggcctcggtttgcgtgccagaccgacggacctacccagtagtcacactaatttccgtaggtcgtactaccctgattccttgtcgctccacccttgtggtacctcggtattcgtgctctctgagcgcgtataccaaatatcccacatacaccgttgcttgtcgaaaacttgggaaatgggtttgtgaagccttcaaaacccgacatgtggtgtcggtgtgtttgaaaataaaatgaattgtgaaaactcgcgatgcggnggttgtgcctatgtggcactgtcccgtattcgcatataaggaccgattcctgtgggaaactcatcgaacataatcaagtgcaaccac

SEQ ID NO: 65847 - DNA, 336 bp, Oryza sativa
agcttagtccattcctaatcaccaacctgcttatttctgttagtagcttcggttattaggtcactaacctgtcatggcgcgtggctacattgtagactagtttaatttacacaatctacttaccaagtaccaactgggaagctctggtctcttgttatgaagtacatttcttttgccacattttataaaaaaaataatgatggtggttcatggcataatgatgaggccagactggtgctagtatgttaagcattgggcattaagccaaatgaagtgcttaagagtaagacagtggcttgaaagatgaatcataatttatcctatctgaggttggga

SEQ ID NO: 65848 - DNA, 474 bp, Oryza sativa
  unsure (1)..(474): unsure at all n locations
actcttaaactaagcttgcatnttcacagcanacacataagactgccagcgcaagcgctccatactatccctcttacttggccgntctcgtgctgggggctcgatatactcggaccattcccacgaggacagggcggctacaagttcctgtttgtggccatcgacaagttcaccaagtggattgaagcgacgcccacgggggaaattaaggccgataatgccatcaagtttattcagggatattctgtagatatgaattgcctcaccgcatcataacaaacaacggctcccagttcatcagtgtcgacttccaggattactgcattggattgggagtcaaaatttgctttgcctctttttctcaccctcagagcaatgggcaagtccaaagggcaaacgacatattgctacatgggatcaagacctgcgtgtacgacagactcatgttacactagggtcaacactttnttaacc

SEQ ID NO: 65849 - DNA, 471 bp, Oryza sativa
  unsure (1)..(471): unsure at all n locations
gggtaagatgacctcggcatttntacaaacagaagaaaaaacattggctacaaaatctgataagaaccgaatacttgcagacttgcgtgaggacaagcagttcttcctggaccaccctggtctagcacctatttccactgcacaggtcagttcaacttaaaaacataacaattcgcaacgcaaaaagcgatacgtgatcgaaatccacaagtatcatatactccacccaatatgagaggcatatgctcaagtttttctacgtttcagttcatgtgcacaacacaataatcaccttttgcaatcttgcacattaagatcagaatttggtatgacagcaactgagcccttcctgctgctgtacatgaacagggggaggagctgaagaggatgataggtgctgcggcgtacatcgaatgcagctccaagacgcagcangtatgaagaacatggacgaagtggtataacagtact

SEQ ID NO: 65850 - DNA, 413 bp, Oryza sativa
aacttgagtcttgcatgccgaatcaatcatgaaactgaaggaaaatcatctttcaaattagcctagccattaaactagagtatatttgagagatgacctgatcttaaactttgggatgttctaccctggtttgttggttgcataattgcacattaccttaaagcttagacattgactctacttgctgtacaaggttatataaagtacccagcataataaagatcttttatttcttatgttagctagccatgtgtttgtatggtagaatagtgcttcacatgaacaacgtccaaaatcttccatgcagatggcagaatcagtcgtgaatcttgatagtaaaatcttacatgcagaatcaacaattaaactagaggagaatcttttgtgcagaattagcatagacatgaaactag

SEQ ID NO: 65851 - DNA, 410 bp, Oryza sativa
ctcaagcttcttgaagaagtcgatgacaatgatttcctcgtgaacatttcttgaatgtattgctgtatcttcaacacactgaagatatagatcttgttggtctcaactctcctcttgaaaccttgaaaattaatgtagatatgaagatgtagattctgtatgtctcgtgtagcgcccgtttcgtcgtggcgcctagctggaaaaatctataattctaaaaacccttattgcgaaaatagtttcttcgcttgcgtcagtctccgtgccattccggatctcaaatccccgatctatcgtcaaattcaaattccgaatccaaatccttcccaattcatttcctccgccaaagtctattttgcctccctcaggttcgatgggccgaaaccccttcggccatgtctctattcctt

SEQ ID NO: 65852 - DNA, 447 bp, Oryza sativa
agctttgcattgtccaagtgtttcttttttgtctataaatgcatctgttaagaccagggcgaccgatctgaggacaagaattattgcccattgacattgcgaatggtagtgggcaaacataattaaatgtttgttttttacaaaaatatcatacaataattttaattagttcatccttacagctcatgttgcctttttttttgattttactgattggcaaaagaattgcacgttactatattagggttttgttgtttatactaaatatgttcatgagtattttagggcctgttcactttgatgccatttttaaccttactaaattttagtaatgttgccaaaaagtagtttgctgcataattttaggaactacataacaaatactgctaaaatttttggaagacactgtccaaatatggagaggttgaaaatggcatcaatcgaaca

SEQ ID NO: 65853 - DNA, 506 bp, Oryza sativa
catcatggacctatgatactcagctagatggtgtctggaataggatccctctgcgcaccaggtggtgctgttggcattgggatattgaatgggtcataggttcctccaaactgtgaggcctccacatatgggctctagaacaagagaaaaaagtatctcagcatgtcatgagagaatgctatataagagctcttacgcctcttatagattaattactgtgctccaagctcaatctctcgatgagtcactctataaggcaccatgataatggacagcggctaatggccatcttgagaaattcgacagaagttaaaaatcataatgagctgctacctgatcatgaggagggatatggataagactgtatggtggttcccttcttggtgatgtatccgaggagcttccgacattggcattcatggtatctatattcctcatattcgatgcttacccctcatcattgatgagcttaacccgcttagtgaaaggtaaatacaagtcatata

SEQ ID NO: 65854 - DNA, 74 bp, Oryza sativa
aagattacaagggcatccggccaagaatatcttggccccgcaaatgggagtgaaatacaaggataactaatacc

SEQ ID NO: 65855 - DNA, 483 bp, Oryza sativa
  unsure (1)..(483): unsure at all n locations
tattagctcctgagagtgaagcccctatagctgatcgaagctatgaagaagatgtggcgcgccaacgcgagagtggtggaaaggagaggtggtcgcgaggccgaggagagagggggagtaattagcgtggtgcttgcccatggctatggcgcgagccaggcggtgtgggacaagctcgtgccctccctctccaagagccacaacctccttctcttcgactgggacttcaccggcgcaggcgccgggaaggacgacgacgagtacacttacggcaggttcgccgacgagctcatcgcggtgatggaggagcggngcgtgggcgcgtctggcgcggtggtggtggcgcactccatgtccgccatggccgcctgcatcgccgcccaacggagacccgacctcttcgcccacatcttcctcgtctgcgcctccccgggttaattaattatcgatcactagatntcattcanttttgctggtccttaa

SEQ ID NO: 65856 - DNA, 461 bp, Oryza sativa
ttcagagcctcatgcttgtgagatcagatgatgcgtgctcttacaatcttacgaagaggatcggcgcgaagctggatgaggcttctgtctcggacctccttatccccgctaactccgacgaggccgccatgtacaatgtggacatgatctcggcgatgctggaggagttcatggcgcagcaccgcgaggacgatgatggcgccaagctacaagaggatgatgatcaggaagccatggatggtgatgatgacaacctgaatggtgtctcccgcagctcgaagctcgcgatcgcgaagctggttgatgggtatctggctgagattgcgaaggaccccaacctcccactctcgaagttcatcgtcctcactgagatggttcccctcgcaactcggtccgtgcacgacgggctataccgcgccatcgacatgtatctcaaggtatgtttcaccacatccccccca

SEQ ID NO: 65857 - DNA, 187 bp, Oryza sativa
aaccaaaagcccaaccaggagaaggggggaaccaaaccccggcaaaataaaaaaacgggaggggacaaacccccgcgggacacaaaaaaaaaacggggaacaagaaagggcccccgaaacccgaccccaatcacaaaactggaaaaaacacccccaaaaaggggaacgggccaaaaaaaaaaacccc

SEQ ID NO: 65858 - DNA, 456 bp, Oryza sativa
  unsure (1)..(456): unsure at all n locations
ngaagcagtgagcaacagagctgctcatgaaagagacttctatctagcaaaagcattccgtgcttattttttcacataggttagcttgcataaggttgatgcagtctttgttcctaagtaatctatacaatctggtcagatttggtgaccaacttatggttgaccaaacggtggattcaccaaactaacaatgctactacgaagaacagctgaataaccaacctacaccctgcaaggttcgtcatcaagcccatctgtacagattcattagtttgtagtagtttgacaactgacaagtgtttaactctagattcatacgctgttccaatcagtctcctcaaaagcgtagaaactgcaacttctctcaagtctcaacctttccctaatctaaatcgaaattacatatatgttacagagaanaccatataaaattctacagatcacaaatgtggcggg

SEQ ID NO: 65859 - DNA, 475 bp, Oryza sativa
  unsure (1)..(475): unsure at all n locations
taagtaagaatgataagtctgtgaggcaataatatcatatttcgccatcaccagtcattaagtaagggtcgatganaatggggggctttcgttgaagatctcagttctttcgcgcatatggagtcagtccatcccgagcatcacaagcttcctgaaccttttccttcacacagtgatgaggtagtcgaattcctatatgtcaataacttgtgtaaaagctcttgtagaggtaagagtccctctgagatctttcgttagcccgaacgaacactcttcctcttattagaatcaaataagtgacaaatgaatggtaacacatggtacctatccgtggtcgggaaatgctttgtgccctgtgtccttgctttgctctaccgaaggatgacgcaaggttnttctaacaacagtgttcggttaccatatctttgaatgacaaagtgccctggaagaggaacaaacctgaagtctgccgaaa

SEQ ID NO: 65860 - DNA, 446 bp, Oryza sativa
agcttcacaccgctgaaccatgtcttatgcatctgaggggcggtggccagaaaaacccttatcggaaagcttttccgactaatgtcccaccggcggcatgtgacccacagatcccttcaattcatgtatgtcgaggaggaggtgtctgccgtcgtcggacgagacgcattttaggagtaccccgtttggtgccttcttgtatagatcattgccgatcatacagtagacttttgctttgcgggatattttctcagcttctgcgtcgtcctcgggcaactcttcgctgcttatgaatttaatgagtgaggtgcgccagtcgtccgtggtctcgatatcggcaacggcgcgctctgtctctgtagcccccgagctgatgtcgggggcgaccgggctatctttgccgcttgcctctttcactgatggcctcatcaggaagtccagaaaag

SEQ ID NO: 65861 - DNA, 473 bp, Oryza sativa
  unsure (1)..(473): unsure at all n locations
ggggtgaggcanatcttccttcaatgagggtgggagaggcggatccatcgctaccaagctcaggagtgtcggatccgtcattaccaatctcacgagtggtggatccaccgtcgatgggctcaggatctatgcggtgacggcggttgaggagacgcgtgcctggggcttgatagcctgccgcataggggcagttagcgatggtggatgaggcatgcgcctcggcctcatcctctgttgcagggttgggagaggtggatttggacctcggcaacgacgataggcgttgcgacaacgatgacttctgtgatttgggattgtggattttagggggggttttttttttaagaatgtggatttgggtttctaaggtagattttggagatgggggcatgaatttgtatattttttgtgcaattcttttccctgaaaatccttatcacaggcggtcagctcaatctctctgtgagtgaagt

SEQ ID NO: 65862 - DNA, 400 bp, Oryza sativa
tgaccatgctcataacataagctggaacatcgtttcctactttatgaccatgttgctccagcgctacaagaatctctataagaaagctggtgcttgcatccacaatctataatggtaattgcacgacagcatctctgagctttatatacaggagagaaaggcgaatggactcactgtctgctctcctcctaaaatcaatgccatgcttactggatcgtgcgatgccgggcgccaccaatacggtatatgaccatgctgtgacgaacctatctcacctgactcctgcttgaaagtaagatgatgatgatcccatgctaactgttgaacatgacgaatgcggagcctcctatgaccatgatgatcatgctgcactggactgggtctgacgagcatatgacat

SEQ ID NO: 65863 - DNA, 456 bp, Oryza sativa
  unsure (1)..(456): unsure at all n locations
ggaactggagccatgcctaccctctcggagctcatcggctagccgcatcatctttctctccttgtcgagctcctcctacgcaatcttagcctcccgtatcatcttcaccgcctcgccacccctgccatccatgccgccggtggcaacgaggccgctcctcacaagctcgtcggacagttgctgcgaccctactagtccgccatgaccgttgcccctctcctcgtggggttaggtcacttaggagtatgtctctctccctgtccggcttgcagcatacacgtatccgcgctntgctcgcctgcgtgcactcgccaagcgatgactcgccctccctcgttgaggccacgggtgctaaagcatatggtgacgccttcttcgcacacctatgtcaccaccattttcgtctccacctcaccactaagcacatccacctctgttggttggcatcgacgtcgc

SEQ ID NO: 65864 - DNA, 431 bp, Oryza sativa
agcttagccaactgcagtgatctgaacattttctcgatgaaggacaatcttctggaaggccatgtgccaagttcattaggcaacctttctgttcaacttcaacatctgctcttgggaacaaataaattatcaggagattttccttttggtatagcaaaccttcctggcctaacgatgttaggattggaagataacaaatttaccggcattgttcctgaatggcttggatctctacaaaatttacagggaatagagttggcaaacaactttttcacaggacttattccatcatccctagcaaacatatctatgttggaagaactctttctagaatccaaccagttatatggatatataccctctagtttgggaaaactcaacgttcttagtgtattgagtatgtccaacaatagtctacatggcagcatacc

SEQ ID NO: 65865 - DNA, 444 bp, Oryza sativa
tgtcgacggcgaaggcgcgctcgccgtgcgtgctcagtgtgcggcggatgccatcaatttcatctggtcaaggcgcaacatgctcattgcccggtccatggtgatgcccgtagagagattccgggtcaccgtgtaccctcttgtgcacgcagcgaaaatggtcgcttctggcgcggtgaacacgctgcggcggattgccaagccaggggacactactattgccgatagcgtggaatcgagcgcagagaagttggttggggtgtcagacatcgtctcacacttgctgcctttccttagctctctggatccgccgctggtgttcgaggtggggatcaatatgctggcacttgcagatgtacctggaggtaagccggagtgggcttcggctgccactactgcaattcttacactatgggaccggcaagagttctcatcgatgaggga

SEQ ID NO: 65866 - DNA, 300 bp, Oryza sativa
caacacacatcttgagtttattgtttatacaggtgctaaattgatatccattaaccgtgtcatccctaataatttcaaactttgagtggaatgggtagaatggtttagaaatctgcggaatcaagattctaccattataagggaagaggtccattcaacagttattttgtactcgttgtatgtatacctgcaactgccgttcttaagatgataacactgccatttcctctgggagacagaaatcagcaatccatgcaggacaggggcctaccgtgtctctactcttaaagatgtcactgt

SEQ ID NO: 65867 - DNA, 454 bp, Oryza sativa
  unsure (1)..(454): unsure at all n locations
agctcgatatcttccgagcgtctctgtctttttcctttatatgtcaccaggtacaggtggagcctgatactcctaccacgtagtactcctagatttgatgagctgggaaccactctcttgatactgtttagatcttcatatgatgatagtttggtgccctcttcggttagtatgtttgaaaatatctntggcaccgacatcctattgtgctttgcgacctgatagcaaaacatttgttttccctggtcaaggacacgcgctcactgtacggcttatacaaaatggagcactttgtatgtttatactccacgtagcactccagtctagatgaaaagttcataacttgtaccacacgacaaatcaggcagtctttcatgacaaaagacaaggggagaatgaactcagtttgcctagatatttataagtataacgttattttagatgtgctaccaat

SEQ ID NO: 65868 - DNA, 384 bp, Oryza sativa
  unsure (1)..(384): unsure at all n locations
cgcnntgcagcttcacaccgctgcaccatgtcgcatgtttttttgagcgcggtcggccaacaaaacccttgtcgaaaagcttttcctaccaacatccgtccgccggtgtgtgacccgcagatcccttcatgtatgtccaggaggagatgtttgccgtcgtcagacgagatgcatttgagaaggactctgtttggtgcctttttgtacagatcgttgccgatcatacgatagattttggcttgtcgagttatgttctcagcttctgcatcgacttcgagccactcgtcgctactcatgaacttggtgagtggggtccgccagtcctctgtggtctcgatatcgtgaacgacgtgttccttctctgtagcccccaagctgatgtgt

SEQ ID NO: 65869 - DNA, 475 bp, Oryza sativa
  unsure (1)..(475): unsure at all n locations
cttgagttatatctcccaagtccatatcatctccatcaggagtttgaggtactgacaatgccggtccacggggagcctcaattgatagcttagatttgggaggtgtaagctccgtcggtcgatttggacgagaagtcatcttcacaactatgtcttctttgggccattgtatgaacgtcttgcgcccaacgcccaaagtcatgatttcatcattggggggcatgggcaaccgatagcctgaccaggtgtcctttactgtatcgatggacaccttggcatacccggctagcaggtctgcgccgtggaccttatctgtaaccgagggtttgaaagccatgccctcagcgacttcaggagcgaaagttggtggatcctcgccagtangacacactgtgctacgccctgcatatgtaaaagtttgaatttaatattggaatgtgtaaatgtttttgattagatatggatcggataacat

SEQ ID NO: 65870 - DNA, 435 bp, Oryza sativa
  unsure (1)..(435): unsure at all n locations
agcttaaacatagtataaaaagcattctttatatattggacagattncaagtaagaaaactattgagtgaagattgaaatttttcaactcagatttgatgattctcaagtcaagattgaaaacttttaactaagatttaaagactttcaactcagatgtgaaaacttccaagtttgaatctgaaactttggacttagactcgaaaactatcagctcggatctgaaaatttttaaatcaagattaaaaactttcaattcggatgtgaaaactttccactgtagatttgaaacttttaacttagattgaagaactttcaagtcaacaattcaaaatattcaacttagagttttataactctctactgaaatccataacctttgactgaaaatggaggtgatatattcaatttatataatatagcatgaaaaaaatcg

SEQ ID NO: 65871 - DNA, 462 bp, Oryza sativa
  unsure (1)..(462): unsure at all n locations
ctcagctcgtgaatcatatttatatggttagagtagacgcatctcctcgcttaaaatatgcatatacactcgacgattaggaaacttntaattaggtggctttatatttcacaaagctgccggtgaaaatctgatgaaaattagagacgctacacaaactaacattctacaacaacagcatgttcttacaataaaaagttcagttatatagatagtccgtaattttggaatatgttatagtggttagagactctccaagcacaccatatattctgtactcatgtcccatgattcccgagataatagaattagtggtggtatttagctttcaaggttagtaaatatgatataatttaattacaccacggctctgttcatttggggggagatgggaaccatatacctatgcacggaaaatggagtggtccattacctcatgataaattgagtattaactatttt

SEQ ID NO: 65872 - DNA, 453 bp, Oryza sativa
  unsure (1)..(453): unsure at all n locations
ctcagcttcccggttagctcgcttttatctnttccgctgcatttgttatcttttctatttttgtaagacgtggatctgtatgtcaacaattgtcgtttgtgtaccctggctggtcctggacagggattcaatgcacattcagcttagaaattctggttcgagaatttctgggcgtgacaagttggtatcatagccgaccttgaccgtaggacaagcccactggaaaccctaagagccctctgaaccccttttcatatgcatatgcccttttgcacttggaatttgttttgggaaaatttggagttttgcctctttggtttgcgggaaaaatcttggtcgttcattcggatcggattgttttttaaaaaaaaaatgagctcaacctatggctttagaannaatttagttggagtttattcgacagtcagtcgggaatttattgtggggtatgca

SEQ ID NO: 65873 - DNA, 408 bp, Oryza sativa
  unsure (1)..(408): unsure at all n locations
tccatttcagtatttaactgaacacggatcgacgtttcctgctcataattctctctgtccagntctttggatgggaaagctagagtggaaatcataagcaaaacaggccatgctccacagctggaggatccaacccggttcaacaagatcctgctagacttcttgctggctactcacaagcctgatccttcgtcacatggcgcatcgcaataagtcggatgcccactcgaatatttgattgattgaaataagatggttagccaccttctgccattcatagctaaaatttgtactacgaattatntgagaacgcacattgagaaataattaaagaaaatgggtggattgttgatttgttctcttagccatctaaagcattgaatggagtcaatggagagtcanggcaaa

SEQ ID NO: 65874 - DNA, 464 bp, Oryza sativa
  unsure (1)..(464): unsure at all n locations
tctcatctgtagccagacgttttgcttcagcatatatttctctcacaagggtcattctcttctcacaagaaggctccttcccttggtgtttattcctgctgctattcattcttaaagtttgatcactgaaaccactgcatggttcactgtgtgttcctgccttttggtttgggtggcctttgctgtccttctttggtctgagattccgactgttctcatcanaaccaccagatcgatattccttgtctgatctttttcccgatttcagatcagattggtggccggcagcatcatttagacccatcaatctggcaacaacattcagtggctcctcgccagacatcccttctttccacatgtcctgctccatgagcaatttaacaggagcctcaccagatcttttagttggtgagctcaatcttttagttggggactgctntctangctgactatctctctgtagt

SEQ ID NO: 65875 - DNA, 407 bp, Oryza sativa
  unsure (1)..(407): unsure at all n locations
gatcctactactcctgantcaatcatctggaaatgggaaagttcgggccaatacagctcaaaatccgcctataaggccttgttttctggtcgtgtcaccttcctttccaccccaatttggaagtcgctcgctccgcctcgatgctgcttcttcttgtggttggtcgcaattaacagatgctggaccgctgaccgtctgcgcagtcgagggttgccacacccggatcgctgtgttctttgcgatcagtacgaggaaagcattgatcacatcttggtagcatgccctgaatcgagacaattatggtggtggacgcttcaggcaataaagagtccgaactgcttacttgtcaatgagccatccttccacaattggctttgtgagagccgaatgaagaattgggagcggca

SEQ ID NO: 65876 - DNA, 474 bp, Oryza sativa
  unsure (1)..(474): unsure at all n locations
tgtacaattggtctttggtataattatagtgcatatgtttttaagaaagtatgaaatgactagtactgaatttagatcctccactatatattatccaactagtagtttagaactacatgaaattaaacatattaggctttgggttataaaaaaaaaatcaccccttcccatttcgaatacccaacctcaaaatcctgggtatgccccacctctaacccacaagccacaggcgtatggtgccggccggtggccaccacacgcacgcccagccccagccctgtgatcgaatcaactatggttgtgatttgtgcatgtgaacaacttggtagtttaatgttaaatgttgttgccattgtagaattggtaggacttgatgaatcatttggctntatttttagggcacacttgatgttgatgattngtcattggatgtacaaatgatctgtctctcagtctttgcaaagcagaccacat

SEQ ID NO: 65877 - DNA, 480 bp, Oryza sativa
  unsure (1)..(480): unsure at all n locations
tccatccattggagaaaactgtcacagcctcgcaagatggtatgcttatagccagagcaatacatgaactatttacaagtggactagaataggatactgaaagtggacccatgttgtggcaccagatggctccgcactatactgcagagaaacatgctgacttgtttcaaatttgtaaatacagcccattctgttcaattaaactatgcctggcatatctcagttctagtgatcatgtaggtagcaagtcaaacattatagaataagaattgtgcactatccaaaatgggaaaacttgtacctgtaggtttcctttntgctgggagatgagtcatgcatcgcanaatttgaagacacaaatggacttccagatgcacttcttccagcactgctggngctccttacagattcctcaccaaaatcataccctaagtcactctcagctgcatgatcaccagctctgtaatgtctctcagcctt

SEQ ID NO: 65878 - DNA, 361 bp, Oryza sativa
agcttgaatcaaagtgggaatgactctttctcatcaaacacaagtccaggacgggatcttttcgcctagcgacactagagagtgaggagttcgaccattcctggaacgccgcctctttcaagcgcttctatgcctagaatgggtggcacccaaatcgctagcttgttaaaatgtacatacagtcatgtaagcccttttgcaccatgtaagcccttctgcactatgaaagccttttggcaaagaaaaaaaaaggggaaaaagagaaaaaagaaaaaaaaacttgatgttgggctattatccaccatggaggcccgaaccagtataaaatctctatgtcctccgccttcttttcatttttcgt

SEQ ID NO: 65879 - DNA, 453 bp, Oryza sativa
  unsure (1)..(453): unsure at all n locations
tgaatgaacttgagagcaaactttggagagggaacgaatatgtgttgaaatggggtggaattccctctctcggccatctggctnttatagggtacccacaacggtcataaatgacaagtgggacccactagccgttatcctgccaaaagtggcaggtaaccgttgcctggccggttcagctgaaccagtgggttcggccgaacccctggtgggcccaaccagccccacttttggccgttggattccaacggttagtatagtcgtggcacaatgaattttcgttgaaaatcttattttggtttgctctgaaaaatccatgtgaagaatttcctcanaattcaaaaatcctaaatgcaattntgaaattcaaacatgtaatgatgcaagaattataattgtggaaataaacatgcagatacatanccaattacctgttgacgaaggtcgcgtcat

SEQ ID NO: 65880 - DNA, 447 bp, Oryza sativa
  unsure (1)..(447): unsure at all n locations
agctntggcataattgcaacatatggtgtaattttttattgatgggagatccaaactccaagtaaactataagatagagacgtctccgagaaggtacttactgagtcaacagcaattgaaaaatagattttgccttctcctgcaaaccctggtattcatagcaacagcataagctttaagatcacaaagagagacaagtagctagtcaaaaagcttctacctctttcaagatcaatagtggagcacatcaatttatcaagatccttcacatttctgaaaattgtaacattctctttgttcgctgagcagagatctgcaccactttcttgttgctgctgacttctaatcttctgattccatccaattgggtctgaatagcaatccaatatccgtacactggtggaacaatgtaaaaagattctaaaacttactgagcactcagtattt

SEQ ID NO: 65881 - DNA, 431 bp, Oryza sativa
atctccagccttcatatattctgtagtaacactttccattttattatgttagcttggttcaagcgctcaatttattccttattaaaatatcctggttctactgcaagcatagattctactcttaaattctgaaagttcttctctttggaagcttataaaagttgttacagatcattctatgataacttgtggttgcaagaaagtggtgcctcacttgctcctgatcagaatgtttggaacgctgtaatgaggaatgaaaaggctatgaagtttacaagacctatgcgacgagtaagtattactctaagagcccggcctattttgctcatctgattgagtagatttttcaaaagttaacctgctatccgctcttactactttccctctctcagagcttaactaaaatgaggtcggaagcagcgagtcagact

SEQ ID NO: 65882 - DNA, 442 bp, Oryza sativa
aagcttgaaaccggcccttgtaagtggttcttttgttagggagcggttattcaagtggcaaccggaggctcacagccttggcacccttcactgttaccacggcaccatctgatagcactacttttttcagcgtccctgcttccacatcatgctgttaagaaaacagtattagcatattgtatttaaaatacatagtaagagaacagtattagcattttgtatttaaaatacatagtatataaagtaattcacccagtaaagcaatgttaggcatgtctgtaacataatggttagatgaaccttcccatggttaaatacagcaatggcaaccaaatgaccaatcttaaatgaaccccaagctgcagatggtgttagcattatggcaaatgcgtaacagtctataccaccaacttatgaggcgactattagatataactatgcc

SEQ ID NO: 65883 - DNA, 479 bp, Oryza sativa
  unsure (1)..(479): unsure at all n locations
aactcaagcttctcnggttcttggtctctgcccgaggcatcgaggccaacctctagattatacgagctatagagcggatgcgcccccccagcaagcttatggatgttcagtgcgtcaccggctgcatggccgccctaagtcggttcatatcgaggctgggagagaaggcactacccctatttaagctcctcatacgctccgggccgtttacctggactgaagaggctgatcgggccttcactcagttgaaggcgtacctcattactcccccagtcctggtcaccccggagccagatgagccgttgctactctacctggcggtaaccccgtatgtggttagcgcggcattggtcgtggagcgcgacgaggacaaccctcactccgcgtatcctcaccctgtgtcgactctacccgggagagagcaaggaggagaggcccccgatccgaacggcgcctaaagccccctacagcctgagctt

SEQ ID NO: 65884 - DNA, 441 bp, Oryza sativa
agcttgactatgaaaaggtcaaggaggttacatactatgttttgaaggtaataaataacaacctttattaaattacgcaggtgtcatcttctattggtggatattattcattgagcatgtatcgaagcaacttacaactgaactctattttccacataggactgcttgttggtgcaactttaacccttcttctgttcgcctcttttggtagaattgcagaactgttctccaaagatcctatggttctacaaattgttgggagtggtgttctggtatgtgccccttttttttgtatactacaataagaacttcagcactgtcaacgccatctttacccggtctgtttttgtttttgaaagttgctagtgccacccaaccaattaatgccctagcttttatcttcaaggacttactttggtgtctcagacttctcatatttgt

SEQ ID NO: 65885 - DNA, 484 bp, Oryza sativa
  unsure (1)..(484): unsure at all n locations
actcaagcttctcgttcggcggcgacccggacacgttcctccaggtggtcgtccggaaagggacgctctcggtttcgagggacgcgccatggacgggctacatgatgttgagccggtacctgcaagtgaattccagcgacatcttctacttctctgttgtcgacaacgacgagaagagatacataacgttcagcgtctccgagggctcgccgcacaccaggtatgtgattacctacgccggcaggtaccagttccagcgctggaacatcagctcgtcagcgtgggcggtggtcgccgagttgcctagatgggactgcaactactacaactactgcggcccgaacggctactgtgcgacaacacggcgagggcgcctgccgtcccgacgtgcaagtgcctcgcanggttcgagccggcgagcgcggaggagtggaacagcggccggttctcgcgtggttgccggcggacggaggcggtgcagtgc

SEQ ID NO: 65886 - DNA, 341 bp, Oryza sativa
agtcatcggtccgcgaagattaagtggagttttcccggagatgacctagacccaatctttcccagaaagagtagttttcgttagccttctagatcgtgtgttggttgcttgtgtgtaggggtatggtttgcatcattggtggggatgcaaccatactatgttgtttgcttaagcaacttgaagaataaaagtctactcacaacatatcagttggcaagtggcttagtaccttatctttagcaacccctctctttcacctctcttccgttctggtaacagatggtcagtatcacagagaagagcaacaaccacggtgtatgaaagtcacagaacaatggatc

SEQ ID NO: 65887 - DNA, 447 bp, Oryza sativa
tgtcgctcaagtcctcggtttctgcaggtcgggccgaatgcccttcgttgtatacctccaacaagcctctcacgggcaagggtgagtagggagcttctgccgagaccgtgtaagtcgtatggtataccacgaggcgcccccttctagctgatgctcctaccgaaacctatgttgtgttcctgcaaagtaaaaaacttgctctcgtgtaacgaaaaagttttgaggaaaatttccttcctgtgttcgccgatgaggggcgaagaggttaggctgctctttatattattatgaatagtaatggccccatgggccttaccattcttggtttcggccttttactgtttggcctcggtccgacgggaatttaccgtttcgtttacccctagacacgtgtcaggttctgattggtcggtagccgaactgtcacgcgacggggttatataatac

SEQ ID NO: 65888 - DNA, 237 bp, Oryza sativa
atcatggaaccggaatactacccgagtatatgaatgctgactctactttatgttcctgctataccgactatactgctaacttatctaagagatgctttggcaccggtatactgttagctagagcaattactctatgtcatgacgatgatcattagaggatatctggtatatcatgcgtggtgtctagactatgggacaacattatttggagctatatgtcactgatgagatgtgggg

SEQ ID NO: 65889 - DNA, 466 bp, Oryza sativa
  unsure (1)..(466): unsure at all n locations
tgcatgttggtgtggagacatatatgttgtctgtacttatttatggcctaatgtcacgctacacttacatgttngttatagggagttaagaacgaaagtttgccacacgtggtgcacaatgtgaagactttagctgtcagtgtgctttagcttgatgtggataaagttgttgacatattgagatgcttttcttgcttggagaacttgtacttcaaggtattctttactgaaggtttattgtttaacttgtagtaatatttattaccgctcttctaaaatagttaatttttgttcttcatgtcctttatcagtcatgtgaattgacctcaaaagttgtgtggcgtaaaaaataccggaatcttaccaagagccttgacattcgtcttatgacagtagtgttggaagaatatcggagcatctgggcagaatatcattttgcccaatcttttgtactgaatgcaaagac

SEQ ID NO: 65890 - DNA, 439 bp, Oryza sativa
  unsure (1)..(439): unsure at all n locations
tattcatcagttcagtatctatgacaggaacctctntaacatctggtgccacctctgcagccttcttggcagcctctctctccttgactagcatttcctgtgtttctttgtattgttgttgcacctcttgcaaggtagcttgcaactttgcattctcttgtgatttagcttcctcaagatcagcctacaacaaagacccatgcataagtaataataaggtatcacaagttaactatacattttttttttcattttactaccagggaagaacaagatctcccttgccatttcccagatgtctattaggtcatatggtgaatataccgcataggtcactcatatcatggacagaaagatatatatattgatattcatggacagtcagctgtgtgcttgagtgcttaaaccaatatagtgaattagttatgggctgagtcct

SEQ ID NO: 65891 - DNA, 335 bp, Oryza sativa
agcttccggctcgcgtgagaactctattttctggttctgggcctcatcctgatggcgcctcaacacagcaaacagcttagggcagtcaatgaagtccaaaaacctcatcctgaaaagcttcatgagagcagcagcaagcaaggctagacgccaatgtgagcgccttgtctgctcaatcaacaacttttggttgccaacccaacacttggtgatgcgctctcctagtgcttcttccatcttgttcaaatgggcggcgataaccttggcgatagccttcttctgatcatcccaagccttcggcggagcctggcatggccagcaccgtcgggtgacgt

SEQ ID NO: 65892 - DNA, 484 bp, Oryza sativa
  unsure (1)..(484): unsure at all n locations
acactatgaaactaagcttgccggaaggaacatttgcatgattcctttggttgatagataccttngctggggttggcgagggtgggtgctgctgggcaacagcagatcttctttcttgctctctttggatatctctcaaagacagaggcctttgcacctttgctgactcactataccatgctggagcaggtactgcacttgcctgatcactcttccaaggaacataatctccaaaagacggaccacttggtggagccggtagtatttctctctcttgatgtgattgctttgaaggctttcccttttcagtaggtacagatacagtcgatgaatcaaaggaaacaacaggtgctggggctntgactgcagatccttttgcttttgtcgcctttttcttgctcnttttagagtccttggcctcaatgaagtcagtatcatcaatagcaggaacatcatgctgaacaacagcagaagagagaggtgg

SEQ ID NO: 65893 - DNA, 473 bp, Oryza sativa
tcagtttggtgattgctgaggagcatttggatccatcatatctgcctgatactgctagaagagcaagatagctgtgtgattgactcgatcaggataatgtaagttcctgaacaactatgagtatgtgtatgtctgtaccttcttcaagaacatcacaaactaatagtctgttctgtgcttgcgatggttcaatgttcttcgaatgtgatgtccgtgatgagctgttgctgatgaccctcacacgattgtgagttcccagaagcttcatccttagctttgtcggagaaagtgcaccagcctacaggaacaacaaagcagccagtaagtctttctccatggaagttctattaattcaaagtactggatctcaaattaaacttaatattggtgattgcagacagaacttgtagaattctttataagttagaaccgcttacagaaaacacctgtattctgccaagaatgtaatcatt

SEQ ID NO: 65894 - DNA, 468 bp, Oryza sativa
  unsure (1)..(468): unsure at all n locations
ggagggtcggcacatcataacggaagtggaagaagatggtctttctagtgccccggccgaagccgccaagaactatgtacgtcacagcggttgggttgtgcgggataacgtgcctgtcagtacggtgtactggcgaagaacaagggcacgcggagatcatgagagctttgtcccagattcggagaaagagatgctgtggaccacaatgctcgagacattcacccttcccgcgggtacagaggacaaagtgaaaaggtggactctgaagaaaatggcagaacagttttagagcttcaagggagagttgtacaagaaatatatcctgaatgggcagacaccgaacttcgacacattcctcaagctaagggatcactgngacgagttcgttgcatataagacaggtgaacaatggcaggcgatgatggatagaaacaaagaatatgccgccaagaaaaataccatcaccac

SEQ ID NO: 65895 - DNA, 429 bp, Oryza sativa
  unsure (1)..(429): unsure at all n locations
agcttgagaccattctgaatgcagcggttattaatcggtgatagttaatactaacagaagtacatgccactgcaggaagataagtataagcatggtggagcagatgcagaggcatttctgttggcctttcccacaggttctgaaccagtaatgagaattaggtaagccataagcaaagcaatagcattactagtagttaaatctggtcttctcctatctttagattctttcttgaagcaccagctgcatctgcaatagactaactattcattttgtatctgctatagagtactattcattngtatctacatgtgacatgtgattgaatcagcatgcatggagcacaactgcaaaagtgccagatcgatctgattaatctatgcacacttgcacagttgatccacttaactcgtgcaaccactaacttac

SEQ ID NO: 65896 - DNA, 452 bp, Oryza sativa
  unsure (1)..(452): unsure at all n locations
atcaacgtttcagaattcagatctatattacaagtacctgtaccatatttttatctgaaaagccgtttctcttgaaaaagagattatgtactctcttttttctgaaaagccttttcttttgaaaaagagattctgaaaagtatggctgccatcggatggcctaatcagccaaaaaaaagcccaattttgaatatttaagcttaatttaagattgatcttgagatattgtcaatggtagttctgtttcaacattggtttttaagtcaccaagaacacatttataaaagtttcacctacgaattcattgttatttcctaataaaccgtgttgacttattagaaaataagacaaacgatggggacctatcactntcaggtcggcaatcaccatgctgtgttgtgacttgcaagtagcaggcagcaactaggatcatctacaattctctttaccta

SEQ ID NO: 65897 - DNA, 467 bp, Oryza sativa
  unsure (1)..(467): unsure at all n locations
tccaaggtaaaagttggcacgcatgagaattaactaactgttctgtagctaaggaattagctagaaaatagctactacaagtattatatatatatatacccttgaaagatcatccggaagagtggaatgcattttgctctggactgaggacagaaattcatatttcttcttcttcttttggcgtatgctacatgcatgttcaaacatagtggtgacatanaaagttttcctgatataggacatggaaaacttcagataagagacaggaataaatggcttcggcctgttcactcaaattattcctcgttataccagcataagctagccgttcttttctacactgaggtagcggtcaattcctgaagttgattggtaaattcttctgaagttatgaacaggcagtattgatacatatacatcacctggtagtgtactagtagtctgtactcagtactacttttgtagtt

SEQ ID NO: 65898 - DNA, 437 bp, Oryza sativa
agctttggagaagatgtcttacgtggagtcctggcttataccccagatgagcgcctgtgaagatggagccgtaggcccgctagcccgctgctgtttatttttgattgtcaggccttaagtgcctttgtaataatgtaaatattatcgatataataaagatgtgtcttttatatcatgtttgtgtggtgtaccccggcttttcctgggacggggattaatacactagcgttcgggaaaaggcaattttcccggtcgcgacaagctggtatcagagccatctcgactgtaggattagccaagtggataaaacctaaggacatattttataaataaaattatttgcgaaagatcctttttctccttcccctaatgctatatgcaaaaggtatactccgttcttccttcttcggatcttaactaatactagatggtcaggt

SEQ ID NO: 65899 - DNA, 466 bp, Oryza sativa
  unsure (1)..(466): unsure at all n locations
cttcgaaactacgacatataaggctgcattcttcagttaaatttctcactctctcgtttaaacgcacgcatgcttcctaaattgttaaatggtgtatgatttgtaaaaattttctgtagaaaagttgctttaaaaattatattaatttaattttaaatctttttaaagctaataattaattaatcaattgctttgtttttcgtgtcgatgtgaggatngggaaccctcgcctatgaacacaacctaagtagtactactacaagccttttgtaatcaaggagaaaaataacaggataaggagagcaaaaaggaaggagacaagcatggttgaatcagctggccggtcagatgactcgggctcacatgcatcatggagataatatgttgtgttgggacataatcatatcanaggcatatgtacatagtgcaggctgtttatttgctcacaaaatctaatctctctctt

SEQ ID NO: 65900 - DNA, 460 bp, Oryza sativa
  unsure (1)..(460): unsure at all n locations
tgtcgagctcttctcgtatggcttggttccggtctggagctaatctctgtagttntagctttactggcttggcatcgggtcgcaccataagtttatgctcaatcacctccctatggacccgggcatgtcggacggctgccaagcgaacacgtctgcattgtcacggaggaaggcgatgaacgcgagttcctatttctcgtccagtgacgccccgatcttgaccgtcttgtcggngttggcactggagagtggaacgatcttgattgcgccgtctggcttcggcatcttgtttgtttagctcactttcttgggtggctcacctgtggtgggagggttgggcgtgtgctcgacctgtcgaggctccgcttgtcacactgcaccaccagctttgtgttcccttgaatagtgattggtcccttcgggccaggcatcttgagcacttggtatgcgtagtgagata

SEQ ID NO: 65901 - DNA, 376 bp, Oryza sativa
taagcttgaatatatggagatattgggagtgtcttgtcatatgcagggagtagtgacttcattcggaacctaaaaaagctgaagatactctcatgtgaaaaattgagaaaggtgccttttgagtcgttgggtttagccacgaaagagataataattaagtggtgtgatccatatgatgatacgttctcgaggtatttgcaagggctaaacggtctgacacgtttataggtaggtggtagccggaggtgcaaattaatcattccatgtaaacaattgatgtccttggagtacctacatattcaaggttttggagatgtgtgcattaaaagtggactgtggtatatcaaaaacctgaagaatatactgattattgatt

SEQ ID NO: 65902 - DNA, 475 bp, Oryza sativa
  unsure (1)..(475): unsure at all n locations
tcccctcctgcatcttacctgcatgacgcccnccaacaagctgtgttttcagtaagagggttggtcactagctcttatgtgtcctgngattcttgatttctagctttgcaattgattggtgagatgttgtttgatttgttgatgggggcggctgaacgagtctgtgaatctgtgttggcgcagatgcagttggggtgggtttcggtcacgtctggtggtgtggattagtgaacagtgaacactgcctaaaatcgatgtaggagaataatgatctcctggcctgatgattgctgatttcgatccgtggacaaattatattattaaatcaaatctgcattcgtgatgtgatctccaaatctatattgnggagagtctatcccttcgaagtcttacctatctatatatctatctatctgtctttatacatattttgttcttggaagttgactatagtggattttcagaaatatgtatc

SEQ ID NO: 65903 - DNA, 476 bp, Oryza sativa
actcaagcttcactggtggtaggcgatacatgtaccacaattatcacgatgtattgtttatctgccgtgcctatggcgcacctgatatatttacaacttttacctgcaatccacagtggcaagaaattgaagatgcgttgcagttcgaaccaggccagagtttttaaaatgaaacttgatgaaatggcttctgacattatgtctggtgttccctttgggcgtgtgcgagcaaggtagtctcctttttgctatttctttggattgcattttttgttgtgttattaattttgttcggctggttttcctaccatatggtgtagtgctttacagcgtggagtttcagaagagaggcctcccgcacgtccatatactggtgtggcgtgatgcgccaagcaccgatgcatcaccatctatcgtcgacacatacatcagtgctgaacttcctgatccttacgaaaaccaacttgattatttgt

SEQ ID NO: 65904 - DNA, 428 bp, Oryza sativa
  unsure (1)..(428): unsure at all n locations
agctttttggtacactgatttgttctctggaaccctgcaagatngtgatgcataagattgttatggttaatattgagtagaccaacgaaatgtaaatgaatggttaatatttggtgtaagacaaaagagattgacacacatgttcatctaataggattccatcaatgctgatcaatggatctgctgattttgatctcatgtttagagcatcccataatcttattagacggccaaaaaccttgcagttttgctggccaatagttacatctttgagtgctgtagctgagcttgccatcgaaataaatctgaaacaataacaaataatattagataactaagttattatttttattgagcagaatatgtagataaaagtagaatgaaacaaaacatttgataagatagggcatgcacaatatacctagata

SEQ ID NO: 65905 - DNA, 467 bp, Oryza sativa
  unsure (1)..(467): unsure at all n locations
ntaagaggtccaatacctgggctaatccagtattaactgtatgttctaagcggcgatatagctntgacagacaagacactgttttctccagtggtctataccatgtcacatatatgtccgagttgccactaacctacagattgaaacataagaaattagattaatgctttaactacactgataattcataatgctcgtgattaatactggattcagttataagcaacatgtgcttctgttaacatcagatgacagcatggagaaaaatgatgttagcacataagggagtgaagaaattacaaaatctataaaactgatagtaccatcttaagcacacatctgagccagtaaaactgtgtgtgaaccaactgttaggacagattttattgaatgactangaccatgaagagttaaattgaaatgaactttcattaaactaagaacaaaactaacattagaacttgtag

SEQ ID NO: 65906 - DNA, 465 bp, Oryza sativa
  unsure (1)..(465): unsure at all n locations
nggagtgcntgtggggtggtggtggtggtggtggatcattgtgttgcggtggagtctggatgtggcggaggaaagcagccatcatgttggcctgctgagcgaggatctgggtgaggatggggttggtatctggtggcggcggtggtggcggacggggaggtggatgtgggctgccattggtgttgtggttgttgccttcgggtggactgtctctaccgggagcagcgcttttcctggttgtcaccatctgaagattccacacacaaccagcacactgaaagagctgaccattataactaaccacccacgactaccatacttcttgaatttcattctgctattaaattgcttcattaacgttgcagttgcctatgcacatatatatagacgtgcttcgactcatttattcctcacaccggtgtatccattgcccacacgactcctgctaaatacaaacataaagaa

SEQ ID NO: 65907 - DNA, 247 bp, Oryza sativa
acatgaaataaaattgatttttttttggtccttgcatcctattttccaagcttgtcaattctattccagaggtcattctggtttgctcttggatggaacattctgataacagctgatacatgtgtacttgttaataaaataacacaagtttattattcccatcatacgtgcttaattgtggatatataataattccatgaatataagtttaaaaatgcctttatattatatattaaatatttaaaac

SEQ ID NO: 65908 - DNA, 431 bp, Oryza sativa
  unsure (1)..(431): unsure at all n locations
tgcggcggagncaggatgagggggaggaaagcagccaacacgccggcccgccgagcgaggatatgggtgaggatggngttggtatcgggcggcggtggtggtggcggatggggaggaggaggtgggccgccacggaagatgaggaagccgcctacggggtgaccgcgctcaccggaagcagcgcttcccccggttggcaccacctgaagaggccacacagaaccagcaaacagaaagagcggacgactaaaaccaaccacccacgacgaccataatgcttgaagagacgtctgcgaacaaacaggggcaacaaggtagaagatgcatatgcaaacaaaataaagacaggccccgacacaattataccacacaccggtagaaccatgccccacacgactctgccagaagcaaacaacaagaacacacgcgcg

SEQ ID NO: 65909 - DNA, 423 bp, Oryza sativa
  unsure (1)..(423): unsure at all n locations
acaaagnnggagtatgttatgacctaaatggtagttcatgatgcattangcgaccaagcgttcatcactgaacaaaccaacatggataatttacagtgtagtttattatgggagcttgttgctgatgtcctggtcttacagaatcaatgcaacttatgcaaaagaaaaaactaggaagtgcctccacatatttttttcactaataagaatttctaccgtggntctttgtttgttttaacatgttagcagcattattcatcatttcgtctgtacgattgtacatganagttggttacttagtttatgcgcctatacgcaatagttcccttttggtaacttccatttctaatttgcccggatgcaacttagtttactatnttgtcataaaaggcttaatttactgtgctgagacttatacatgga

SEQ ID NO: 65910 - DNA, 370 bp, Oryza sativa
  unsure (1)..(370): unsure at all n locations
tctcgtacacaccacattagaaagttaaatatttttattcaaattagacatctactnctaataatgttacacatatctgctaagtctgatattcaaattcattatattttagccgtaacaaaaaagtggaaaatcatatagctttaagtgtaaaaatctgtcagaactttgtcttttttgttacggctaaaatataataaatttgaagataagatttcacacgtgggtgtaatactatggaagtatgtgtcccattttttctagaattttctgtgatattttcttaatggtgtgcatggagtgtacacgggaagtttgtgtgcatacgatatgctccccatatatatgtgtgtatgtgtgggggttgggg

SEQ ID NO: 65911 - DNA, 436 bp, Oryza sativa
  unsure (1)..(436): unsure at all n locations
agcttgggcattggaccttcttcagtgacttanaaaaaagctcactctatcaaacggttataaaaagaataaatagatttaatcacaggatatgtgtgaggatgttctgtgcatatctttttttaagattaggtatgctctaatcatatattctatgcatgttcttgtttgagacactctcctcctgatgtctgtatataagacgaacatgttacgtaactttgagctagaatttctatttgatgaaatagttattacacagcaagtctttcttctctatagaccctcaaatcactttgtatacattcatagactgccagtgacaatacttattttcttatgccatgcacaaaaattatctcttcattaaagatatgtgtgaactccttagccatagctaccaccattaaacttgcccgtcaaatgaactaaaatt

SEQ ID NO: 65912 - DNA, 152 bp, Oryza sativa
tgtgggttgtggctgtaggatactgtatgtattttttaatgaaactagaagtggtgattcctggtctctgcaccatgggtgctcataaccattacactgccataatcagcgataaaaaaagagaaacaagatagaaatactccctccgtttc

SEQ ID NO: 65913 - DNA, 312 bp, Oryza sativa
atatctatggctactcttgacataacgtgcggaacagtgtactgcttattgttctggactgtggacataaactcagatttcattctgtgcatatggcgacagctacgtgcatgggctaacactcggccgacagagagagtttttgtgtaataggacatggactacttcacatgagagacaggcatgagagtgcttcttccagtgaacatgaagaattgctcctcataccagatatatcgaggcggtcttttctgggctgaagcattgcgcgatctctagacgtagctgcttcatatcctctgactgatcaac

SEQ ID NO: 65914 - DNA, 419 bp, Oryza sativa
agcttcgagacagatcatggtgtgtgttgtctattacttggcactgcccaaagttgtgtgctattgaacggcttcgaaaatgtatatttttgccgcatcatggattgagtgttccagcttaccagctctgctagagctgaaactaagagataaaatggtattcgaatgcatatatgcagaggggaagtgtcagaaagaggtgaaaaatatctgctttcatatgactccaaattaattaaatctcaatagcatttgaggtaaaaaaatgttcttctgggtaatttagtagctcccacatagatatacacattgcattcctaaatggacgcctgttagagcctaacgcatgcatatatgtatgtctagtacagagacggaatggaatgtgtggaaatctaaaatcaagaattttatccatt

SEQ ID NO: 65915 - DNA, 381 bp, Oryza sativa
tttgcgatggcttgtctaatttgtgttgagcatccatgactccggccagggtgggtatgtcgggtgcttgggtctcttcattgctggttgacgcccgacgtcggcttggcatctgtggaggccgattaccgtagcattctaatttcctaacctagccttatgggtttaatcccgctaagggaatttgctttgaagtgaactttgtgttgcaagcatggtggaataaactcattcataacacagcagtaataatatcattaattacatcacagagttccacaggtagtacataaatcatgatgtaatcgactgcacatatacacagtccataataaagttatccaaaagatcctcgaactaatcatcaactactcgcaatct

SEQ ID NO: 65916 - DNA, 318 bp, Oryza sativa
acataaaactaatgtatacgaatgtatatacgaccgtaatacatatacacatgcattctactatacgtttgtacatacacaccgacacaaacaagcaacgtataatttagccacgacacggataaataacactctaatttatgtccgtcaaaaacacgaaccctacgaggcagaaagagaacaagcaagctaatgataatggtcggtacacgtaaacagcgcatacaacacgctatgtatatgtaatacacctctgaagaatcaataactctaatctatgaccagataatgaatccagactggtgtatctatcaatca

SEQ ID NO: 65917 - DNA, 468 bp, Oryza sativa
  unsure (1)..(468): unsure at all n locations
ntagagaataaatacatagaaatgctgtacaaaananattttagaaaggtgatactgattgttgaaaagtccaactatgtggcttagtattgtctataattaaacaagccctaaagaagaaaaatactagcacctaacctcttgccctagtccacaatcatttttactgactttaaattactagcaaagtacaaccataagaaggtactgtactaacaagagaacaatgaaaaaactaagaaaggacatccaactagaaacaatggaaagttctagccatctaatccttttgtatatccctatttaattgtacactccatggaacagctaggcatatgcatcatcaacccccatcaattgtaaggcctataatacaatttcagttttgtagttaagatganaaaaataccaacattgaaaaggannaaaagaanagaatagaaagaaaagaagcaaagcattagcact

SEQ ID NO: 65918 - DNA, 476 bp, Oryza sativa
  unsure (1)..(476): unsure at all n locations
ngccagttctttagcaaacacaccaagttgccagcacaggtgctccatattatccctttgcatggccgttctcgtgttgngggctcgatatactatggccattcccacgaggacaagggggctacagattccagttcgcggcaatcgacaaattcgctaagtggattgaagcagagccaacacgagaaatcaaagtcgacaacgccatataattcatcaaggggatattctgcagatatggattgcctcaccgcatcctcacagacaatggctcccagttcactagcggccagattactgcattgagctaggagtcaagatctgcttcgcctcagtatcccatcctcaaagcaacggacaagtcgagcgtgccaacggaatagtactccaagggatcaaaacctgcgtgtacgataggctcatggcctacgacacanaatgggtagaagaactcccgtcagtccaatgagccgtac

SEQ ID NO: 65919 - DNA, 464 bp, Oryza sativa
  unsure (1)..(464): unsure at all n locations
taatntctcaattatgccagtgcatgctgtacaaacgaatgttngcttgtatgctaatgtacagatgtaaatataattgctcgtacaacaaattaattttccatggtaacagaagagccatatcccaatttcacattaataccaagaggctgagctttttctcatgatagagaatctaaaaaagaaaataacaaaacctattgacgcaacccaagctgccagcttatcttgcatctataccattgagagtatgaggtacattctgaaatgctaaatcgagcacatgaattatcataaggatagtcctaaacattctagtacatattaagtttatgttcctagcttggtgtacatgtcactgtgagagtattttaccggtaactgtgaagaaacaagtatggcggctaanagatgtttcatttggcagaaagtatcatgttccattttgcanaaagtatctcact

SEQ ID NO: 65920 - DNA, 416 bp, Oryza sativa
tgcaagctttggatactctgggcacgcttttctaaactgctaaacggtagtttcatgtgaacactttctatataaaagttgttctaaaatatcaaattaatatatttttcaagtttgtaatgattagaacttaattaatcacataatattatcacctcgttttacgtgaaacacttaatcttcatcttaaaggaagattcaaacaccacctaagtttctctctcctgattagtattcccagaggtctcctttgccttttgtgccgtatttgttttggctatcttgttttcccaacatctaatcgagaatactgtgtcggccgggttgtcaagtttcccggtacaaatcatgttcaaaggcacaagttttgaacaggtgatcagtatcctcaaaagcttctgagcaaagagagcata

SEQ ID NO: 65921 - DNA, 386 bp, Oryza sativa
  unsure (1)..(386): unsure at all n locations
tagatatggatgggtaattacttcattntgtcctcatanaatatgtannacgaagtttttttttttgtttttgatcatgcanggttgtgatgcgtccatccttcttgatcccacgaaggcaaacggctcgccggagaagacagcgatcccgctccgcgggtacgacgccgtgaacaagatcaaggcggccgtcgaggccgtctgccccggcaaggtctcctgcgccgacatcctcgccttcgccgcccgcgactcggtggccaagtccggcggcttcgtctacccggtccccgccggcagccgcgacggcaacgtgtcgtccgccttctccgtcttctccagcatcccgtcgccgttcttcgacgccggggagctcggtcagagct

SEQ ID NO: 65922 - DNA, 444 bp, Oryza sativa
cagcgtgcagctttagcgacatccatggtcatttgatttacacgcatacttcattgtgctagctttgttgtcttcgatgccatcgaaatgcacccggcctatgacacataggaacgcgtgcatgctgattaagaactcgtttgatgctcgatctttcggtctcaacagaatcgttgtgattcaattggtcctgttcgatctctcttcgaaggaaaaaaaaaagaaaataaatcatgtcatgctgtgtacctacatgccaagctgcaagactaaaagccctgcacatcgtgtgggttgatgaaagagacaaagcttcgggccagctagctcgtgcatgatctttgatagatgattaatatcttttcggtggaagcataaactgaactctagtactgatctgtgatgcggcacacgcaaatgccattataatcatgtctcagagac

SEQ ID NO: 65923 - DNA, 467 bp, Oryza sativa
actcaagctgctgcagtccttcttgctgttactagtgtcatttttcttgagccattattgttaccactactgtctaggacacgagtagaccagcaactaagggcaagtgacttgggatttttattcagcattactatctgtcattggattgtgtaccactcagatacatatatttggccttccatgctccacatattacttctggacagcacaagttcttgatccctgcaatcgctgactacgccttccaggtatcctttgctttgctggtaagaaccttataagagcttggttgggtactccatattgctgagaatcgttgagaggcaccactacacctgcgtagtagattattagggataaccttcaccgtttgtgctgttttggtgtttaaatggcaggtaacgaaggtgagaagagtccccaggattttgctgactgtgtcagtcaagagcaactacgaactc

SEQ ID NO: 65924 - DNA, 478 bp, Oryza sativa
  unsure (1)..(478): unsure at all n locations
tccattagcagttcgcttgacagaagaattcataacaccttataacctgcagaagagaagatactgaattcataatcctgatgagggaaataagtggcaaacattgggatacttgtaaatnttttttttttgcaccatatagatcttatttatatttttgctgtttaatataagtatattacatccctccctcccactctgacccattctgtactgctcctatctaattatgtcttctcttgattntgggggctaagcaaggtgactaagaagaacaatacctattatctctcaaacaattttcttcatcaaatggccggttaaaaagctcctctgcctgtacaaattcaggattccaaagtacagcagtatcttttggaatacaagcctggatactgtacacttgaactgaacaagaatctttaaattcttgccttgcttctgcatcantaaagaaaaaanaacanatgctccactt

SEQ ID NO: 65925 - DNA, 314 bp, Oryza sativa
cagcactctctgccctgagccttctttcacctctgtgttaaaacaaaaaacatacccctcagaagatcgctctatgagctatccccattccataatggtttacctctcttcttccccctttttggaccaacggaccccaactccctccccctttctttctcccaccccctgggtaatgcgaactttattgttaaaatataaaatacggataaatcccaacttttttcctttaaaaatggatggggcgacttccttaataaaactctcggggcgcccctaaccagagggaggggctccccacccgggggggggga

SEQ ID NO: 65926 - DNA, 475 bp, Oryza sativa
tcggtataaatgtagctgtagtaagtagcataaaaggagttgcaagtagcaatatgtatactgcatacctgtacgctgctaacctggtcaattgatctattccattgtactgtatcatatcatgattcatagaaaaccaagcacacagataatacaaacttatggtcacgtagaattacttggagattatactcgcgcctttgatcaaactgagaacacaaaatgttttgacagtacatctctctagtaaaatccaaacatgatttcttggttggtggaagaggatcaatagtcatccacatatcgatgtgttcgagagggataggaaagcatgtggaagaatcgggaatggaacagtaattacgatccgtggagggttgggatggaatgcaatgatggtgattaaagccatgaagccttcgtcagtcactcaaaaacatacgccagacaatggtttcattgtgcaggaagatgg

SEQ ID NO: 65927 - DNA, 437 bp, Oryza sativa
agcttgttcaatagatggatccaaggcgggcagatcatcagtcgacatattagttggttgtggttgagttttcttgaatttgatctttttctttggatccaaggctaaggtactcatggctaatgatctggttttccttttcttgcctgcatcggctggttccctagttaggccgcgaaggagagttgaagtcttgggggcatggtagccgatgaaatggggagataatccacctccattcagaattagacctgaagcatattcaatgttcttgccactgttactttgatgaggaggggaggactctgttgtctgcaaaacaggagcaaaaagttagtcaagtaatgaatcggctaactggttatgcaaattagaaatgacaaagtttacctcgggcatgacctcacgtaatacatcttgcatatacattgaagctg

SEQ ID NO: 65928 - DNA, 398 bp, Oryza sativa
tagagtcagtatcggcttcaagttctagaatcagccgatgggagtcaagtcgccacgatgtcgtgttcttggtggagtcggatcaatcaaaggaagcttatctagaagagtccgagttcaagaaggatgcgacatgacagtttatctattaattaggcatagtttgttagtttccttttatctttaggaaagtgtgtttagtgtccgataaggactttacttttcctttttagtttctttcttgtccgacaaggactagtatctccctatgggtataaatatgtacacccggggtcattgtaatatatcaatctatcgatcaaccatactctcggcgcatcgccaccctctttaccgagggttttacttatcatccgacagaacttggcacctgacgc

SEQ ID NO: 65929 - DNA, 415 bp, Oryza sativa
  unsure (1)..(415): unsure at all n locations
tgtctaaccctagctggcatatcatggattcagggactttctaagcacagaagaatcatacacacaggagtagggtattacgcttcatagcggcccgaacctgtataaacctcttttgtctcatcgtcttggaggagcctccgagatcaagatcacacacagtttcgctcaccaaatcctcgaatctcacccgctgcccccggccgaactctcaaaggggggcctcacagccgcctgctagagagggtcacctctcgacagctggcgcgccaggtaggaggcgcgttcgtgatttttgaggttctttcgatcgccggcgtggtgattgtcgcgtcgccgctacgagggaaggcgcagcatcctcaggagtgtcgcgccaccccangcagggggcaagggcccccacgttcccact

SEQ ID NO: 65930 - DNA, 346 bp, Oryza sativa
agcttagtgtgaacctgcacaaatgtgtgttgctttgttagctgttttaattgacggggaagaagagaatggatttgtagaaacagaacacaaattgtttgactgttcaacttcagcaggcacatggcaacttgagattattgtcgattacgacgacccaggactgcacatggccccacttgtaccggcctaacgaacaaatatataatcttcagtagcaagtgacagcactacgcgttatgttcttatattagcacattagcgaaaagaacaggactgcagaaaaaccagctacagattaaccgctaaacaactcattccaaaacacagttgttcttcctagtga

SEQ ID NO: 65931 - DNA, 376 bp, Oryza sativa
agcttgtcgatcatctcgagtaattcttcttctcttgccttcgaattgctccgagcattaatgccgacaatgagtagattaagacagcacggtccgattcttaaaacatccgtagctgccaaaaacttttttaactagacccgtctatgtgtcattatattgtttttttatgtctcttccttaaactgaagagataaatccctaaagtcacgaaatttcttaaagaaacatccttgtaaatgcatacagttccaaaatttcatgccatgggtcatcacaaccgcaaacatctctcctattagggattattgaggactcccaaagatcgggtttcaaaccttcacagaatttcgaaatgaacaacggttatgttatt

SEQ ID NO: 65932 - DNA, 457 bp, Oryza sativa
  unsure (1)..(457): unsure at all n locations
tgactntctcggttcgagaagtgcattgatggaactggattggctctctcccgctctttcctcgcccccacctcccccaatctctaacccaacccgggatcctacatccctaactccaccacctttgtcggtgtcattggagccggcggacccggagaaaaagctaataccagagcatgaatctgtaagattntggcccaataattaatctatcgaatgccatttagcatttcactcatttatttgttatttatgagttatatctatgttactgtcaaattggataaagagtacacttgtagttaaattgagtgactctatattctatactctccccgctcaaaatattatgcgtattctgaccgtttaattttacattttagttaatgatttatttaatactatattcgntttaaaatatagtaccataatttagataaaccctttgccaaatata

SEQ ID NO: 65933 - DNA, 340 bp, Oryza sativa
agcttctcgcctcgaaaacacaatcttgcaagcgaaatttggagtttctaattttgccaaacccaaaaagcgggggagaatcggatgtaattttttttacatatccatggatatataaattgtctgattccgagtccgtatgaatgcctattaaaataaaggacactcaaatgtaaaaaaaaaaaaaactcaacaaacccatttttttatagaatgtaaaaaaggcaatgtacaaacttttttttgtttttttactataggaaaaacaaaaacaaaaaacaacgagtgaattttaagagaggggagagaggggggggcgctcaaggggggagggggcggc

SEQ ID NO: 65934 - DNA, 386 bp, Oryza sativa
tctgtgtaatgtgtataccaaattttcctgctcttattttcatttttgtactcttgcaagaatctgagaatattgcctgctaatcaaattactgaagaaagcaatatactgtctgcttctctcctagaagagttcactggctaaagttccatgtgtaagtttggttgaataaaaccattctaatgtctttgctgtgcaacaaaggtgtatgctggcaaacttattatattcatcacgttggttaagaaccgagtagtcgaaaaaaaaacttgctgtatttatcacatgaaagagaagaattcacgaagcacgtgcttgagatgtgcaacaagattatctggacagctacaacttggatttttcctgaacctgcctagtaactcact

SEQ ID NO: 65935 - DNA, 343 bp, Oryza sativa
agcttaaggctcgaaagggtgctcttggagaggatgtgaagacactgcaaaagaagaataatgatgcaagcacttggaaagaagaaaataaagaactgttcatgtcactgaatgaacaagatgaaggtcccaaggagtctggctcacagggagttgcttttgaagggaaagaagacctattcttgcagcaagggctgctaatcattcaaaccatataccatggtgctacaaaaactctttctttaagcttaaacttgcggaagaaaatcttagagatattgagtagtgttgacctaacacattctgacgaactggaagtagaagtcatggatgacctgaagaa

SEQ ID NO: 65936 - DNA, 181 bp, Oryza sativa
  unsure (1)..(181): unsure at all n locations
ngagaggtactgtactactcctatttgttaagagctcttgtgtccacttgattgtatcattcgaatggaagaatcacacctgtttagactaaaatagcccttctactcgtcagggtgatcgaatagtgaanaataatgtcatgaagtggccgatccatttgattgtgaagcatttttttct

SEQ ID NO: 65937 - DNA, 359 bp, Oryza sativa
agcttgagctgaattataagatgctctattgtactatattgtatactagaataggaagagagtaaagtaaaaggagtcggaagaattctggagttgtcggtaatcttctcctatttcttttattctgtttattactctgaattcattataatattcttcttgagtaatttagatttatcttgtgagaattatctcttggttagttcctaaatagcatacaggattattgttcactataatcaactaaaatatagtgattgctttggtgagttataaacactaaagtagatagtaattgcttagacgttttgtttaggtaattgttatccagtaattgctgcgtatcccacagtacgttg

SEQ ID NO: 65938 - DNA, 466 bp, Oryza sativa
  unsure (1)..(466): unsure at all n locations
tctcaaagctagtttcatcagagaagttcttcattcagagtgtctagccaacccagtcatggtgcgcaaggccaacgggaaatggaggatgtgtgtcgatttcaccgacctcaacaaggcgtgtcccaaggatcactttcctcttcctcggatagaccaattggtggactcaacagctggttgtgagttgttaagttttcttgacgcttactctggctaccaccagatcagcatggcaaaagaggacgaggagaagacaacattaatcacgccgttcggcgtattctgctacgtcaagatgccattctgactgataaccgcaggaaacactatccagcgcacggttcaaggngcactcaatgacctacttggacacaatgttgaggcctacgtcgatgacattgttttcatgacaaaaacaagcgactcattgatcgatgacctctcggaaacgttcgacaacctc

SEQ ID NO: 65939 - DNA, 431 bp, Oryza sativa
  unsure (1)..(431): unsure at all n locations
tatnttcagctntaattaactaaccacatcattgttctgctgctaataacaacacaggtgagtggtttatgattattcactttaatacaccacgtgaattccttctgccatgcaggcagggttggacagaaaacacgcgaaggaattaaaatgcctggaacgggaaaaatgaaacatgtcagtttgactctgcaggttgagaacgacctgaaacatcagcttagtattggcgcattaaaacctggcgcacgcctgattactaaaaatctggcggagcaattaggtatgagtattacacctgtgcgtgaagcattattacgtctggtttcggtgaatgcgctttctgtcgcacctgcacaagcatttacagttccggaagtggggaaacgtcaattagacgaaatcaatcggatccgctacgaactggaatt

SEQ ID NO: 65940 - DNA, 373 bp, Oryza sativa
agcttgaatgctgtgaataaagaattttccaaagtatacgccatgcgcacactgctttaacagatgtgcttaagtccctaaaagacacatggtttcaccacacctggaaatatatggcatatgtggtgtaaaatccgagtaagtaaactcataaaggatgtaccaaccgcctgaaaaatgaccataatatataatcagcctaagccataatattggtcaataaaaatgcacacttacgtggcaaaaagcaatgatattgtatccaatcaattgcttgataaacccaaacagcaccttgactatataaaaaagtcagcggggcagctatataaagctttactgtttgacaccttttaagatgcattgtaccaac

SEQ ID NO: 65941 - DNA, 370 bp, Oryza sativa
tgctgatcttaagcaatatttcttatcgatcgatggcattacattatactactacatgatatggcttctggaaggaacacatataatgcagaacaaatctattattaactacaattaagaatgttcttggagccgaaaatgacgctactcttaatcacgagctgatagaattggtcaaacggctattatgtcctccatctccatgtcagctgaaccaaagtatcacaaataaataaaatactataacgaaagcgtcatgactacgcaggcttaaagacgataaatacaacttaagctggttgtgatcaatgataaccccctaatttccagacacttcgaaatcaagttgacatttgatcgagatatattt

SEQ ID NO: 65942 - DNA, 368 bp, Oryza sativa
agctttgatcaaggtgtggtgtgtaatgaatattgttcttgtgttgagtaaacaacgggactctacatccattatgttatttattttgttattgaatggggctctgttgatgtatttttattctcatcacggattcatgcagttcatgagtacacatggaggacccacagaaattcctatacttgattctgttatttctaatgctgtagttcctggatctgatatatcaacagttttaagtcgtgaagaccgtgaagatatttcattgctatttttggaggttagagagttttgactcgatgttcgtccttttgcttgttacaattcaaggcatatgttatagtttttaagacactaaacagtaaacc

SEQ ID NO: 65943 - DNA, 327 bp, Oryza sativa
agctagggtactgcctttgttcttgtttgtatttggtgctggccccggtggtgcggtggactgcaattgcaatctgtgcaatgatgaagattgcgtctcctgttcttataatacggagccctttaatggcgtgcatgttataatagcgctatatgataggagggggaatcgggtattgccatgattagcaccgggttctccttattcgaacactggttatatattgggcatgtgcgaaaatctttggctgggcagggattttaacaaaatatgggcccacaacggatggatgaattattaaatgcaagtttgaaaatatgcccataa

SEQ ID NO: 65944 - DNA, 77 bp, Oryza sativa
accaacccactcaaagagaacgagagccttccttttcatttataaacggcgcggccgagacgtgaaccgtgcaaccc

SEQ ID NO: 65945 - DNA, 364 bp, Oryza sativa
  unsure (1)..(364): unsure at all n locations
agcttcgaggggtcggcccctcngctcgcgttcgcccccagctccgacgaggagggcgacgccagcggtgaggacgacggtggcgacgaggccggcgacccgggcacattggaatgagcccccaggcccccgccaatctccaattttttctttttctttcttctttttgtatagatcaacttaatctgcaatcaaaaatgatgaaaaatttcttatgttaactttattttgctatgcatatgagttgaggatgatttgtgccgtggtccttttgcattttagcttgatttaagggctcgtgctcaagtcccgatcctcaaatggctcgggtcggggctagtgcctggggagatccacatgtcga

SEQ ID NO: 65946 - DNA, 354 bp, Oryza sativa
tgaagacttgaccattggcccagtccttactgtgagtgatttactctaatcactagccattttcatgtattaatactattttttgttagtatttgaacattatgtggttcaaaagttgttgaaaaacaaaatatggatgggcaactatatatgttcctgaatccctgctagtggctactaagttcaaatatcaaagtgtctaaaaaaactgactggaactgatccttgcaaaacatatatagagaaaatggacatggagccattcaacactcatttttgcttgttaatttgttcatgtgggtgcataactagatgaccatcattatgggttctccatgaagttaaatatatttt

SEQ ID NO: 65947 - DNA, 456 bp, Oryza sativa
  unsure (1)..(456): unsure at all n locations
ntgcatatgaaacacatctataatggcatgttttaaaatattttatttatgacatcaaattgttaccatgacttatttaatggtactacccgctcacacatgtgtataataacaattaatgatgtaccatataagactttaaaatatacagatcgaaagtcttaaaaattgcattgacatacggatgcaattcaagcatggaagaatacaagtatgacaggccgttgggaacttgagaagcatcttactgtatttattcactatagcaattaatttagtatccttatttagcaatgtgtatacccgtgtctttcttttaagaagtagcacgttgaatagtggtctaaccaaacctattattacatatttacattcactctcaattgttaaattatacaagaataatttccccagtcatgtgccaatgatcagttacagctgcgattatggtttaca

SEQ ID NO: 65948 - DNA, 246 bp, Oryza sativa
  unsure (1)..(246): unsure at all n locations
ctgaatgcagaaggagagcactataattgtcgtgctggcagtacaagaacagttagctggcacctggcagtcttttccaactaaaagtgacagtatcacgaaagggaagattaattaagtcgcactaatccaacaacaagaaggtccccctaaacataactagacattcagcacatgattgcaaacaaacgtcacaagattgaagtatgtacttcgtanatcaaaatacncctcaacagatcaagt

SEQ ID NO: 65949 - DNA, 376 bp, Oryza sativa
agcttgtgcaaagcatgccagtatatgagaaagagctgtcaactcttcttgtttcgggtttgcaaaaaccgcaacatcgtcagcatataacgagcacctgaatctcccatttcttaccccaaggggagcaaggacattgacattttctgcttcttttaggattcgatgaaaaggcttcatagccaggatgaaaagcattggggatagtggatcaccttgtcgtaggcccctagcatggttgattttttgccccggggacccatttaagagcacctgggatgaggaggtggagaaaagattagtgatccaatttaaccatcggtttccaaaaccaaattgtcgaagaatctctaggaggtaggaccaattcacggtg

SEQ ID NO: 65950 - DNA, 463 bp, Oryza sativa
  unsure (1)..(463): unsure at all n locations
tatatgtgggtgatattttctttaaatattctgactctattctaaatctatttccgtcgataatttatttaagattgcttatgatttttttctaattacccttgcaacgtataaatcacttttattaggtcaattcttacgataaagtatattttcattacatggattctcatatatatataagtttaacatggtatgcttctcctagttaaccgaatttatagtggaatatccatgtaccaattatatttaatactggatggataccccacgtattgctgcggaatttttatatccttcggagcattcccctattgtcatgcataaagcaatattcctcattcgagtataaaaagataacatgaaaaattatatgaaaaattatatgaaccaaaaactgaaaacanataaccaagtatctgtaattcttgagctgaattgcatagcattgaaaaaaaatatg

SEQ ID NO: 65951 - DNA, 360 bp, Oryza sativa
agcttgcaagtgaagttgtcatggtcctttttaagaaggggacccaaatatctatctatctatctatccccatcatctccaggagaaaaacaaggagaaaacaaagattcttgagaaataaaaagaaatatacatcataaaagatatgccatcagattggcaagaaccaaggaatctcttgtgacgaactaagcccaaggaaaaaacacttcttttttttttccgtctttcaaagcaacttgctctgcatgacgtgttggaatgcatccatccattcatatctagctgatgaggacgttcatgcatactgatgaccaatgcataaaaaaggcagaggaaagagcagaacatattcgacgc

SEQ ID NO: 65952 - DNA, 106 bp, Oryza sativa
tttttaagccaaaagacactgctgagctatagagcttaagaaagaacttctggatttgttcaaatagaggttcgttattaaaaaaatagagttttgtccctatctt

SEQ ID NO: 65953 - DNA, 360 bp, Oryza sativa
agcttgtgataacaggcaagctgttacttgaattatgagtccacgctggacaagtgacacaagctgcaaaacttatatcaagcgtcctcatgaaatcttatgcaaaataacaaatgtgcagactgcagtagcaacagaatcagaacgcatgacaagataccaacaaataaatgataacaatggagaagggactgccgtaatcaaaccttgtgcagtttcttctgagatattagcaaaggcggatgcttccataagtgtctctgtccacgcatgtatacttgctgatctcaagatatatgggtccttctctgcagagtaagatcggctactgccatcatccccacttctacctcttccact

SEQ ID NO: 65954 - DNA, 339 bp, Oryza sativa
ctctcaaatttactagttggatccagccgatattgtctaacactcgtctttttacagactcctcctccttctccttcttacactgtacaacaatcatcgagtgaccgaactccattcggaccgggggagtcatcatattgtggaagaagaacaaccagctgcttctgctatcccactaagttatcctttgatgcaaaaatttaaaacggctatattggcttagctctcaaactgtctgaacttatacctgcaggttctagccgatctcttatctttgatatcaaagattatcttgatgaggcagaagaagatacttcaagcatagctctagctttctta

SEQ ID NO: 65955 - DNA, 361 bp, Oryza sativa
agcttagcacgcttggtgggagatgtgcgtgcacaccctcaacattcaatctctatgtcatgttggaatcaacctatttgcttatttcttctctactagtttgatactgagatcctccttagtatggttcattctcttttggcacttccatgggaaagttcccctttccttatgcttttcttttgtttagtttgtaccttttagaagtatgtatgtaatgcacatgcctttttatcatagatagctttgtctttatgtaagaacaagggactttgcaatgtgaataaagtctgttccaataagattttggatgtattttggtttactttacataattgtctatactgcagttaagtctatt

SEQ ID NO: 65956 - DNA, 467 bp, Oryza sativa
tctacaccggaagttatgcttccacaaaaattccattcaattaaactcctactttagactatgttttcttctcctagaagatccttggcaaaaagaaaatgagaaaaggagggaaaggcatggctatataagaaaagagagagaaataaagagagaaataaagcttgctctcaaaacattgagcatgatgaaaaaagtgcatatagccatgccccttccatattcatgcaagaaaagaacattggaggagaaagtaaaggaaaaaaggagaaccatttctttattccatcattccacaaaatattttactttcccatttttccaccacaaataaagacccttgatttatgagtatgactgatgatcttcttgagtccatatatttggctttgcaatatatatgatgcacgtatgtcacaatttatcactaccgagctccacatatcagccttagaatagagatgagt

SEQ ID NO: 65957 - DNA, 369 bp, Oryza sativa
cagcttatattcaaacctaaatcatctatggcattaaagaaatttgtcaccaacttaacggtgaattgaaggaaaatgtgactgcaggggcatggaagggattaagttaaaatttcaagggtacacaagggatggggtaaatttcaagggtttaaaaggatcgactgagttttcaagggtgtacatgaaatttactcttgaatatgacatacgtctctacactcttctttaaataaaaggagagatacacatagatagaagtggagccaggtcttgggacaagccagtccccaagtctatcctaatcatctttaaaatgtatttcttgtaaacttcactgagatctgctcaacttacaaggattccatg

SEQ ID NO: 65958 - DNA, 353 bp, Oryza sativa
agcttagcaagtgtgagttctggttgtccgaagtcaaattcttgggacacgtgatatctgctaaaggagttgctgtggaccccgaaacagtaaccgccgtcaccgaatggaagcaacccaagacagttactcagattcgcagtttcttaagtttggcaggatactaccgaaggttcatcgagaacttctccaaaatcgctcgacccatgacacagttgttgaagaaagaagagaagtttgtgtggagcccgcaatgcgaaaaggcgttccaaactctcaaagaaaaactggtttcctcgccagtgttaatcttgccggatactcgcaaggatttcatggtgtattgtgatgct

SEQ ID NO: 65959 - DNA, 183 bp, Oryza sativa
tcatcaagtcatcgccaccgtggagaatcttcagtatctgtatcttccaaaaccgatccaatatcaattcctcctcgtgcacgacatcaattggtgtgagttattggctggctgcgcacaggccggacacgacgccgattcccaccaaccaatatacctcgatgcatgccgcgccaaaatttt

SEQ ID NO: 65960 - DNA, 356 bp, Oryza sativa
agcttcacaaagcgaggttgagtccgcgccgaagaggcgcgaagatgacatcctcacaaaggcgctcggaaccaaaaaacatcctggccgaactcggggaattggtagcgatgtgccctggaagcatggactccctcagtatagatcccaatacaggaaacgaaaagtctccaaggaagagagggacgctcgtttgaaggccgaacttaaggttgaggtcattcaagaactagaagctagcatgaatgcaagggtggaagaaagggttaacaaggtcctcgccgacatgaatataccccgagtcacaacacctgctgtgcaaccaactcctcgtgtacaacacgacgcgagtccat

SEQ ID NO: 65961 - DNA, 390 bp, Oryza sativa
tcgcagaaccctcatcgacggtggcagtgcactctatattctcttcgccaagaccttggatgatatgcagattcctcgctccgagctaaaacccagcaatgcaccttttcacggagtaattccaggattattcgcaactccactcggccagatcaccctcccggtcacttatggaactcgggaaaacttccgcacagagaatatcagctttgaagttgccgatttctagacagcataccacgccatactccgacgcccggcgttagccaagtttatggccgtcccgcactacacttacatgatgatgaagatgcctggtccccgaggagttctatccctacggagcgacatcaaacaagccgtcacatgcgacaaggagagttgcgacat

SEQ ID NO: 65962 - DNA, 362 bp, Oryza sativa
agcttgcctctttcttgcgcgttctagcgttgccagaccaagtaggcggcgtttaagtcctgctctcagccagtgctctagcgttgtgagctctctttgctcctgtgcggagtctagccgctgtatgacgtcaagcgccatgtggaattggattttcgcctcagtgcagattcccctggaccactctcgcagactttttccggtaatttgcagcttatgatttaaccgatgcatgggttctgtgtgagtcgtctgcttgctccaagccgccgcaacaacgtccttgaatcctggtatccttgtctaaaaattctcgaacttgaagggacgtggtttccgtggccctgaggtattggaaagga

SEQ ID NO: 65963 - DNA, 401 bp, Oryza sativa
taatctaattctaatagctctttacaagtttgtactgtgaatcggcaaacaaataagcaatccctagctggatcaacaatttcaacatgtgataaagaattgcttcattcagatgttagcagagcaatctaatctgctgcaccgaaaccaagaacaaaaatagcaatgcctgtagcaaagaaaacaaaccttggttgcagaaaccgacttgcagagaaaaggttgcacggtgctgtggatctcgaacaggaagcggaggcgaccgatgactgcggcgcggtgccggatcttgaccgggaggcggaggaccgacagctggtggaggcgtactacgcgccggcggacggtgtggcgcgatctggatgggaaggactgaacgtctgcgctcgcggacagggatc

SEQ ID NO: 65964 - DNA, 366 bp, Oryza sativa
agcttttgatagacttgaatgggtttttattgccaatgctcttcaaaggaaaggctttcatcatcactttatcaatcttgtgctttcttgcattaattcttcttctttttctgttaatatcaatggtcagacttatggtgctttcaatgctaatcgtggtatcaggcaaggttgtcctctctctccttatcttttttgttttgccttaaatgagttatctgatcaattgaatgaagcccttcaaaatcataatatcaatggtatcaagcttagtgtctctggtgctgttattcactctttactctatgcagacgacctaatcattacaggtacagcaactgttgaagaggccaatcaaataaaaat

SEQ ID NO: 65965 - DNA, 467 bp, Oryza sativa
tgcagtgaaggtcttccagggtgtcaatatgaatcacgacattgtatgttcacccctcctttggctcctctggcggcggattgtggtgcggttccaggtccggaagggggatgtctatgggcagaccttcttcatcagcattggtgagagagaagctcgaagatcgcgggatgaattttggagcgtcagtccaaatccataagtcaaaagtgcggttgtagttcctgcggtgggaatactcttcaacataatgaacggagcactttcttccaatgatcttggctactgcttcatctgtacgggcatgcattgggagcccctcaatgcatactcgagctctgaatctgaaacacgccgggacaccatgcaagccttcttcccacgggcggaagagatagactcgcccagacttggtggcaagccgtggctgcctcatgatggcatccctgtcactctggctggcacat

SEQ ID NO: 65966 - DNA, 372 bp, Oryza sativa
  unsure (1)..(372): unsure at all n locations
agcttctcatgagaaatggngagtttctttgtgaagtctttagctcctcatacaagacctccaaagaagcatgatccttttttaaggcgttgaacttgacaatctccttttcactatacgcatggagctcctcaaacatactcacaagctcatcatatgaaacatcatcacaatcatcatcactcacactatcactgagagatgttaccttagaagagccctttgcgatgagacaaagtggagcgaagagtgatggagcctccttgctagcaacaacggccatcttcttcttcttggagcttgcatcatcatcaccttcttcttcggacctggatgaggcgaagctctccttctatgcttntgggcaacctc

SEQ ID NO: 65967 - DNA, 482 bp, Oryza sativa
  unsure (1)..(482): unsure at all n locations
gacactataaaactaagcttatagagatggacttctacactctnttgagtttgaataatttgagacatgctaatcttgcttacttggcaaaatgataaaggcacatttcaaggtcaaagtgaaagggcaagtgaactattgggactagtacatactgatgtatgtggaccaatgagctcaactgccagaggtgatttagggtactttattacctttaccgatgactttagtagatatggttatgtctacttaatgaggcataagtctgagtcctttgaaaagttcaaggaatttcagaatgaggtacaaaatcatttgggcaagacaatcaagtatctatgatctgatcgtggtgaagagtacttgagccttgaatttggcaatcatgtaaaggagtgtggaattgttccgcaactcactccgacaggaacgcctcattggaatggggtgtctgaactgacgaatcttacattattgtacat

SEQ ID NO: 65968 - DNA, 284 bp, Oryza sativa
agcttagggatgaggaggttaaatgatactttgaccataggccttcttcctttacagcgatgcatcagcgcgagggtgggcgttggcataaaatagaggagacggagaaaccgattgaaggtgggactgataatgcgacccttctgttgtgaaatagaagagcctggccacatttgggcccccgaagaactcttttggaagagagtttttcactggggtggcttaaatttaatttgaagagcccttttatgtggtgacagttgacagaacatactgttgatttc

SEQ ID NO: 65969 - DNA, 346 bp, Oryza sativa
ccccactatacgccgacgccgctctgttcgtcgtctctgcttcgtacatcgcccgccgtcgccggcgtcgttccggacaccgctctctcatgaagagaaagagggacagatagagaatagaggagagggatgaggataaaaggataaaggaggatgacatgtgggacccaagggttccacacaaaatttttttgttataaaacaaggggccgcccttattttttttattttatttcccatcatctcccccttattgccccttttctaaacatatgttaacattcccggttggcccccttgctaaaccccctccccacacccacggaggaaattgcccccttttata

SEQ ID NO: 65970 - DNA, 363 bp, Oryza sativa
agctttagctgatttcctttttgtgtggaccgagtgccaagaagacatgccagaggaaaagatggaatattggactatgcattttgatgggttgaagagacttacaggcactggagctggggtcgtcttaatttccccgactggagaaagattgagatacgtattgtggatacatttttctgcgtcccataacgtggcggaatacgaggcgctactccatggattaaggattgcaatctctttatgcatccgccgattaatcgtccgtggagattgtcagttggttgtcaatcaggttatgaaagagtggtcatgtctagatgataatatgaccgcttatagacaagaggtacgcaagctggg

SEQ ID NO: 65971 - DNA, 199 bp, Oryza sativa
agccaaatcatgtcaaacatattgggtgaaaccaaatgacttttgagacccacgcctaatcagcaaacaccagtctactcgatcggttagacagacggatttgcacagccgcctcgagcccttctttgagaaaccttgcaacgtaagagctatgcagcggtgtccaaattattcaatacagggcaccgctcatatctct

SEQ ID NO: 65972 - DNA, 362 bp, Oryza sativa
  unsure (1)..(362): unsure at all n locations
agctntgtcaccgatcgatatagttcttatactctacaattggcaatactcggtctccaaactgcagcgggctggaatctgcatgcgatataggtattcagaagctataggcagcagcgataaattcttgcacagataaaaaactgatgatatatagagatctagatgacctgtgatttactgattagatatgtgtgcacatgagctgtgatttactaattagatatggtgtgcagccctccttgattccttgcctggagaaacttaacatataaaaagcaaatcatgcatgcatgcttgcatgcagcacatatcactcatgcgaaaagctatagctatagagagggtgcatcgaacgcaca

SEQ ID NO: 65973 - DNA, 432 bp, Oryza sativa
  unsure (1)..(432): unsure at all n locations
ntccatgaagtacttgcacgcccaaatcggagttcgcatgatgtcgtggcggccgtcagaagttggcactgccctgcagtccgaatccaccccgcgcgaatcctcttccctttggatcctctccatcgttcctgagtaaaacatgagtgcacgcgtctccagggtataaagacgaggaatatgaactcaagaaagaactcacctgataatttagttgacgtgcacgagcgcgggtaatatgaccatcatgctgtacatggggggacgtggatgtatcgatggtgttgatgtcctcatcaaaaacagagagaactgtaggtaaaaatttattgtacctcgatgttcctccaccctcgcaaacaactatgtttgcagactatatgtccttgagaccaggacagtccttggctcaatgcctangcttaccgcaca

SEQ ID NO: 65974 - DNA, 370 bp, Oryza sativa
agcttgagctgaattataagatgctctattgtactatattgtatattagaataggaagagagtagagtagaagaagtcggaagaattctgaagttgtcggtaatcttctttcatttattttattctgtttattactctgaattcaatataatattcttcctgagtaatttagatttatctcgtgagaattatctcttggttagttcctaaatagcatacgggatcattgttcactatagtccatttatttatagtgattgctttagtgcttgatcggcactagagtagttattaattgcgtagacgcggtgtcttggtaattaatctctagtgattgctgtgtatcccacagtatgtttgaggtaggtgt

SEQ ID NO: 65975 - DNA, 376 bp, Oryza sativa
cacgccgaacacccacttatcggttgttatttttatgccggcggagcggagactatctaaagttccgctagatccgagagtaaagtctcttggttgcacgtcttcacaaccaagtcatcaacataggcctcaacattgcgtcctatctggctacccaaagaaaatcgagtagtacgttgaaaagtaggacctgcattctttaacccgaaaggcattgtcgtataacaataagttcctatgggggtaatgaatgcagatttttcctcatcctccctatccatgcgaatctgatgataaccagagtatgcatctataaaacacataaggtctcaccccgcgtgtgagtcgactatctgatctatgcctggcaaggggt

SEQ ID NO: 65976 - DNA, 372 bp, Oryza sativa
agcttctccaaacagcagatctctgtattgtaatatttggaacctcagcgttttcagaacctttctggtaactgtcgtagattagaagggatttgataggctttggttcactaattatccaagcgtatcgaggatggttcttgtccgtcttcagatcatgagggtattcgcttgccaagataagattcttctgcatgtactctctggtgccttcaagaaccctgcgccagaaatgggcgtcaagatgaacccttatcaaggcaccaacaacatgagcacaaaatagagatcttctcagctctgctgcaatcttcatagctattgatgtcaactttggatgctcatcaggatctgcactttcaaacacaaaca

SEQ ID NO: 65977 - DNA, 356 bp, Oryza sativa
agcttgtagtgaagctgctaccactgatcacgaatcgccttctctcatgcatttccatagtattgctcactactacaaaaaatcagacattcagactttacaagtctctaggagaagagtggtgctggacaagccttggtccaaatgattaagatttgatgaagcctcgtaagaccaaaggaacatttattgagattataaaacatgcattttgcgaaaataagcaacgttgtttattggccgctctggatggatgataagtggattctaaaaaaaaaacaattggtattatgaacaccagctgatgttaattcttaattggcgaagacccagagtgagatagtataaacgtagta

SEQ ID NO: 65978 - DNA, 363 bp, Oryza sativa
agcttgcaatgtgcttctttatctgcgccggcttcctcctagtcgttaccacgccgggcctgccgcgcctcgccggcaacgtcccgctcggacggcgctggctacaggactccgctgtcgttgtcagcggcggcaggctgacgccggcgatcaccgcggtgtacaacgggacgaagaggcttagcccacgtgggcctaatccacagcaccactgataatcaacgtgtttcttttcagtgatcatcaccagctacagcgttttatccacccgatttcacagccctaataataaattaagctctaacaacaccggcgaaccacgaaccggccggtccggaatttaattttccctttctcgtgtgt

SEQ ID NO: 65979 - DNA, 421 bp, Oryza sativa
  unsure (1)..(421): unsure at all n locations
cgccgatctgcccagagccactgaagaccatagatcaaatctgaaatcatttggcacatacttaaccgaatngacaaaatatctgaaggtgatctctggggctgatgcagccgatgcccaaatcatcgatgaagtagactaaattaggggaagggctatatcagctatccaaaaatatgtgtctggttaaactgaacatgtaatctgcttttaaatttgcaaacttttgggctgtaatgaatttttaagtttaacactgtttttgcttttgaaatccgtagcttttgaaatccgtattttccatatatgtttgcccccttaattatgcaaagctgaatacattgataaaattataattggtcctaaggcgatatatcaaatatcggccatcatacatcggtaaagcacaatcgattatgat

SEQ ID NO: 65980 - DNA, 366 bp, Oryza sativa
agctagtttacgggcatgaggcttttttttctgggaaattagaatcagctcgagaaggatggaattacagaacgagtttgcagctgatgaatattataacctcatggccgatgaaaaggatgacttggttcaatcaaggttgagagcgcttgcaaaggttaccagggataaggaaagacttgcttggcattataataagaaagttgtgcctaaatcttttttctgaaggagagcttgtttggaaattgattctgccgacaggaactcgagataacaaattcggcaaatggtcgccgaattgggaaggaccgtttcaaatctataaggtcgtgtccaagggagcttacatgttgcaaggacttgata

SEQ ID NO: 65981 - DNA, 472 bp, Oryza sativa
tcgccgccacctcctccatgagccctccaacttcactcgcttcgtattgttaagtacacgggtgagcagcatggcacgcgtcggcgaaggtggtggcatgctccactgtaagcggcaatgcgggcagcatgctccaacgaaggcagcgaagccagcgacatgggaaagaagcagctatgaagggagtcgagctcgaggcggccctgccgacctgccttctccactctcggcaaggggttgctggatccgaggaggtccaccgagtttcccccaccgaagccagtcacgtggggaggagctcaaaccctgccttcaccacgagctccttcctacgacggtgaagtatctccgggtcggctagacatataacggtaggttgatgcgtgcgtgcggcatggctacttgcttcttcaatttcctcatgccgttgtctctgtaggtgcgggttgatctgtgcctagacaatgtaccg

SEQ ID NO: 65982 - DNA, 369 bp, Oryza sativa
agcttcaccgctttgagtgatccacgtatgtcggacttagggggaaagaacgaggaaaatggaaaagaagatgaagcaagcagcaagggaactccaccacccaagggagctactataccttttgattacatcaaacttactattccctctcacaactttgtctccgtgccttccgggcgtgctcctcaatttgatgggacatattatgccgcttggaagcacaagatgaagttgcatctaatctctttgcatccaagtatttggaaagttgtttgtaccggtattgatataccccatgatgacatgaagctcacttcggagcaagaacaactcatccatcgcaatactcaagcttccaatgcaattctc

SEQ ID NO: 65983 - DNA, 305 bp, Oryza sativa
  unsure (1)..(305): unsure at all n locations
tcttatanatatttcagaattatccctgtttttgccttattagtcagctgattattcatctgagggtattatgcacgctatggaagctacttcttcgacaatggttaagttcatagagataagtgaaaaataaatttgaacaaatagacacgccatgtgtagaatgctatatacatgataaattctttaccttgggtcagctcggctgtagaaaccaacattgacactaattccaccacctagaacctttgccccggcattgatgacaccatcagtggagataaatccctgagatggtgaatttg

SEQ ID NO: 65984 - DNA, 372 bp, Oryza sativa
agcttgagttcagcaagatcttggaggccttcaaggtaagaaaccacgggatcccttgttctctcattcatgatcatcatgttatccagtgctctgctctttagcctcattgctaactcggtgaaccataactttgtaggcgaacttcaacgacaagttcgacgaggtcaagaagaagtggggaggcggcgtcatgggctccaagtcgcaggcgaagaccaaggccagggaaaagcttctcgctaaggaggccgcccagcggatgacctaaattatattcgccccccgccgttgagctcgccctgtagtttcatttttcagtgtaatgattttgacgaggaactcagttagcaccatgcgacagtgctgtgg

SEQ ID NO: 65985 - DNA, 272 bp, Oryza sativa
tctttatggtgatggtactgtttgtgtgttcttaaaaagaacctgaactcggcattagttgatggtcccatgtggtgatggtactgtttgtgtgttcttaaagagaacctgaatttgggattggttgatggtcccttgtggtgatggtacatgttgtgtgttctcaaagagaacctgaatatgggattaattgatggtccgtttcctgagctaatatttgtgcttgtctatgcaccgtggattgtttgagaattcgtatttttgcagcactt

SEQ ID NO: 65986 - DNA, 360 bp, Oryza sativa
agcttcagacagaactgattgattgtgactctctataaaaatctactgaatgtataataaattactcaatgtaatactctctccatccaaaagtctaaggcatatttcttttgccaccaagaccaaggagaaattaactcattccccatgtaccaaaaccagggaattatttacatgcatgcaaccaatgagtattaaaatggttacttgggttccgatcaacaatttaatttatcatatggagactacaaatatgaccgtctcatttgggaaaaccaaaaaatgaaatatgctcaagacttttggatggagggagtataagagaagcacttgatattctctacacggagaagactatta

SEQ ID NO: 65987 - DNA, 418 bp, Oryza sativa
  unsure (1)..(418): unsure at all n locations
tgtntntaccacactacattatgaaaagaatcatgattctgtttatcctacgatacttcaatcgagagtctcacttcatattaacagcaaccagccaactaccggttgattgaatggtgagctgccaatacctaaaatttctacatgaaaagagaaaaaaaatctcatgatggccagttgggcaccaacagacatttgctttcatgtgcagtcatgttgatgaggagacaaaatcacaaaactatgcaagaactgttcttttagcgtctaacctcaaattgcaatgacctaatcagcagccagcataaataaaaaactcaacacaaccacctttgtaatatatgcaccaacacagcggttaatgaaagcagctgatgaaataaatatctcccacgaattctcagacaacttgtttaaa

SEQ ID NO: 65988 - DNA, 363 bp, Oryza sativa
agcttgctgggggggcgcatccgttctatagctcgtatcttctcggggttggcctcgatgcctcgggcagagaccaagaacccgagaagcttgcccgcaggcacgccgaacacgcacttatcggggttcagctttatgcgggcggagcggagactttcgaaagtttccgctagatccgagagtaaggtctcttggttgcgcgtcttcacaaccaagtcatcaacataggcctcaacattgcgtcctatctggctacccaaagaaattcgagtagtgcgttgaaaagtaggacctgcattctttaacccgaaaggcattgtcgtataaaaataagttcctatgggggtaatgaatgcagttttt

SEQ ID NO: 65989 - DNA, 456 bp, Oryza sativa
tgtagatagaataataacattttcaaaccaagacaaatttattatgaaaatatattcaattattgatttaatgaaactaatttgatattataaatattattatatttgtctataaacttagtcaaatttaaagtagtttgactttgaccaaagttaaagcgttttataacctgaaactgaaactgagggagtagtgaataggttaaaattagtgcacttgacttttagagatgtactagcatagttgtgtatttgcgaacgtcttctgtgttaaaaaaaaatcgaacagagtaaagccgtaaaatatatccgaacatataaagtcgacaaatcacgctggagaaattcaaatcttgtcatttttaaagaagaacaatccaagtctcactcgtatagagcagactagcaatatagtcagccgcttctatgacgtaacgacataacagatgtaacaac

SEQ ID NO: 65990 - DNA, 369 bp, Oryza sativa
  unsure (1)..(369): unsure at all n locations
agctntattccatttagaaactatatagaatacaaagtggaagagggaattgctccttgaggtgtgttgtgggatcctctatttgtagcctcctaataacggtagttaagtcggttgtaggtcgaaaaacgggtataacagtcatcaaaagtgaaggaatcgccacgtggaagctcagtggcgcgggcgccaagattggttcggccaccgcctttggtgagggaaattttattctttttgaaaaaacaaatgctctagaattccagtatcactcagagaaagatcataacaactctatttcaccaattcatatccaacaacaatctagatttagatcatgctttatgcaacccacaagtttcatgttga

SEQ ID NO: 65991 - DNA, 224 bp, Oryza sativa
gcagactaagtagaaaaaaccatacaggctatgatagaccaagttagccaattaaattgataaaaaatcacactccattattatgatgatagcccccaactgataacatcaagaagaaaacttgatgttgacagtcaagatatggaagtacaatgataagcttaaagcgtagaaacgacgaagatggtcaatgtttcaagagttgtcgaccatagtaccatctt

SEQ ID NO: 65992 - DNA, 369 bp, Oryza sativa
agcttccactgacacttgggccgtatgaaggccgaccaccacaagcacgccgccgcggctggccatggcctccgcggccgcggccgccgccgccgccgtcgccggaggacggggtttctggtcgatcgatagtccgcgccgacgagggcgctcgcagggaggtccgggcatggcgttgcattcgtcgatccgctgcaactccaccactaggtggcgccgtatgtggtggcgcgtgcggcgacgcggagagggaagaagaagagagcggctgtttgctcgcgcctcgcggcggccgcttcatgcgcctgcgcactagcccgtggtacggctcagttttcccgcatctcgcaaccagttttttctttggtt

SEQ ID NO: 65993 - DNA, 351 bp, Oryza sativa
gaaccacagaggaatcttctttttcttatagtaaacaaatattctcagattttggagtttggacataaattggttaaatctgagctgatccatttaaagatgtattacttctttggctatattatcggatcagaaattattttcttttttggtccttcacctcaacatatttttctttaattaagagtcacctgaagaattaatgatttgttatcatctgaccgcaagtttatgaaacaaaattaagtatagcccttcttcatttatgtatcaaacctcagatctgaacaagatccatgtgtgatttgacgatggtaattataattctacagattcaagcctcatctgact

SEQ ID NO: 65994 - DNA, 324 bp, Oryza sativa
agcttccttccccatcctgtgatcacagaacgggtatctttgtaagcaacctgcctcaggcagcgtaaagactgaattttgcatgactgaattaggcaataatttttacaaatcaacaagaacatcaagaacagggtactataattaactgtaccgccatcgatatcttctgcgcaaccaaggcagaagattcatacagaggtcgcacaactttaggcacgctccaaggctgtgaacacaaaaaaaattggctgaaatttctttttgctagatgaatgaactatttggataagaaaattgaatggttattatttattacctcca

SEQ ID NO: 65995 - DNA, 360 bp, Oryza sativa
agcttgccgttcgccttgggaacgaccaccgggttcgccagccactccggatggatgacctcgtggatgaatccggcctccagaagtcgcgccacctcctcgcggatgaaggcttgacgttccggggcctgccgccgtactttctgccggaccggccttgcgcccgaccgcacggcgagacggtgctcaatcacctccctggggaccccgggcatatccgccggtctccatgcgaagacgtcagcgtttgcccgcaggaaagagacgagcgcgtcttcctatttgccgtccagaagaccaccgatccgtgtggtcttggacgggccgtcgcccagggcaacctccttgaccgggacctcg

SEQ ID NO: 65996 - DNA, 321 bp, Oryza sativa
  unsure (1)..(321): unsure at all n locations
tgttngagatgaagatctagagcatctgacaaagcatacataattgttctttccttagcaaccatattgctgtaggttgtcttcagtatcaaataatcattttggagctgccttgttaacggcaaacaggttgaacagagaaaattcaaaataatagcgagccataatgttgtacaatgcanaatggtaccatggaaaccaccgcaacataacgatgcacttctatcagtgaatgtcgacagggaggacatgtgtatgggggcaatccaaatccgcacacatggaaggaaaaatttaactgtaacattcagatttacataa

SEQ ID NO: 65997 - DNA, 365 bp, Oryza sativa
agcttcgtcctcacctgataagcataaatgtcatatatgtcagacccaatttaacacaagaacaaagcttcaagcgtgtattataatgtagtatgagctctccatggaaaatctggcaatactagacagagagctacaaggatattatcagataaaattgtgtgttcagctatgccagagatcaagaggattagctgagtcccaaaaaaaactgtctcagcctcaggccacacaccatcaatgttatgtcaaccaaaactatctgtaccatggttgaaaattgaacagttctgatagttcataatttgatagtatagtttgagttgagctttactttttaattcttgtgcatatattcatgaaag

SEQ ID NO: 65998 - DNA, 387 bp, Oryza sativa
tcatgccatattgcgccccttccttctaaggcggatgaatgatgatgtaaagcatatgcttccacgaaagaaagagataatcatttatgctaacatgactaaccatcataaagaaatccagaatcacttggttgaacaaacatttgatgaatacctgcatgaaaaatcagaaattggtacggatgcttgtgcacatagtctcctacatacattcctgttgacttaaaaagttaatctgacaagtgctgaggagtattgcagttctgcggagacctggcattaatgcgaagctgaataaccttttaattcaactgaggaaaaattgcaaccatcctgatcttatggagtccgcatatgactcatcacgggttttcacattggacatct

SEQ ID NO: 65999 - DNA, 361 bp, Oryza sativa
agctttaggacttctgtggaagtgtagtttaagtaactgaagcaagaagagctatgcgaccgtagcgaactgaagtaagaagagctctactggctactgatctttgaaacacctgacaagttttgatcctgctatgctgtagagaaacagagaaactagctggctgcaacgaacttagttgccacgcgttgttcatttgtcttcataagcaaatttaccatttgttagcaatttggaatgcctttaccgtatgtttgtcagagctgaagtaatgtgtttggcgcacccgctcactgtagcttttacggctttaccggtaatccaccacggatgcactgggtgtacatggcatttctgattt

SEQ ID NO: 66000 - DNA, 468 bp, Oryza sativa
  unsure (1)..(468): unsure at all n locations
taagaaactganattgtctcaaatcagtctggaatactatctgctatgtatcaaagttaccaaatgagaaagaagctgtttatggtgcattggataagtggactgcctttgagcccgaattccctactattgcagcagcaaaagctttggaaatgttgaaaaggcggagacaatggctgagaatcatccaggtaaggttattatagattatatctccttgttagtctgttgagagtacagtaatcgcagcttttgatgtcaagctcattttctcacttacctttcaattttgttgctgttatcaggtagccaagtggttgatgagcaaaggccaggtgctgacatggacaacgtatgatacactactgttggctctttttatggatggaaggatagatgacgctgagtcgatttgaataatatcatacaaactcatacacgttcagtacccaagaggttgttttcccg

SEQ ID NO: 66001 - DNA, 363 bp, Oryza sativa
agcttaaagccatgaatcccttttattttatatctggatctggatccttcgtcgtattcccttgatgacagcagatagtgccgatgtgggaataaaaccgtccatcaatggtgacaaaaacaccagtcggcgccagtggaaccaagccagtggtgtagatgatgaaacccattaacagcggcggagtccgccaaccgtataagcgagaacaccattcggcggagacataagtaggccggcggtgaagtcttaaacactcaacagcggcggtataataggctagccgtgcaggcggaaacattaatcggcggcggcgaaggccatccggtcggtgaagatgtagacgcccaacaacggcggcat

SEQ ID NO: 66002 - DNA, 462 bp, Oryza sativa
  unsure (1)..(462): unsure at all n locations
acacatgaaactaagctacactgggtaggaaggaagtgccatacctatcangttctaacaatctaaacgaaaatatcaatattttataaattatatccgcgttcccccctattcaccgtggtaactgcacgcttactatgcttatcgctagggaatggtaacccctcctcaccaggtaagctaaaccctatgcatgaaactatatggtaacccctcgtccccacgtaatgtaaacacgtggtggaaaattatcatactgagtagccaataaccaatcatccattttatgtgttattcatcattaacggcattgtgtacctacagcactctacactgaaaaaatatagcagcaaagaactcccagtagtttgcacattgcagagtagtacaccttacaacttcccaactgaacactgtaaatacatcatcatatcactgggagaatagcatatagtacatatg

SEQ ID NO: 66003 - DNA, 371 bp, Oryza sativa
agcttatgccattttcaatgcaatctttttattatgcctgtcatacctgcactgttatttctattaaccttagattggcaagctgctgtaagttttcgatgaaatctttactactctgtctgccaaaatgaatcatgtattcattctaaaaaaattcgaaaaatggataagagccgagaagtcttatattatgaaccctcgattctaaaattcaaattcttctacattgaatgtatagctgcagcaataaatttggatcagcctttctactccctgcatctacgttgagcaggtatcattaggtaactcgacaatacctaacctaatttattgataagagtgcttattataaatcaattcttgcaattttt

SEQ ID NO: 66004 - DNA, 350 bp, Oryza sativa
  unsure (1)..(350): unsure at all n locations
agcttgtcgagctcttctcgtatggtttgttttccatctggtgcaaatactcgcagtttttgctttactgggctggcatcaggtcgcaccatgaatttggacttaatcacctccctgggtaccctccggatgtcngatggctgccaagcgaacacgtcaacattgtcgcggatgaaagggattaacccgagtatctatttctcgccttaggatgccccgattttacggtctggccggggttgcactggaaaagggaaccatctttattgcgccggctcgcttttaacatcttgattggtttgctcaattttttgggggggacacactttgggccgggggcctggcctttg

SEQ ID NO: 66005 - DNA, 137 bp, Oryza sativa
ataactgggaaaattaccgtgaataatcacggagtttttatcttttcaccagatctcttaacgtatgttaaccacataccacaaatgtgtacccctaaactcacacaaacttatcacacaacgttctattgccatat

SEQ ID NO: 66006 - DNA, 364 bp, Oryza sativa
agcttgagcccacccagcctttgtttattttgggctggaggacgcgacccgggtttctcctcgaggtatttttcttgtatttaaattcacttccttatgtgcgtgttcctcctgacttatcgaattctggttctcgatctacaggtttgaacagcgaaaccgtggagtgccgcgtcggccaattgatgatcagcggcccgacaacggcgagcaacgtccccgtccccctttacgagaagggggcagccgaacgcgaagctgccatcaatgtaagtgtactcggcggcccttttgcatttttcttccgagatcgcattgtgacttcatgaagcgtaggctctccctctgactgatgtcatcgggc

SEQ ID NO: 66007 - DNA, 151 bp, Oryza sativa
aaaaaaaacacttgaacttgttagaagaaccttttgttttaaaatacagacaagatagttaatttcaagtaaccactgctatctcgataatccaaaacttccaactttggaaaattgaactaaacactaaagttgaaaactacgagaaaaa

SEQ ID NO: 66008 - DNA, 364 bp, Oryza sativa
agcttgttttcgcaattccgttatttttgttttggcaattccatctgtaatcaaaccgaatgagagcattggcacaggccatcacctcaattcctactgcaaacttgtcaaattccaaaacacccataggtccattccaaatgactgtctgtgttgtttccagggtagagctgaatgacgcgactgaatctggaccaatatccagacccatccaaccatcaagaatagcagatgctggaacaacctgtagaacaattcaaagacaaggtcaggtccagtatatcacttcaccaaactttgagctgctctatatcaaggtatcgactagacaatatctatgataatcatcatcagtgattacaaa

SEQ ID NO: 66009 - DNA, 267 bp, Oryza sativa
aaaagaatattaagtgagaacttgttgactcatatttgacagactaaaaagaaaatgcatactttttgagcagacacctatgcaggaccaactattttatatataaaaaagaacatgccaatagaaggtctaaaaaaaaccactgcattggctcctcgaaaaacactaaagtaactatgtctgcataattatcgggagtgaatctgacaatgtgtgtatcaggatctatcaagcatctctaatagcaatatgattttcatgtgcact

SEQ ID NO: 66010 - DNA, 369 bp, Oryza sativa
agcttttccgactaatgtccgatctgctgcatgtgacccacagatcccttcatatatgtggaggaggagatgtctgccgtcgtcggagaagacgcattttaggagtaccccgtttggtgccttcttgtatagatcgttgccgatcatacagtagacttttgctttacgggatattttcttggcttctgcgtcgtcctcgggcaactcttcactgcctatgaatttaatgagtggggtgcgccagtcgtctgtggtctcgatatcggcaacggcgtgttctgcctctgtaaccccgagctgatgttgggggcgaccgggctaccttcgccgcttgcctctttcactgatggccttgtcaggatgtccaaa

SEQ ID NO: 66011 - DNA, 369 bp, Oryza sativa
  unsure (1)..(369): unsure at all n locations
agcttaccggcaaggatntttctgttctacagctgtgtccgatgcggacaagattatgtcaattttttgccagacaaacttatttgccagcccaagagttgcaaaccatcccgttgtcctggccgtttgcggtctaagggcttgacatggtcggcccatttaaaagggcagttggtggttacacgcatctctttgtggctatcgacaaattctccaagtggattgaggctaaaccggtcatcacgattacagcagataaagctagagattttttcatcagcattgtgcatcggtttggggtacctaatcggatcatcactcataatggcactcaattcactggtggagcatttaaagacttttgtgaaa

SEQ ID NO: 66012 - DNA, 329 bp, Oryza sativa
  unsure (1)..(329): unsure at all n locations
gattcatacatctatatgaacattttacagctcataggtggagaaaaacactatacatatatacctattgcattatactttctctcaaatagctgtgcacaaaataaccacagaatttattaacccttttttttcttgagccttcttgctcatatattttctatcaataattctgggtacctccttggcgtcaagactgtttctataggattcacacccactatttttgctacattgaatacctccttggcgtcagactatattcaaggattncgtattaatttttcaaaaaatttaatttttttgccaatgacaattacaaacttttg

SEQ ID NO: 66013 - DNA, 213 bp, Oryza sativa
agcttcactatatcctttactttcttttctgagctgagcatcgctttctgcattgaaaggaaaatgatattatggttagctgatgaagaaacttattaatcctgaatagtagaataaataggggtccatttctattaacatgggcaattattaaccaagactttacttctgaacaatcattgggttacaaaaaacttgctgagctggcatacc

SEQ ID NO: 66014 - DNA, 176 bp, Oryza sativa
  unsure (1)..(176): unsure at all n locations
ttctgggtttcagcttgtgctccctcggcatgtgttatcttctctaccctgcttgntttcctgttcaaagctcagaaacatggcattagcatagtaagaaacctgaaacaactgtaaattactgcattagtattttcttagttgtaacatattaataaaaaaatgcctatcttttt

SEQ ID NO: 66015 - DNA, 362 bp, Oryza sativa
agcttcagctggagaatatgctcggtcctgacaagtcaaggaggtacttcaactacttgaagggctacctgtcgaatagctctcaaggcggatttcgacaaggtgtgcctccaaacattggggagagagaacctccgagtgcataatcagctgatacgctcagttctctacaacgcctaccatgcgaagtgtccacctccaacaccagcaccagatgttgggaggtctgtgggagcaacagtgaagaaggtttgtcagcccggcgaagcattgaattcttgcaatggggacatcaggttattacagatgcaggggtcaaggcatatgagcacaatgcaagatcatcagtcaaaagatcggat

SEQ ID NO: 66016 - DNA, 305 bp, Oryza sativa
atggcccaatcccgtcttccccttcctcttcttcgctcctcccaaacccaaattcgtcaaatttgactcgcgcgaggggcccgattcgtggggcgcgcttccccctgctgctgctgctgctgctgctgggattctgacgagctggtcgcgttcgcgttcgtgtgatctatgggggggatatggggtacttgagctccgtgatccccacggatggatcgccggtcagcggctgcggtctcaggtgggagcgattgattctcgggacgcctcttctgtcctcttttgcgctttttttttggtctgat

SEQ ID NO: 66017 - DNA, 367 bp, Oryza sativa
agcttaagtagggaatgtatgaccaaacgtgcagcatccactaaaatgggacgtgtatttttcccttctactacaacagaatttgtattattagtaatgtaataatcagaaataaaagaggtcttctagaagctacaccatcaaactgaattgtaaccaaagaaatactacacagctgtttgatctgtgttgatgctatccagatcatggttcacgctcaacagcatcaccagcaaactggtgacagtgagtgatgcctcgggcatatgccacctccatccaaactccaaagtagctttgcacgtcttgaagacaaactagaccaaaagtcctgcaatttttccatataaaacactttctataagac

SEQ ID NO: 66018 - DNA, 108 bp, Oryza sativa
catatcgaggctgggagagaaggcgctacccttcattaagctcctcaaacgcctccggccgtttacttggacggaggaagctgaacgtgccctcactcagttgaaagc

SEQ ID NO: 66019 - DNA, 372 bp, Oryza sativa
  unsure (1)..(372): unsure at all n locations
agcttgacttcattcttgccaacatgactatgtccttggcttggngaccactaacccatggtgtcattcattagcctcatcgtagtgggacctattccttttcacacctcaaaggagaacattagtctcaacaaatcggttgtcatccttcacttgatgaccaaccggttgcatatgaaagatatggatatgtttgttgagtattcattaacatcacaagtgtcatatactcgtatgcaagctcaagtgcaaagatccgatataaataataggtgaacaacatggatctagaacatgcacaataaatgtataggatttgctccccctaaatatatgcctacaaataaatatacaagagatgcaagtgtatgc

SEQ ID NO: 66020 - DNA, 389 bp, Oryza sativa
tcaggggaatccgaagctctgtggtctggtgatttctgttctatgtatcaacatattcgaggctaggtaccatacttcgtccaaggtcgtggggaagaaggtcctgatcgccatcgttcttggagtttcatttggtctggtcattctcatcgtctccctcggatgccttgtgattgccgtcagaagagtcatgtctaatggagcggttcatgatggcgggagaggcgtgggtgcctcactgttcgactccatgtcgtcggagctgtacaatgataatgatagctccaaggacacgatctttttcatgtcggaggtcgccggcgaggcggcgaaggccgtgacgttcgtcgacgttctgaaggcgaccaacaacttcagcccggcgaaca

SEQ ID NO: 66021 - DNA, 383 bp, Oryza sativa
catgccaccttatggggccaagaaattgaccttcttttcaactaccaccgccaactccaataaagcaagaatgaatagctggcttggatgaacacagtttctgaacaaacacaaatcggaggaggccgagtattaatgcggagtgggagcccagagggtacattcccggcgctgtgtttggaaggataataagacgaggaggatagagatatgcaatacgcagccttgtcctcctccggaatatgcctagcccacagcagggcctaaagatggtgggaccctaaaaaggacatccacttcgatgtctcgacactcctgaatccatgagttggacaacaagaactttggtgaaaccgtgcctttctcttacaaaccattaaaca

SEQ ID NO: 66022 - DNA, 345 bp, Oryza sativa
cccgaccatttccgttcgtttcaaaaaaaaataataatatatacccgttccgaccattttcattcttaagcaggggcaaggtgttaacgctgcgacaaatagttttcttttctaatttcatgtgacttccatggggtctaatgcgttctttattgtacttttcccatttaaaactctaaggtagtgtaaagcaactcttttctgtaaacaaacccgtgtttatttcctccatgaccaaaccattcatgatgcaaatgaaccattttaaaaagcgacggattaaaaatcggattgggtataggaaccaacaaatctccccattaaaaaggaatttctccaaaaatt

SEQ ID NO: 66023 - DNA, 386 bp, Oryza sativa
tcttgccccccgaccactaagtcgactgcagcatcaagcagtagaggagaagacatacccctataatggccctccgctggatggtgaggcacaattgcctccgatgttgtagtcgttcacggcacctcctcctggcgcaccagcttcggatccagctcctgtcggcgtcggcggcggcgcagctcctgtctgcggcggcgcaccaccttcgccaatagcggcggcagcaactccagacatggcgatgagcattcgtgcaggaagcactccccaaaaacctgatcacccgcctaccccgtgcagatatcatgcgaaggtgtggtttcggaggcacttgtttttcctatctctcgtgcgcgcaagagatcacaaacggggtaacgaga

SEQ ID NO: 66024 - DNA, 396 bp, Oryza sativa
  unsure (1)..(396): unsure at all n locations
tctgttcactatagtcaccttactcttcattgacttctctgcgaccatcgattggagctccgttaagatgctgaagccgatggctgccctgttaattgcatcgataagaggaggcaaatcttcagcatccattaagtttcgtgtcatcgtcacaatcagagataaaactgtcgccagcatttgtctgtccacagattccgcacgaagtgttctcacaagcacctgcaacattatgtttatccttagtatgacacgcgtaacgatccaacacaaagactaattatcaccctatatatgatgctgataaaaataaagcacgtgtttttttttttgcgtcanacagactaataccttggactcttaacctataaggtttccttgaggttctggatatat

SEQ ID NO: 66025 - DNA, 342 bp, Oryza sativa
ttatgactccacgtttttttcttctgctacaccgctaaatctgacttgtgtacgcggaggaagacatgaatgaataatgagtttagctcctaaaagctctcgcggatgttctgattggggagaaaaggcttgttactgatatttggtttgggtaggctgataattccagcaagttcctgcatccttgctgtgagtacatatcaatttgtgtgaaaaggatattgctatatatggactctggatcgtgagaggggggtatcaattggtataaaggatacctttctttgttctctttccaaattccaatcaacttccatgtgtgctctgaacttctgatacttc

SEQ ID NO: 66026 - DNA, 390 bp, Oryza sativa
  unsure (1)..(390): unsure at all n locations
cttanaaactcaaccgcacagaaaataaacgcagcccgatttgttatgtttaataacacagaaaagacgatgagcatctattgactcggatatgttagaaagacgctaatcgatatggtgtataaaacagaaggggcaccaccgaatacctagcaccgggactttcagtcttggtttacgacttaccaaagcacaaaacacctgatgctgatattatattgcaacatatgtccagaagtgtggaaaactatggactgttgaacctttctacattatttcactaaaagaatgcctaactgaatactgagagcaggtgccataagtctaaaatctcaatctaactcttttcattatatatgggctcgctttgaggatacagcttttgacaaa

SEQ ID NO: 66027 - DNA, 370 bp, Oryza sativa
agcttaactgtaatcctaacgtattactttacgcactggcaatccgctattcccagatgtcgctatagtatgtacctggacagagaggacttaagtgctcttgagggctgtcaccacctctacacctacctcaatcgaactgtgggatacgcagcaaccactagaaattaattacccagacaccgcgtctacgcaattaataactactctagtgccaagagataattctcacaagatgtatgctatttacgaactaaccaagagataattctcacaagataaatctaaattactcaggaagaatattatattgaattcacagtaataaacagaatataagaaatgagagaagattaccgacaactccgga

SEQ ID NO: 66028 - DNA, 296 bp, Oryza sativa
aagtactcaagtctctgtttactttcaccagctgacagtgttatatggagtaactacatatgcaagttcaatagttgaaactgtctggatgagtttgatgggcataacaagctgatgagagtgcatatctcacatcttattgactgagaacaataacttacgatcaagttctgagacccaggagcccaagcaaatttgagaagtccctttatatgactttacatgcacaagctttcccttatcctatttataccacgttgcaattttggaacatccgtgttttgcgtccttcacac

SEQ ID NO: 66029 - DNA, 351 bp, Oryza sativa
agcttgatgcacgaaacacctgtttctcttgttatccgaagctacaaaacttgacagctcagtatgatcatgcgctgtcgcgctctgttggagaagcctaatagcccagcctggtttaacgacaatcgtgttgcttttaggcggtcgatgcagttgagcagttccagttcgtacaactactagtcatcatgcacccgagagaacgattagaatccatcttgtggatattgacgcttgactctctggggagttttgcgagactcgcatcgctcagtctccaagtacctctaacccatggagaaccatggcgcctgatgagaaaaaaaaaagggccgaacctggtgctggtcc

SEQ ID NO: 66030 - DNA, 358 bp, Oryza sativa
agcttaagattcttgttccggcatgtgtcgttctacatgtgggtggaagagttcgagatcataacctttgtaagatctagaattttcgcacacactacagctattaatcgttaacttcatgggaaaaaagtaccgtctttttttccaaccaaactgacaagacaccattatcgactaatggacaatttgttaggtgcactaatatactggcctgtctgctacctatctataactatatatggcctgtcagaaatttgtttgttctcctctccacctaattcagttggcatttgattattgcgctttacctaataatatatttcaggaatcttactattgtaaccactgcgttaaaaaa

SEQ ID NO: 66031 - DNA, 172 bp, Oryza sativa
  unsure (1)..(172): unsure at all n locations
gcgtgcggcagcaaggattccgcatattccanaatgtacgtacttcagcaattgtctcccttcctctgaagatacgcagcgtcgcaaaatccctgaagggcttttcttgtacaactcagcttcattcataacgtaaagtttgctccgccttgaaatacgctcggcttcatat

SEQ ID NO: 66032 - DNA, 365 bp, Oryza sativa
agcttccctctcctgcaatttcatcaacaaggccacaaggagttcagcgtaacatacaccgatgttgcctgccctcctcatcacatgatgaattcatgacagtaaagcgttctgggtactttcttagtaggtacatcagcttgagccacggtttgcattctgttccagctgctgaagagccagcctctggtgccaggtgcatctggacctggcgctggggccatgttgcactgtaacacgcaacgagctgcaaataatcacagatcagttttcgcgttcatgggtgcagcaataatgcgaaataatgtacttcccccatcttaatgaattcggtcgccgttccttcggccgacccggcaaaaaaa

SEQ ID NO: 66033 - DNA, 353 bp, Oryza sativa
ctttataccctcaccacgcaaacgccacatctattctagaccttacagaaatctaaattctatagaaccagcatccatagtaaattccatcattaacctagatcactaaagatggaaatcataaattgcatttgcatgtatcaatcgaaaactgagcaaaaatggagtaaaaatctccagatatttttcacgcttacttggatctttggtggtctcctcggcgaggatgttgaaataacacgtcgcaccgggcttcctcagctgctgcccataccagttgaaagcgtaactggcgtgcgccgcccttgtgttatgaccgaagcaactctcgccgcgctggatggcgtcgcacg

SEQ ID NO: 66034 - DNA, 319 bp, Oryza sativa
agcttatgttatataatagcagattatgtcatggtgaaaaaaaaagagagttgatttctctatggggtcctgaatttgaaatgcattgcatttcactactcactatttgattcgacaactagactttgttttggcgcgtaagatgtgaaccatcctggctatctaaagctcgctgtcatcatcgacctcatcggatttgctggctggctcgccattgacagcaacaagctcggtatcgaatatgagagtcgctccacctgcaggccggaacataacaaccccagatcagatcagatatattacatatgttgtgaaaaag

SEQ ID NO: 66035 - DNA, 447 bp, Oryza sativa
  unsure (1)..(447): unsure at all n locations
ntaacgtcaaagctgcagccaaatgtacacctctccaagtctcaaacgaattgactcttgagaagcgttatttctcaaacggctgaacagtacactttttaaaaaggaataagttcctgaagaaaaaatacttttaaaaaaaattaactaatatttaatttatcatgttagttgttctgttacattcgaacagtcttattaaaatgcgcttgcaggcagatctcatttcttgcattcccagcaaggaatgcagacatgcagtacacatctgaacgaaaaaaaagggctcaaaacaaacaatcacgattagcacacaatttgcattgccctccgttaacgccatggttctggtatttggaggctaaacaacagctacagatgtacaccatacttttctttctgccgcccgggttcataccaatttctctgacatgttaccttgcatac

SEQ ID NO: 66036 - DNA, 373 bp, Oryza sativa
agcttgatacatatgatccttcttggcttgtctgtcgtatttgtatctctcctttcttccttctatgattagattgtatgtgtacacaatcttgtcttgaccaattctataagctcggcagatcccctaccttccaacatacgggttccatacaacatacaagagaactatacgtgacacatgtaatgcattcactaagtccacaacactccttcatcgatggaaacattaccttggcatcacttttcatgtcattgaaggcctccatcacaacttctcaatgttttactaggacatctcacctcatcagcaggatccccttacctttagcccagaagaacattgtactaagctggtccatgaacaaagatag

SEQ ID NO: 66037 - DNA, 244 bp, Oryza sativa
acattggagtgcccaaggaggaaagaatttctttccaggattctagcctttccacccagaagttcacatcttctaagcctttcgatataaaccgagcggaggaagggttctgattcctgaaaacaatgtcatgcccatgattccacagtccccacaaacacacaacgtggaacagtttgtactgtatggttcggatccggctgggcctgtccaagttggaacctcctgcttagaggtcatgtgc

SEQ ID NO: 66038 - DNA, 309 bp, Oryza sativa
cacgtattctagcacaccgtagctggagaactcacatcaccttgcagcagcttacagaaccctgtcggggaatatgacttccacttcctcccaacaacctgagaggcctaacactgtgcccgagcgagatggagactcccgcccatggagataggccccgagagaggctgtggctcatcaccgtcgacgaccttgatgggaactaacgcctactcgaactacattgtggagaggttcagttgacactcgaacgatcgaacgatctgcctgaactttctggaacgcaccggaagaacttttcgacagtca

SEQ ID NO: 66039 - DNA, 378 bp, Oryza sativa
ctgcatgcattcagcttggtatgccaatttattattttataccgctctactttttgcttttggaatatcttattcctgcattaaggttcctgtcatattttgctcagttttggactttgtctatttccaatcatcatgtatgtgatttcaaattaccatcgttgaactgcaagcgatagtggcttcatgcatggccctctaaccacaatactagtactggccctgatataaatatattatgttcccatgtttctaattctaaaattagctatatgaataatgtggaagaaaaaattatcgtacatgattgctttctttgtatctgatctaattaaataaagagagaggaaaaggtcaaacctttaaactaattcaatg

SEQ ID NO: 66040 - DNA, 441 bp, Oryza sativa
ctgaaggaatggctgccggctatcttcatggtgatgctccagatcttcaccgccgggagtctgatgctcgtcaaggtggtggtggatagcgggttgtatgtatgcaccttactgacctaccgctacttgcttggcgccgacttggtcgtcctctttgcagtgtcattcgagaagatagctcctgtgttgcgtgattctttaactttatttctcatctatttatattatatgaacaatattgcgtattggatgagtctgctatatcaatatcctttgatagaaaagatattgttgtagcgaatttagcattcacccatcagaatactcagttagacatactgaagccgaattttggtattttcgaagtacgacatctgatcaatctgagttttggaccagggttcattgacaaataaattaacgcactactcgatttgattt

SEQ ID NO: 66041 - DNA, 344 bp, Oryza sativa
agcttgatggagccgattgccgatacaactgatatggtatgacttgggctcggggtgggcctatattggaataaccatcattactaattaaagatatacctccgataacgcaattgtatctattaattaagatatttgaatcggtttgttaaagatttggcaagagacgtcgaataaggtcttgtttggatcttggttttagaaaggttcgaatcgtgtccataaaggaaaagttttgaacttcgggtataaaatatgaaccccattgccattgaaataccggagaacaatcaatacaactttgcgcaacgccaccctttttaaatttttttccgtttcaaaaa

SEQ ID NO: 66042 - DNA, 168 bp, Oryza sativa
catctttgaatgtccccacaataatctttctttcactcatatcccaaagccaaactctgtggtcacgtggctgttttaactctttcttaaagtaatcttcacaaaatcacagccccatatggtttcgagcaaaacgagccaatttcccatgcaaaccccaaagcgatt

SEQ ID NO: 66043 - DNA, 242 bp, Oryza sativa
  unsure (1)..(242): unsure at all n locations
acactctgaaactaagcacactacctcttagaattgaaacaacagtaatagttttgccatttaaccccactctcgtangccacccaattatcttactggccgaatgatgaattccacaaaatccttcatggactactcttctagcaaccttagaatgatcattatctaaggaaaactccctttatattttcggggaataatatttgaaacgctcggcgcccaaatttctcaacaaccctaag

SEQ ID NO: 66044 - DNA, 367 bp, Oryza sativa
agcttgaaaagaagccatcctaatttactgcatatgttcagggaccgcctccaggtgttgatctcagagttatggggttccaaatttatgctgttgatagaaaagcacgttttgaatatctgaaggagaaaactgacaaggtaaactttccttacttcttttgtatgttaagatgataaatttatgtctgcagaagcttgaaaagaatctttattttcttcatggcaattttagaccaaaattttattctataaaggatccattgctttgcttataataatgattgtgggcaacattgaagttacatttccttctttttcccaaattggtaaggaagcgtgatgtcatcctgaagtttcaaggatca

SEQ ID NO: 66045 - DNA, 416 bp, Oryza sativa
accaaatctgaacaatctatcacagaccgtatccgatatgataaaatcagtttccgttggaactcataatcgggcggatactttcctaaaactattttcgaatattcaaagttacacgcgcataaaataacaaattattcatatataccttgcccaacgccatgcctattcagtatgatacctcccataggctatcatacctccacgtgaccttacagactctatagagtagagatctgacggacttgataacagacatccaaatattctagagcctggcgggttttacatcgaagattctatagccgggcggcgaagcgacacatctagatctcatgtcgtgtctgtccctgccggctattcgaagttttgtccattcaagctgaagctcgctttgaaggtgatctggatttcca

SEQ ID NO: 66046 - DNA, 365 bp, Oryza sativa
  unsure (1)..(365): unsure at all n locations
gttgggccaaccactctgattgagcttaactgatcatttagcgagttggtcctttaaagcctttttcacccctggcttgttttacacaccgactgtcntgaaaaggcactcagcttctttttgctgcaagacgctcgctctgtcagggcatcacaatttcctgggtagctctcttcttttcacctctcgctttcctgacggagaaggtttgatctggctcgttgtccactgatgagggatccttaagatacgcagtgtcaagttcattcatgcagctcagtgatcctaaccgaagttccagacgttttggtcccaacagccacttgtcccataatttgaagttgttggcattgttgttgttcccc

SEQ ID NO: 66047 - DNA, 451 bp, Oryza sativa
  unsure (1)..(451): unsure at all n locations
tctatggaatcagctggcatcacctanacccaaattccatagtgcatatcgccaatttcgtccatgtttgtgaagcctttttgggaatcaagcctcactttgccctgtttcgccggatcttcttcctcaaaccccaaccgaacaagagaaaaccgtgcgtagtcgggggggcaggattccagctaaggggaactctgagccagaaatacttctcaatgcctttcaagacttcaaacaagggatggcatgcgaactggttttatgttcagaatcctgagcctgctcttcctgaatattcttgtcttcccccggtgtaccaagatacttggaactctcttccaatcggagatgaagctgcccaagccttggaattgttggatcgcatgttaaaactcatagaacaaggcttgcaaggagagcagattactcggcatttcatcanatgccgact

SEQ ID NO: 66048 - DNA, 322 bp, Oryza sativa
agcttgtatgaaatctagaaattaaaccagcgaccatggagatggcccaatctagaaatcctagactgaactttataaattgttaaataacaaaaggcctggttccttcacttacagtgcgccagaagagtccacggagccccggaataaggtccggttggatggaataaggcagggttgagctgcgcctaaatctttggatttggggcaaatccataggcgctgtaaccacaaatcgacgcggaaacattttcgagttcacctttggagcaaacccttaccacaggagaacagtattttgaaggggattctgagggagaaa

SEQ ID NO: 66049 - DNA, 351 bp, Oryza sativa
  unsure (1)..(351): unsure at all n locations
agcttatgtggatgacgtantcgtcaagaccaagcagaaggatgaattgattacggatctataacagaccttcgcgagcatccgtgctttcaggatgatattaaaccttgaaaagtgcatcttcggagtaccgtcagggaagcttcttggatttatggtgtcccatagaggcatacaagccaacccggagaaaatcaacgccatcctcaacatgaaaccaccgagctcccagaaaaatgttcaaaaattaactgcttgcttggcggccctcacccggttcgtttcacaattcggggagccggggatgctttttttaagtggtggaaaaaaaccgacattttccattggggg

SEQ ID NO: 66050 - DNA, 178 bp, Oryza sativa
agcttgtcaatttcatacgtaacacacaaagttaccagcgcatgcgtttcaaactattcctctcacttggccgatctcatgctgggggctcgacatactcggaccattctcacgaggacaatggaagcgacctccaccggggaaatataaggcgacagtgccctcaaattcatttaag

SEQ ID NO: 66051 - DNA, 365 bp, Oryza sativa
agcttaagcccaatttgcccggttcggccttttcgtatgttatgttgttgtatccggcacgaatgggttatgttcatctatgtgttagcttatgtctaattctctttttcatatattatgttgatttgtgctaccgctgcaatgtcttcattccccttctattctttattcaccttcccctagtgcgatttcaacctgtgattgtcttatgagggtaaataaattgcgacaaagccatgaaaccaaaaaaacctacgaaactaataaacattatataaataattaataacacaataatccaaatattttgagaaacaaataaatactacaaattccccataactcaataatccaaatattttaag

SEQ ID NO: 66052 - DNA, 448 bp, Oryza sativa
  unsure (1)..(448): unsure at all n locations
ttcttncggagtgtcaggccgcgagtcattgctccgcataatactctaccgacagagaaaccagccgtattatcgccaccaaccttcaagacaatggccacgcagactcttcgcgagtttgctgctccctctgctgacaatgtggccgtcgggccgcaagtcaacatatgagatgtggatttcgacttgaagtccagcctcatcacgatggcgcaggctagccctttctgtggcaagcctaatgaggatgccaacgctcatctgcaacatttcctagagatatgcagtacgtacaccatcaagggagtcagtcctgacgccgtcaggctgcggctgtttccgttctctcttctcgggagagcgaagcagtggttctatgccaaccgtgctgctatcaacacctgtgataaatgctctacgatattcctctcgaagttcttcccgatgg

SEQ ID NO: 66053 - DNA, 343 bp, Oryza sativa
  unsure (1)..(343): unsure at all n locations
aagctttcttactgaagaggggaattattgagcaagaataagtacaaccacagtactcatcaagccacaccggagatgcataattattgcaagggagtacaaggggataataatataggggttaatttttgcagaaaacagcatttaaaagtcacttatttgcccaaagccattttataaagacgatcctatagttacacagtgttattaatcaaggccgtgaaccctcacaaacctgcctttaacccaggcctacgatgattcaaaccgaactggcaacccgaccctgggtcctagctcgntccaagccaacccaggccaacattttcacattttatttgta

SEQ ID NO: 66054 - DNA, 365 bp, Oryza sativa
agcttcgcgccgaatcacacgtgccttgtcccacctgtccgcgtcacccgtctctcctcgccgccgccgctctttgcttctgcacgtagcatcctctatctcgctcttgtcctcttcgcttcgttttgtatataaagacgccactgcgcttcgctctcctctgctactacctgacaagctttgctttgctcgcacgcgttcccagctccacctcatcatccatggcgtccaccgacagcgcccaggtggctgcaggatggcccgccgccgccagggaacacgaagcgtgcccgccgccgcttgtcgttggagccccgtcgcatgatgccgacgcgcagccggaggaggagataccgtactccgtc

SEQ ID NO: 66055 - DNA, 370 bp, Oryza sativa
  unsure (1)..(370): unsure at all n locations
agctntgtttggccatcatgaatcctcattttatgtcttagccgacagccggtcatggcatgatgcaccattggcttcttcaacgatgcttacgggccaatggactacttttgtaccgttcatttggattttagacgatatacacaccgcgacttgaatccactcactgtgacaataaggttctggtggcaataaactttaacgtgacaatacaggctcgatcaagtgttttcgaagggctagacaacaaaagtccttccgatttaaagaagacgaacttttatctttatatatagacctgacgctcatatacatcctttctgtctctcgtggtgaagtgaaacacgtctgaaatgttctttgagctgac

SEQ ID NO: 66056 - DNA, 448 bp, Oryza sativa
  unsure (1)..(448): unsure at all n locations
gaaggtggtgtgagcgagcagctggactgtattcttttataatgcggaggaagaaagaaagccgcgccggagntttccggagaggacgggaggcggcacgcggcgcgcacgccgacagtgcggagccgggctcccgaagcgtcgggaagcggcgagacgccgctggagaagaagcgtggcttccgtgggcctgtgaaagcaccggagatctaggcccagtgcacacggcccggatactagaccaaatttcgtatagaaatatgcccatatgtattgggagggacttggggttgggccgaacccacgaacgcttcgggctggtaaagtccgactaggtcagatagcgcgctgggctgtaaaagcactccatttgtcatcgtgctgtgcagaggcacgatcctaaagtgatgcgcctgagctattctatggcagggaaactaatctcgag

SEQ ID NO: 66057 - DNA, 360 bp, Oryza sativa
cgctgcatgcaacttatgaactgccccttatgaccttccaaatttgaaatgcattgataactcctgtcagggactgaattgtctatgttccgcacaaaaagttcatgaccaaaatattcttgtcctgagaacatacatcttgatgaagctggcgcctaaaaagggctttcgcagcagctgcatcagttgctggctcaaattcaagaagcaaagcattttcactggaaaaatctgtaagctacatggccctcttaaccctgcggcctttaattcattaaacacctcatctttaacttttttgctcttaaccttaacaaaataaatatgacgacttttaccaatagctataccactaccaaa

SEQ ID NO: 66058 - DNA, 126 bp, Oryza sativa
ctttcttaaaaaactctacattattacacagtagtcatccatcaatgatgaacattatatttctaaaacttatgacttgttaagagatgcatgtgtagattttttcataggcttaaactatatata

SEQ ID NO: 66059 - DNA, 177 bp, Oryza sativa
agcttcgattaaaacggatatacccaatttcgttaaactcattgcccaagggtagagaaagacccgtttcacattaaaaacaacataaactagcgcacacatgttatagcgtatttggaattgtaaccaaaccccccccctgggttctattccccgatcataactagaaaggttttt

SEQ ID NO: 66060 - DNA, 367 bp, Oryza sativa
agcttatcttggtaaacaccattatttaaaactaagtcaaacatgcttcatcttgcaatctaaagccacgagttagtttgatagcctactgttcatcgaggacaaaaagcgccatccctaaaacagagagattcttcctccttttgcagaaagagtatgctgcccttgatgctgtggtccttgttcatatattccatcacgtcaagggacagcctcagtttggtgtcaccgagggatgcaaagtggaatggaagtcccatattgtaagtgcaatctaaaaacatcaaagtatcaaactgccatgtttatatgctaatcctgaacatcatgtgacattttaaccattcgtgcacgtttctcgggtgaa

SEQ ID NO: 66061 - DNA, 444 bp, Oryza sativa
aattgatagtttgtggtttgtatgtattatgtgaatttatcatgaacatgtttagaacatttgtgaccagaaggagtatgttgatatctctaaaaaaaaactattgaagtatcatgtacattaaactatgttttccgagctaggatctcctactacatatttttccatttcttttggaaagaatcacaatatatattgtagaagattcaaatgtggatattatatcgcaatcctgcacttgccaatccgcaccacacgatggacgtttgagctttgagaatctttggccccctgtaatatgcacctcctcgtatcttaattaattggcaccaaaacaaaaactaaaaatgaaccgctgatttatttctttttttacgggcaacatcaccaacagcaaatacaccatgtgcaccaacagtgactgatctatatacctaacctttc

SEQ ID NO: 66062 - DNA, 367 bp, Oryza sativa
agcttgaatgccgtcatgtgcagtatccatcggattgagcagctggctgccatatttccatgctatgcgcacactttcgttcgatcgtaccacacaggattttccttgtcacgtaactatctgcgtacagtggcagggggccaggcagcatcgcatgcacggctagatgccatgccagagcacgtacaccgagtttaacgcgccgcgcccccaccagctaattggcagtggcaccggcgcaacatgggcaagcatctgctgcagcagaggcgcaaagcccctggccgctggcacttgccccccgccccgcgtgccacggcgccatatgcgtagctacgcgcgcggccggcctgatcatcaacgcgcg

SEQ ID NO: 66063 - DNA, 435 bp, Oryza sativa
  unsure (1)..(435): unsure at all n locations
atgaaatccggggatgtcattacacctaaatacttcagaacaaaataaaatgtgtgtgagtgctactgtgttangtagtgcaaacaaaatgattgtacccacaagttggccttgaaatttatttctgaaatctattgtttccaacgtcatttatacagggaggaatcacttcatccgatcttgctacgaaggctttggaagctcggcgtgccaaagtaatgggacaagctttagctggtgtccctttatggcagcttggtcctgagagtagacatcctggtgtcccttacattgtttttcctggtaagaaatatttttattcattttccgttcctattgatatagaaaagttaatcttaataataaagtaactgtcttgagactccctgaaataaaatacaggtaatggtggtgacaacagtgctcttcaaaagt

SEQ ID NO: 66064 - DNA, 344 bp, Oryza sativa
gcatgctagctagcagcaaatgagactatgccattaccaccaattggaaccatatcaagcgcgccaatataatcgcgacggtggtccgaaccccaagtcttctacttccttcaccaaggcctaaaaccataataaaccacaagtatggacttcacataaacctattaattgcagaaatataaatgtctaaaacacacttatattgacacggttaataaattgaaatacaaatgagcttaccgtaacaaaatggcacccaacggcagccaaaaggcacggaaataataatcttcccctgaaatattaaaaaaacacaattgtttacaaaaagaatggtttttaaa

SEQ ID NO: 66065 - DNA, 339 bp, Oryza sativa
agcttgacgttgtgaatcactgtttttagtaccaggggctaccgtcccgggtggaccactcggtctggatgatccgaccggtcaaacttgattgttgtttcctatcaccgaagatattggggcgtttcaggctgaacaacgttaatttcctgttcggtcaacttttgttttcttttagattcataagccaggggtcccccaaagatgtggttgacttctttgaatggtcttgacaacctgttgaggggtaattgtaatcttcttttttttttgacggctttggttctccattggaagcccttccggcattttgggcgattgttcttgaaacgtgtttgg

SEQ ID NO: 66066 - DNA, 164 bp, Oryza sativa
  unsure (1)..(164): unsure at all n locations
nggagctggcactgaattagctgacgaaccaaccatatgtttgtgcatgtgtactgaaacgaatatttattntacagtgtcactccttttacagtggtatttacatgtatgtgagtacataacaaacttgtgatctttttcagctcctgtgaacttgtggttta

SEQ ID NO: 66067 - DNA, 345 bp, Oryza sativa
agcttgtaaactctatagtctcatttatgttccgccatgaaatccacttgtgctttgcaaaagccctgctcctgtaaagctgctcataaatagtcttctggaaggccgtgtgaaaacggggatcagtggtgtctctaggcctcttgaactgatcatgatgccttatgatggtgtactgagcggagttcctgatgtttaccacaaactgaacagaaggatcaatttccatctcatttccttcttcctcattctccccactgccactgtcatcaccatctccactttcctcttcaccctcttcccgtccctcattcacatattgctcttcttactcacttgctcata

SEQ ID NO: 66068 - DNA, 428 bp, Oryza sativa
tgatggagcatgagatatgttcttcataaccatgcctatccctcctctctttcttcaaaaggacttctttctttatgagaaaaaagcatatgaatgcatggagaaattattctggtggtaatatggaaatggaatggaatattgcttatctcctagtgtattagtttagcatgttcatatatgtgggtgtatgatcttgatcatagagcatgacaagtatctattcaagtcacaagagtttgacaatgttcaatggaatggcaagcaaccaaaatgtatatggtttaatcatgatggcatatttttggctctggtaggaatttatatcaaatgacgaactcttacatttatcatttttaaaaacaaaatattcggaattcaagtcaaactagtatcaggatcatagtaactcgatttactatctcata

SEQ ID NO: 66069 - DNA, 344 bp, Oryza sativa
agcttgcactttctatggtttagtgttacacgggattttacatggttgcccttatgaaagggacatttacatgggtatgcagtgtcatttgcacatataagcctttaatgggctgataagctgggcctggtctatggcaaacaggcttaaaaagccaagggcggcctgttgggccttcttgatgccgaactcgtcatggcgaagtctttgtagttcgccgaagatgccttcacccgaaatgcctttactttcaaaataccgacgcggcttttcagccttcgccatctttgcttatggctttcgccataaggcttcccctgaatggccttgacatctttgggttg

SEQ ID NO: 66070 - DNA, 200 bp, Oryza sativa
agcttgatgttgaaacaccggcgcattgtttgccgtaagttccaaaacttgacagctcagtatgtcatgccctgtcgcgctttggtggagtaacctaatagcccagcctgggttaacgaccaatcgggtggttttaaggggtccatgcaaatgaacagttccagttcggacaactactaatcatcatgcacccgaaaaaa

SEQ ID NO: 66071 - DNA, 320 bp, Oryza sativa
  unsure (1)..(320): unsure at all n locations
actcaagctggatgcattgccgnttccaaaacaaacggaacgatatttttacatacaggcagggggaggggggcccatttttctttattccccccaaacgaggcccttccttaatacctaggttcacacaggccctggcaaaaccatggagccaacaacacatgcaggccggggaacaacgaccgtacaccccatgggacccaaagccagcctaaaaggaagcttcccaggctcaacaagcttaggacggaacggacgcatgcacttctttaaccacacatcgaacaagcgaagaccaagaagaaccaggaccaagggag

SEQ ID NO: 66072 - DNA, 427 bp, Oryza sativa
  unsure (1)..(427): unsure at all n locations
aagtcacccgccgcatcaagcttggtttgaaacctgaaccgttatagttgatttctttngncaaaggccagggaaagaggaggcactgagagggtctggatgaaatctgcgattgttgaaagggagttagggaatgtagacgaagaaaggaagctgttggaggaaggtctgaagttattcccctcattcttcaagctgtggttaatgcttggacaaatggaagaccggcttggccatggatccaaggcaaaggaggtttacgagaatgcactgaagcactgcccgagttgcatccctctttggctctctctagctaatctagaggagaagataaatggcttgagcaagtcacgtgctgtcctcaccatggcaagaaagaagaacccagctacacctgaactctggcttgcagcagttagggctgaat

SEQ ID NO: 66073 - DNA, 382 bp, Oryza sativa
  unsure (1)..(382): unsure at all n locations
tggctgtgaggaaatgcaacaaaagacaaattctcattngttgctgaactgggagnacacaaaacatgctatggtacctatgattgtgcccacagatactgaactgtgagcggtactccgattaagacatctccccatcgcccacttcaagcatgccaagatctgcaattgatgttcaacagcatctgttgatcggttcgaagctctcaaatggttgagcagaacacattcatctcaaattcttaccgttccatccaccaggtccagcataggcaggcagcccatttgtcgttttcgtctgcacaagatgtcatactgaaataacagcgcaatcatgatcagtactacctccttttcacaatataagtcattctaacatttt

SEQ ID NO: 66074 - DNA, 427 bp, Oryza sativa
tgcacgcatgcgagcttacaaagcgtatgagaaaatcatgtcttatttgctgcagatcatgcctcgcacatcatgccgttttgttcaactgggcaaggtcacgtttcgatttgttcggcagccaatgagttgcgggcttgcggcgttgtcgtctgtaggccaagtctgaagactgaacaaaatgcaggtcggcattctgcacaccgttttcaggctttttcaggtttctgtccattgtttttctaggacagttatcgtatatcggtgtaaactgattgaagtgaacatttaaacctgacgtgattccttgcatcaggatgtatgtgtaacgcaggcttaccaacaaaagcaatgcacccgatgaaaatactgataaaattgaaatacacccaaaaaaactgacaattgttctctatctgaatatgtt

SEQ ID NO: 66075 - DNA, 384 bp, Oryza sativa
  unsure (1)..(384): unsure at all n locations
tcagctctgaagatttttgctgaggttgncatttttgtggatttatatacttcgttctgatgctttgattcaactccctgtactgtcaatcttgcagtcagatttctgtgtcccctgtatctgaagtttatgagggcctgtttggtacagctccaactcctaaatttaactccaggagttgagtctggagtggagttgtggagttgcataaacctagctctacaactctagttcattttgtgagagagctctacccagctccacttccagttttggtggagctgaaactatttggctgagctccagctccaggaggggtggagctggagctctgcctaacaagccctgagcatcgaaaaacctggacatatgatactcctgcgc

SEQ ID NO: 66076 - DNA, 280 bp, Oryza sativa
ggaactggtacaaatggaatcgtgcgaatgaaataatcatatataccgctgctgaacaaaacaatatcacattggtgctcatttttttgataaacctatgagaacattttgataaaatttgaggaaaaccatgaaataataactaaaattaacagacatatgatacaaaattcaagacagaaacttgcgtttatttgatttgaactaatcatcagacattttcaacagttgcctttttagaacttggtaatggagtcttgaaaatgaaaaggagttatgg

SEQ ID NO: 66077 - DNA, 286 bp, Oryza sativa
ccaaccgcactctatatgccaccacagcaatgatgcgcatgacagaggaatccaaaggatggctataggtcctattgcgcaaaacaagttatgtaattcttttcacaagcctataacctaacattgactgatcaagttttaataccatcgtgcatattaaacaatgacagttttgttcaccatccattgtgatcccaaagatagcttcctcccattgagttaatatgattttctgaggacgttcatattcccgcctcttaagagtggcttcatgagcataaaaatc

SEQ ID NO: 66078 - DNA, 315 bp, Oryza sativa
gaccccctgccgcgcaaacaacagatggcccacaccaaaacggggagcgacacggagagcatactagaagcacactccagggaccatcaaagtcgcacggccagggaggacgaagaaaaaaccgcggtcataacccccatagaaacccatagggaacaacaaggcccttcgggcgaaagaatgcagggcctacttttcaacgtaccactcgaacatccctggggagccaactacgacgcaacgccgaggcccatgacgatgacccggttggaaagacgcgcatccaagaaacgttacttacagatcgagcggaaa

SEQ ID NO: 66079 - DNA, 414 bp, Oryza sativa
  unsure (1)..(414): unsure at all n locations
agcnttccctctaactntggttttaaataatctataccttcccagaaagagacagggatcacagggaagtgcaaaactttctcgaccacacaccaagcaaaatttacaataaggtaattgaacaaaacatgattaagagtttcagagcccccacacaacttgcatttatcatctcctcccttccagttccttttaaccaactgaaaggcacatggaatcctcccccttcctgcatgataaacaaaatactttatcttcaaagaaactttactcctccaggtcccctgcatgtcggtatccactactcctccaaaagtcaagagtctatacattgatctagaggtaaactgcttcttcttagcatgagaccacaccaccttatcattgctccccccattcagaactacccattgg

SEQ ID NO: 66080 - DNA, 373 bp, Oryza sativa
  unsure (1)..(373): unsure at all n locations
ggatacattnctggaanggtggncctttatcatttacttatccccattagcatcaatgctaaaaggtgtactccatttgaatccctccaaccgcaactgcaagcgtaaagaattgggagggtgagaagaaaaaaagtaataaccaaaaccatntatatgtatgcaggaagtagcagntcagagtataaaagttaacctttaaaagttcgttcccaaattctgatcgccattgaaacgcttgaggaggactacttggatgtaaatgctcttcagtctcactatgatactcagataggataatacttcttccaattctattgataaaaagtgctcgtgggagaaaatttataacctgcattatcagtcaacattt

SEQ ID NO: 66081 - DNA, 411 bp, Oryza sativa
  unsure (1)..(411): unsure at all n locations
gcacgcacgcttcttacttaggccatatgtatatttttttccgcaaanacnccaacgcctaatcatgttgctgtgccatgctataagcctttcactgaatatgaaattctacaagatgtatttggatatgatccctgaaaatttggcagatctatgggcatgtcacatcttcctgaatatcatcagatattcagattctactaaaccacagtttggtgttaatgatattgagctaaatacatcttgtaaaatttggtggttttgtgcgagtctatgttataacttcttcactgtttctgttttattgttcttaaatggttactttctggtatctactgagctggtgagtgatctgaaataagaaagttatgagagttctgattttgtgagccttctcaattctcatgcatc

SEQ ID NO: 66082 - DNA, 339 bp, Oryza sativa
aaaaaaaataccatgctgaatattagtagtaaaacactgcacaatggcaagttggcagtacacacaaagaagttcacgacaagaggtcgcgaccatagatacaaaatcaggacgggaacatcagagaaacgcatttagtatttctgatatcatgtctttgcctttatgtactgccatttctgttcattaaacttcatgagaagacataggtttcagacgactttattcatccgtcattacctctgaactcaagtctaaaggctaaaacagtgcatggcctgcatgcactattaaagatgatatcatatcactatatatatcaattgagttgatcaccat

SEQ ID NO: 66083 - DNA, 412 bp, Oryza sativa
  unsure (1)..(412): unsure at all n locations
agcttgagtgctngcagatagacatacatttacatagacaaatagatagatagattgtctacagatagacacaaaaagcaagcaataaagaaagatatatacaaaagagatagatagacaatacaagattggggaaaggacgacgaaaacagaaaaggaaagcgattggggaaaaaaaaaagaagaggcaagatgccggcgcccacgccctccctgtccttgtggcttctccccgtccaggtaactgatcccagcccacgccccccgcaccggtttgtgtggccacaacatgtgtgtgatcaaatttcgcgctgtggatcggagcaatcgccagcgagagagagatcctgcggcagcaatcaaaagacgggaggggaatgagtgatcgatcgattgaatggatgcggatcat

SEQ ID NO: 66084 - DNA, 381 bp, Oryza sativa
  unsure (1)..(381): unsure at all n locations
aactcagcttcattccttttttcctggaaatttcttttttttctttataggacgtactccacaaactaaagcaatgtagtattaaacgtcaaatcatacaggtgtgctttttttttttactgaaaataccggcttttcaaaatctcaattacaccccaatccgaaatcactgatagctgctaatttatccggctgaagtcatgtagagtagaaatgaacacacaaataggaacatggtattgataggtgtcatcactttttagtgtaaaataatttagatggaccacatcttttataagtattattacctccgttttttaatttatgatanccgtgatttttttatcaacgnttgatcattnggattatttaattttttat

SEQ ID NO: 66085 - DNA, 358 bp, Oryza sativa
  unsure (1)..(358): unsure at all n locations
agcttgacgaagatcctganccgncggtgattgcacttcgttcggggcatatcacccaacatacgaagtcgttgaagaatccatctctggaacccatatcatcgaaatcctgaagcaccaaactccccctaactagcgcgccactgtcggcgtttgatgtcgcgattccggtatttacatactatgggatcgttggtactaagatatatgcgagattgtagtaaaagagatgggaacgaggatttttatacaggttcaggcccatgaattgtcacataataaccctactnctgttggncgaagccggtngttggttttattcaccataatcacaccagtacaatatttggggtagtta

SEQ ID NO: 66086 - DNA, 331 bp, Oryza sativa
  unsure (1)..(331): unsure at all n locations
aagaaangagagaagaccacaacctcgngtgtatcgggggacggaaaagcctcaccggacgctggccgccacccgatgatctccttggcagggagaacgccgtgcgccactatctccttcaggttcttctccgtcacgtcggatggcgcccattggccctcaaagctttctttctcttccgccattgattttacccgaatgcgctgatttgattcgggggatggctaaggagaggtgagggattgaggcggtgaattacgggaaggattttgatgaacttttccaatgtggatttgagtggattggtgaaccctaatttgcctgcgcagct

SEQ ID NO: 66087 - DNA, 399 bp, Oryza sativa
agcttaccgagcacattctatgaaaagtacatgaagaaccatggagaacttcagtgatgacaatgtagaacaggtcggcctagctagcaagtgacagttgaagttgggcttggatttttcactttgtgcaacaacttggtttcattttgtataattaactctgttttcttagaatgttctgtgaaaatggtacgtttaattctcctagcttagcctgtgttccgtacttttcaccgtgtagaatattgccttgttccccaagaaccgtaccggcgaacgactcgtaacgtacttatgatgaattgatcaaggtcaagacgtcaagttaatccttgagagtgtctatcagtgtgagcactttgaatattgttatattagctgcacacatagtaccttaat

SEQ ID NO: 66088 - DNA, 330 bp, Oryza sativa
  unsure (1)..(330): unsure at all n locations
tggtagtccccctctgctcttttttcttgcatggtcccccnctacgaccccctctcctccggcccagcttacaactcccatatccccttaaaaccacaccaactcgtagccaatttcttcagcgcggagacgcaagatatagcagcagctagcaagaattgccccgagttgggtggttaattcttggttttggttcacgtagaagcagatagcttggttggttggttagacggccatggcgaagccgcatgacatgcgcagcgtcnactcgttctcgcagctgccgatcattctgccggcgccgccgccgcagcatcaggcgcgggacac

SEQ ID NO: 66089 - DNA, 297 bp, Oryza sativa
  unsure (1)..(297): unsure at all n locations
agcnnnnntactagatngagacngaagtttttgtccagtagttgcgtacgatgtctttcctcataggatntgggatggcccctttgtatgcccngatccctcatgatcgtgatgaaaaaaaaggctggggtcaaatcaccttgaacaagaatcggaaagatatcccatcggtgatgttcgaggcttgagggggaagctacattcatgcttgtcaggaggtggccaggatcgccataggagagctccgcgaaagttacaatgatccggtggccgacaccgagtaccgttaccatcctc

SEQ ID NO: 66090 - DNA, 414 bp, Oryza sativa
agcttggggggttttgttgacggtcggatatttttattttctaccgccaatattactaaaacaggagagaactagtgatgcttgcaatgcataaatatgttagagcaataatattccactagttttatgtatactaacctttttgtagagaatgacaataaattggaggagaatcgacatcaactccaacgatgaatcaatcggacgatgtcgagaatcagacttgtgtatgagtgaggcaataactcaaaattgacacgacaaactgggccaaatatcacaagtcagcggagaagagaagtccaggaggctaccagccaaattgtgggctagcggagaagagaagtccaggaggctaccagccaaattgtgggctggttgggccagccacaagttcggtggatttctccaccg

SEQ ID NO: 66091 - DNA, 375 bp, Oryza sativa
  unsure (1)..(375): unsure at all n locations
aaactcancttaagaccttcgncgcagcagaagacatcgatttttatcttttctgcgangatcggcatgcactacgcatgactgcatgcagcgcgtgatttccaagatagcagacctgctcgtgcgttcatcgtttgctgacaatctgatgaccacggcattgatctgttccttggcctatgttctaaatcggaattgaggagtccatgtgtttgcactagtagaattcaattcctagtcggcaacctgaccgctcgttccgaggacataagtcacaagtaaatagatcacctaaacagacaagagtatatacacacggggcaacaatcaagatcgatctcacattgcaccgtccatcaggccaccatacgaata

SEQ ID NO: 66092 - DNA, 103 bp, Oryza sativa
ggggaaaaaggaggaggagaagggaacaaaggggaaggaaaaaaaccggccaagccggccaaaaacaaccaaagggaaaggagaaaacaaaaccagcccaaaa

SEQ ID NO: 66093 - DNA, 240 bp, Oryza sativa
ctgcacattgctaagctcaagtgtaatttgcccagttctaaggggcttttctgcaaatctggtggtattcaagtgtcctctacctagatttttcaccttttagtctttttgaaaaacaaacttatactgcaaatgatccttttcacggcgccaatgtcattggccgtctgttataaattcaccataaacattcaccactgtatagctgtttttctggaaaaagagaggccaccccccccc

SEQ ID NO: 66094 - DNA, 250 bp, Oryza sativa
  unsure (1)..(250): unsure at all n locations
tgctcacttaccgatcaaggtggnngttgtngttttgtgaacgcctaaaatggcctatgtttatgtgaggaatttgacccttccagggggcaggaaggatccttgggccggctgggaaaaggctttgtcgcaaccctctgacaccggccagtgtctggagtaagtccgtgtcttgtggggaaagagtacccctctggagaggttaactaactgttcaaacagcccggctcacggtcatgggcggatgtga

SEQ ID NO: 66095 - DNA, 279 bp, Oryza sativa
  unsure (1)..(279): unsure at all n locations
agctcgatcgagacanctttgctttcttttacccgcangaagcaacaggctgatcagcaccgnncagaacgctcttttgcagtgggcgattgggttaattgaagcttcagcccttcggtcaacagtcggggggtaccaagggctaatcgaaactctcatttcgattctatggaccatttcaggtgcttgacaagggttgaacgggagcatatcgcttggatctgccatcttccagtttgatccacccagctgtncatagctccccaccttacaaaggcc

SEQ ID NO: 66096 - DNA, 264 bp, Oryza sativa
  unsure (1)..(264): unsure at all n locations
accgcgccgccggaagccggagccaggcnnccacaccgagaacggnagggaaaggagagggancaacgccagaacgacgcccccaaggaggggaacgacgccaaaggcgccgccgccgncagccggccaacggcacggcgaggcacncgccagcgaanacccgcccaaacccacacnacccaaacgcgcaagaaagancgccgccggacggcagcaacgaccctcaagcaaccaggcctaggccaacacccacagcaccggcag

SEQ ID NO: 66097 - DNA, 384 bp, Oryza sativa
  unsure (1)..(384): unsure at all n locations
actcaagctncataaaaaaaacaggaaggagncagatgtttttttttggctctangcngngngaaacttattcaccagaatagactgctgtgaattatggcgatcctgctacttttgtctttgcacataaaatatatttgttagttctttcatgcatcacaagtggtggattctcgaagttgtagactgatgctttggaaaatacatcagttggaagaatggtttcccctaaccagtgatagattcttgaatgtttctatgcttctcatgaactgttttttttttttttttttacatggcatccccaaatattgtttgccagtaaacttgcacttaagtgaagcagaactattaagctgaggaaactgaagctgttcaatattg

SEQ ID NO: 66098 - DNA, 342 bp, Oryza sativa
attaataaaaaaaaaccctactcaaagtaggtctagaactcctattcacaatagaactttatggagagacctacggatcggacattcaatccaggagaaaaaaatcggacgcccgtcccagccatcggatcgagggattaaattccgaccattggtagcgcgtcgttactgttcgatgcaaacttctcctgggcatctacatgcatccatgcaactttttccgcgcacaaaattgcatgtgtgacaaggatagttaattgtttgtaaccaactttaaactatatttttctcttaaaatattaattccaatcatgatccaattacaccattacattcggtgca

SEQ ID NO: 66099 - DNA, 381 bp, Oryza sativa
  unsure (1)..(381): unsure at all n locations
gggataaatagtaaaattttgggaacgtatattttattacaaaaangacctaaactaattgttgttttttttaataataattaaaaaagtgctgagttgccgagcagtagtaagctcccagtccaaacatttctcctcctcggtctggagccgctcccccctccccgccgccgctgctctcgacgccgacgccgacgaggcagctaggccggcgacgaacctcgatctcgatccgctcgccgccgtccgtcgccgatccgcgcgccgacaccgacaccgaccttgatcctgatccgcgctccccgcgacgtacgccacggtgggctcccgatctgaccccatcctccatccacccttctcactctccgncgtcgtagtata

SEQ ID NO: 66100 - DNA, 297 bp, Oryza sativa
  unsure (1)..(297): unsure at all n locations
agcttgagggtcgacacatctttatcggtagttcttgaagatggacgncctagtgccccggccgaagccgccaagaactatgtacgtcacagcggttgggttgtgcgggataacgtgcctgtcagtacggtgtactggcgaagaacaagggcacgcggagatcatgagagctctgtcccagattcggagaaagagatgctgtggaccacaatgctcgagacattcacccttcctgcgggtacagaggacaaagtgaaaaggtggactctgaagaaaatggcagaacagtttcagagc

SEQ ID NO: 66101 - DNA, 255 bp, Oryza sativa
ggccatatccccaccacaaataagagaccaaaaaaagagagaggaaagcctgccagaccataacaggaacccgagcacacaaagaaagagaggcacaacgccctgggaaaagaaaaaaaacatgcaggagaacgcgatcaacgagggcccaaggggggaagctaccgacaagaagctaaacaaaaagaagcgaaaacctaaaatgagtgtgggcagcaccctcctaagacgactcagaggggggtaaacagaaaa

SEQ ID NO: 66102 - DNA, 403 bp, Oryza sativa
  unsure (1)..(403): unsure at all n locations
agcttcttctagccattctctgtttgcttcaaccgatatcagnaagaatatttgtttctttatgttgtctcgatgtggcgttgcttgtgcaaatctgaatttctgtaagagagagagaaagcagcatatttgaattctgccgctttgtctttcagataatttgtcaagcaaaagttcagcagtacaaatcattgagtacattcttgatacactagagatgtaagtttgaactatcgtgttcttttggcttccacatcaatcggagcacagattttgtatgatgactcgatgtaacgatatatatatatgcttatattatcttatcttttcctctgttgcaggagagacactcatgagttatttgcaatgcctgatgacatcccagatagccatggaggaatat

SEQ ID NO: 66103 - DNA, 372 bp, Oryza sativa
tgcgtgcagtcccagggtacatgtcgtgtctttgtatggaaggatttgacttctatagaattttactcaatccgctgatgactatccaatacaaaaatgtgcgggaaataaacaatgacttggagagcgtgctggggttacttgctgtaattcctgcgcatggtgtggcgtgtgtagtagactcgtaggtcttgtttggtagaagcgcacattgttaaacacattgactgcatccccacgtaacgttggtatgatgacctcgtgccagttgcttatgcattgctcgcacgtatgagatatggaatgatttaattctgggtgtttattcaaggttcaccaaaccgttttgagtgagtttggtggtagctgcat

SEQ ID NO: 66104 - DNA, 240 bp, Oryza sativa
  unsure (1)..(240): unsure at all n locations
gaccaagcaccgaggctgcagctcactcttacacagnngggtttttttttttcaaannaccacgaaatctgagtaggacaagtaatgtgccgggagacagttgggatggacaaactggtgaacttgaataactccattggaacaacaaatacagttttctttaaatttgctgcataggactcaattcagccacattaaagatattcgacattaccgaaaaaatgcaactcttcgaaaatg

SEQ ID NO: 66105 - DNA, 414 bp, Oryza sativa
agctggggagtttgtgttgaagtgagatgacgttgtccttatataggggtaggtatgacggttatacaacgcgaattgtcgaaaatgccccgcaaccgccatcaggagatgatcaggactgttcacgccaaaccccaacctagacggttgagattttggtccctggttcagctgaacctgggctaggcccatctggcctggcccttggcccatcttccccctagacctcctctatctatttcttaggattttgggttgattctcgggtattttgataaagttcacaaccaatccttgcatggatacacatttctcctcactttagtctgattttcctcccaacttcagggtttattatctgcatacaaatatatagcaacacttgtggaatatgtgagattaagcacctatcac

SEQ ID NO: 66106 - DNA, 382 bp, Oryza sativa
  unsure (1)..(382): unsure at all n locations
cctatgtatatttggtggctgttcgaaatcaattttgnngtagttgactgaactagattccgnaccttttacggcttgatctcgatatctttcagtaaccatggtcacattagttggatgcacttgtatccaaagaaaggatggcatgtttctaactcctagcacatgaatgtaattctagtttttgcagccacactgccactcaatggctagacccacaagatgacccggtcgcaatcacgctagacgcacccgagaaaatgacccggtcgcgatcacgccacacgaacccctcacctgccgcgatcatgccacacgaccacctgcagtcgtcctcgctgctccggttttaaatgttcgctctggagcctcttgtccgctg

SEQ ID NO: 66107 - DNA, 404 bp, Oryza sativa
  unsure (1)..(404): unsure at all n locations
agcttatttagttcttactaatcagttttatattttatgttaattcgatcacattcttcaatcaattcaatagaaagcttgttaagttaatatatttactagttgtggtttgtggccaaagntatccattcactattctttttttctctcctgcgtcatcataattcatatgctagtgacgctcctaccatttagcgaactgttataaaacacaggaatataattctgcctactaattaaggttcaaacaatatcataaaaatagcgtatgtcaatgtgaaaatgtgtgttatccgtataacatcaagcataacacgtggtaatatcatttgtctaaaaaagggagcaatttaattaattaatgtgttacgtactccctccataaataaaaagcgaatctataa

SEQ ID NO: 66108 - DNA, 376 bp, Oryza sativa
  unsure (1)..(376): unsure at all n locations
ctcaagcttgccgagctcttctcgtatggcttgcnancgatttggtgtttatctccgcacgaattgctttactggcttggcatcaggtcgcaccatgaatttgtactcaatcacctccctgggtaccctcggcatgtcggatggctgccaagcgaacacgtcagcattgtcgcggaagaaggtgatgagcgcgagttcctatttctcgcctagtgatgccccgatcttgacggtcttgtcggggttggcactggagagtggaacgatcttgattgcgccgtctggctttagcatctttgttgttttgctcactttcttgggtggatcagctgtggccggtgggctgggcgtgtgctcgaccatgttgaagctccgc

SEQ ID NO: 66109 - DNA, 395 bp, Oryza sativa
  unsure (1)..(395): unsure at all n locations
catcgactacaccgttcnnattaggtangttcnaaggagcctgaccccctgcctcgcatagatcagaacggcgactccactgcggagcgcgaccttttgtgtaatctatacgcatattctggttaccatcaaatacccatgggcttggaggatgaggaaaaaactgcgtgcattacccccgtaggaacctattgttatacatcaatgcctttcgggttaaagaatgcaggtcctacttttcagcgtactactcgaatttctttgggtagtcaaataggacgtaatgttgaggcgtatgtcgatgacttggttgtaaaaacgcgcaaccaaaacaccttactctcagatctagcggaaactttagagaacctgcgctccgcacgcataatactaaa

SEQ ID NO: 66110 - DNA, 298 bp, Oryza sativa
  unsure (1)..(298): unsure at all n locations
gagcggaccgagcgccaagaatttangtttcttgagaaggnggagcaaaggactatgcattttgacggggcgaacaggatattaggcactggagcgggggacattcagacctacccgactggagaaagattaaactatgtattgtggatacattttgctgcatcccataacgtgccagagtataaggcgctgctccatggattaaggattgcgaactctttgggcatcccgcgtctgaaccgccggggagactctcagttggctggccatcaagtcatgaacgaatgggcccggcctg

SEQ ID NO: 66111 - DNA, 375 bp, Oryza sativa
  unsure (1)..(375): unsure at all n locations
tgaagcacttggattactatctnngataggcttttatggncgaccgcaaaggactcgggggctactgtggagattatgggtatcccatatctacacggcgacggtatttggattgggtaccggatacttaatgtagatagaatatcttatctgtatctcgggtttgtttcttaacttgtgtatcaaggaaacaccctgagacttagtcggttacgactgtattttacctctatcttcatattccgttaggaatatagattatcttttgtaatccggactccttcccatatataaggggggtccgggcgcctctaggggcatatgctgatttttcccaaatcatacaatcaataatacactccgcggattcatccc

SEQ ID NO: 66112 - DNA, 410 bp, Oryza sativa
  unsure (1)..(410): unsure at all n locations
agctntggcttgcatgggattatactatcattacaaanccaaccaggcggcaatatgaatggtctaactatattgatagagcgaaagttgaagaagacaaaatgaaacttggaattgagatggctgccaggatttcggctaccgaagcaacatataagaaaaaaatttcaaagctcaaaaaagaggcagaccacgctagaggttggttcatgggttccctagttgttattgcaattcttatgtacaagatttcagagtgtatgtaccactgttgactatattatgtctgagctgtactttgctacctgcaatttaacatatcaattttaacaatgcttttcggatttctcacatctgaaatgacaccaaaattatgaatgtggctgtcagtctcacgcatgagtgaagta

SEQ ID NO: 66113 - DNA, 382 bp, Oryza sativa
  unsure (1)..(382): unsure at all n locations
gctaaaaggcgggctcacgangctcnatatttngtttgnatcttaagaacnccccaaagaaagcaatagatttggaagtcaaaatatatcactaccctccgtccatatcataagactttctacattgccctatttatatataatggtaatgaaatctaaacatattattatataatatatatgtggtgtgtggttctaatttaattaacaattatataaatatgaataatgttagaaagtcttacaatatgaaacggaaggagtacgcacgtttgcaagcgtggtacgtgtttacctaaactctcgaaggtttttatattcttcactggtatacgtgtacgacggggtgtgcgtatgtgtgctccggggaccagggaaaaaa

SEQ ID NO: 66114 - DNA, 403 bp, Oryza sativa
  unsure (1)..(403): unsure at all n locations
agctntaggacttctgtggatgtgtgttttttaactgaagcaagaatagctatgcgaccgtagcgaactgaagtataggctactgatctttgaaatacctgacaaattttgatcctgctatgctgtagagaaacagagaaactggctggctgcaacgaacttagttgccacgcgttgttcatttgtcttcataagcaaatttatcatttgttagcaatttggaatgcctttttcgtatgtttgtcaattgtcagagctgaagtaatgtgtttggcgcacccgctcactgtagcttttacggttttaccggtaatccaccacggacgcactgggtgtacatggcatttctgatttgcgacgggcgttctgcagntgcatatgtaattgatcttctcaagtgttg

SEQ ID NO: 66115 - DNA, 381 bp, Oryza sativa
  unsure (1)..(381): unsure at all n locations
ntgacccactcatgaattcaggantgtctatcatttcntttggccgaaagggncgattttgacttcttgggttctcctttaagcttgaggaaagaaagatagagtgatgacggggacaccttgacagagaaacattgcggtttatgcataactctagagagctactttacaaattgtgctctatttatagatgaatgccaagcagaaaattcactaaattgttttaagtttgttttgataaaataaaaaaaagtgctcgagtcatgaatgtttaattttggtatttaagaaatcacggatgctgttgccgagaattctttttaccttgttagcattaatttcatcatgatctgaagtagctctagcttaatttggtattct

SEQ ID NO: 66116 - DNA, 347 bp, Oryza sativa
  unsure (1)..(347): unsure at all n locations
ggaccttaagcaccgcggctgcaactaacctctgccaccttttattttttttncganacaacgcagccaccgatttaatgttgagcttggctgacttatgcattntcaaaataaattcagcgtgtgccctatcatcattatgaaccctctcactagtaggtaaaggcaaaatatcaataggagcacgagggttgaaaccatacactacctgaaaaggactcaccttggtagtaaaatgtgttgcccgaatgtatgcaaactccacatgaggcaaacattcttcccacatctttaaatatttcttccaaataaccctcaacatggtacccaaagtgcggttgactacc

SEQ ID NO: 66117 - DNA, 373 bp, Oryza sativa
ttgaagtctatggggaaacggaattccttttttttatggatcctattatctttaatgtggtgcaatatcttatcctctttatatggggcttgtgatgagatgtaattattcatttgcatgtgatgtgttggatgtgatgagcatatgtgatatatttattctcttgtgagcttcaatgtggatgcaataatttagggggagctctccacttgcttttatgcacactcttagggggagcttccactaaaactttgcaccaaaaaccttaaattatattcattctctcttgtgttctaatcgtattgtcatcaatcaccaaaaagggtgagattgaaagtgcatctaggcccctaatgattttggtgattaatta

SEQ ID NO: 66118 - DNA, 407 bp, Oryza sativa
agcttgacattgatcctaaatgatggattattttctttttattcaggccgctgaagttgctagtcaggtgaactcatgggtagacagagtcacatcaggcctcatcaaagaaatactccctccaggatctgttgaccatactaccaggctggttctgggtaatgccctttatttcaaaggagcatggactgagaagtttgatgcatctaaaaccaaagatggcgaatttcgtcttcttgatggcaagtcggttctagcaccattcatgtccacttcaaagaagcaatatctttcgtcttacgacagcttaaaggtactgaagcttaacctgtataggtctacccgtataatttttgagaatttttacggtacaatctactggtagtatatactaccaatataaatga

SEQ ID NO: 66119 - DNA, 375 bp, Oryza sativa
  unsure (1)..(375): unsure at all n locations
tgctgaaatcaagcttttagctcgttaacggtatcttttttgcctagctgantcattaagataacgagagctaaaatgagctaacacttatcgagccgagctgactcgttattatccagccttaatacacaactcatggatgaattaatacactaaaagatactattaaaaggacatccaaaattaattatccagcggattaagtctattgttagcccctttttagttttgctaaaagtcacccttttgctctgaattgcacaaccaggtatttttcactttcaatttttaaaactagacacatatgacaccctaaaacatattattgctaatgtattttcactaacacgtgaacttcattaattaattgacacc

SEQ ID NO: 66120 - DNA, 408 bp, Oryza sativa
agcttgtcagccaagattttatttgttatctgcagacggagaaggcgggaaaaacgctctcttcacataaacctgcaacacagatcaaatagttagatgcagctaggtttctttcctctgtgaatactgtaatccactcatcgtcaccaaagaaaataccgaaccataagcagctcaacagaacaaaacagcatattgccagcctacctgggccaagatgttgtaggaaaccagccggaactggtacccagctgcccctgtaacccaaacactaaaacagttttaatacaaattaccctgcgcctgcgcgatttgcaagtaatactagcaatcaaccaccaatcaaaatcgtattactcgcttcttaagattgaccaagaaaagatacaacacaacctgcatcggatt

SEQ ID NO: 66121 - DNA, 363 bp, Oryza sativa
  unsure (1)..(363): unsure at all n locations
tcaatagggtagggcgcnctgtcatatttctcatttctccnaccnccggnatgaactgagtacgcgatgattcatggtgcgtatcataggcttaccataagataatgtcgtgaattcgccaagcgttcaaacccactgatgtgttatgtaaagaaaaatatttgtaagtattcatgaagaaaaggcaggtaaatatttcgaatttatttatttagaaatttagccgacacattagaaagttttaatacacaatattacatattagttcgaatgagcaaaatataaaatcgttctactcattagcctcatcatcgaaatttcttgatgtcggaatgccttttttctttccctttcttctagcac

SEQ ID NO: 66122 - DNA, 52 bp, Oryza sativa
acctctgagtcacctgcggcatgcaagcctgggtgcctattgattttctttt

SEQ ID NO: 66123 - DNA, 209 bp, Oryza sativa
  unsure (1)..(209): unsure at all n locations
ggagctcggctcgattagctcgcgagctnggtaatgtctcagctcggctcgngggagctcgtttgagctcgaatcgagcctaggatgagtcgagctcgaatagctcgcgaacctcgactttttgacagcctagaaggactatagatgcaacgcacgggcagggcgcgggaaaaacgcggtttttcctttcctctctttatttagcaagt

SEQ ID NO: 66124 - DNA, 405 bp, Oryza sativa
agcttagccactggctggggctatctgtctctgtctaatgccttgatgtgggcgagcatcttctgcgtccgcggctgcgagaggtggtagttgttgagcacctggaacgcgtgcccgacgccgccgtacgtggcctgctccacgctatggtcggccctgcgcagcgcgctgcagagctccaggttgcggtcgcggaggatgtcctgctcggagatgcacacgaggaagtccgggagcggcagggagtcgagccgcggcgcgccacgcccggtgacggggttgcaccacgggtggtcgcgtgtggcgccggcggggagcgacatgcgccagtatgtgtccgaggtcgagagcgtcagcgccgagcctggtggctggggcatcgtcttctcggaggcggtgcgggtc

SEQ ID NO: 66125 - DNA, 379 bp, Oryza sativa
tgcacgtagacttcctagctcctcgtgacaacattctcccaatgtgtttagcgccggccatactccaccaacctaattcctcttaaatgcgactaatcatctggtgtacggtcgcctcctttgctctaaagattcttgcatttcgttccttccagatttcccaagcaatgagcaagaagagagttctgagtcctttctgttttgttgctttcgggtcgcatgttccttgtgtccaaaattaaacaattcctacgttgagtttaaacgggtggttacgtggcaatatggtcagccagataaataaaaaataatggaaaaaaaattgagctccatatgtcaatcaagcaaatagacccacgtgaccccacctctttctctc

SEQ ID NO: 66126 - DNA, 413 bp, Oryza sativa
  unsure (1)..(413): unsure at all n locations
tgcaancttatttacaaatagatccataganttttttttttttanaaanannaaaagatccatggaatcacacatatttttaaatgaggggttaaccaaataaacaaaatatttttttaccctagaatcacaccaagtattatacacaaaatttatctagacttaccataaagattaggtatagaacaaaaagtatgttctaataaatatgctataaaacaggatggaaaacaggccattttcaatgaaatacgatctacagggtaaattaaatgtcactttaaatgtataatccttgcaagaatttaatggatattaaatatactaatccaagcatcctatgaaaatcatgccttttctttaagggctctttatcactaatacatgggctacaaagagcgggttaagagttt

SEQ ID NO: 66127 - DNA, 287 bp, Oryza sativa
  unsure (1)..(287): unsure at all n locations
cccgtttatttttcatgggagcctcaaggtgccggacttgaagctgcacctttgatagactcaaagtgccgctgccaatgcccttgacaataccgcaccaatgggggtggcaccaacaccatcggccatcagaatatagcatgtggaaaattaatgtgaaattctataataggccatgttactaaaatattgcatgnattgataacttctggacctttcaccaaaacactgaataacaaatatgaactctatatcactgagagaatactggctaacattttacttct

SEQ ID NO: 66128 - DNA, 411 bp, Oryza sativa
  unsure (1)..(411): unsure at all n locations
agcttgtacaaactaagtctttgatactaattataaatccttctgatcagccttcctaagtataatagtatcatcagcatactgaattattggaaagtcactttcttcatcaggctgaataggcttagaaattaaaactctattgaagcaactcagcccctaaaacaaacaaaagtggagacaacgggtccccttgtctgacccttcttttgcatttgaaggatattccaggtacaccatttaaaagaactgaagtatttgctgagttaaaaatcatttctacctagtttaagcatttagcaggaaaacctatatgtctcaatatcatcaagattgcttcatgctcaattgagtcaaaagatttctcanaatcaaggtttataataacaatttctctctttgattgctgac

SEQ ID NO: 66129 - DNA, 380 bp, Oryza sativa
  unsure (1)..(380): unsure at all n locations
tcctaattccaacaaaaagaacggtctcctaactatattgnacannccgangnngcatattgatatagcagaaaaaatttacaaaattatatattactggaaactataattgcgacaaggaaaaagaaacaaacacacatcccacatgtcgacgctcaaaactcgcactgaaccgactgtcgctaatgctgccaaacatgcaaagggctattaccgaaccgcccacaaaggcctctaagcagttgaaacattaacaacttcccagcattgcgagaagggttgcggaggaagatggtgagagagaaaagatccaccctccctaattcagactggccatcgcacgggagcatcccatagcacaatacatccatggtagcctt

SEQ ID NO: 66130 - DNA, 413 bp, Oryza sativa
  unsure (1)..(413): unsure at all n locations
acctgcagctgcagcttgatgctaagagctgtctgtttatattgaactatnntggctgctctagctccattttttctgaagctagagtccaaccaaataattttagctttattcaaaaagaagtgaagctgacaaaaatgctctataaatgaactaaaaaggtggagctaggtttagacagcttcactctaaaccccaactcatagagttaaatttgagagttggagccctaccaaacacgcattctatttggtaggcctctaacttataaatataacttctcatttgatagggctcaatatcttaaatttaactctacgagttagggtttgaaatggagttgtggaggtggagctgtctaaacccagttacacatctctagttcattttgaaaagtatttcaaccaactccg

SEQ ID NO: 66131 - DNA, 390 bp, Oryza sativa
tactcaagcttcgcgggctaaccccaaccacccaaattctatttttcgtacgggctcctctctcggcaaaccaaacccaagcaaagcacccgccacatcggagaagagagagagagagagagagcggggaagcttctggaaggttctcgaagatgctgtcctccctgtcggcggggctggtgaacccgcggcggaacccgctggcccgcctccacatgaacgccgtcgccttccgcctccgcaaatacggtgagctgccccctcccccccttcgaattccgccgctaggggtagggttagggttttgccgcggcgagggatctctgatcgggggttctggtgtgcgcagggctccggtacgacgacctgtacgacccctaccacgacctc

SEQ ID NO: 66132 - DNA, 404 bp, Oryza sativa
  unsure (1)..(404): unsure at all n locations
agcttgttttcactacgactngtttctttcttattaggtggacgatggcgacgaaagcgctgatcctttgcaaggaggatggcgattacttagcttagtcaacacattgtaaacatttcactcatcattcataaataacaagatggtaccaaagactctactggttgcttcgtgttagtcccagcaccagacaacattcagccaaaactgtcggagtagttgctgcatactaccatactatttttttggtcgcaactatgcataagaactgctagtcttcggactaaattgcctgcactgaaaaggggttacaaatcataaaaagtgatttcagaaatatgtgtttttctaacatcacccttcacatttttaaaatctttatttctttgggatttccgatttgt

SEQ ID NO: 66133 - DNA, 383 bp, Oryza sativa
tgagggtcggcacatcataacggaatttttagatgatggacgtcctagcgccccggccgaagccgccaagaactatgtacgtcacagcggttgggttgtgcgggataacgtgcctgtcagtacggtgtactggcgaagaacaagggcacgaggagatcatgagagctttgtcccagattcggagaaagagatgctgtggaccacaatgctcgagacattcacccttcctgcgggtacagaggacaaagtgaaaaggtggactctgaagaaaatggcagaacagtttcagaacttcaagggagatctgtacaagaagtatatactgaaggggcagacaccgaacttcgacacattcccaaagctaatggatcactgagacgagt

SEQ ID NO: 66134 - DNA, 402 bp, Oryza sativa
  unsure (1)..(402): unsure at all n locations
agcttaacatagntttaaaaaattaaatttattttataaaaaaacgccacattggtgtttactgttactattgttaccatggatccaccaccataggatgcgtgggctcgtcagtggatcatcaaaatgagaccctcactttacattttttttctcttataatttatttttttcaaactatgttaagcttatttacataattattctaatgaattatacacatttttttttcatattttggaaaatacatatttctaaaaaatatattactagagcaacttgttttaagatagtactccaagttgttaagcttattccaaaaccatgtaaataatccgcgacaataataatccgtttggcaatctaaatcaaacggcgcatataggggttgtttggttgatg

SEQ ID NO: 66135 - DNA, 354 bp, Oryza sativa
ctgattaaaacttcttattcactcaacgagctatctctgtcagaagaaaaaaacaaactgaacggaaaacctgctacaacaagcaatgcttccggttaagctggccaattatgcgagaagctacttctccaagagctaaaccaaactgaaagagaaacaaaaacaacagcgttgatgcgctgaaagctgcagaatgccaatcttccttctcagttaccgcactcgttccgaaggattttgtcagattatctactgctaactgatatccagaacttatgtgctccacttctatctctcattgagcaacacaattctcgaataaagtgatatctggtattagtctttttactccta

SEQ ID NO: 66136 - DNA, 364 bp, Oryza sativa
  unsure (1)..(364): unsure at all n locations
agcttctgtttgatatattttgcttgctctaatatcttaacatagagttgtatcggagtattagccgatatgtgctagatctatctgatcggctatgctatgaacatctataatctcattattaatatatacttcgatctaagtgattcatactgtctcggcatgacgtccgatctatcctaatcacttgatttaagtatatatcaacataaggattatataccattaatatctacagccgatcgaatagatttagttctttcttacttattcatgattgccgatcgattcaaatatgacatcggctcaaagttaaatgatatgtcatcggcgcctggccgatcgngtatcatttatggattta

SEQ ID NO: 66137 - DNA, 282 bp, Oryza sativa
  unsure (1)..(282): unsure at all n locations
agcttcatgtcaccactgccaaggaactantattaccggcattcggcattagcgaaattcgtcagttggattccatgttgttggtagtagaactcagctcacagtgtgttccgttttgtttcgggcaggctgattctgggaatcgtccggtgaacggcattccgttgatctaccactctatccctcgcctgcttctactactattctcttcagcctttctcccatcatctttcttttctttaccctccctgctttcctcttttcccttcacctaccatttct

SEQ ID NO: 66138 - DNA, 342 bp, Oryza sativa
  unsure (1)..(342): unsure at all n locations
cacaagatactcaagcttaccacttgctgcatggcaccaagccaaaanggcatggccatctacgggcactggaacacggggncttttgggcacaaacgacatggaccccaaccggaacaaggcaagcggcaagccggcggggtgggccagcaacaggccgaaaaggagcacaaatagggaccaatcaacggagaagggacgggcgcgacagaacccccgcaaagggccaaagacacacgaacacgccgacccgacaaacggcccccgaaaacatgcggacaaaagcagcgaaaccggcaaaccccagcaaacagggaaagcgacagcacgaccgaacaaccg

SEQ ID NO: 66139 - DNA, 417 bp, Oryza sativa
  unsure (1)..(417): unsure at all n locations
agtcacctgcggcatgaagcttgtatcggaatgagagacaatttcattttggtgattgnggacggcaacaaggagctccaccggttaccggatgctgaaaattggtcacgtcaaggttcacctacgaggaagcttaaagttctgagaagaaactggttggtagttagcttttaagaatctaaaaaagctaggtttttcaacttatgtctttcatttctgtgaattctataattgcagtttctcagtttctgagaatctagataaaaaaactgaattgtttgggagagctttagatttctagggaagttgtagctacaacaaactccccaaacaggttcgaagcttcatatcaagttcggtgtccaaattccagcgaggcccatttagaataccatangaaaggccgatagtgatgga

SEQ ID NO: 66140 - DNA, 364 bp, Oryza sativa
  unsure (1)..(364): unsure at all n locations
tcgcattaaaaagggctgtgccagagtaccncctgttnctgatcagagacctagctagctagccagcctagcaacgtgtcatcagaggaaagaagtcggaaccgtgtattaaaagtcagcaagagtcatccccggacgagctacccaccaacctaactggcacgtgcatgtacgcaaacgagttttcagataagtaaaatgcgttttttttttaattcggaagcgtcgctctcaaaattgctggagcatttagccattagttgatcgagaacttgctcgttcagatactgtaaaacatcctanctggggtgtctgccgcgtaagcgcgtatcactatcagccatgcaaatgtaaaaacttgcaa

SEQ ID NO: 66141 - DNA, 410 bp, Oryza sativa
  unsure (1)..(410): unsure at all n locations
agctnttctccgtgactgtgaacttatttttgttgcttgtgggcgttccagccccacctaaattggaactccccaggtacccagtccatagacactagcaagctaattcaaataactggcaaggggcagcaagtacgcttggtcttagacatggctggcagctgggactgggaagaataagatgccacactgggctgccttggtcttagattaactggtcaggcttagaagttgggtgggtcatcaaacttctaccttatgtttaccacctaatttgggctagagttgcattgttctgttgattacctgcgtaatggatagtcaggaaatgggagtgatctcaattgggacctgngaaagacttaaagcatatcatgcggacaggcaatgaatgattgggcgatagggcg

SEQ ID NO: 66142 - DNA, 407 bp, Oryza sativa
  unsure (1)..(407): unsure at all n locations
cactgtgacactactcaagcttgacaagtaaagtttatcagcatgaagaagaatttataattttgtctacagatttcctgtccaaaactccaaattgaaccattttagttaaaatttattntactagaacctaatataatttgatatatattctcaaaatgaccgagtcagtaagtatggtttttcatttgctccattttctcatcaacattttcaccactgtctaagaatgtttgttgattcccagtttcccaccttctcatgaggtacagagatagatgctttaaaccatgttctcgcagttaactggataagagctatgtagattatctcatcttccctttttaacacatgaataaaagggcatcatatctacagtgttcttattgttaagacaaataaactaa

SEQ ID NO: 66143 - DNA, 94 bp, Oryza sativa
agctagagctgtcttgaagacagacagttccgttccgcgccgccggcgccgacggaaactcggcatgcaatggacaaagcccaaccaacagccg

SEQ ID NO: 66144 - DNA, 211 bp, Oryza sativa
actaaaactcaactaatccgagactatcagatgggcaaattcctatttgttgaatgccaatgagggacctttttttccattgccacatgacctcagcccttaatttatccttctccggaacagggggccacaacctccgcctgaaccggcacttaatgcctatgattctccttgcggaatggacctattgccaaataccacattttatggc

SEQ ID NO: 66145 - DNA, 349 bp, Oryza sativa
aatggaaccttcaagggctttcttttttcttgagaaaggatgagataattttattgctacagaataatccctccatccaaaaaaaaatcaagctgggaggggttagtccaaattcgttgtcctaggagaggcctctcctaggttgattttttttatggagggagtatatcttatttgtaccatcatgttattaacccctctctttaattcggtcatatgcatgcaagctgttttgtgcttgcaagtcaataaagacggaataaatgtacaaattaaatcttagatgctgattacatgagtcttaaaattaaatttaatacgaagaaatttaacttttaatcatgccatg

SEQ ID NO: 66146 - DNA, 375 bp, Oryza sativa
tgtttcagcggacaacaaccagcctagacagtattgtctgcactacgagatcctatgggaaagagagattgactcagcacaggtgattaaagattcttggtccagttcgagcgagaaatcagacttgggggacataaatcggtctctcgcaaaagtcatggcggctttgcgttcctggagcaaaacaaaagtgaaaaatgtaggtagagaacttgaaaaggcaaggaagaagctgggggacttgattgcttcagatgctgataattcccaaattcgttttgccactaaccaaatgaatgaactgttatacaaagaggaaatgctttggcttcagcggtccagagtgaattggctcaaggaaggagataagaatac

SEQ ID NO: 66147 - DNA, 396 bp, Oryza sativa
  unsure (1)..(396): unsure at all n locations
agcttttgtacttcatgtacgtttgacttaggctncatttgctggatggcattgattttctcgggattcgcctcgatgcctcttttggaaacaaggaaacccaacaacttgcccgcgcggacgccgaaaacgcacttcttcggattcagccttatgcctgttgtacgcaagctgtcgaatgtctcctgtaagtcgatcgcatggtcgaaagcctttcgaatttttacgacgatgtcgacgacgtaagcttccacattccgccccaactacttgccaaggaccttgtagaccagcctggcgaaagttgctccggcgttccttaagccgaaaggcatcctgaggtgacaaaatgtgccgaatggagtgatgaaagatgttttggggatgtcgagcggg

SEQ ID NO: 66148 - DNA, 384 bp, Oryza sativa
  unsure (1)..(384): unsure at all n locations
anacattcgatgaatttaataaaacagtgtagtatttaacaatatcaatccaacgctatacaacataccctgttgtataggcccaaccattctgaacaaccatcccggctgcacagttctatctccaaaccaggaatataccattccaaaccaggagctaatcaaattattaccagttatagcatcttctattatggtgagaagtgtgagactaatcacgaaagacattgttagacccgcccataaccgcgggcacggctattcgaatagttttactctgatcagaggtgtaccactgtacccacaagacacaaccccacatcatgtcaccatgtgcctcaataccaccacggtacctcggaaaggagttgtgacattacctct

SEQ ID NO: 66149 - DNA, 407 bp, Oryza sativa
agcttgtcatgtttggcagggtcatgcttatatttcagtgcaggtgggcatgctttgctgaataaggattgcgaacttgggcgaggaggctttggcacagtctacaaggcagttttaagagatggccagcctgtggccatcaagaagctgacagtgtcaagcttggtcaagtcagaggacgagttcaaacggcaggttaagcttcttggaaaggtgcggcaccataatgttgttaccctcagaggcttctactggacttcatcactgcagctcctcatctatgactttgtgcctggcggtaacttatatcagcacctgcatgagtcctcagcagagagatcggtttcatggatggaaaggtttgacataataatcggcgtagcccgagcccttgcgcacttgcaccg

SEQ ID NO: 66150 - DNA, 379 bp, Oryza sativa
tctggaatgttccgggcgcggatccgttttttttgttgctcgctcgcggctggaggtagcggcgcgctggtggtatcggcttttggtctaatgctttgcttcggtttggagtttggaggtgggggttttattgatgcttttggttgggtggatttgttgctgcagtttgagcggggggagcaactctgaggtttggttttcctgagatggaggacctgctgggcgcggaggtcggcaagaacgactatgactggtgatcatcgatttcgttttcttcagtttctttcttttttttttgtttgtttcaccttcgctgattttgattaatctccttttgttgtcggtgtggtgatcttcgtaatgtatttggtacagcaca

SEQ ID NO: 66151 - DNA, 402 bp, Oryza sativa
  unsure (1)..(402): unsure at all n locations
agcgacctgaggcatgcaagcttccgctaagagccccttttctgttaaatcataacngctcagnagctccaactattcttatgctaagtaaatgtcgactatgatagacacgcgacgcagatcgatatggaaagaatttgatccatgcagttgtcggagccaaggtttgaactcaagggngaagttttatgtcaaatcataagtgttgtgaagatagtgatgactntgttgaccacatacggaatagatggaaactcgtacggcagatgctaatctagctattggaaccgtgggtagattcgggcaagaattttggtcgatctgacaatttcttggctcctctcaagacttcctagcttatctcagcttatacggctcttctctttccactttctattctaa

SEQ ID NO: 66152 - DNA, 354 bp, Oryza sativa
  unsure (1)..(354): unsure at all n locations
acccaagctggaaggagccagagatgaagncaccaatgccgcttctttactcgnccaggcaangnncnncaanaacaacgaaccgagnncactcgacgctatcgagaacnncgacaagccgagagccgccctagatacatattttaagaacatcaaagaagctgggagtatgggagcaggcctagcgctggcgatgaccatgtacttgtaccccaagattgatattgatgctgttgacggctctgctgacgggacaagtgacgaggccgcccttgaccttattagtgatgcgcaaaaggccactgacaagatagccgctgatgtggacgagagattctacgactcacaacttaa

SEQ ID NO: 66153 - DNA, 402 bp, Oryza sativa
  unsure (1)..(402): unsure at all n locations
agcttaagcctgaattcctttattctttccggatctggatcctgcagaacaaacatataggatgagtagtatctgatataaatataatactcgagaaaaaatcaagtattttaaaatatttataaatatgtatttctcctcttgtcaattttgatttccccgagcagatgactcattacgtttaaacactctgcccgactagtcatagccaccaagcactgggagtcggcctaagcacttcccaaacatgcatatgagtgacatgagttcgtcattaatggaacaaagtttcacggatcggagtttactactcgggtacttttgcaattattaagagcaganaataaattatcttatctctatgcttttgatttattccgaataatacttagcaccttgcgt

SEQ ID NO: 66154 - DNA, 371 bp, Oryza sativa
  unsure (1)..(371): unsure at all n locations
tctctttgctaagaagaaaattttgatggtctttagcnccncctctgcttttttgaatttattttatatttttgtaagacgtggaactgtatcaaattgtcatctgtgtactctggttgatgcctgtccagaggttaaatgcacagatagcaggtgattcgggctgtcgaatccctgggcgcgacatccacggacatctacagaaaaagttacatgcgattctccccactttgtcgggttcggcgaaattagaacctccaaattccgcttgcaagattgtgtttttgaggccagaagcttttcggtagagctttgaaaaattctacaagtcacatattttgtccatttgaatttattttttctatagttgg

SEQ ID NO: 66155 - DNA, 397 bp, Oryza sativa
  unsure (1)..(397): unsure at all n locations
agcttgagggtcggcttattatatcgattgtggaagaagatggacgacctagtgctccggcagaagccgccaagaactatgtacgtcacagcggttgggttgtgcgggataacgtgcctgtcagtacggtgtactggcgaagaacaagggcacgcggagatcatgagagctttgtcccagattcggagaaagagattctgtggaccacaatgctcgagacattcacccttcccgcgggtacagaggacaaagtgaaaaggtggactctgaagaaaatagcagaacagattcagagcttcaagggagagctgtacaagaaatatatcctgaaggggcagacaccgaacttcgacacattcccaaagctaagggatcactgggacangttcgttgcata

SEQ ID NO: 66156 - DNA, 373 bp, Oryza sativa
  unsure (1)..(373): unsure at all n locations
tcctagaagattcacccaaaatctccatagactgcgaccaacagncaagctcacaaatgtgagttctttcaagaatgctctgcaggatagcatcttcgataattaaagccaacagaactcattaaggcatagccaacctgccttgcagctcacgagagtacatgcatcttcacttaaagagagtttagattgctactctcctccagttaactaatgccttgttcttcccaagttctaattcgcgggatctctgatcacatagactgggttaccgcttgatgaggatgtaaagtcccgatcttccgataggtattgataagcagtcgatttgagcagagtcgtgacacaactcaatccgacttctaaatgaaca

SEQ ID NO: 66157 - DNA, 89 bp, Oryza sativa
  unsure (1)..(89): unsure at all n locations
gcacgcgacancggccaaaggaggcgaggaggaccccgaaccagcgaccgccgtacacgaacagaaaccaacccaagacacgcccccaa

SEQ ID NO: 66158 - DNA, 352 bp, Oryza sativa
  unsure (1)..(352): unsure at all n locations
tgagctgctgcaggccctaccctcacaaaagtttttgtnctanattctgcacacggagangagcgccaccggtatagagatgatcggagcgaggatcaatgacacggacttcttgcaaggagatggcattctctggatcaatttcaagggaatctacgaactacaccagctggatgccctcgacgtctctattatgagttgctggggtttgtaagaatatcgttcaagtagaattcctactaaggctcccttaaataaataaggcccttggctattaagtgaccttatattaattatacctccctttaatcggtgggaaaggagaattaaaaggccccaacgcgggggggtt

SEQ ID NO: 66159 - DNA, 388 bp, Oryza sativa
actcagcttgctgacgaacgtaatttgagtaacaaattttttatcgggatatgtagggtgtcctattgcaaaccgacagtggtccacaacattaaagatttcaaggttaccaaattaagttttcctaggccctgccctggaggaactaattgatgttcgtaacgaaccgccattgcttgaactatagaggaagtatagaggaggtaagagatagagaaatcagaaatgcaagttttatgatcacctgttgtgaagaggagaaattgtcatgaagaacaccgaaatcctggcaggatcaacattctgttccagccaagtcgaccaagtcttgaacacacggccatatgtctcgatccttggcacctcgtcgtgatctgaccaagaaatt

SEQ ID NO: 66160 - DNA, 216 bp, Oryza sativa
  unsure (1)..(216): unsure at all n locations
ggacacnaagaaactcaagctngaccttcaaagttaccccggcaaggaccatctccggtcaagtcggcaccttcgaccaaggactggcccaagaaccaagtccagcggccgggaagcctccaagggcctccgccggaggcccaaccacaaccaggttggcaaggcgcaacgaaagccggggcaaaaggcaaaaggcgaaaacaaaggaaagaggca

SEQ ID NO: 66161 - DNA, 377 bp, Oryza sativa
  unsure (1)..(377): unsure at all n locations
ttaagttgctgatgccctcaggnatatcttctttatgggaagagaacaactcaacacacggatgtgttgaagctccttaaaccagctgccaagtacagaagcaaactcacctttgataaaagctttactgcacaaaagggtgcgcagtttcttatacctgcatagtcccattaaatcatggcatccaatatatctttttgtgaaaattgatagatggcgaacattggaagggattgttcgaaggtcatttgcattccttatgatgaagcattcatcttgcgaaactagctgtgccatatcatgcatcaagtcatgtatcacatatttgccgtgcgtcactttctgaaagaaggatcggcttataagctcttcaaata

SEQ ID NO: 66162 - DNA, 323 bp, Oryza sativa
  unsure (1)..(323): unsure at all n locations
ggtagaggggacacacgggaggaaaccggagaggaacaggagcaaggggaaaggggaaaggggagaacaacaaccgacggnccccacccccaaaccgcacgcacagcccagaggacacgggacacgaaaccgcgagggcccacagcatgagcaacgacgaggaacaaggagcaaaacctggcacaccgcggcgggagaaacaaccaaaggggccgaggaggaggggaacccaccagcaggcccggcgaggccgaaagacaccacacagcaccgcgaaaggccgaacaccaagagagaacaaacgccacacgaaagaaaaaaca

SEQ ID NO: 66163 - DNA, 384 bp, Oryza sativa
aggacacttaatactcagcttggcctattccttcggaatcaatttaatttgtactgctcaaaatataacatgcatgcgtattactgcgggaatcataagcgataaatataatgattgctcagtacaatggcgaaaataaataatgtgctttcttgaaagagacaatgtgcttgtccggcaatgaaagcagtattctacgtgttttaatagggaggctttgttgcatacgtggatggctaggattcgtaaatgtggtaaaacaaagtcagatagcaaaaaaattgctcgtaaaaggatgagtaacatgatctacggttaaagaagattgaggtcttttttaatttttttaaaaaaggaaattgaacattaagctgaccattttac

SEQ ID NO: 66164 - DNA, 370 bp, Oryza sativa
  unsure (1)..(370): unsure at all n locations
tgatattagctcaaatccggatgcatcttgatttggcanaccnannnnnactgggaatcttggcagnatttaattaaatccagactaaaccactggtattaataatgttttccattatttgcaagacaatcttaagtaacatgctcttttttcctaaagtccattgatctcagaagtttagagatatttggacacttattttatgagatgtgtggatatttatgaagattattcagattaagctatgttcacacataggggagcaataaccatgtaaaagctccaaaaataatctcttactgcatagtcgacgatgaagttagattttaaagcgtgttatgattaatcatatttcccaaaactaagagta

SEQ ID NO: 66165 - DNA, 375 bp, Oryza sativa
tgattgttctggaggagatcttagatatctcagaatgggaccagataaaaccaatgttattccccctgttggaaaagacaagcctaatcattgtgactacaagaaaagaaaatattgccaatcattgctcatggaaaaatggaactgtgcacaaccttctagttcttaaacctaatgatgcactgtgcctcttgagtgaaaaggtaatataggcgtgctccatttttcttggtttgatattctttattcatttgagtaatccaatcaagatgatatttgtgcagacagaaatagcatacacatgatgcatatacaatttaatctggtctcacaacaatagcgggttgggtaaaaaaacaaccatagcgatgcact

SEQ ID NO: 66166 - DNA, 186 bp, Oryza sativa
  unsure (1)..(186): unsure at all n locations
agctngacattngcatgtgagaaaaatttgttctttattatctaaaaccgccgagagacgaagacagcaaggaaaanntactcgnaagccgaaaagcaaatggtttggactttattatctatagtatggcacaatttctttgtgtgcgcaaatacaataaccagcagtggaagagtgtacttgact

SEQ ID NO: 66167 - DNA, 91 bp, Oryza sativa
  unsure (1)..(91): unsure at all n locations
aaacacacggaacggagacgccgggggccgaacgaaccacccacaacaangagggggggggcaaagccacgcggagacgcgaaaaacagag

SEQ ID NO: 66168 - DNA, 332 bp, Oryza sativa
  unsure (1)..(332): unsure at all n locations
cgagcgcgagatgctacacagggcggcgaacccacaccggacgcgggaagaaccaacgaagccgacaaacaccangaacacaagcgggcaaccaacaccgaaagacacgcctaaacccacatcgctccaccagagacgaccataacgcgaaaccgagatacacttgccagcagcactgcccacaagaaactaagcacaagagacgctgccgaactcaagacccaaggcgagcgaagccagcaggaaaagccgcaacaggcgaaacgctcaaccaagtacggagctcattgcacacaggcgcatcatagtaccaaagacaggccaaggccacc

SEQ ID NO: 66169 - DNA, 84 bp, Oryza sativa
aaaaggagaaagggaaaaaaaaaaggaaaaaggaaaaggaaaaaaggggaaagagggaaaaaaggagaagggaaaaagaaagga

SEQ ID NO: 66170 - DNA, 402 bp, Oryza sativa
  unsure (1)..(402): unsure at all n locations
cctgangcatgcaagcttgnggctggaagtaaaacatcgattttccatttttttatagagnccgancctcaactatttctcgcgatatcttcttacgacgctctgttagggcatctataacagcctctggtttaagtgggcaacccggctagttgacgtccacaggaattaacttatcaactccccgaacagtactataggaatccgcactgaacattccaccagtaatagtacaagctcccatagcaatgacgtattatggttcaggcattcgctcatataatctcactaaagagggagccatctttattgttactgtaccggctgtaaaattatgaccgcttgtctangacttgatctcggtaccaatccataacgatcaaagtctaatcgtgagcctat

SEQ ID NO: 66171 - DNA, 273 bp, Oryza sativa
tatttacgatgcacctagtcacggttaaagcttttttttgttcggaccaaaaaaagagcagcggcttttgtaacatcagctgccatcaaggctctgcggcattatgttaataaaaaagggctcaatggtatgctaacgaattggtcgattactaaaactagactttctcaattttgagaccttagagcacaacaaaagatggaaaaattccaccactctcccaaaagagatgtggccatccctgagaaaaaaatatctaccttgcaaagatat

SEQ ID NO: 66172 - DNA, 403 bp, Oryza sativa
  unsure (1)..(403): unsure at all n locations
agcttgacatgagggnctgggtagtttgtgggtggnggcatccagtcctccatgatggatccatggtcgctactgctggccatgcgacagagcaatcaagtttaactgaaacgagtatcaggtaatacagcattagttagtcctgattaaacatggaatatctcatagcataattgataagagaaaaaaactgttatctctacacaaaacacgaagaaaagcttatcagaatcacagaagcacaagaagttagcaagagaccagaccacaaagccatcaatcctacatgaccagtaaccagacaaacatcagaagttcagaaccaagatcagagtaggtttgaacacaataatgaagaataccaaggtgaggagctcaagaaatgaatgcaaaacgttggaag

SEQ ID NO: 66173 - DNA, 345 bp, Oryza sativa
  unsure (1)..(345): unsure at all n locations
gaagccgacaacggacgacnngacaactctcatcggctaatctcaggacttcgaagccgatgctgactctaagccgatgactactccgggcttaccaaatttcactgttaacagggtcgggctcccccgaccccctctctaggtcaccacgtacggtgggttaggtgtctgcctccaggtgcccacctacccgcatttatggcatcccaagcggtcgcgccacgccgcatttaatgcggtatgcagtgcactcaaccggtctgtgaccgatcgaatgaatgatgggacccaagatgtcaggcgcaccatcgcgtgtgtcaagcgacgtgcagcccgacatatccc

SEQ ID NO: 66174 - DNA, 395 bp, Oryza sativa
  unsure (1)..(395): unsure at all n locations
agcttcataaaactggatttgtttgtgttgcgggccgngaccaacagncnataacctacagcgnnncttcttgttgcaagaaaaagttcttttcatataaactgtgatcctaagatctgaaatcttgccaacataaccacttatttactgtcttttggttcatgttctttcttcttaactgtcttttagtactgaaacttttatgactttgctgtggtttgctgatattgatttttctgctgccttgggggtgatcagtgctgcttccctgccaacctcgcggcgcatgtgtgcgcgaggtcctaccagcactcggaggccgggacggcgatcttatgggacgaagcgctttatttccgcccgaggctggttcagcacaagtgctacaacctctt

SEQ ID NO: 66175 - DNA, 377 bp, Oryza sativa
  unsure (1)..(377): unsure at all n locations
agctcgctcttttcctgtccatttctatttgtaagaactatgaaaatnaatttgtgttatgaggggattactagaggtttacaatgtcttttttgacctttcattctaaggaacgtactactgcaactgcatcaacaatccctctttaatatagtctatgtttagcccttnttattcaacctattcatacgcagtttgggccgggttcccgcagcaaaccgatcaaacccagggatacccccggtttagacggtttaatttggtttcagccgtttaaggggtttgaacgcgcgcgcgagggtttcttccagcgatagttaaaatcggccatcatgcccatcaatcaacatcacactatcgagcccttatttcattat

SEQ ID NO: 66176 - DNA, 382 bp, Oryza sativa
  unsure (1)..(382): unsure at all n locations
tctggtcatcattagcatgcattatggcatcngtttttttttcactctgagaaaaatggaaaaaaaatatcattttcagaaacaaaagccgagacaaattatttgtgttagggataagaaataattgcttacatgaatccctgagcatcaaaaagactcttcaaaatgtgagattcttcattcatgccgagatgagctatggtctattttttttccgcattccatgcctggatgagtttggttcagtctcggaggtcgtctgcacatacctgatcttgccgctagtcatttggaaccttggtattcacatcttcagacaactcgctgaaaatattggatgtttcagtcaaacatctactgaaattattggatgatcagtcta

SEQ ID NO: 66177 - DNA, 369 bp, Oryza sativa
  unsure (1)..(369): unsure at all n locations
agcttaagcgtagaatttacattatgttcaatgnnccaagagttgtcgacgatagtaccgtcttcgcgcttgagtcgataggaacctggccgggtgacttcagagatgataaatggcccctcccatagaggagataacttgtgccgatccgtgtagtttgaattttcctcaaaaccaggtcaccgactaaaaaggcacgggatcgaacattgcgattatgataacgccgcaacccttgtaagtatcgagccgaccgaattaaagctgcttcgcggacttcctccaatcggtgcaagtcatcctctcggtcctcttcgtagcgttcttcgcggaaattacgaaagcgcaaagactcgaattcaacttcac

SEQ ID NO: 66178 - DNA, 308 bp, Oryza sativa
agcaacttgtaggcgaaaatgcgcatccttgtgaaatatcacctatgttgcaagcgtgcctattgttgtggccttgacatccatcagaaggtgctcaactcctataagtaggatgaacatacatcagtcaaaaatcctttctgaaggaaaaagacttcaccacaaaaagattctttcttcttggtgaggaaaacctcactagcatcaaaaacttaatatatttattgctcaaacgagctaactattatctgtaactcgcaaaatacacatagcatccctttttcctagttaaaacagatgaaacagac

SEQ ID NO: 66179 - DNA, 396 bp, Oryza sativa
  unsure (1)..(396): unsure at all n locations
agcttgtttgttccggtttntttgcttccagagatccggaaaacatcgtagtttcggcttgtttcctggtgaaataatctggtagtatatgaatcaagttggcaacacttctctaaaaagaaaatcaagctggcaaccattctctcgtgtgttgagatatgattagttattagttgtcacgcgttgaatgccttgtttctgttcaagtatttgcacgttagtcatgttctagagtcagaattttgcaacgaggattggtatggtaggtacaactacttttatatttcccagtaggatatggctaagatcggagctgtctttcggtactatatagatgcctccacgcctgttcattgcacaacatcaatggttgggtntctgatgagagtggatcgt

SEQ ID NO: 66180 - DNA, 397 bp, Oryza sativa
  unsure (1)..(397): unsure at all n locations
ttactgaccttttatnatattttctaacnnnaatcaaattaatccaaaaacttgtgctattaaatggataaatgtcttaactccctcctttcacttgtctttagatgccgcgctacaagcctgagtacttgtttggtgttgagggatttgtccaggagttgcgtacgatgtcctttgccataggatttgggactgcccctttttatgcccagattcctcatgatcatcacgaaaagaagtgccgagtcaaagtcaccttgaacagtaatagtgaggatatcccctcagtgatgttcgaagctggaggaagaaactgcatccatgcatgtcaggaggcggcaaggatcgccataagagagctttgcgatcgctacagtgatcagttggccgacactgg

SEQ ID NO: 66181 - DNA, 331 bp, Oryza sativa
  unsure (1)..(331): unsure at all n locations
gcccgaaaaanngagcgcatagcattactcgaagaaggccccgccgcgccaaannnggagcaaaagaaactagccgagctcccgaaggttattgaagaacagaagtcaaggctaaaatcggctatcagaaatgttcccgatatgacttagtccttaaaaatcatccctggaaccgatgcacaagatgcccaagcaatcgaagaagtagaacaaatcagacaacgtgttgtattggctatccagcaatatttatctcagtgactttctatgtaataggatttaagaaaattttttgcaatcggctaagaaattctgatacttcatttgtcgc

SEQ ID NO: 66182 - DNA, 97 bp, Oryza sativa
  unsure (1)..(97): unsure at all n locations
agctcatatatctggccccgcgaccnattgtttatataagccacggggcggntggggtttttaagcaatggattaaatacaatatcatggctttacg

SEQ ID NO: 66183 - DNA, 324 bp, Oryza sativa
aaactttatataggagtactacgatttgctagtgcacttgtgcacacacaatacagagatgaaacagcgctaggcacccaactgcttttgtgtgctcaacaataacaaatgccaccccatgctatctataatctactcagcaatgaattaacgatacacagcactttggtttgactactgattgggggaaacttaagttggactcaagagcaactagcatattcgtttctagttgtgtaactgtggccacctcaataaaccattcctcaaggaatagaagttccaattgaacttagctcatctacaagtactggaaaatttctt

SEQ ID NO: 66184 - DNA, 397 bp, Oryza sativa
  unsure (1)..(397): unsure at all n locations
agcttngcagatgacatggactttcattatatggactctcacgattgtcaaccatccagcgacaagaaatagatacaacactaaaaaaagtgaaatgaaagcgaaagcacacagatggatcctactggctntgcatatgactgctacagtttgactttagctcaaccaaaagaagcctacataattaatcacaaactaatccttgtgaaaaaggaagtacacagatagtacagtagtattttctacatagacgtgctcaaatatggattgtatcttatgaaaacataggtagatgtaggatcgaatcacagaaactaagccaaccagaggggggtgaatggttggtatacctcaaaaaccgaaacttttagcagatataaaagttaccttcgaaatc

SEQ ID NO: 66185 - DNA, 377 bp, Oryza sativa
  unsure (1)..(377): unsure at all n locations
ttccatctcttcaactgatttgcanagttgttttctggaccaactagagaatacgacattttccaaatggtttctagcgataaaaccaatgcccacatgtcttgtatttggaacaaagccggcatccacattaagttttatccatccagggaaaggtgttgtccatggcattctcttttggttcaagttctgaatgtccgggaatactttatgttgttccatggatgatccctcattgtgaacacctattatttttttaatgagaatgctacagaatagtattatggttatatgggatgataatacctgatacctggatacatataatatatacctattaagcaattcctcatatggatcattcttgtcgaacaggg

SEQ ID NO: 66186 - DNA, 304 bp, Oryza sativa
  unsure (1)..(304): unsure at all n locations
gcgaccttaagncaccgcaggctgcagcttactataaataaaattttcactttttccancgaaaagnccaagggncatggtgcttcgattgatcacaaaaccttcataaatatatttggggaaaatggcccccaactaccccttctgaatggtcggccaaaaacccatgccttttgcctccggcacttcactggatggttctttgggttggccccaacatctcggtctcttcccatgcttgctttcaaaagatgagaacatatctcattatagaattaaaatatttggagaaaaaatgtactta

SEQ ID NO: 66187 - DNA, 290 bp, Oryza sativa
  unsure (1)..(290): unsure at all n locations
ngtcttattattcttatgttgaaccacattaatggtatgtttcgggaacnnaaaannctaacaagctgctggttggtagccaactttcgagaatctagaaaaagcttttcagcttctggttttagcttattttttagattcttataccacagcttgtcagaactattccaaaagctagattatttagggagcttctgattttagagagattgcagtagccggaagcttccttacagaccttaaacacagccgtggccccataatgggctcacctgagccatcttactttt

SEQ ID NO: 66188 - DNA, 406 bp, Oryza sativa
  unsure (1)..(406): unsure at all n locations
agcttcacatgtgtcccatctatttgctttatacagncgnngaagtatggccaaaaatctgggttttctaagttagggtgcaactcagaaaattcagggtcccttggtctaattatgttaggtgctaacctaaggagacaacgcaaaactttgttaaatgtccggctaattgtctccaaagatctaaccaaacggtcatcagcctgtctaattgactgtggtgcaccaacaatccacaaaaaaatggctagagcttctacagatgacatttttgttgtggactgcaacccataagactcaaccaaaatattgtgcagcctattaaacagttgcctctcaaccctaaacatgttatagcatgaattttctcgggttaaagtcctctggacccattggatacctgatt

SEQ ID NO: 66189 - DNA, 405 bp, Oryza sativa
  unsure (1)..(405): unsure at all n locations
agctttgcctggacgtataggtttatttatgtttataacggnaatgccatgaaaattacttattccatttagcttgcaccaagtaaaaaaaaagatagaacaatatattttgtgggtctcaacagggtagcttctttgtgctagcaactactgctttcttctaatcctttgttctgcagatgaatgcacggtttcttttgacatagttcttccatagaccatatatgttgtacaatgaaggctgccaaaccatgtggtggatttaaacaatccatatatgctgtacaatttattntaacaatgcagtattttgaaactatcctaactttgtttcttaatatgcatggtagcattatttttaatttgagtatcattacaatgtattggatgccttacagatgtatc

SEQ ID NO: 66190 - DNA, 123 bp, Oryza sativa
  unsure (1)..(123): unsure at all n locations
agcttctgaaaagacgncctttangaatgacgggnngnacccgngcaacgcgatcatccgagcaaggtctcctctggccgcctcttcagggccagcaggcggaagcggtggggggtgtctgta

SEQ ID NO: 66191 - DNA, 84 bp, Oryza sativa
  unsure (1)..(84): unsure at all n locations
tgagagctctccaaatgnngcatccattgaactagttgccaacacatgggnccaacctcccaaccgttgcattcaattgactga

SEQ ID NO: 66192 - DNA, 399 bp, Oryza sativa
  unsure (1)..(399): unsure at all n locations
agcttcgattgagngggtaagttacactcatttattnctagttggtcttatactatcgtataaatatgtgacaacataaagctataaaatctccgtaaagtgatggtaatttttaatattatatgtaccactggtataatttttaacgaaggtacatattgtttgtataaatttggttattaataagcctacaacctccattaattaattaagatttttacgataggttagaaagtgccaaaactttatataaaaaaaatcaggtgcctataatagtccctttaggggttagaaaaaagttcaaatgcccctctaaactttgcacggaagtctaccacaaactntaaaactgaatatccagccccttgaactntaaaataccgntcatgttatatacta

SEQ ID NO: 66193 - DNA, 401 bp, Oryza sativa
  unsure (1)..(401): unsure at all n locations
cattgacacttaaaactaagctgaacatatatgcagcacaaaagtanattttattgcntaagncatgngatacgccatcaagcaaactactcatttatgtaccagaacaactggatactttgtgcataatcatcaaaacaggactcagcaacaagataattaatatggcagtaataaaagtaaaagtattgagacaactaaggaggttctaataggcagcaagtttcaaacaataggacatgcagaaccaaacggatgtgatctcaaggatcgggaagagatgttagctagaactccaggtaaaactatatttgtttgaattactaccagatatatggcccaaaactaccagatatatggcccaaaatttgaaattacatcaagggagaaatgcatatggg

SEQ ID NO: 66194 - DNA, 439 bp, Oryza sativa
  unsure (1)..(439): unsure at all n locations
agctntgcctggacattgaatcaaccaatcatgtactttttaactgtcctctagctaagtttgtttgggttctcataactgaagtaattgaaggggggcttgctccttctaccatttgggatggggtaaagtttcttaaagaaaaactagggaggaatgtgggtcttttcgtttgtgcaagttgctgttgggggctctggcttgtaaggaatgattttgtgtttgaaaacaaattgatcaagtcccccttgcaggcaatgttcaggatcatttcgctgatgcagagatggatgttgctgttaaaagaaaaagatcgaaaggctctgtcttccttgcttgacaagatgaagcgcatattggaggatctgcgacctaaggatgtgttgcctgtcgatgcactattctaagaagggtctctataaggtccttatggttgctg

SEQ ID NO: 66195 - DNA, 508 bp, Oryza sativa
  unsure (1)..(508): unsure at all n locations
tacggacacttagatactcaagctaacatgcaagtgtaccacatcatcatccactagcaattattatctagagtattttaaatcatatgcaagtataccacatcatcacccactaacaattattatctatagtattntaaatatcatgcaaacatgacatatcatttacaattttattgtatttttagaactcaatatgcaagcaatgtcaaatcattatctctacattgttttcacattatttaaagatatatgtctaccatttccatgatgtataacatgcattaatccacatatcccacagcaaagagcggngtatcaactatagtaaaattaatgctaaaggcttgcttggaaggcttgttcttggcccaaaatggcgattaaatatgagcctaaaagtttttccatcttaaattcagaaacattgcttggatgtgccatgtaaccactaaatttagatngatcttangcccattcaacaaanataaagtgtggcctatgcgtc

SEQ ID NO: 66196 - DNA, 409 bp, Oryza sativa
agcttccaagctgctccacttgtcgtaagcgccgcctccacagcatccactaagcttaagcaccgtcattagagcagtacaatagcttaaacatattttaaagagataaatgaagagagaagagcagcggactatagatctgtagccagctgcaacacggacttaaagacgtaatgtctgtatgatatgtggaaccagatattaatagtgtagtagaaagcagctatgatagaaatcggctcttatattagctatagatgatttgtagctagtagttggctatactattaaacttgctcgtagcatagcctaatcaccgtctccttcatctctaatcacgcacatgcaactcactagctctgaacatgacaatagcagactataaacgagcctgaatcatattttaaaa

SEQ ID NO: 66197 - DNA, 499 bp, Oryza sativa
  unsure (1)..(499): unsure at all n locations
tcttcttgaacacccacttgcaccccacaggtttacacccatatggtcgctctgtcacctcccaagtcccgttagcgataatggaatccatttcactacggacagcctccttccagtagtctgcatcaggagatgcatatgcttctgaaattgacttangagtgtcatccacgaggtacacagtgaaatcatcaccaaaagacttagccgtcctttgtctcttactccttcgaggagcttcactgacatcctcctcagagacaagttcatgtgtatgttcagtttgttctggtggtgtgattgaactgggaattatttcagagggttggttcgaaccactatgtgtatcctttattgggaaaaagctctcaaagaaggtagcatcacgagactccataattgtaccaacatgcatgtccggtacctcggatntaactattaaaaatctataggcaatgctatgatgagcatatcccagaaaaacacagtccacagtctt

SEQ ID NO: 66198 - DNA, 433 bp, Oryza sativa
  unsure (1)..(433): unsure at all n locations
agcttcgctgttagatgcgactttaatcttgcctctatagactatcttcgaacatatcacttggttcataactgggaatagttcccatgaacagacaactcggattcactttctttacattcaagttacttcctgctattctcttcatgttgtcattatttagcattcacagtattccttcacacattcaaccctgatgtattcttttcagatttctcgtatcaatcacctttcgacctacttctttgcccgacaataaacacctttgctggtatcttctatcagtcacctttggaactttgtcaaccaagtactcttcactccgagagttgtggatgcttctggtgacgatgtggtcctttggtctgctgcctttcagngaaaccttgaagtgttttcggcaaaagctatactgactgttattgtctttgat

SEQ ID NO: 66199 - DNA, 466 bp, Oryza sativa
tcgagtgcacacgttgtaacgcaagatactcttgcctctctatgtgtactatgaattcgacgaccagactttacattatgttcaatcttttttctgaaattctcagtaatatctattaactgatgagcatggctttgtagaagtgaaaacttacgtgtgtaagatacgtttccttcttagctcttaatatattctcaataatccataattacacttatttcctgacggagatagtaagttacttatgtattatccaattcaactatgacttaaataaatatgaacgaaagattcactccctaacatactatgaattataatatcacgctgatgcagacatactactttatcgatttggatgggtgacagacaccaaaataatctggatcactatttgtctatgatcatatatgcacagaatatcataaatatatattgtaagattaatgtatacatatgatctcta

SEQ ID NO: 66200 - DNA, 376 bp, Oryza sativa
  unsure (1)..(376): unsure at all n locations
agcttggctgagcggacaaggaagtgggatgatgagaggaggcatgagcgccgggaaggcaagtccccggcggttccttccggccgtcggcgaagtgaggccaagcaaaaggcccccgccgaggacatcgatgatggcgataatgacctangtttccaagagcctgtggctaccatagccactgtcgatggaggagcgtgtgcgcacgtttctcgccggagcctcaaggccatgaagcgagagcttctggccgctgcccctactcatgaggcgacgcgccgggcgcggtggtcggaagttgccctcacttttgaccagtccgaccacccgccgtgcgttgcccggngagggcagattgcgatggtggtttctccca

SEQ ID NO: 66201 - DNA, 477 bp, Oryza sativa
  unsure (1)..(477): unsure at all n locations
acaaacagaatggttcagcatcgagcatcttcattngaggcgatttcatatacaaaanaaaaaaaagagaggaaaattgccaaattaaggtatggtcttaaagataagatacactctccagcctcttttgtataatctatattttagccagaatagatatattctgcttgttgcatgttacccagacatcagattttgaacgagaacaaatatcaaatatttttttatgcatacgaaaaagccctttttcctacaactgaaaaagacactgaaaaccagcagagcaccattatttgcctggatggctggatccagtctcccaaactctgagctggcaaattaatcgatgcagagagtagagtagaattatattaacaccacttgacatcatgcagggaggaanaaaaaactttctatctcttaatatcataggcatccaatgaaaaatttttggacaacgttctatctcatgatagt

SEQ ID NO: 66202 - DNA, 127 bp, Oryza sativa
ttgatattttatgctgaccatgtggtcttacctatagatcataaactaactcctccatcctatctgacatgatacaatactgagtttgtaacaactttttgggcattcatttcagtgaaacttttac

SEQ ID NO: 66203 - DNA, 436 bp, Oryza sativa
  unsure (1)..(436): unsure at all n locations
agcttgtttgacaaatgccccaatgtattcatccggatcaggggcttaattnttcagatggcatggagaagatagtctcctttaattcaccttgtgctgtatcctcctggtcttatagtagagctatacatttggtagggttatcgccgaccagttcaggcaccgagatcgtcggaacccctaggagttgtgtgacaaaacgatgaagttctttcttgtcttgagtggatacatcccttgatgggggttgcaacatctatgtataaatctttctctcctctggcatctgcttttaagtgaaagaacagtcaattgacatcaccttctttggtccaagttagccttgccttatgtctaatcttaatcttgtttagagtagatacaacaccaccactatttgtcttagatatgttctaagctccttttcagcattagt

SEQ ID NO: 66204 - DNA, 430 bp, Oryza sativa
  unsure (1)..(430): unsure at all n locations
agcttgaagcactcggattactatctatgagaaggctatgatggtcgactgcaaaggactcggnggctactgtggagattatgggtatcccatatctacacggcgacggtatttggattgcgtaccggatacttaatgtagatagaatatcttatctgtatctcgggtttgtttcttaactggtgtatcaaggaaacaccctgagatttagtcggttacgactgtattatacctgtatcttcatattccgttaggaatatagattatcttttgtaatccggactccttcccatatataaggggggtccgggcgcctctaggggcatatgctgattntttcccgaatcacacaatcaataatacactcggcggattcatccncggacaggagtagggtattacttcttctataagaaggcctgaacctgta

SEQ ID NO: 66205 - DNA, 486 bp, Oryza sativa
  unsure (1)..(486): unsure at all n locations
ctcagcttgacaatttttaatacttctataaaaatccaagtttggttgcatatgtgaaaatttgtgctgcttagaattagaagtttattattgtgacaatntattgccgtctttgacagaagtcatgcattgcataatacctttgaaagtggttgcattaactctagtctttaaagacatatatatatattaagttgtgtagttgctgaaagaaattaaacaaggtttactctagcaaagttactttggctgattntgcatgttaattcagggtacaaggctcaaaataacaaccaattgtctgtatagccctgacagaactttgaatgccactttggggatgatcttaacaactttcttgttcattaacttctatcaggaaacagctctcanaaactgtaaagcattatgctgaccccatattgatacatcaaanagttatcttcctggctccaaattatgaaatcacctncactaatatacaac

SEQ ID NO: 66206 - DNA, 433 bp, Oryza sativa
  unsure (1)..(433): unsure at all n locations
agcttgtggcatatgttgcatgttatggcaacaatgcatgtaggcatcaactgtataaaatataattattttatgtttactcattaccaagaagaaagctgtaaaaagttcctttttaacatatctggagagtataagttgggaggaaaaaaaaatagcactaggcgcaagttctgtcaccttgacatctgttcctcctgttggcatgaattcttcataaatgtaagatccatctcgcctcaccttcctaatgtctggataaaattcactagatcgattgccaacctatgcataaatattttgaagaatacatctggtgagtgaatttggggagttttgaacagatganagtcgactggaagaacatgatatgacaagcagattcagaaatcagaatgcacattaactcattcatttatatcaaagaagttta

SEQ ID NO: 66207 - DNA, 490 bp, Oryza sativa
  unsure (1)..(490): unsure at all n locations
attaggaacatagatactcagcttgaccgagctgtcaanaactcgaggttactcgggctcggtttgagcttgagcctacataggtaagcttgctcgagctcgacccgttgtcagcccaaggtacaagcatacccttacacccaaatccataacatgactttcactgaagcaatgatatgcgcgtatcaatccgacaaacaccaaagacaacacacaaagggcccgtttcgtagagcttttaacttctattaactctaagagttggggtttggagcggagttgtggagcagcctaaacttagttccacatctctaaatcattttgtgagagtgctccacccagctatattcccattatatgtggagttgaaattgttcggctaagctccagctccagaataggtgaagctggagctgaagccgtgccaaactagcccaaaaccacaacgtcgcacaccaactntcgtgagagtgntgagganaatagtact

SEQ ID NO: 66208 - DNA, 436 bp, Oryza sativa
  unsure (1)..(436): unsure at all n locations
agcttgagggaaggcgacacaagggtctctatccacttccatctccatctcctccaaaggcagtctatggtgtggcaccatctttcgcaacatggcacagtcggctagggcatccatcgagtccaatagtgtctaaagttattagtacaaataatctaccttgtcatgacaaggctagcaaagagtctgtgtgtgatgcatgtcagatggccaagagtcatcaactcccttataataaatctactagtgtctcgcaatttcctttggagcttatttcatctgatgtttggggacctgcccccatttctgttggtagaaataaatattatgtgagttttgtggatgattatagcaagtttacctgggtgtatctccttaaagcaaaatcagatgtttntcgggtctttcatgaatatcaagcccttgttgatagaat

SEQ ID NO: 66209 - DNA, 342 bp, Oryza sativa
tattacgacacttaaaactaagcttattttattgctactccctccgttcaaatgttgtttcttgagcatcctatcaaaaaaaatgaagaaattcttcattcagttgggcctaaaatagatcactctcagctctttgttaactatatttacccgatagaatattctgctgctgatggtcccagacatcacatttaacgacaacaaatatcaaaaatttttttatgcatacgaaaaagccctttttctacacctgaacaagacactgaaaaccagctgagcaccattatttgcctggatggctggatccagtctcccaaactctgagctggccaattaatcgat

SEQ ID NO: 66210 - DNA, 385 bp, Oryza sativa
  unsure (1)..(385): unsure at all n locations
agctttacacaaattggcagaatgttcaaaaagtaggttagcagaatcgacatgtatgtgttctgccgtgtaccttaaacatgcggctgagctgctccacgcattccgctacaagttgctgatggcccagaactttgcggcttttcatgatgcgcacaagagatgcatcaattgcgaacctcctgtccttgttgacatcatcgacaacctttttcttctcatcgatttgaggaagtggtacctgcacacaaaaaaaaaattacgtttagttagctcgaaaaaccaggggggaatgggtaaatagttagaaatggcaccttaatccttcgcatcctatcnggtaaattggaattgaactcaaactcgtcctctggagaaatcactc

SEQ ID NO: 66211 - DNA, 488 bp, Oryza sativa
  unsure (1)..(488): unsure at all n locations
ttatcatagtagaaagtaaaatccacagaagcctcatttatgctagaagagttctcatggttaaacagtagaaaggcatactgttccaaaattcaaaaattgacttcaatgtcaccattgacttttgaacattcttttgaccattcgtcttattcaaacaaacttgtgcaaatatgtaaaaatataggtcatgcttaaagtacctttaatgataaaacaaatcacaacaaagtaaatggtaattacttaattatttgaataagatgaatggtcaaacgtatgtttaaaagtcaacagcctgatacatcaaaaactggagggagtagttaacttggcaggatgaaatagttctttcatgctgagatacacaataatcacgaaagcaaagcttatgtatatgttagccaaattgcttcctctgttataatttcaaattacatgaatattgcattcacacatatactatcctanatacagtaacataaata

SEQ ID NO: 66212 - DNA, 308 bp, Oryza sativa
cttttttatgtcgctctgttgaccactgccgacgaaaggggtctcataccaactactatgtttgttccagaccatactgggccaggtattgcaatggtgcaccgctacacctccccggagaatgcacattgtttctcagcctcgatgctaccctgattatctagttacttagtcaggggtgacccattccacgcatgaggtcggacttatcttatgttcggatgaaacttctaggaatttagccttatgtgcgaaagcgggaaaccctccacctctgacgattcccgggccgcgtcttggaaatcatt

SEQ ID NO: 66213 - DNA, 491 bp, Oryza sativa
  unsure (1)..(491): unsure at all n locations
cgctactgattctactgaactaggattagtccaaaaacgtcccttgtcaagttgtcctggcttctagcttgtatcgcgaaataaagctttagttgtgctagtaacagtgtgtaatagtgagactgccgtcgttttacaattgatacctatgctgccaacatttggtagctgcagcgatgggcacacaccatgcatatagtatggatagggatggaaacggtcagaagaatgctcanaccattttcataatcataatttttttcccaaaaactgaatcggaatgattgtgtgaaatgataacgagattaatactactacaacactagaaaatatcataaacaaaattactgaaatagagtctcagagataacgtaccacaagaacaaggaggtcatagtcatatctatactacanagtaacgtcatgtactaagcaattagtgtagagttaaagaagtaaataattaatttaaagtctctataatgatacta

SEQ ID NO: 66214 - DNA, 442 bp, Oryza sativa
  unsure (1)..(442): unsure at all n locations
agctntatatagctgccccgctgactntntaatatagtcatggtgctgtttgggtttttaagcaattgattggatacaatatcgttgctttttgccacgtaagtgtgcatttttattgaccaatattatggcttaggctgattatatattgtggtcatttttcaggcggttggtaaatcctttatgagtttatttactcggattttataccacatatgccatatatttccaggtgtggtggaaccatgtgtcttctagggacttaagcacatctgttaaagcagtgtgcgcatggngtatgcccaatactttggaaatttctttattcacaacatacaagctnttttatagctgttttgctatgtgaattttcaataatgtagccaactttaggttacactcatcatattttacaaagcagtcggtatatcacttcgatcat

SEQ ID NO: 66215 - DNA, 491 bp, Oryza sativa
  unsure (1)..(491): unsure at all n locations
ngctggagcaatagttgaagctggaaaagaagctgcanaatctaacatagagctgcccgataacctgtatgagagtgtgcatagcattccagggtttgaagatacatatcttgctcattatcatgcacatctagttgacaatcctccaactgcaagggtgtttgttacccttgaatttgctcacaaggtcacttgggttgcaagatatattgccaccacttttaatgggtgaactgtgctgtgatggttgtgtgatgctgttggtagttgccctgtgttcaaccttcttttgcatactcagacaatgaactatgagtattgagtgtgatggtagctgttagatggtagtaggcatgcattcaaccttcttttgcatactcagacattaaactatgagtattaagtgtgatggtatttggtagatggtaataggcttgtgttagcctacttttgtccctaaaccagtcacttttatggcttgtatggtgatg

SEQ ID NO: 66216 - DNA, 403 bp, Oryza sativa
agcttcatgaaatggaaacatcaatgacaggatatccaacaatcagcaaatcttgcttccttgcccagggggcctgtcgttccttcctgacaggggtcgcttatctgaatttaggctgaaatcacttactgtttagcaccaaatagctggaggcactaggcagtctaatattccgcagttagtatcgtcctttatttacaagaaaacagtaggagcctctcctactgtgttagtatcgtcgttgtaaaagcagctcatatcctccaaacattcatagatactgacttcaactgtatatcagctcagttcatttcttcatatttatgagattatctgagttgaagatcatattgaaatattctccaaaactattatcttaatttgtataatcttaattatatca

SEQ ID NO: 66217 - DNA, 483 bp, Oryza sativa
  unsure (1)..(483): unsure at all n locations
tattatggaagtaactcagagatatccgtccggctgtatcttcctctagaagctcgactagaaatatcctaactaccgccttatagacgcaaggggcacggtcagctgtaaggcactgcacccnccttatgatgaaaccaaagcttacagaagatttatcccactgacaatggaaagacttcgacaagacttctgcagcgaatcattagggtcggtggtgccccagacacgtgtcgcacatgcccgttgttgacgatcgttatcgatcagtttcgccagtcaatattactaaaataaaggagaactagttatgtttgcaatgcatatttgtgttagaataagttattntccactagcactaggattataaccccttgcagaaaataagtacaaaatggaggagaatcgacagcaaaatagacgatccatcaatcggacgctgtcgagatccagacttatggataaatgggacaagaacaaaaa

SEQ ID NO: 66218 - DNA, 425 bp, Oryza sativa
agcttgagaacaagaagatcgaggagaatgctctgttcgagtgcgagcgtggaggagcaccgaaggccaccactgatcagttcaagtgtggcaggtgcggccagcgcaagactacctactaccagctccagactcggagcgccgacgagccgatgacgacgttcgtgacctgcgtgaactgcaacaatcactggaagttctgctaagctaggcacatcctactgagaagtgttagtgtagttgaccctggagtttgacaggcaggttagtttcgggccctgcttatctgggcccgtttcatcttttttccccttaagttagcttgttccgaattcgatttgttctagtgccatttgactgcataatggccggccgttgggcttgcattgtcaggctactggctgtgtacttatcagtcttgttat

SEQ ID NO: 66219 - DNA, 483 bp, Oryza sativa
  unsure (1)..(483): unsure at all n locations
ntatagtgacatcagccatcaccaagtccataaatatagatggctatggcaatctttagggattaatttcggtgacactatgatctaatcaccggtgaagctaggaaaagtaagatgggcatacattgccaaatcatatagaatggaattattgagtataggaaaggtctcaatcagaagggagccaagtttagcaacatggtgtacacttgcacaaccaagaatattcaacataaaattaaccccaattctttctgtaagatcaaatatatgttaagtatatactagatatattatgtaaaatactagcaattaatgctgtcaaataaatacatattgtacagatctattgctgttgtttcttaatttgccgacctccaatctcgtaccttatcctcctttgttgnttcttttatatcctacatncgattattctactntatattctcttcggagttccagcttccacanaacaagctccat

SEQ ID NO: 66220 - DNA, 407 bp, Oryza sativa
  unsure (1)..(407): unsure at all n locations
agctntactggtgaaagaaggtacatgtattataactatcaagatgcagtagctatatgccgtgtgtatggtgcgcctgatgtattcacaacatttacctgcaatccaaagtggtcggagattgaagaggcccgactaagcgaggggttggaggtaagagtaagcgtggagcgtacttggcgaggggttggaggtgggaggtcggtccagccgcagtcgaggaggaagcagaagccatcgacggcgagtaggtagcagaggggtccctcaccgtacgccccactcaacggagtcacctgcaccgacgttcccatccgatcgatccccttcgccggcggcggtggcgagcaagaagagttccgctcagagtggaatgagagagaaagagtccaagtgtagtagttggg

SEQ ID NO: 66221 - DNA, 183 bp, Oryza sativa
  unsure (1)..(183): unsure at all n locations
tcgggcagctggaggaggaagaagacatatatatagtggtgggacctcagtcccggntggtagcaccaaccggggctataagatcaccgggatcattagtcccggttgggattaccaaccgggactaaagttaagatctttagtctcggctggtagcaccaaccgtggctaaagatcaccggg

SEQ ID NO: 66222 - DNA, 444 bp, Oryza sativa
  unsure (1)..(444): unsure at all n locations
agctttctttgaagataataaggcatactctgttaataattaanattaaacctgacctctccatctatcatgaatgcagaaaaaaagggaagaatatgtgcaaaaacctaggatagggatcacaatatcatgctcaacgccaaacactcgaagattccaacgattgaatctgtagcataagtatatatgatgcgtactgtagaacaatgcctttaagaagaaaataatttttgtccactggtatcattcaaaacaacccaaatatcaatcggtgctagattttcatccatgtaaaagttagagaccacattcagcaacgaaacaccaaacatttatcatgcattgtcaaactaaatcatggttttcatgctagagtngagtgccaacattatacaacccgtcatgataggagtttgtgccctcggcaaaagggccaccatctat

SEQ ID NO: 66223 - DNA, 491 bp, Oryza sativa
  unsure (1)..(491): unsure at all n locations
cttaagttcctattttcttcttcgttgcactgaattccctcttactgtcatcattgattacattttttggagaggtaccaaggcaaccatagctggtatattgctacatatgctaaactaacaacacttgaagtgcacccccaaaagaccatctactgtgcaccacaagttctactaagagaaaagctttgtcacgatcagtatcaaccatcaagcgatattacgaagataaagcactgcccagggaagaacgatcagaagcccagtcacagttgtggataaccatggggatcatgtggtgcccaagatccagtgccatagcggctgcctatggaaggatagccatcatcatagacgccttgcaggcccatccctggagtcgccattggtggtccataagctccatggccgctgaaacctataatcatacatagtatggtggtgtgggtcagcgccattgatttccataactntcaagctagcaaaagaaa

SEQ ID NO: 66224 - DNA, 439 bp, Oryza sativa
agcttaggacaatgcgaacgaatgtgatctagagcaccacattcaaagcaacgatttggtccactttttatcctgtacctaacattattgatagctcgagaaagcttgttagtcagcaaaaccaagtcctcctcctcaaactgttcgagttgctcatcggacatggcattaaacaatgcaagaatagaagacttcgatgaaaaagcaccaccatccaaagaagtcaaagaagaaaccaaagcactagacttaaaatcaactttacgagcaagaatattcatctcatgagttgtaagttttgtgtaaagcgaatccaaagttaaagtagacatatcaacatactcttgaatcgatgtaactctcatctcccaaatagacatgtcaagaccattcaaaaagtgatgagaaacctcagattatatggtaataacatcataag

SEQ ID NO: 66225 - DNA, 194 bp, Oryza sativa
  unsure (1)..(194): unsure at all n locations
tgctcgggcagctggaggaggaagaagacatatatatatgtgtgggactttagtcccggctggtagcaccaaccggtgctaaagatcaccgggatctttanccccggttgttgctaccatccgcgtctagagttccacccctctactgctgtggtgtttgtcctcctgctgtccgctcacgcaggcgctttcgt

SEQ ID NO: 66226 - DNA, 495 bp, Oryza sativa
  unsure (1)..(495): unsure at all n locations
tgcggaggcaccgtgcacgangaataacacatacacctactgttgtgactagacttccggccggacgtaccagccgacgctaggcgacaccagcactcgccgctgccgtccgacgcaatcgccgtcgacctctggagcaccggctgcatactcgccaagcttctcgccggcaagcccatcttgcccggccaaactgaggtaaataaataaataaatattataacctcaactctccatctatatatcgtctatgcatggatgaaatggatcggcatcgatctgattcgccattgctgatcgacgcagatcgagcagctgcacaagatcttcaagctgtgcgggacttctcgttgagtctatcaaactgtgcatgcatatagcttagatagctgattagttagagctagtcaatatatgcatatgttgcatgagttgagtggcagttagcttcgtgctagtggctggtagcgataatccaccgatcgaacaccttgc

SEQ ID NO: 66227 - DNA, 373 bp, Oryza sativa
cgctttgtcttgactgagtttttctctatgtgcggatatgtaatctatatcttgcgggttacttcttttcacttgctgatctaaaaattgtagctattgtggcgctctttcatgtaataactgcatgctgatcatatcagcatgtatgtggtctaattacaagtttaaaccaagcagaccaggttttcattgtcacatgaccggaaacctgagctaatagcttatatgaatgaatcttttcgaggatgtcgctgaaggatttgtgctcaatatatttttctggttgaacattcacgatgttttgcttaagagctattaataactagtctgaatgaatatctttggggatgtcgctgaatgatttgtgctccac

SEQ ID NO: 66228 - DNA, 490 bp, Oryza sativa
  unsure (1)..(490): unsure at all n locations
tgcaatcccggccggcgaattaggtcgtcccgaggataggcttaccttccacatcgntgaattggagaatccacatgatcctactagtatgtacgtgcagctcctcttccgcgagacagattngtatttcgtggccttccgaccgcttgctccgggtgttaacccagacagcgcanacggttggttccatttcaagcaagcagagcctatcataccatccttcctcaactcccaccaaatcaactatggttacggctacattaatgcgtacgtacttcattcctttattaattaattttggctcatgcatactgctgcttctgcttcttatgtcaattgatgatcgatctagtccagtactgtaactaatttggagtactacactacttacataagtatatatatatatgtgctatacctgtatctgactgtatgtatgtatgcatgcatgcagtacanactaccaagtctgcactggctgcctaagtga

SEQ ID NO: 66229 - DNA, 436 bp, Oryza sativa
  unsure (1)..(436): unsure at all n locations
agctntggtgttcacagctgggattactcatgagtgcagcttttcgtttcatgtttaacgttatttaaatcgctaagcgcacttttaaatttgagaccaataacatggggttaggtactggagtatctttgtgattagtgatgcttttctttcctaaaagatgtggtgtgactaataaaggaagaatggaggaaaatgaattggcaccacttctttttgctaatctttttctttaattctcagtgcggagaaccttgctattttgttctctttagccttttttctttgatagctaatcaactttactatgatcgcttttccatactaccgtatgagagattaagtactcctttgaaaagatgtgctatattttttttatagatttagtgttactaagggctgttgtccatataggccagccagatcaaatacacac

SEQ ID NO: 66230 - DNA, 404 bp, Oryza sativa
  unsure (1)..(404): unsure at all n locations
tgcattanacacctanattcccgtgacttgctgagtacgttagtactcacccttgctctataaaaaaatatatatatagttcctccatcttgaagagaagattaagtgaagcgaagattagggtttcgtcctggtttccagccgtcgcctgtggtgttgggtgttagtccgttgtttccgctgctgctgccgttgttggtgttgcctcgtccgtgtcgtcggttgtaatctcgggctatcctgagctgcaaccctagttaaggtaaataagtcatttatttatttcaaggattgcaatgatttatatttgtcaccgtgggtaccagcgctatgtcctgngattggtactgagatcgcggtctcgtaggaagcggttctcaccgttnttccgacaacacgcccct

SEQ ID NO: 66231 - DNA, 249 bp, Oryza sativa
agcttcgagctcgcgttgcttctgcttctttctcgcgcaggcgtggatttcttctggaggatgaaactggggccaaattcggcccaaatttggcccaaatgagctcagagattgcccaaaaaaattaggaaaaagtacatcgaaggtccctcaacttgtcgtcgggaatataaaatattctcgaaccacaaaaccagacatgcgagatcccttaactatacaaaatcggtcaccccagatcctttggtg

SEQ ID NO: 66232 - DNA, 449 bp, Oryza sativa
  unsure (1)..(449): unsure at all n locations
ttatgcagcatcccattatcttaagcaagtactcactccgtattntaatatataacgccgttgactatntttatcaacgttagactattcgttttattcaaaatttttgtgtaaatatgaaaatatttgtgtcatgcttaaaggacatttgataacgaatcaagtcacaataaaataaaatgataattacataaatttttttgaataaaataaatggttaaacgtttgattaaaaatcaacggcgtcatacattaaaatatagagatagtattacatttttttaaatattgaagctatcgtttgacctgacttgtatcatgatccactttacagtttacacagccactacatttttcatggnggacatacttgctttnnttttcatgttattcacttcttaatttccgtataccgtctaccatgtatgcttacgctttggtgttgttcg

SEQ ID NO: 66233 - DNA, 422 bp, Oryza sativa
  unsure (1)..(422): unsure at all n locations
agcttgtattaactgccctctgatttcttctgtttcccccacatatattcttcctttatatttcataattccagcctcaaacttatactccccttgtggatcccctgctgtgccaattaaactcagcaacttatgagcttgaacatcctcttcataacttcttttaatatccagtatccactcaggcaccaccacagcaatagctgcacaaagttcagtcacttcttccttgtttttcgggctcctagatagggcatctgctactaagttctccctaccagccttgtactcaatagtgtaattatattccatcagtttaagcaataacttgtgttgtatcccttccaccagtctttggttcatcatgtacttaagactctgcttgatctgtttgatgactaattctccacccanaacataat

SEQ ID NO: 66234 - DNA, 472 bp, Oryza sativa
  unsure (1)..(472): unsure at all n locations
ggcacaaaagcgatagcaggtccgactttcatattgaaagtatgtcatcgntggtaagctggcaaaagcaaagcacctccgacttcaccacaaacttgtatcgttgttgtcgagctcatcatagaaacgaccaagcagctccgacttcccacggcggacatcagccaaaaccatcatattaccacttcctgcttattgctagcaccagcacacctagaaagagactgcaccgtgttaccgttgctgaggttcatcgcgcctcaacaataaagcaacttcgacaccaccttgcaaactgaaacaaaggcattggctgccagccgcaagcaagaagcggatccaggaaagcgaatgcctcgccgaacatttctggcctatctagcgttggtgtggaagtagaaatccctagagctaacgccaactccacgaccagagatgcgcatgagaaggttctccacacggtacccacagc

SEQ ID NO: 66235 - DNA, 440 bp, Oryza sativa
  unsure (1)..(440): unsure at all n locations
agctntggtcgctagtccaatcggtgacctgtaaccctaccactcctgattctttcagctggaaatgggaaagctcgtgtcagtacagctcaatatcttcttataaggctctgttctttggtcggatctccttcctcttgaccccgatctggaaatcgtttgctccacctcgatgccgcttcttcctgtggttggtagcaatgaacagatgttggaccgctgatcatctacggagccgggggttgcctcacccagaccgttgtgttctttgcgatcaacaggaggagagcatcgaccacattctggtaggctgacctgagtcgaggcagctttggtgttggacattaagagcgataggcaatccggactgtctacccacctctggctctgtgaaagccggatgaagttgagagagcagcatcgccgggaatttgacacta

SEQ ID NO: 66236 - DNA, 498 bp, Oryza sativa
  unsure (1)..(498): unsure at all n locations
tatcatgtctgatanatntccgcgtcagatgtttagtgttgatctgtacatgtcctgtcccttaccactggcaaagtcaaatatggattatcttgcctacnaattgccaacatggtctttaaagaaatactcaagttagtataaattattgttaaccgattaggttatctctgcccaaaataaatacctcggcccccacaaattagtgcatctgtggaaattattaaagaaacaagaactagtggagcaaaacagggtggtttttgttgtctgaacacaattacatcagcaccgtagctttcatgcctgggactacaattgtttgagagaaaaatccttattaggaatgcaaagtattccatctctgtgtaaacaaaaagtacataatttcttttggtgtctattgtgcttttttttattaagtacagattaatntagtgcctctcccattctanggaaaaaaaagaacaatcctcanatatatatntttttatctgc

SEQ ID NO: 66237 - DNA, 385 bp, Oryza sativa
tgaagctggcgatgtctgtgcgtccctttctgctactaggtgaaagagtgcttgcacttgtgacttgaacaatctggttgttattgactcgctattacaagaccgcccatcggcgtctcagtctcactaccgaccgatggtgagaccagccaaatcgttctttccacttggacccaggctaaaacctgccaagttataaccgggactcatgccctggtagtacttgcagttgcagaatcactatcaggtgggtgtccaattggatccttaaccagtggacgtttagtgttaaatttgaatcttccaaatgtgaaaatctagttaactgctgttaaaattctatggaatctatttaaaactcttacatccaaaccgaatttaaaga

SEQ ID NO: 66238 - DNA, 372 bp, Oryza sativa
  unsure (1)..(372): unsure at all n locations
agcttgtctaccaaattttataattggcataatggagaaattaaattatcactttgcacgggttgcttactgtagtaacttcttttagatgcatgcatataggactggtttggtttgagatctaaattaagcttaccaatatttatcaatttcaatagtatttagtgtctatttggtttgaagccaaattttggcatgcctaanaaataggccatttcaatagtgaacttaggctantttggcttcaatccaaacacaactttgctttaccaaaattagtcatgctaaaactcgccaaaatttagtattgacaaaatttagtaagatgtatttaggccacaaaccaaaccaacccatagttacctgaacaat

SEQ ID NO: 66239 - DNA, 464 bp, Oryza sativa
  unsure (1)..(464): unsure at all n locations
tgtgatcatccaggagctattaactgatggaacggatacctcaaggttacatttaccaggacggccggaggcccatctttcacacgcctcccctcagcggcatctacgcgtccgagggctggttcatgaagctcctcaaggagagccggaggttcgccgtcaccgaccccgccaaggcgcacctcttctaccttccctacagctcccagcagctcaggatctcgctctacgttcccgactcccacaacctcaggccgctggccgcctacctccgcgacttcgtcaaaggcctcgccgccaagtacccgttctggaatcgcaccagaggcgccgaccatttcctcgtcgcctgccatgattgggtaaaccaacatcttgatngttttattttcactctctttntgtgtngcagttctgatcgtgtctggttttggttcctggcaatggctgcaaggatcttacac

SEQ ID NO: 66240 - DNA, 437 bp, Oryza sativa
  unsure (1)..(437): unsure at all n locations
agctngagcatacacgttgtcacgtaactacacatgcgcagctgggatcggaaacaacaggtagagtagtacggctactgcttttntcttgttttgccataacaacagtgatgaaaaagaatcaggtctctcctcgaattgaggagagtggaagagattgttctagcctctgtacacgccggagggatcagcgttttgaactatccaagggtgctcgaggagcttgtggaggggcagacgatgcgccgaattcttcacgagcatctgcagatcaaaatgctctcttgaggttcacactctggtggatgttctacttgtgtccaagtgacgatttacttgtcacagttttacagttatgtaaatcatcaggacaggagcatgcttcttacctgtgaaattaggtctttcgcagccggggacacgaatggtttcagtgg

SEQ ID NO: 66241 - DNA, 354 bp, Oryza sativa
  unsure (1)..(354): unsure at all n locations
gagacgacacggatcgacatggctatcatgctttctccatcttaatncgagtaaaccctcctaattaaccctctctgactacttaacctatgcgattaacactatgctaatgacttcttctactgggccgaaacctctcaaaaaagataactcttggtgcaactaccaacacaccagatgaaacttgtgagtgatggctacattagtggcgagttgttgccaatggtgatcatagctcgacgacgacgacgacgatcctagatggagaggtgcggccaccccatggcccagatgctgtccgacaccggccgttgtgcggacggcgctggagactgtgtataagtggccggccgc

SEQ ID NO: 66242 - DNA, 273 bp, Oryza sativa
ctactcccatccaccgaggagaaggtgaatgtgaaaaggtcatcctatctcctctgttctcgcagctgcaaccaccgatcatcctgcaggcgccgctcgagctagcgcctacggagtggtccacacgaatgggtgcggactcaaagtgatgcacatgccctcgcattggatcggacataaagcgctcttcctatctgtgccggtgtccaaacgcgcacaattgcgcctcatggaggagatggtgctgctcaccccgggtgaaccggatgctga

SEQ ID NO: 66243 - DNA, 364 bp, Oryza sativa
ctccctctatagcattggaaacaatcatcaattattttcggtcttgaaactccactctcctaagcagccaattgatcttacggccgattgatgaatttcacgaatcccttcatgtactactctcctagcaactttagattgaacattatctaaggaatactccatctattattcggcgatataatatttgaacacttgccaccgaatctttcgatcgccataaatgtaggatctttcacatatctaatctaaggaattctccaagctatttctaactcatgggcacaaatgtccgaattcacaattaattcgggcttttaatcaattgtaacgtgcccctagctctctgctcgagatcggtcag

SEQ ID NO: 66244 - DNA, 431 bp, Oryza sativa
  unsure (1)..(431): unsure at all n locations
agcttttgaccagattataggactaataatactatntgntaactgacatcacactgcanatatcactgaattatttatctgtctgtccagatgttctcttctatgctctgcaagcatttccaagagtttgatattatcttatcttgctaaggcactctccattcgtcttctgcaggaaaagcttcctcgaaggcgagactttgtgcatctcacagtgcgctttctcaccgcctacttcctccgggaaggcgctggcacgcagctattgcaagaccagcgcattcttagtctacaaggagcaagatgcataggagatgctgcagaagatgttacatatctgaaacttctcttcccattgtaaaaattgctttgctggggatatatgtgaaacataaacaggcatgttctgctcttagtgtaagtctaagcac

SEQ ID NO: 66245 - DNA, 471 bp, Oryza sativa
  unsure (1)..(471): unsure at all n locations
ggcattanacacctaagttcccgtgacttgctaagtacgattgtactcattcttgctctatataaatatatataattcctccgccttgaagtgaagatgaagtgaagtgaagattatggtttcgtcctggttcctagctgtcacctgtggtgttgggtgttagtttgttggttccgctgctgctgctgttggtggtgtttcctcgtccgtgtcgtcggttgcattctcgggctgttctgagctgcaacctaagttaaggtaaataagtcctctatttattttaaggattgcaatgattcatatttgtcaccgtgggtaccagcgctatgtcctgngattggtaccgagatcgcggtttcgtaggaagcggctcgcgccgcttttttctatgacacgctcctgtcaggtgccgntgtacggcggtgccaaattggtgtgtgacagcccgcggcggcctcgcccttctctcta

SEQ ID NO: 66246 - DNA, 438 bp, Oryza sativa
  unsure (1)..(438): unsure at all n locations
agctgccgttcgccttgggaacgaccaccgggttcgccagccactccggatggatgacctcgtggatgaatccggcctccagaagtcgcgccacctcctcgcggatgaaggcttgacgttccggggcctgccgccgtactttctgccggaccggccttgcgcccgaccgcacggcgagacggtgctcaatcacctccctggggaccccgggcatatccgccggtctccatgcgaagacgtcagcgtttgcccgcaggaaagagacgagcgcgtcttcctatttgccgtccagaagaccaccgatccgtgtggtcttggacgggccgtcgcccagggcaacctccttgaccgggacctcgtcgcatgtgactatccgctgcctcggggcggcggnggcggaggtgccaagcctctcgtcgcctccctcgggcttggacg

SEQ ID NO: 66247 - DNA, 491 bp, Oryza sativa
  unsure (1)..(491): unsure at all n locations
gagatgaagatctagagcatctgacanagcagacataattgttctttccttagcaaccatattgctgtaggttgtcttcagtatcaaataatcattttggagctgccttgttaacggcaaacaggttgaacagagaaaattcaaaataatagcgagccataatgttgtacaatgcaaaatggtaccatggaaaccaccgcaacataacgatgcactcctatcagtgaatgtcgacagggaggacatggttatgggggcaatccagatccgccacacatggaaagaaaaatctaactgtaacattcagatctacatagaataatttggcagacctttaaggcttctagggttctactcttcttttccagggaaagaatacaggcatggtccataaggagttaaggactatgctcaagcctacatnntttctgttttctctangtccncaattgtaacttgtagtacagtgctactctatcttcaatataaaa

SEQ ID NO: 66248 - DNA, 437 bp, Oryza sativa
agcttggtgagatacctcggtcatgcttctcccagcgttcccgttctgagctctcgccgtggtgcttcgtacagaatcaaatcgcctaacctacaccagccaccaattacgctcggatcattacacccaaatcaacatggaaacgaggcatcgacgcaacagagatagagacacctgccttctcagaacacgctctgagcccagacgcgtccccgaagccgatcgtcgccacacccacactgcactcaggatcaccatgcgcagaatcagaatgccgccgcctcaaaaaccgagggaaaaatgcggaggcgagggagaaacacacgctcaccggttcgtactctcgacagagcggcgagccgggcggagcgcgatgcctcgacgagctgtcacggcggcggcggaggaggagggaacccacggggcgcgatttatac

SEQ ID NO: 66249 - DNA, 488 bp, Oryza sativa
tgaacacttctcaagaaatgtagtctgaaagtaaacctctctatcaaatgctccttttttctcatccaaggtgcgacccagccagggtagggggtaagggcgtgtcacgccccgaactagtcccgaccggaactagcccgtgacgctccaaattaacctgttaatcgataccagtcccaggaaacagtgctggtatcacaggaagacagaatatcacagcaacagaggtctctttattatagagtaggagtatagtcatgttgggctgcggacagatcccgagctcacaactgcattacaaaagggaagcggaagccaagacttggaccaaacatcacaggcgcgacttggaaactaggccgaaaccctaaaactcatcgtagccggcttgctcctggaagaactcctcgtcagcgggatccgcttcatcttcttcagcaactaggggggattatttatatagagcaagggtgagtacgggagtactc

SEQ ID NO: 66250 - DNA, 435 bp, Oryza sativa
  unsure (1)..(435): unsure at all n locations
agcttaatatatttcatatgatgatatcttaacgtanagggcaaatttagcatatcaatgaagcatatagtaagttaaataactaaatcagataagatcggctaaaaccccgattctatctctagtgatgatcacgagacaagttagatattataactatggatattacttaatagatggaactcaaccgatgcagcattaagcataaagataaaaataagatctaaacaagttgatgaaaatccctatgagatggaggatataccctataatctaaattaacagcaaaatctaactctatcggctatcttccaatgatggatattggccggtttagggttagattacgatactaacaaagattatgaggcatatatgataactcgacgaattacataaacaaaattagagtggcataaagatgtaagcactaat

SEQ ID NO: 66251 - DNA, 477 bp, Oryza sativa
  unsure (1)..(477): unsure at all n locations
ngcattanacacctaagttcccgtgactagctgagtacgaaagtactcacccttgctctatataaatatatatatatagttcctccgccctgaagagaagataaagtgaagtgaagattanggttttgtcctggttcccagccgtcgcctgtggtgttgggtgttagactgttggttccgctgctgctgctgctgctgcttgtggtgtttcctcgtccgcgtcatcggttgtattctcgggctgtctgagctgcaacctaagttaaggtaaataagtcctctatttattttaaggattgctatgattcatatttgtcaccgtgggtaccagcactatgtcctgngactggtaccgagatcgcggtttcgtatgaagcggttcgcgccgttttccctacgacacgctcctgtcaggttgccgtgtacggcggtatcagattggggtgtgacanatactcagaacacttggnntatata

SEQ ID NO: 66252 - DNA, 440 bp, Oryza sativa
agcttgaacctttgctcgtcccgagtgaatgactcacaaaaaaaaacttgattgttgatcaggagttgctaccatgctgtatatctcaaatgtacaggtgcaaggtatgtgtactctctctctcaaattaataaatttggcacggtggcttatccttacccctgattcccacaagacactgcctttctttgtaaagagcggttgagaaacagaacatcaattagagcactaattacccaatctacattcaacaattattccgaaagtttttcaaatgattttgcaaaagaaatccaagttcctcaaatgattcactcgatctctccaagtatatgaatatgaattcctcagcaatttgccttttttattcctattctacgggtgatatatggagcttggtagcaatcaaacatggcatacttgcattcacatttattact

SEQ ID NO: 66253 - DNA, 434 bp, Oryza sativa
  unsure (1)..(434): unsure at all n locations
ctcagcttgtgtagtaggctggaaacacctatagtatgggtgtcattactttaataattattattatgatcactgttctagagagtcgaagtaatgtaatcgatttgggagtaccgtatgtaagaaactaattaaatacagatttgttaccatggtgggttaggtaggggcagaatataaacgctntataagatgttcttttgattttgataaggttaaaatttgaagattntaaccatggatcagtacacatccaaatataatttacaaatagaaatttataagagttatagacataactntatattccccgtaattattgatttcataccggtgacaatatattntaagccaaaataagggttacaaaaggtgaactgtgggagcatgttgccgtttctaattctagatagagcccgaggtanacacatacg

SEQ ID NO: 66254 - DNA, 395 bp, Oryza sativa
  unsure (1)..(395): unsure at all n locations
agcttatnggtagaaatatacatcgacctcacataatcgntgcgcgagacataacgaaacagcaataccgaacagtatcgcataagaaacagcataccgaatctctggtccaaaattagtgattaattaccataattagttattatttaatgataactaagattaattaggtgctaatcaatgtgattaaaacattaatcattcagccatgccgtgcggtctcgcgtattggttgtgcgagaccgtacgctttcgtggaattcccttgcaaaaccttggcgcgtcgttactccacgtcattctcgtgcggtggttatgtgatagcgaggtatatttctaaccaaaaaaaattgaagaaagaaataatatattntcaaaattaattacatcgtatt

SEQ ID NO: 66255 - DNA, 419 bp, Oryza sativa
  unsure (1)..(419): unsure at all n locations
cgcatcanacacctaaatntccgtgacttgctgggtacgttagtactcacccttgctctatataaatatatatattgttcctccaccttgaagtgaagatgaagtgaagtgaagaatagggtttcgtcctggttcccagccgtcgcctgtggtgttgggtgttagaccgttggttccactgctgctgctgttgttggtgtttcctcgtccgcgtcgtcggttgcattctcgggctgtgctgagctacaacctaagttaaggtaaataagttatctatttattttaaggatttgcaatgattcatatttgtcaccgtgggtaccagcactatgtcctgngactggtaccgagatcgcggtttcgtatgaatcggttcgcgccgtttttcctacgacacactcctatcaagtgccgctgta

SEQ ID NO: 66256 - DNA, 424 bp, Oryza sativa
  unsure (1)..(424): unsure at all n locations
agctttgttgtcttcatcgtagtttggaacacaccatctaggagaaacccaaagggtggaagatacaatcactgtctaatcggccttgcatacttttaggtgtggacccacctgaccctttacgtttgcccgtaggatttccatgcaagcatctgtagagttagaaattgcaatgcaaatgcttgaacaagtagttttcacattgtttctcatgtattcttgactgctcctaggacgtgaagttcataacaaggaagagaaaggaatgaaggaagcagagaatgtggttgaagctaanagctcacagttggagtctcttgtttctcatggtacacaagcacttactcatgtatctgtgcttaatattgttcaaatnttttaatgctaaattgtggtgttgccattctcctgattaatgtttcta

SEQ ID NO: 66257 - DNA, 479 bp, Oryza sativa
  unsure (1)..(479): unsure at all n locations
nttgtatctgctatgcattaccgattatgagcattgtggatcctttctactttctttcantttttggccttctgttctggaaactgctattcgtgttttttgggacactggcaagcttttgtatctactacacattactgattatgagcattgtggattgagttcctctctttgtnttggagtgtagattcttgttgcacttcaattacttcacctctgttgttgtctgtccttcggctcactatttgttgaaattgttttctatttcagatgtcatctgccaactttatacatgggcatgcaatatttgcgaatgcacaatttcaaacttgcagagcangtaataacttgagaaatcctaccgagacntaatttcttatgaggcttccactctngataagaaactatactttagagctgactttttccctatatnttctcattccatnnatttgttttggcaaaaaaggagggttaat

SEQ ID NO: 66258 - DNA, 412 bp, Oryza sativa
  unsure (1)..(412): unsure at all n locations
gatcttaagcacctgngctgcagcttgcttgctgcccctctgctgctagtcttctgcaatgccatgccgctgcctgagggaaaaaaagtgcagacctaagagactcnagtttccatctgcagctctgctaatngatatagatcttggtgttcttaattagtgactagtatttaagatgattaattctcatgcaaatgaatttcttcatatgaaacctcacttggccacattaaggccggagattagtactagacgttaagatatatctgtactccaaactgaaattaaccatgcctgcacatatattagttagtctactttaggcaattaggctgaacaccaattaatgtgcttcatacagttacttaatgtagagttcccaagtttacagctaggaattaggaaatttata

SEQ ID NO: 66259 - DNA, 501 bp, Oryza sativa
  unsure (1)..(501): unsure at all n locations
gcttgtctgcaacgttgtacatcactagatcgttccaccctggtccatattatcgctcgccaccaattataaatgttgtggcccaggtgagtagaaccaccgagaaaatggtaaagccaatggctgaccggacaacatctgcaaaagaagctaaaatgtgtaagaaaaatgtagaccacacggttaccacgaagttccataacatcttatgctagtcaggataacatatgcagtagaaaaacttgcaagacatggaaaactcaagagatgaaaagacatatgctcctcatcttggcaagggtttgggataacgctgtatttcatttacaggttgcagggttcagaaattaccccaaggctatggcatttgactaaaccaaaacaatcactttgaaacattgtgatactggatacccaattagttgaggcattttatcccttattgtctganagggaatcatcgaatttctagtctgcatgcctcatcaacaaatgaatact

SEQ ID NO: 66260 - DNA, 204 bp, Oryza sativa
  unsure (1)..(204): unsure at all n locations
cgtgcgtgctttttggtggccccagatccccgatcctctgccttcctgctgctgctgccgcggtcacggtccgcttttcctgcctacccgattttgtggcagacgcagggtggagcgtgtgatgancttaacgttgactaccttttgcttcaatctctcacccataaaanaaacgacgttctgtggacactaaatctatataga

SEQ ID NO: 66261 - DNA, 483 bp, Oryza sativa
tacggacctatgatactaagctaatacaccacggagtgggtgtacgctttcatggccctacttgataacccccggtcttccattctttcgcgatctatctcaccagctagatccatagcggaagtacgctcttgatcatcgtgccatatcccccggccgaactcacaaaggggggggggtctcacgatctcccactagagaggatcactccttgacagaggtatacaggagtactgggtttttcgcattttgatccttttagatattctacaaattgatcccaagaaaacttattttaaaaatggtccttttcgcggcgctaatgttattggcaccatggtccaatatgatggctccaatgacattggcgccatcccctccgtcctcgggtgaaagctaagtcactaatgtgaagggatgacgccaacgacatttatgccgaggaccaatttgcaacaaaaatcgaaaatgacttatttgtca

SEQ ID NO: 66262 - DNA, 295 bp, Oryza sativa
agctttactctgtatgcctcgatcgagtctgactcggagtccgagtcggactagcatgatatcgtctccacgcggtcgcatatggaaaaagtacacgcaatgttcctcaacttgctagccatataactaatttttcctctaccagtttagcggaagtacagcgtccccaactttcaaaattggtgaaaataagtcctctagctgttctaaccctatttgacacacggtgcccttactcattatgggatccatgtggcccctcaatttagaatgacatgtcatcctctttgcttcg

SEQ ID NO: 66263 - DNA, 471 bp, Oryza sativa
  unsure (1)..(471): unsure at all n locations
tctncggttcttggtctctgcccgaggcatcgatgccaacctcgagaagatacgagctatagagcggatgcgcccnccagcaagcttaaggatgtgcaatgcgtcaccggttgcatggccgccctaagtcggttcatatcgaggctgggagagaaggcgctacccttatttaagctcctcatacgctccgggccgtttacttggacggaggaagctgaacgtgctctcactcagttgaaggcgtatctcagctctcccccagttctggtcgccccggagccaaatgaacccttgctactctacttagcggcgaccccgcaagtggttagtgcggcgttggtcgtggagcgcgatgaggacaatcctcattccgcgcaccctcaccctgtactggcttggcccgggagagagcagggaggagagngccccgagccggacggtgtgctaaggcccccgtctactnntgtagtg

SEQ ID NO: 66264 - DNA, 427 bp, Oryza sativa
  unsure (1)..(427): unsure at all n locations
agcttgaggaagatagctaggtagctatagagagaagaagacgagatcgatgactatgtgttagtaattgacaaagtaagccgcagtggtacgaaaatttatacacaggatgcaattgcaaaaaggagctatctatagcttagcctaattagccctatcactaaattacatgtgtgagtaacatgcaccagccatgaatgctagtaaatgaggttggctttgggaggaaaattttctcatgtaatttaatctcagcagctataaattaattgtgtccggtttcccatgtaatttaagctagctagatcttctgatttatttaagccaatacataagcctatanttggcatacgatggtctgacttttggatgagtctaggacgtacgtggaacttgttaattactccctccatttaaaaatgtgaag

SEQ ID NO: 66265 - DNA, 476 bp, Oryza sativa
  unsure (1)..(476): unsure at all n locations
gcttacagaccttttttgggtgtgctctntggcgccagtgaatgatctgcctgtggagactcatctggagattcagtggtgacctttgccttgtagaagaagcacttttttttttcagaaattgatggattaggttatgaaaagaaagagcatgaataccttatccgaagtatcacggngaacaattgtagttaaagatgcactttgtgagatcttctcttcatgatgagtgccaatttttgccttgcatagttggtcaataggtcagagtgtatctccaaatatttaggaaaatttgtttatagcagaggaagtgcaagagtaggtattgagaaggataccttagtatcagtagaggtctttgcagtgtgagatggcatagagtagcctgagacaataatgctctttttggtaaatactaaggagcttgattngctagttggtgtctcatctgtcgcagtancangagtgtattt

SEQ ID NO: 66266 - DNA, 432 bp, Oryza sativa
  unsure (1)..(432): unsure at all n locations
agcttaactgagcattttctcaggttttcaaatgtttcttgcaaatctttgccatgggtaaatgctngtttactctttaccacaatgtcatctatgtatgcctcgacattccgtcctaactgcttagccaagacttttcctatgagcctggcaaaagtcgctcctgcattcttcaaaccaaatggcattctgataaaacaataagttccaaatggtgttataaatgatgtcttttcctcatcctccttcaccataaaaacttggtgatagccagagtatgcgtctaagaaactcattagttcgcatccagctgtggcatctaccaactggtctatccgtggcaaaggaaaatcatcttttgggcatgcctctgtgagggtctgaaaagcaatgcacattctccacttgccatttggcttctttactaacact

SEQ ID NO: 66267 - DNA, 458 bp, Oryza sativa
caggtgtcagaagaccttcctctgcatcctcacaacggccctctgtgggagagcggcaccggatagccagggagagcataaaaaagcctgctgatgtttccaccccacggcgtccttccactgcagaaaggcaccctgtcaccacagagcgtgcaaggaagcaagccgatgtagatacaccacgccgaccatctacttctgaaagacgtgctgtcaacaaagggagtgctgacatgaccactacacatcgcccctctactggagaaagacgatctgttaccagggagagtgttctgaagatggacgtaagaacacctatcaagacaaggcctactatgacgcaactgaagggtgcaacaaccacagtggtatgttctagcacttaactgtaaccgaagttcatctattcattatgtcgatgacactttaagccatgttttcagtaatctgaaacatga

SEQ ID NO: 66268 - DNA, 436 bp, Oryza sativa
agcttggaagaattggaagtcgaagctcttcaccgagtatgtcaacccgcccggcaatcatacgccgttcgatgaataccctcaaataaccgaagcggtgtgggaggaattctgctctctcaagaccacccaagagtttagggaatccagcgaggcacatcgcgtactgcaacagcggaatgagcacccgcatcggttgggcaccgcagggtacatcggcaaggaggcaatatgggcccaagaagatgcagccgctgcagcagcgaatgtacctgccccgttttcagacatccctgaacaaagagctcgcaactgggcgcgggcaaggggtaaggtcaacccggacggctctgtcacatttgagaacaaaagtgatgccgtcgtctatcacgaactggtgagttcactacttaacctaactaatttccgttcgtat

SEQ ID NO: 66269 - DNA, 499 bp, Oryza sativa
  unsure (1)..(499): unsure at all n locations
ctcaagcttctcttactgaagaggggaatgattgagcaagaatgatttctttcacagtactcagcaagccacaccggagatgcacaattaatgcaaaggagcacaaagggataataatatatggtttaagatttgcactaaacagcatttaaaagtcacttagttgcccaaagccattntgtaaagacgatcctagagctacacagtattattaaacaaggccgtgaaccctcacgaacctgtcttaacccaatggctacgatgattcagatcaaaatggtaacccgacctgtgttccagctcgtgccaagccaacccaggccaaccattccacattntagttggtgagcaaactttaagaattagaacactgacttgngtacattgctcggcttgcccatattcganggctcggctattcgaatagatttactctgatcagatgtgtacatctttacccactagacacatcttcctcacgtgtaaccacgcgccacat

SEQ ID NO: 66270 - DNA, 371 bp, Oryza sativa
gctttgttggcttgaagcaagaatatgtattctatgccagaaagatacaagagtggtgcggacagtttgtcaccatctttcctagatgaagccaacgctactcttgctgcatcgaaacattagaatgaagctagttagcctccgcactcaattaatagagacatccttgtaatgcgatattaagttgtgtatcttacctttctttggcatcatccttcctgggatgagctcacgttcgcgcttctcgtcaagcattttgagcacaatgcgagcggcggcggtggagtctagcgtgagagagcacggccggtgagcgcgacgtatgcgacgagagcggggccggcgagcaccacgcaagcggcggcggtggc

SEQ ID NO: 66271 - DNA, 490 bp, Oryza sativa
  unsure (1)..(490): unsure at all n locations
ntatgttcggcgcagtactaatactggaacttatgagcaagaattgctctatcaatcaccatctactttagacatatcttctgaaactttnttcaaatccaaaagtccagtatcttcctacaaattagtgaattaagaggagctctttgtgccgaanaagaaagagcagggcaatatttcaaacttgcattcgaactgcgaaatatttatacaaaggaggagagatcaagataatgcagcagggttggttatctaattggctagtcaaacatgaggtggttcatagatctttgggcttcgatcatcgaggaatagggactttgcaaataaaagcagaggattgggattccattgctgtcattntatatgtatatggttacaattatttacgttcccaatgtgcttatgacgttgcacccggtggatctttagctagcgtgtatcatcttacgagaatacagtatggtatagataacccagaagaagtatg

SEQ ID NO: 66272 - DNA, 434 bp, Oryza sativa
  unsure (1)..(434): unsure at all n locations
agcttcggaagggtcgccgctgacgccatggatgcggcttgctctgtcctcttctcagctcgggaaaacaggagccataaaactcaaatccaaaattatctatacggagacgaagacgaaacctcactcgagtcttcttgtttgggccgcttaaatgggcctttgggctcgtaatccaattggctgggccttccagtgtactccgcttcaatgggcgtttggactcgtaatccaattggctggggcttccagtgtacactttaaatgggcctttgggatcgtaatacagttagctgggcctcccagtttaaattactcaggaataagtttataataggtcccttatcttaccgtctagtttatttgttttacaagtatatatagttattactttaacatgacttatatactntatatatatatatatatgcact

SEQ ID NO: 66273 - DNA, 453 bp, Oryza sativa
  unsure (1)..(453): unsure at all n locations
tgtgttaggaataggaatgtgataatttgtaaatgaagcccagcgaacagaaagttatggaatntagaaaagtgtaaagctagttaaatgttgttttgaccaaaaaaaaaaactacacaagcatcattcggacaaatttcaagtaatattggagtgtatatggggaatgccatgagctatccatagattccattcacaactggattggggtgtatatgggaaatttattgaaatatgcaaagaggtgcgcccaactaaacaatactccaattcactttcaccatgtacatcactttcctgccaaatttagaaagatatgaggattccaaatacagattanaataatggtccaaaggtaccaactgatccgtctcattattttttaaagcataccatatacggtcaatatagaggatgcgaacccgacnnataagatatagagagagaggactc

SEQ ID NO: 66274 - DNA, 425 bp, Oryza sativa
  unsure (1)..(425): unsure at all n locations
agcttatatttaaacctaaagcatcattgtcataataagacatttgcaaccaaacgtaacagtaaaatgatggaaaatgtaacggtaggggcatggaagggatcaaattgaaatttcaggggtacagaagggatcgggtaaattttaggggtatgaaagggattgagtgagttntcatgggtacacagggaattcactcaaatttaaagctgcaaatttaaaatttagctgatatgagtataagtgtaagcggaaagatgaggttgttcagttggcagtgatccacagaagggggcttatttgaaaaaaataatatcattggacttgtgttaagtgttaaccgctggatgggaatctaagatcgagttacatttacataaaaaatcctctcattttcatgtttgaattaggctccttctcgggtt

SEQ ID NO: 66275 - DNA, 409 bp, Oryza sativa
  unsure (1)..(409): unsure at all n locations
ngaacagcttcacacgctgatctttatcaaccctgtagcttatattggcaaatttctcaagccaatgctgaagaagctgaagaaactccgtgtgctgtccctctgctntttcagcagttacacactaccaaagcacataggcaagttgaagcatctcagatacttgaatctggaaaggacgtccatttccaagttgccaaaatcttcgtgcanactataccacttgctagtactcaaaatgaacaaaaaggtgcccaaaacattgccaaagaaagcaaacaatctcatcagtttgaggcgcatcaacggccctttgaaagacgtatgtaatgtcgggatgcttacttctcttgaagatatgacagaattccaagtgaagaaagagaagggatatgatatacgtcagcta

SEQ ID NO: 66276 - DNA, 380 bp, Oryza sativa
agcttttcgataacctcgcattggcagtacccgctccatgaactttacatccttatgcactctaggcgtacacggtttctagcagtgagaggagttctggcgcacccgggaaggaaagactcacacatgcattaagttataattatgtttaatttttctcgtggcagtcctaccgatggcgacaccactgtagacacccgcctcgcggttctactaatggctgccccaccgtagagcccctgcctcatacatcaagaaaccactatgcatggatactgcctccgctcggctatctaatccgctaggtctatacccattcgagaagtaccgttgtacgggggtcgtttcatgcttaacttcatggctcggtccttaattga

SEQ ID NO: 66277 - DNA, 467 bp, Oryza sativa
  unsure (1)..(467): unsure at all n locations
gggtgtacaagcgggagaggngctcacacagggagaatttggttgtggtggtggtggtggtggtcacatccgctgcactcgagtgcgtcccgtaccaaccaaacacgtccgctgtcatgggtggcaatctattgggcgatcgattagtttatgcttaacactaattgcactgctcccacaccttaatcgatcttaattaatcgctaacctttatgtcatgtctagctagtgcaattagagtaacctatatatcacacaaactaactacgtgcgcttaggattagtgataatggaatctgataagttgttaattaattaaaccattgtttgtggattgtggaactggatttgttaagaaaaagaanaagactttgatagtgaatatatatgttgtatgtgtgtgtatatcctagttctctgtgggctaaccagtgtgtccacctagatatcaagcacaggaaagaatc

SEQ ID NO: 66278 - DNA, 432 bp, Oryza sativa
  unsure (1)..(432): unsure at all n locations
agcttgttaatttataatcagccagaagtaacaagaatatgcgagtggcactttgtggtgaaaagtgatttgtcatggaaaccgtttaatacgtcgtagatataaaggtgtaaattacttcagacttatttgtacatcaaccgaccatgaatacaaaagtcaagtttggaaacattgcttttttgctatgccggccggaccagcgctacaatttagctatggtactttcaattaataagctagctaatactaatttatacacaaataatactaccatcacacttattagaatatatggcactaaatgcaatcaacaaccataatccaaaagttttcatgaattttaccagtgaaataattttcggaagtgtttccctgttntatagacatgttntgctcatatatcctttntgcaccccggctgtacctctg

SEQ ID NO: 66279 - DNA, 434 bp, Oryza sativa
taacctcagagttctttcgagatcggcttccggaaaagaagttgcaacttgttaatatgagtattctattaatcctattaagccctaggccgggatgtcacacatgctatatactttgggtgtaaatatgaccacaaaaccctgtaaacaacaacaatagtttaataatacttcggcgcatcgccacccttttcatactatcattgtttcaacgagttcttgctttcgagttgggctgcatcgagttcgatctccaacaaagaggtaaaacttgttatgacggtttgcgttctcgggattagtgcttacatcttcatgacactctaatcttgttcatgtgaatcgctattggtatttcttacgatcacagataaaatccgcaagcgcacggatataccgatgtagcacttcccctacggagtattccaagggta

SEQ ID NO: 66280 - DNA, 390 bp, Oryza sativa
agcttgcccccaagaagcgaagggtttctgcttcgtcggactccgacgccgacgatgaggatgatgccgaagaacgtgacagcgaggaggaaggagatgaacaggaggaggtggaggctgtggctgataacgccgcgggtgaggcggtcgaagaccgcgccgacacccccgggtacactcctaccccaagtcctggtcacaacgaaaccggggtggagtcgaacagctccccccttcgtcggaaggatttggaaggggcgaaggccctagttgcgttctcttcgggcgcggcggcgaagggaggtcctgtcaaaaacgtgcctaaaaaaaatggctcgtcgatgtcgcttcgcgttttagcgacgacgagtcctccgacgggactccgac

SEQ ID NO: 66281 - DNA, 489 bp, Oryza sativa
  unsure (1)..(489): unsure at all n locations
ngcacagatntagccacagacgaccgaagaccaggccaatctaacaactgaagtacccgctgataagtcacattcaccccagaatgcccaccaatggcagctgtgtgcagattgctcaaaatttttaattgcaactctgtattcttgccaatccacatatgattcttataatacagaactccatccttaagatgaaaatcanggattgcctatgcactgaaacttaacacctgcactttgcttagagcatctgcatcatttgcatatccagccacaacctcagatatccattcagaaacacatacagacaaagccgacaattcctcctgaccaggaacaagataacgcgaaagggcatcagcagccttattataaagcccttgtcgatagcatattctgtaccggagtcccaaaagtttagttaacgccttttgctgccatgaggttgntaaccgctgatctgtcaagaaagaanaactacgatgatct

SEQ ID NO: 66282 - DNA, 440 bp, Oryza sativa
cagcttctcatggactggaccaccagaatatattctttttctattgtttagatgggctggaaatcatgatactttggaccataaaggtataaacttctgttccaactagggtgtgctataagctacacctggtttagattcctcagaaatttccagaataaaaaggaaaatttgcaagcaacagtgagtacatgaggttaagaagttatttttttcacaagtagaccagagccaagagatccgagaagcattgaagaatcagagagtatgcatctaatatacatctcacaactattgccatctgttgatattacaaacacaagaattatctttggttcacttaatgcacaatagcatgcaggtcggctgagctttcatgaaacaacatttgaacattcaagatctgaagaaacaaagttaaagtgctgaatcaatgcaag

SEQ ID NO: 66283 - DNA, 483 bp, Oryza sativa
  unsure (1)..(483): unsure at all n locations
actaagcttataaagaccaatgtaaaattcagcaacttctattttctttagaagttgcaactgattntntttctcccaaaagttcaaaatcgaactatccccgagagagaccgaggctgaaagaagccaatctgcccaaaagccgaaacatccccttgtctcaactccgttcctggatgaaacccagcccgcttgtccggcaatgcctcgccgtcaccatcttccactcgaagaacacggctccgcttgctcccgccgccgccgctcaactccacgcgctcctcctcacgtccggccacctcctccgctatcacggcctccatccgctcttcatggtgtattgcgcatgtggccgtccctccagcgcccacaacctgctcgcgcaaatgcnccaaccaccaccggnttctttcttcaactcactgctcccgtcgtacaccggcctcggcttgcaccgggagggcctcgcggttactcggcgat

SEQ ID NO: 66284 - DNA, 432 bp, Oryza sativa
agcttgtttcgcagtcaggaggcggcggttgctcatctggtgcctatgcgtgcgacggtgtgtgtgtaacctagctagggtcagcccataatgctccattgggtcgacccatgatggcccatgaaatttcatgggtaagccaatgaggttgtgaccccatgtttcgtgggctatgtcgttgggtacatgggtttacccggcccacgtgcatccctaggttcgatctagctccaaaagtcaacggtgtcaaacaaggataaacagagaagatatattattaggaataaacgattattgtaaaagttgtaagtaattacattatggatatatgaaaaatatcacacaacagcacgtttacaggggtattaattcgagcctgattttgagtcaaattaaatggaattgtataagagttgatttcatcacaataat

SEQ ID NO: 66285 - DNA, 444 bp, Oryza sativa
  unsure (1)..(444): unsure at all n locations
acctaagttcccgtgacttgctgagtacgaaagttctctcccttgctctatataaatatatatagttcctccgccttgaagtgaagattanggtttcgtcctggttcccagccgtcgcctgtggtgttgggtgttagttcgttggttccgctgctgctgctgttgttggtgtttcctcgtccgtgtcgtcagttgcattctcgggttgttctgagctgcaacctaagttaaggtaaataagtcctctatctattntaaggatttgcaatgattcatatttgtcaccgtgggtaccagcactatgtcctgggactggtaccgagatcgcggtttcgtatgaagcggttcgtgccctttttcctacgacacgctcctatcanagtgccgtgtacggcggtgccggattgtggtgtgacacaccttaacttanataattattctcat

SEQ ID NO: 66286 - DNA, 375 bp, Oryza sativa
agcttgtctgtgagccagtagtggtggtcgactatccagcggcggcgacgaacgagccggtggtgaaagggacagtggcggccaacgagcccacggtgagggaaggcatcgtgtcaccaacccggcttgtctgaccggagagaggagacgacctaaagaggggggcagcccatgggagagaggggacggccacggtggagaggccctctaaccgaagcatccacaacgaaggggtagatggggaaaattaatatgtgttcgtttggctggggcacgggttgggttctgcactgtgggctgtgttacctcatcagtaacttgatccagttaaaccacacaaccagcggtgcttgactatgggatgggtgtctttgg

SEQ ID NO: 66287 - DNA, 304 bp, Oryza sativa
ctatgctgattaaatgttcaatggttcagtataatagaatcgaagtcagactagaagtagaattgtaacataatacacctcccttaaataattgggataatggcaccctcccaatggcaaataaatactactaaatagaacagtcgataccttcatatgtgcgctcacatttacactatagaagagccaaggtttggttcatatatgccagcctctgaatattcagaagaataaaaaatgaacaatggggggcactcagatattttggagagtggacagagagatgatagggaactatttatat

SEQ ID NO: 66288 - DNA, 413 bp, Oryza sativa
  unsure (1)..(413): unsure at all n locations
agcttctcctcgtgcttcacatcgncaagcggtcaagcgaataatgaggtattngaatcatacacttgagtttggaatatggtattctacttcatcttctatatgcttaagtggatattccgatgctgattttgaaggttgtagaactgataggaaaagtactagtggaacatgtcattttattggtacatcattgattgcntggncttctaagaaacaatctagtgttgctcaatcaactgctgaatctgaatatgttgctgctgctagttgttgttcacagattctttggcttttatctactttgaaagattatggtcttacttttgaaaaagtacctctctttngtgataatactagtgctatcaatattgctaagaatcctgtcaacactcatgacaaagcacatgata

SEQ ID NO: 66289 - DNA, 463 bp, Oryza sativa
  unsure (1)..(463): unsure at all n locations
cactagttgcatatatactagttgctntggtggaactaaccggtgggtgaaactcttgctattctaacccccgtcgggttagtctgttcttgctccattgtgcagaatgaggagccgattgtctcatctgtccaaggggtccggctcttcatcaagtcatcatgatgagtctagtactcattcatcagctgatgtctcgttggaagacgccgaagctccgcgacgactcctgaacgacaccgacctcgaccttgtctgtgatcgggagagaaaagcctactacatgctgagcaaccgggagtatgctcatacacgagaatactctccggagctgctganaaagatagatatggatgttgaatatcgtgctatttgganagctcgtggttggcagagaattgctgtggtagatgagcctggntctcgttggcttactttgcaatttctatgcactttgaaagaa

SEQ ID NO: 66290 - DNA, 435 bp, Oryza sativa
  unsure (1)..(435): unsure at all n locations
cagctttgagttgaagggaaatccagattatatatttgatattcagtaatcagtgcctcaaaaatatcatcaactccaatttgatgaccaaaaatcctctgcaaaactgataattntacaaccttgatgctacagatcaaataacaggactgaatgtgccctagctccaaatatcacaatataggtggtatgtgttcctatcgggctaacctcacctacttcagggaagaaattggtcagcagccatacttggataatggcagcatgaccgtcgccgtggcctcgcaccgccagtggccggcgcacgcgcaacacaccaggtccttccgctttggtcaccacttgccactctttgcctccattaatgacaccacctcagcgactagccaccataggtttggccccaacaatcacttgaaatgaaagttgagaata

SEQ ID NO: 66291 - DNA, 487 bp, Oryza sativa
  unsure (1)..(487): unsure at all n locations
tcagacgaagctgatgatggaacacatgacagcaactactttcttagtcttaagagaggctagacacaatgtccaagtacatggtaccttcacctttcttgcccataatggcaacttggtttctttgaggtacagttggtttcttcatcaagtaggtcataaagtttaatttaattgcaaattgaactactgatcagtagctatcgattacgattagcacccaccaaactgatgttctatatgtgcatctcctcctctgtcagactatcactcttgtaaaaacatatgtgatgaataatacagtgtcatctcagttttattcataagaaagtgcagtgtcatctcaatataagtagatgatcagctagaaatttaagaggaacacatcatttcaccatgatggttaattaatattagtatgtgatctcgcgacacgttatcttgtggacgtacgggacgaaccacggtgtcttattngatctctaac

SEQ ID NO: 66292 - DNA, 436 bp, Oryza sativa
  unsure (1)..(436): unsure at all n locations
agcttctactctatttacttcgtaagttggtaaggtatctagttgtggcaaggtcagtaacaaagtttgagtaagtaatgacctaaatggtagttcatgatgtattaggcgaccaagcgttcatcactgaacaaaccaacatggataatttacagtgtagtttattatgggagcttgttgctgatgtcctggtcttacagaatcaatgcaacttaagcaaaagaaaaaactaggaagtgcctccacatatttttttcactaataagaatttctaccgtggttctttgtttgttttaacatgttagcagcattattcatcatttcgtctgtacgattgtacatganagttggttacttagtttatgcgcctatacgcaatagttcccttttgttaacttccatttctaatttgcccggatgcaacttagtttactat

SEQ ID NO: 66293 - DNA, 427 bp, Oryza sativa
  unsure (1)..(427): unsure at all n locations
tctcagcttctgccttcgagcttataagncattatctggattctatatctacaacttctcagaatctgtaccaaaacatagactatttaatggagcttttggttatgggagaagttgcaacagctagaaacttccccaaacatactctctatagggctataccttgcgttttctaattgtactacgagttgaattggcaaaaacgcgacgaatcttctgtgcttcaagggctcgtntggattgaagccaaaatgcgctctaccaaaattttggtaactttgaatagtaaacatgctagtttgaattgaaaccaaacaattggtaatgcccatactcaattagatcacattctagaaacttactcaccatactaaactctcggctaatatnggtatcagaccaaacatgggctatcctactttaccct

SEQ ID NO: 66294 - DNA, 419 bp, Oryza sativa
  unsure (1)..(419): unsure at all n locations
agctnttaataatatggccgtgatctgtcattacgtgcgactatctccactatagaaagaaaaataagaaaggatcaaattttctagtatttactagaaaagggggctttctacatagggatcgtcaaaacaacgattttgccctatcagctgtaggaagaaaggacacttcacgagaatcaaaataggaagaaagaaagtatggcctatactactctatggatagagttctcaaattgatagagaaagcaccgtaaagatcaattagtgaccgactgggtcgatacaactaanaaaaactgcttacttatcccatgatatggggcaaaatttaagaatccgcttatgtaatagagccgatccactaagggattaagcagcggtgtagtatcagatcccacagatagtaagttcttttt

SEQ ID NO: 66295 - DNA, 426 bp, Oryza sativa
  unsure (1)..(426): unsure at all n locations
cttggcttcgtctgctgacataaaaacatccctttccatgtcttcggatacaacccanaaaggcttgcctgttcttagtgcataaacccttgtgatcatttcgcgaactttgtgtaactcttccacttctagtaaaaattctggtgttcttgcccgataataagcactagcaggttggtgaagcataatcctcgcgtgggggaatgctatacgctnggtgggttctcctccaagcagaatgaaggacgccatggacgcggctattccgaggcatattgtatatatatctggtgtcaccgtttgcatcgtatcaaaaatcgccattcctgagattataccacccgccggggagtttataaacaaaaaaatatcgctaattccatcttctatactgagatataccatgagacctgtaatatgattcgt

SEQ ID NO: 66296 - DNA, 401 bp, Oryza sativa
  unsure (1)..(401): unsure at all n locations
agctntgagcttcctcgcgttgatcggctgatgagctgccgctgttcgtgggcttccaaacgtccaccgtctgcctgctgttaacgaggcaacgctaggtagcttgcgacaagggcaatgtacgtacgtagtacatccgcggtgggcaccgaatcgctgatcgatcgggcagggcaggcaggtgctagtgcagtgcggatcccctcgatcggtcgagccagccgatcgatccccctcatcacccggaccccccctcacgctcccatccacgcgtgcaccacctggtcccgccccgaacacccaactcccgtgcacgtaggcccagctcattccccttgccgccccgctgctcgcgcacgtctcgcctctcttccgcccgcctcgtgacaaaaactactact

SEQ ID NO: 66297 - DNA, 488 bp, Oryza sativa
  unsure (1)..(488): unsure at all n locations
tccctaganattntcacttgttactatgcacatggtctataaagcttccctagaaattttcaaaagcttccctaaaaatttcctctccctcctccccttccctcttcctcaagtctcccgcgcaccacaagcctagcccaacactagcctcctctctctcccctcaacccagatcagcaacggcccgatcccctctccttaactcacgcaaggccgtcggcacacgcccaacatgcatgcatgcaccacctctcgcgcgggtccatatgttagcgaccgtgctccccacagaaccacctgtcaagcccactctctcctcccatcttactctcttttatgatccctttccttccctctcttctctcgattcttttcttttccatccttcccgctcaacgtcttacgcgcgtnncatcctncatatcgagcccctaaaccgacaccattaccttttcacgatggccgctcatgtcaggcgctatcactct

SEQ ID NO: 66298 - DNA, 436 bp, Oryza sativa
agcttgtgaagcatgcccttgataattcataatagtaagaggaagaagaacacacctgagtcttttgcttcataattatcttgtcgataaaaatctattctcatacagattttaaaagaagaaattatagtacaaaaatccgaagaggactaaatccgtatatactccctctgtttttaatagatggtgtcactgactcttgaacatatgtttgatcatttgtttattcaaaaaattcatgtaaatgtataagatataaatcttgcttaaaatactttgagtgataaaacaacttaaaaaataaattataattacataaattttttaataagacaaatagttaaacgtttgataaaaaatcaacggcattatctattaacagccgaaggtagtatgtttcattggaagttaccaggatatatctgttctgactcat

SEQ ID NO: 66299 - DNA, 479 bp, Oryza sativa
  unsure (1)..(479): unsure at all n locations
ntctgactntngtttcctgttaggaggaaggtccatttcaacctgattagtagtgcacggctcaatctctgataagttatttagatgattcccgcctatattaagtcatggctcaatcatacttcaaaattatctagtaaaagtaaaaaatattaactacaataactatgagcaggagaatatcccttttttataggaaaaaaagaatcaactacaggcatggggtttactctcgagggcgagaagcccanagtgagctcanggcacggaggcgattatggtactctccaatggccaagaaacatcgagctgcctgcctgactgtcagaatcctgtgcatctgatggatagtctgctgcctcanattatcagcctggaaatccaatgtggtgcacattatgcagtggttaagttccttatacttccaaaaattccatcacatcanatgtttggatacatgcatagagcattaaatgtgg

SEQ ID NO: 66300 - DNA, 433 bp, Oryza sativa
  unsure (1)..(433): unsure at all n locations
agcttatatgattacaataataaataacacaaaatcaactctaaaattaaattttaaaaatataattntgtttacgtttgatatggcatacccgccacggcaggttccctcccaaggacctagtagaccatcgtgaattcgtgattgagtcggagtcccagcatcctaggggccagtagcagttgccactccctcccgacgatgacccanagcccgaccgaccacgcctctgagctcattgcttagcccccggtatcgattcggctgcgccctgagttcccctccacattntaattttaattgcatccataattttccgtgaacaattttgactatctatcttattcgtaaagcatttgaaaanttgaaaaacataagtcacatatacagtactcactttatctacttttgatatctatatttntaaatatga

SEQ ID NO: 66301 - DNA, 440 bp, Oryza sativa
  unsure (1)..(440): unsure at all n locations
cacaagagtttctcggatctgttttagtttcatggatctgcttgacttgctaaaggacttgctaccagaggggaacaaaatgccaagacgacttatgatgcaaagcaagtgttatgcccattagaggctggaggttaattagaagaattcacgtatgttgaaatgacatattgtagtacaaataatacaccaactctgatgcgtgttctgtatctgctatttctcaatacaaatgaaataatggtagtgctgaaggtaagaagttaaagatgattagtctcgctaaggttgtttggtatctccctattaccgatcacatcaagaaaatgtttgccaatcctacggaggttgagttagtttggtggcataaaagataggttgatgtaagctaatatactntgacanatcaacgtagtcgaggaatattgataggatatact

SEQ ID NO: 66302 - DNA, 429 bp, Oryza sativa
  unsure (1)..(429): unsure at all n locations
agcttaacatatgctagtttaacagtttatatacctgaccatcatgaagagttgtttgctcactcacacaaaatcacaccgtttcaattcagtttttgaaattgctctgaaatctgtaaatgaaagaaggctttgttaattgtaacctgtaagcaggagccaggagcaaaaaaacagacatggacataacatcaagattgaaaactaaacatggtaaaaacgtgaaaggcatgtgtaaaccatttctttttcagatgctttgagaaagtactaatatagcaagaccatgactcattgattcagtatctacttgactacttactacctctgnttcagaatgtaagacttctagcattgcccacatatatagatgtctatatgtatgtgggcaatgctacaaagtcctacattgtgaaacggaggaagtat

SEQ ID NO: 66303 - DNA, 443 bp, Oryza sativa
  unsure (1)..(443): unsure at all n locations
ntctattgctcctagtgcccattgcaagactcttattttttctccttgngcacatagctgggctatcaggagtaccagaacgtgatggctttccctttgttttgctcttcgccttttttggtgcaacggtaggtgttttatctccaatacatggcaaggctacaacatgttagatggctcaggttgattatagccagtaagtgatcttgatctagaaaagagagttgagaataaattgtatagaacaacataatgccagcaaattgacataattgatctatgtctcttgatctaattacttacctaattgatatacttgaacatgagctatngntccatgtactattgtcctcagtgaaatgaaagttttgactgtggaaaatataatgttatatacctaactgatctacaatcatgtagaatgaaattaagaaatttgctaa

SEQ ID NO: 66304 - DNA, 422 bp, Oryza sativa
  unsure (1)..(422): unsure at all n locations
agncttcaaggataaaagtagataaacaaccatttgatcctccatcaaagtccgaattgaaacctttacacactattgggtgtaaacaaatagtacgaccctctactaaagtgggttggaaagccggtatgcctaatcaattcaagatagatgctctattcaacagtacaggattttccctcattacttcttgaagtatttcccatacaatgggttctttttcccgaattttcttttcagagggttagaagtagcacgttaggtgtgtacctgcgagacatcaatggcatgtgcaatccagatttctgatttggactcttcttgaccctcaagcatgcactanggttgccagccgctggcgacgatccanatggagccttcagctttgcgcgcagtgtgggcaacgacgcctanggtgatct

SEQ ID NO: 66305 - DNA, 500 bp, Oryza sativa
  unsure (1)..(500): unsure at all n locations
ctaagcttctcacctnctgcgtacgcttcctgcttggttcctgcactcttccttcctctcctcttttatgcagattttcctcctttcgcagaggaaatgttcatcatttctctgatgtggctgtggactttgtagttcatcaatcggagcgtcttttgaaaaaatgtttgtcatttctctggacgtccatgccaaaccctagcctcaacggtggagatgggggttcggccgaaccatggngtggcccaatccagcccatttttggctagcgaccttctggacttcttcttttcacagactagtgaatattggctcaattgatcgtgacatttctgacatttctgagttcttggcccattcatacataagtctgattctcgacatcgtccgattgatctatcgttngatttgataccgattctcctccactctatgtttattctcagcaaaagggtagtaaacctaatactagtggaatattattattctaacacagatat

SEQ ID NO: 66306 - DNA, 366 bp, Oryza sativa
  unsure (1)..(366): unsure at all n locations
gtcgcttggtgctgcgagcacgtacacacccgtgtacatgccagcatttgcgtggtaaaattgccaccgtcaaaccacgcatctgcagcgcgtacaccatgtttaataaattcagcgtggctccgatcgctgttaattgtatatatannatctgctagctgcacgtactggttgttagtccttcctgggtacatgatcatatcacatagtcaaagccacgcggctctctgataactaatcaaacagaggtactgctgattacttagctggactctggaaaagggagatcggttgatcatggatcacattggcttactagaattgttacgggctaagtaaagatggggcgggcatgctagccgggaa

SEQ ID NO: 66307 - DNA, 449 bp, Oryza sativa
agcttgctcagatgtttcattaaccaattaattactatactgcttccatccaaattgtcaatacaacttagatcttcaaaaacacttcgatatttcgtgctaggttgaagagaaaaatttggtgcacaggaaagcaatctcaagggatacacatcatgaaaacacattaaagaatttgttcatcagcacattgggcttcattcttgataagccttctctccaaaatatttgacagagggcaaagaagagaggccgaaagagtcaagaaagatctgtttgccaactttaaaatctgaactaatcggtaaacctccaacatgcaaacccaaaacaatatgaactgattctttggaaagtggaatgactttatctctaacgatgatatcacaagaggtgacatcaactctttgtgccacccataaagcaaatttatatggcacgggacattt

SEQ ID NO: 66308 - DNA, 471 bp, Oryza sativa
  unsure (1)..(471): unsure at all n locations
ngatgctntatgattccacaacaagctggaacagaatgattgttgaattctaaaanaggctaataatcatcaagagaatgtcacaggctagcatagctaaccttgtgtcttttttctctatctttatatttcctacaccaaactcatggttgcatgattaagtttggttggtgcaaacatttgcttaaatagcaccacacgcccaacatttgatcatctcttgagtacgtcagttcgcagcctgcaaagtttctctgcacanatttcgaaactctgcttaggctcctacgaactagattaggctagatagatggaattttcacgtattaattgagatgcatgtgtttgtatccattttgttgttcgtggcacatttggagcttgccgttctgatttgtgccagatacatcanattggactgtaagcacatatgaacatcatttgatgctttgatgcaacttatgttatttt

SEQ ID NO: 66309 - DNA, 377 bp, Oryza sativa
agcttagggaggagataattaaggaggacaagtcttgaaattaatcctgatgactgcgtttggttcacatccggttcttagagacgcattcgagtaacatagcaagaggaaattgagaaaacatatgtaaaggcgccaactaaaatgggtctttgaggcgagatgatgttccaatttatataaactaaccgaatttcatatgtaactatgcaagtatttcgtttgaatgtagagttgtgcctactataaagcttagacgcactgtatatccttatactcaagtacatgcttataatggctagggatgtaattatcttcctttttctttttacaaaaagtgtagctagttgtttcattggaatgaaccttaatttgtc

SEQ ID NO: 66310 - DNA, 475 bp, Oryza sativa
  unsure (1)..(475): unsure at all n locations
taggacctatgatactcagctatntttaaatattaatntattcctataatcaaatcaataatccacgaaaacaactctaaatttacaatcactggtttggcagcaattggagttttacaggaactggaggtgatagtgcttgaagaactaaaatcatggttgtatgcaatgtctgattttggctatacattcactttggatgtaaatgccggtttaatataaaccattatataaaaaaaatgcaatgtctgattctgcacgagcacatttcttcagaaattgaagtgctaacaagttcaagaaacatatttttttcagtttttgagcttcgagaagtgatccgaaccgaagaaataaataaaaaagctgaaataaaagcacatcatgaacacttattggtgctattatatcttattatatcttacttgtgtacagctgctgtcctgattganggaaagggttatcaagaacagta

SEQ ID NO: 66311 - DNA, 442 bp, Oryza sativa
agcttagggaaaaaaaagggttaacgcatatggacattaccgtatcggagaatccttacggttcgttgccgctgttccttttgagagcgtaagcaattgccaaaccaccggcaagggcagttgccgcaaggatagctggtgagctcctggcttgcacatacgccaccgcccaccacagcatgaagtttgttccacagctcacttcaaacttgtccatcgaaaagctctgcatacagtaaatgaggccgataatctgagaaatatcatatgaagcaatagaaagtgttaccttggtataacaaatctacaaatatataaaggccagacgtaatgataaatcatctggcgagaaggatttcacttgcgttcagtttgagcatcagatggaaaaattccaagcattgcagattggccaaggcttctaatacacatatctgataaa

SEQ ID NO: 66312 - DNA, 465 bp, Oryza sativa
  unsure (1)..(465): unsure at all n locations
tagcttggctagactcattagactacgactgtgagcttattttctaccccatcgttgagtgcacctcttatcacactcaaagaaataaatccaatcaacaaatctatggttgtactatcctattaaaaagagcaattttaccatccaatatttggtatttcgaggtaccacattttacacataaaagtttggtatcttgagataccaaactttacactataggtaccaaaatttacactagaaaatatgccgatgtaccaaatatttgtggtacactatgatttgtggcacctcttatgcactcaagcatacataatatttgtgcacactatgattcanatctggtgggtctgtgggtggaaatatgggatgctccccgttcaaggaatatctctgtatgaaaggttaatcattaattgttacatgaaaagattcttatgtatatagactcgagatatgtatatg

SEQ ID NO: 66313 - DNA, 383 bp, Oryza sativa
  unsure (1)..(383): unsure at all n locations
agcttcgcgtcgtgcttatcccgttcttcttcccagccacatcgggcccttcaccgagttcgccgtccgtctcgccgcggnatggtcggacgcctgtgaggccaccctcgcggtcacgccggtgaacgtgcccgtcgttcgatcgctgttcgagcggcacggtccagccggcgcggggtctgtggcgatagccacctacccgttcccggcggtggacggtctcccggcgggggtcgagatctctttcaaggcggcgcccggggacgcctggcgcatcaacgcggtggccgacgactaggcgctgatgcggccggcgcatgagttccttgtcagggagctccgccctgacgttatcgtcaccgacgcgcactttttctggaacg

SEQ ID NO: 66314 - DNA, 327 bp, Oryza sativa
tacggacctataaaactcagcttacaatagtggttacatggaagagatgttctattgtgaaccaccactggttaagtgtataaagggtatagagactgttaagtgaataaaaggatagagaaaggtatatacatgattttcaaatagagaattcgattgttgacaccaaaacaacattaggatgacctagttgaggtggaatagaaagtgtagtgggagaaagtgtaatatcaattgattttccaaataaagtatttgatggtttgacaccaaaccaaattcctatcccattttccgggaaacttttagaacattttaaacattttt

SEQ ID NO: 66315 - DNA, 325 bp, Oryza sativa
gagagaaaagaagaatctacttcaaccgatatgcccttatgcacggccatacataacatagaaatcacacgtggaaggggtgggcaattagctagagcagcaggtgctgtagcgaaactgattgcaaaagaaggtaaatcggccactttaagattaccatctggggaggtccgtttggtatcccataactgcttatcaacagtcggacaagtgggtaatgttggggtgaaccaaaaaagtttgggtagagccgggtctaagtgttggctatgtaaacgccccgtagtaagaggggtagttatgaaccctgtggaccacccccatg

SEQ ID NO: 66316 - DNA, 431 bp, Oryza sativa
agctttgacactgttctgccatattctttatattccaccttgtcactctgccctctgtacccgcaagaagggtgaatgtctccagcatcgcggtccacagcatctctttctccgaatctgggacaaagctctcatgatctccgcgtgcccttgttcttcgccagtacaccgtactgacaggcacgttatcccccacaacccaaccgctgtgacgtacatagttcttggcggcttctgccggggcactatgacgtccatcttctttcacttccgttatgatgtgccgaccctcaagcttcttctctgcacctcgttgcccgcgtgccctcttctgtctaacggagggttgactaccactagcctccttcttctggtcaaccttcacatccctttccacgtgcccctgctggttactctccgcatacctctcc

SEQ ID NO: 66317 - DNA, 417 bp, Oryza sativa
  unsure (1)..(417): unsure at all n locations
tgttcccgccgtagtagatatcgagtgatactctctctctctcttaactntntatttacacagtttgactattcgtcttattcaaaaaaatttaaaattattatttattttatttgtgacttatttttattatccaaagtactttaatcacaaattnttatttttttatatttatacaattttttttaataaaacgagtggttaaagagtgcanataaaaaatcaaaatcctttatattgtaaggatggagggagtagatagcatgattggttgtggtaacttggttcgtacctacacacacaatgtgaccagttcctaaccagaagtactgactggtgtgaagctntgttaaaaagaatatacttgaaaatgccaaattntatagtaaaaaatggtaagtatgtccttaaaattcg

SEQ ID NO: 66318 - DNA, 417 bp, Oryza sativa
  unsure (1)..(417): unsure at all n locations
agcttgacaaaaacatcactcagtttgtcacaacttaacctcatgatagtgcaagtaagaatattactacaagaatcttgccacaaagtgatgggattgcaaaagagcacacttttattngttcattatgtgttcacataatttgtttcagggatagcgtcaaaggagaggatggaaatcaagacgttcacatacctgctttgctccccaaagtgccaggccggttctactacctatttggcaaaccaatcgaaatgaaaggtatggataatgtcgtcagagataggaaaagtgcaaacgaagtgtatttgcatatcaaatccgaagtagagagcttaatgtcatatctgaagaggaagagggaggaagatccttacagaagcatagcgcagcgtgcagtgtaccaggcatcttggg

SEQ ID NO: 66319 - DNA, 483 bp, Oryza sativa
  unsure (1)..(483): unsure at all n locations
ngtannggttattggtttgctagccaacatacttgcacgatggatctaattntacaccgganaatgggagcttcactttagttnttctttntaattttgatatggaaagctataatgtagaaaatcacactnttaaaaacacaatcccaattgaaaaggcccgaggtacttcaattaagaaaaaaaaaactcgtcaaacttggggtgaggaagaccacgagctggtcccatacatggagaaccgactctttggattaagtcttaacccatgttttgagaccctacccttacacgagagcacgttctttataggtcgattcttaatccatgtttttggaacccgtgagtgactttttntttacacaagaccaggaattgagccatagttagaaacttcccactgcaangcatntatcatcatgctacaagcatgttcggacttagcaataatanagtgtaaatgtgtaaagaacatgtactaac

SEQ ID NO: 66320 - DNA, 433 bp, Oryza sativa
  unsure (1)..(433): unsure at all n locations
ncaacttacgtcgacgacattgtctgaaaaagccgtattgttttcgaccatgcgatcgacctgcaggagacattcgacagcttgcgcacagcaggcataaagctgaatctggagaagtgcgttttcagcgtccccgcaagcaagttgttgggcttccttgtttccgaaagaggcattgacgcgaatcccgagaaaatcgatgctatccagcaaatgaagcctccatcaagcgtacatgaagtacaaaagcttgctggccgaatgcggcactcattcgattcctctcaaaggcagccgaaagaggtttgcccttcttaagacnctccggggcgcaggagagtttaattggacaccagagtgcccagtatcattcgacgaactaaagctatacttgctaacgccaccagctctgaaaggcctaccccagaagcaa

SEQ ID NO: 66321 - DNA, 254 bp, Oryza sativa
  unsure (1)..(254): unsure at all n locations
aatataagggcaacccaaatatgctcggaacgtaaccttagaattgacgatagtgacttcctaacccaaccgatagtcctagactcgcaaagcttggacatcatcctatggatggatcggttggctaagcacacangacagatagattatgccgaaaggtccatcaccttgcagtgacctaaagaaagcaagtctgcttcaccactaacacccctaccgcaagtcggnctattctaacctatttacaaatcacc

SEQ ID NO: 66322 - DNA, 355 bp, Oryza sativa
ctgatgaggttcggttataattcaggccccacccttatatacgaaaagaaaatcctatagatcagggtttcactaattcttctacttcactaaattttggcttggaacctacatataaattcaatttgagcactcatatattcattctctggtggttaccgggaattaataagttgattttttttctaaaagactatttatgccttaatatgcagcgcgcgtgcatatatctaaatattgaaaacacttaaactgagtgatttctataatctatgcatattttcccgatattttattagttatatgttcagatactatttgaagagaataaacttgcagaatccgaaagaaaatc

SEQ ID NO: 66323 - DNA, 462 bp, Oryza sativa
  unsure (1)..(462): unsure at all n locations
ntgctagggtgtgtctagttcacgccacaattagaagtttggctgtaattgaaacgatgtgatggaaaagtcggaagtctatgtgtgtagaanagttctaatgtgatggaaaagctaaaagcttaatgaaaaattttagaactaaactcgggctacggtttgcgacattgacaggctatgtggctaggagtatcgttatactgatcgcgttgtgtacgtcaggatcgtgtaaatgtcaggggtgacattgacatgtactattatctactgtatagctagcaaacccatgagttaatacttcccagctcgtcgcatgatgtcatttcgttacaatgagtctctactgtacatcaatcgaccacttacgcgaagctaatctgcctaacgataaatataatatctggactagccgtatatgaataacactgctctatatcgtcaattaaacaagcgggcctgatc

SEQ ID NO: 66324 - DNA, 428 bp, Oryza sativa
  unsure (1)..(428): unsure at all n locations
agcttgttcggtttttctcgacgtacaagctgaaatctgtgcctgcaaagagcgtggaattcaatgcacttcttcaactcgcgatgtctaatgtcccattcacaagcaaagacccatgacctctcatgctgcaaggtccttctcagcaccatgagtacgtcacctcctaaggtccagccagcacaaatctctcctatagatgcggacaaggaacagggagcggcgactatttcagatcaattcgtcggcgtaatcgacatcgatccccacgagccatctgtcttacttttgctcgaagaccaagcctcatcaccgacaagtacaccacacgacgtgtacgctatcggtggaaccaacacatcttgaggcatgtgaatggangatcaattattacgctaccccacacatcagaactttaacgcgatact

SEQ ID NO: 66325 - DNA, 354 bp, Oryza sativa
  unsure (1)..(354): unsure at all n locations
agcttagattatattagctgttggtgtgctgttgtagttgtggttatcgctcagctcttcctgattaacggagcactataaagtttggtccttaatatgggacaccttcttaatataaaaccttagcaatgacttgatcgttcgagaaaaaaaaattaaatgcagaacataaattggtaaggcgtaccctgttcgtttcttacgtaaggagaggattaaattttgaataccgtgacatgcttttcaaactgctaaacggtaccgttcgtgtgataactntctatatgaaagtcgctttaaatatcaaactaatctactttttaagtcaatcagatcacaatcaattatcacact

SEQ ID NO: 66326 - DNA, 407 bp, Oryza sativa
  unsure (1)..(407): unsure at all n locations
agcttggnggctggctgcagcaagtgcaactgatcctgctgggggaccagcgccacgcaccatatgaatggtatgatctgtttcaacacctaccaaatataaggagtgtgagaagcaagaaaagaattatgcttgataagtcagaaatttgaacagcgggccagcatatctacataaacaaagaatattccaatatctgatgtaatcatatacaagagaattacaaatgaaaacttctaaagaattcacatgtgagagactaaagaagatagtgcatcggatgactatgccataaatcctcatttatggcatggtaacatacttagcgtgcncaatattttgtattacatgaagaattactggtactctctcatagaggtaacaattttccagaagatgttttcttt

SEQ ID NO: 66327 - DNA, 418 bp, Oryza sativa
  unsure (1)..(418): unsure at all n locations
tgccgcttaagattaagatcttcatgtggtacttacttataggggttgtgttaaccaaagacaatatagcaagacgaaatcggaatggtagtttaagatgttgttttttaataaaaaatgagaatattcaacatcttttcatggattgccatttatgcaaactttataggagagcaatacaatantccttttggtctttgccctcctagtagtatatcacatatttttgatggttggtttgggggtggacaagataaggagtaagcttatacttgtgggagcctctgcaatatgttaagctttgnggttgagcatgaataatttggtttttgacaaataaccatctattacatatatgcaggtatatttcagggcaacattattgctccggtgttgcgctcagttacaaaggtgtgat

SEQ ID NO: 66328 - DNA, 476 bp, Oryza sativa
tattatgcacattcgaattgctagctagctcgtcgaatattccaaagtgcgagcgatcggctagctgctgcaagaagccttgaccatggaggccagacaccgtgtgatgtcgctgctgctggtgctggtgatcagctgctgcgcctgtggctgccgtcctggcgcggcgcatgtgcccgtcccggcgaggacggacaaggttcgtgtaccgtgggaaggcgccggcgctgggggagacggtggtggtggaggcgtacttctaccccgtctgcccggacagccgcgacgcgtggccggagctgaagaatgcggtcgagcactacgcctcgcgggtgaccgtcgtcgtgcacctcttcccactaccgcgagtatacctacatgttgatatatacctaccgtcactatatgctatatgcaaaattcttgtgggacaaaatctcatattattgcgaataatgcttagtatctataaatat

SEQ ID NO: 66329 - DNA, 437 bp, Oryza sativa
  unsure (1)..(437): unsure at all n locations
agcttgattaaggaatcagctcagcatagtgaaaagtatagcacattgcaagccttaacaagcaacagccaaaattatgcatatgttccggagtaattacaatatacttgggcatatacattacttaactgccactttcaaggttggatggaccaattgataattcggtcaaaaatattcaaccaaaataggttcagttaagaatctagcctatcatgaagctctaatagtcaattgaaacagatatcaggaaaaacgagctattctcaatcatcaaatgaaacaagcaaatcgagactctacattgatccggcgatagcgattagctacactacagcagttggaatggtagaagacaactaatctgcatataaataaataaatgctctatcattntagtatggctctgtaccaaatttcagtctacaatcaccaaa

SEQ ID NO: 66330 - DNA, 477 bp, Oryza sativa
  unsure (1)..(477): unsure at all n locations
cttcatttgtcaatgtgcgtacataactgaagcagatatgtctaccaaagagatggaaaagtccagcaggatcgagcaatcaattttcaggtttaatggattatatattcaggacattttcgtgagataggcgccagctttgggggctatttatatatatatatatatggtttcatacatttccactaaataagttaggtacggcattgttatttctccgaaataggctctttcaaaatagagcaattttacggtccttaagaaggtaccatgaggtaccacttttttctattgtaaatttggtacctcttgatatctatgtactattaggtaccaaattttacactcgaattttttttgtaccttatggtacctcctgaaggaccgtagaattgctcatggtcctcattgctcncatgttacctattttaaagaaagtaattnnttgtagaanaataagttattctaacccaaaca

SEQ ID NO: 66331 - DNA, 424 bp, Oryza sativa
  unsure (1)..(424): unsure at all n locations
agctngatcatgatccttttccggtgaacataattaattttgatgataagaaggtattgattctgccggagcaagccgaatctacaaaggggaaaggaatggtcattggagagcctangccaaaaatgatggtgccaaagaatccggaggttggtgtttgcaaggaaaataggagtgaagcttcaacttctagagttcctaagaagactaaggtgaccttcaatatgcttttggagaagtatgagaagcaaggcggtgagagagatcgcaacaaaggaaaaagaccaagatcacctcctagggagcgatttggtcattgaccaagacggtcggaatcaccttcatatcatcattctcaagacatgtcatgggggccttacccaatagccgcgccgggttatccttatccttactacatgccatg

SEQ ID NO: 66332 - DNA, 461 bp, Oryza sativa
  unsure (1)..(461): unsure at all n locations
ngactngccactcctncaaaccttaatgctaagcacactaatggccaatattgcaaggccaggtgcaacaccgaaagttagacttacggtactcctccaaaacagaaatccaacaaggcccatggaaaataaaattccacctgaatttgaacaattaaatgttagtaggactcattattataaaatagaaaaaggtcttattagcctcctagaacactatgatcagtctatttaacctcttgaagtatgaaactgagcattcctagggtatgaaaacaggtttaaataacccccccctccctatagtggttntggaggtgctttcaccatagtggtagcagacgtgctaatgatgtactcactcacttgtgttggctctggttacaatgactaacggtcgtggtgcagccacagcgaaggtatagctaacgataagatggagtcacaatcatcgatgacat

SEQ ID NO: 66333 - DNA, 411 bp, Oryza sativa
  unsure (1)..(411): unsure at all n locations
ctcgaccccgatcctctgagtcacctgctgcatgcaagcttacaacagtaaaagtacatgtttattacaaatctaagtccagagaagcaagttactatccagtccattctgaattcgatggtacaaggcagaatggagcaataggaggctgaggtcctacgggaaggctcaatttgcagagcgtttaccttgtgaaggcgggaaagggcggtgtttgatggtgaacgcgtcggagttatgcttgagcacctccctccacagccaggagcactggctggggtccgtctcgacgttgtccgcctccgtgaagcccctgcagcatggcacgagctaaatgagcagcgtggaggcgtgcggagaactgaacggaatgggggggattgngtactcacaagtgggatacctccgtgt

SEQ ID NO: 66334 - DNA, 125 bp, Oryza sativa
tagaaacatcggccgcttgccagcccttctggctgcatctatagcttctggaggtaagcgtatttgggggaaagagtacatagctcctgcaacaacataattggaagagcattattagagaagct

SEQ ID NO: 66335 - DNA, 408 bp, Oryza sativa
agcctctgacagattgcgttctcatttatgcccacaggccaatcatgtgacatgaatatatctataggctcctctacatgcattaacttgagaacatcataatgccttacatggcacactgaccttatagcgctttcaatgtatgggggcctctcatagtgccctgcataagatgcaataagttcaatatactctattcatagcttattggagtatactattgccgcttacgacgctttttcattacgcttccactttctaaacaatatgttctacatataaaagttgaaaaatattacaaggtatcccaagaaaatatgaataaacttgcctaacggataaagtcgattgctatataatcctgatagcgcaccaatatctatggtttcaaacttaacaacaaccatc

SEQ ID NO: 66336 - DNA, 316 bp, Oryza sativa
  unsure (1)..(316): unsure at all n locations
ggtatcacaatatgaaacccaaggatccaacttcatttctttaaagagaagagccaatacactgggaggtcttaaacttgtaacgaagtcttacttaagtctataaacttgcaaaacgcatatcgagatccctatacttgacttaatgtatcatccggatccaaagcctcgntcgaccgtgtcttacctacgtggaggataacatgggagttttacttactctgtgctttcttatacctttgtttctcctttcttatccctttttttttctacactgtgcctctttcctctgccttatgccgcgatttttttcacc

SEQ ID NO: 66337 - DNA, 419 bp, Oryza sativa
  unsure (1)..(419): unsure at all n locations
agcttaacagctcacaaccagctgttgagtccaccagttggtctattcgagaaagagggaagtgatccttgtggcacgccttgttgaggtcggtgaagtcgacgcacatcctccactttccgttggccttccgcaccttgactaggttggctagccactttgatggtgtacctctctgatgaaaccagccttaagaagtttatcgagctcttcccgtatggtctgcttccaatctggtgcaaatctccgcagtttttgctttactggcttggcatcgggtcgcaccataagtttgtgctcaatcacctccctagggaccccggcatgtcggacggctgccaagcgaatacgtccgcattgtcgcggaggaaggtgatgagcgcgagttcctatntctcgttcagtgatgccccgatctt

SEQ ID NO: 66338 - DNA, 476 bp, Oryza sativa
  unsure (1)..(476): unsure at all n locations
taacagtcagtactcaataggcgaacaggattatatgctctcaacaccactccgaggagtcgagctgatcttgatcccggaaggcgtttttcgcggatttcacgtgaacgattgagaggtgaaaggtcccactcgtatgcgttgcacgcgacggtagcacagtagcacgagcaacggcggattntggtcctgaaaaatttagcccttcctgagctctacttactgcctctcgggccgcgcaccctcggccgcgtcctgcggtctgtcggaagcttgcgtttggcccgcgctaggcctgtgcggatgagctacatgggcctgcgtgaggaagcgagcaataccaaactggaacagtcttggattcatggacagggctcctcttggcccangcactttcgaagagtcatctgggcctcctgtctttccgtaccacagtcaaatgaactcggaataagttaacttaagatccctcacat

SEQ ID NO: 66339 - DNA, 359 bp, Oryza sativa
agcttttcctctcgtctctctgtgatggtgttgagttggtttgagtaaatgcttccagccaggttcaggtggcccctaaacctgcagagaaaaccatcctgataagttaagtcattttcattctggataaataaatttcacttgtgcacatgcaaacagcagaaagatgactgaagaacagtagtgtgctgtttgtactcgctgttttggcatgttttggacaccctctctcaaattaatgcaaatatgcaatgatacgcaactctgttgcgtattcgagagaatagcagtgacaatgttgtggagaaaacccaagtggctagactgagcagtattacagattttagcagtgtccaaat

SEQ ID NO: 66340 - DNA, 488 bp, Oryza sativa
  unsure (1)..(488): unsure at all n locations
tcaataaacgccaattggacccggtccaactaaagaccaattgtgctcggcccaactaanaaccaattgggccctctagctgaggaggtctagatgtacgtggacctccgttgctgggctggatcagatcgaagtcaattgtatgcatgattattaattgtatgcatggtctgatctggccatatatactangtatgagcaccaaaatgtattcatgcacacggtggtagatacatgaaaaaataacacggatatctaaacaagctggagaaaactataacccctcttctcatatatgtatggcaaaaaagttttagtgaagccttcgtgtggtacttctcatgatcctagcgctaacagtagaggctcgagccccgccatctcatggtagatccgcacctgcatacacatttgcacatcctggatttcgtcttaggaattataaattatttaataaattattattggaattatattacatgttatta

SEQ ID NO: 66341 - DNA, 427 bp, Oryza sativa
attgagaatctcgggtctactcttgttgacatgaagaataaattatactccaagaggtccctacaaaccaaacaaggtgatactggaggagtgttagaatatatggagaagaaagcatcaaaaagatgtcaagtctttttattctattcacgttgatgaggatgacttaattacaaacattttctgtgctgactctaaaatggttgccgactatgaaaattctggtgatgttgtatgctttgacacaacatatacaaagttggatgacggacgaccttttggtttgcttgtaggagtgaataatcataagaagactactgcttttggtgctgctcttctatatgatgagaccgctaatagttttgtttggttatttaaaacttttctaaatattatgtcatgaaagaagcccaaaacaattttgaca

SEQ ID NO: 66342 - DNA, 484 bp, Oryza sativa
  unsure (1)..(484): unsure at all n locations
ctgggtcgacatctaatcttggcnactgcatgcattgaagtatatattatattagtatcataaatatgtgaagctgtctagtacatagtatagagacttacatcctccgcgttagtcttgtacctcacattaaccctaaggaattcgcacgcataatacttgcaacggaccagtcctcgcagatgctggtgacacttcaggacgtatcatagaagaaaatagttaaaatttgcaattagtgaaacaattggaatacattaagtgagtggagtattaccggccaatacgtacgtactagcagcttctcccttgttcaggtctgttctccacccttgaacttgtattatttggacgcactgtatggatgtccgaccgcttcacattaaagagaatatttatttataatacacttatatacaaatgcaagagtcataatcactcactactataagattgctagacactctttgtattgcttgtgact

SEQ ID NO: 66343 - DNA, 461 bp, Oryza sativa
  unsure (1)..(461): unsure at all n locations
ngaaacttgggatgaatgcanaatactgatgagagaaagatttgtgttttcatactatagacgtgctctccttgagaaatgggaacatctaaaacaaggtgacaaaactgttagggagtactttcatgattttaaaattggtatcacttatagtggtttacaagaatctaatgagaacacaatgactagaattttcaaaggcttaattcaatattcaggctgggcttgttaatgtgacatataatcatatangccaattgttcatgctcgcttgcattgttgagcgcaaaattttggagaatccaatggagcaagaagatatgcttgtgcctcctatcactgatgttttgcaggaagttcagaaaagtctccaaaatgagaagaacgatatgtttgagatgatacttccatcacttgcgaatgatgagaacgctgatgcagctacattatctgaagaaagt

SEQ ID NO: 66344 - DNA, 402 bp, Oryza sativa
  unsure (1)..(402): unsure at all n locations
agctttctctttgctggaacagatcaatcaataaactagtgggctcatcgggtttctgttcttgacacgtatcgagccgccatgaaagctcagctcgcgagcttcagtttgccatacacggcagcgtcgttctcgaaggatgctagctgctgctgctgctgctgctgctgctgcttgatcagctgcaattatcacctgctggctgctgtgtccgattccttgggttgatatcaattgttgctgctaattgcgctgtttgattctgggcatgcgcgtatgatgatgcggagatggagttgtacgggatggggatcagatttgtttcgctggnttgatcttgctttcgattattaatttgatgtgaacctttctaggctggattggtaggcatagttctcttct

SEQ ID NO: 66345 - DNA, 490 bp, Oryza sativa
  unsure (1)..(490): unsure at all n locations
ntntagcttagaatccactccaaccaaccaatcttcaaacatatgagaaatactattacaatttggaccactctccacaaaaatttagcataatttcaataagaaaattatgcaacgacgtttactcgggttccagttccgtctctagctagattatctttagtaaaaacaacgcctttatgtaaatactgcatcaaaaatcatgattntaagcagcgtctgcaatttccacatagccctattcatctctatgtaaccattattaataactgctccatagcggacgagttatgttcaaagtaatcgtaacaagggccacccgtttcttcattgtcgcacgctggcatccgaacccagactactcattcttgataatgtaggatcaaatcattccccatgcatcctaatcccaggggtcgttcgatcgagctaataggtctaaaatctgtaagctgtgtagcaatatacattgtgtatgtcactctagaat

SEQ ID NO: 66346 - DNA, 241 bp, Oryza sativa
  unsure (1)..(241): unsure at all n locations
ctcataatggggttggtcgtatctatcgtaagtggattatttacctgcatgaaagaaagattggtggcaagcagttgagtgaaaattcaatgaagcatgagactaaatgcacgacagtagtagaattgaattgagaagaatgagagagattgttaaagtanggagcaccttgattattatatagaagttgggaacaaattagggttggtttattcttcttgttgacagaagaatctatcta

SEQ ID NO: 66347 - DNA, 361 bp, Oryza sativa
  unsure (1)..(361): unsure at all n locations
ngacagcatgtagtcgccgttgaggaaagccgtcagctgctccagctcgcgctggaagtccgacagccatcctccgtcttctttcttggtcgacgacgacgaggaagatggcggcgggatctccggcaatgtctccgggcaatccgtccttggctcgtccaggtccgtgaagaggtgctcgaatgtgcccgcccacgcatccctcctggtgaggaagtcggagctgaggttgaatatcttcttgatggtggccgggatggaggagtgctcgtactcggacgtgggcgtttggcctcccggcgggctccccaccaccgtccctttcctgatccacggcgacaccatgatggtgggcaccctg

SEQ ID NO: 66348 - DNA, 432 bp, Oryza sativa
cagcttatgtcagttgtgcctgtctgctgcacataacaagaggagaagtttgggttgagcatccatgcgttggcagtgaaaggtggcttgaacaccatggtgaatccttcgaatgcgttggttgatatgtatggcaagtctggggatgttgacgcatcgatgcatgtgcttgatggaatgctggaacaaaatgaggttttttggaattctgcaataggatgctctcttaatgcacggttttatggtgatgtgctgagaatgtttatgaaaatgtcagatcataatgtcatgccaggttctatcacattgtctagtttgcttcctgcattgggtgagcttggaacgtttgattagggaagggaggtgcatgggtatagcataaagagagcaattgacttggatattcttgttgccaactcactcgttgatatg

SEQ ID NO: 66349 - DNA, 394 bp, Oryza sativa
  unsure (1)..(394): unsure at all n locations
tacccacaatgaaggcgatgacttcttcgacacatactcaccaggtgctcgcttgaccacgatatcagtactacttgctctggcagtctctcatggtcttctcgtccatcagacggacattaacatagctttcctaaacggagagccggaggaggagatctatatggatcacccagacgggtatgtactacaaggtcacgacggaatggtgtgtatactgttgaaatcctggtatggtctcaagcaagcacctaagcaatggcatgataagtttgacaccactcttacatctgcaggctttgctgagaacgaagctgacaactgtgtatactatatctatggtgggggagaaggtgtgatctcgngcttatatgctaatgacctttagatcttt

SEQ ID NO: 66350 - DNA, 418 bp, Oryza sativa
  unsure (1)..(418): unsure at all n locations
agcttgtaaattcccctattatcttatgtaaagaaatcccctttggagccttgttcaactgtatgcaataaagatccagattgttacctgtatcaatcaatcgatctagggcttgataaagtctaaacatactgattttcgaatcattagttctcactttaagaatctattntatctatgacaaaaaaaattcatcatggatcactgaaaattcgtcatagaaatttgtctgtgacgattctacttaccatcatctattgagcgtcacagattaaatctgccgatgttttctccgaaatcgtcacggatcagtacaatctatgacgctttttaaccgtcataaaacgttnttgggctcgtgtagtccagccaggcccgaccttacgtcacatatggttgccacatggtggccaacatg

SEQ ID NO: 66351 - DNA, 481 bp, Oryza sativa
  unsure (1)..(481): unsure at all n locations
ctattatatatgaattaaaactgcaattgttctgatctgtattattacacttaanaagagcaaacaaaaatccttattaagacagccatatcatatgcacatgatatcgaccgtcgactgaccccaaacaagcaacctaaacacacaaactaacaagcagaaactagacaatcgataaactaatgggaaaacgagcctaatgctcggaacggctcctgcggccggtggagtcgaaagcgttctcctgctcgtcacctggtccctctgaacgactcctggagcctgacagatcagtctcgccgctgccactgggagtagcggacaaccaacctccggtaccactggctggacctctggcggctgatgctggagcgaatgaaagagtgaacgcgggagctggagctggaggaactgcgggaactgccggagctgcaggcggaactggatgtgctgcnggagctgctggtggaggtgggtttct

SEQ ID NO: 66352 - DNA, 437 bp, Oryza sativa
  unsure (1)..(437): unsure at all n locations
agctntgcagatagggcaatgagagaatgttgatgaactgaaggcggcctatttacaagaacaagatcaccatcctgcaatagtctataggcaatatcaccaatttccagcttgtttgccttccgaacaaaaataagcttcccatttcgacggacaagcagtacttccttggtaagaaggtgcaagttgcactttaaatttatggtttcaaagttgtaaaaactaacttgctcagaaacaaccaagttcaaagctaaatccgtaggaataccgatttcatttaaattaatttttggatccccaaccattatactcctaaatgcattgtcggatcttttgctgagaatgatgtcttttagccatttggctccatatgtatctggagatgtagggtcttcaccatctgactttcttgagtattactgcaaaatgcacaa

SEQ ID NO: 66353 - DNA, 471 bp, Oryza sativa
  unsure (1)..(471): unsure at all n locations
tgtgagacacacanacaagttcagtgtgcataagaatgctatctaacagaaggcccaagctggccgtcgatcgaagccgtgacaactttctcattaatacagcctcacacaatctaccagcattgaggatcataaaagcgtgttatccagaagaaaaaaacataacaaaagcccatttcgtttaaaagagaagaaaaagaagatcctgcggtgctgtaagacgttccagagcttgtgtgagaatctttaaaagagaaacacagctacttgtagggcaggctttgaatcatttcacggaggagctaaagagcacagtcgccggaagcggaagggaaagactaaggataaagaccaagagaaagatcagcaagaaaggaggaggcgaactgggaggccatggcgccggttggtctccctccaggctntagaattcatccaactgatgaggagctngtgaactactacctcaag

SEQ ID NO: 66354 - DNA, 438 bp, Oryza sativa
  unsure (1)..(438): unsure at all n locations
agcttaatactccctccatcttataaaaactaaacttctagagtttaaattntgttccataaaaaactaacttataccatcctacttaatattagcacgaaaaacgagaagttttattccttcaataccctttaactatctatcactcttactaattttttaatgattaagagcattttagttattcttactctccactaattccaccttgagatgctaggattggattttttatgggatggagagagtagtattagtcttgtagtagtgggctacctatcatatacatattacgtcttatagtttgtgttgcggctgtctacaaatttgtagcatgctgctattttctggcctcatctatcttctcaatatgtgcttatagctagcttataatctgctattataccagctctcaattctctcccttccagtatgggg

SEQ ID NO: 66355 - DNA, 385 bp, Oryza sativa
  unsure (1)..(385): unsure at all n locations
cttgatcagaggaacataagctagcctttttggtggtggttggcccaacttagttgcctttgtggcttgggaatatgtagatgcatcggttggctagtatatgctcctccgtttcaaaatatttgataccgttgactttttagtatgtgtgactattcgtcttattcaaaaaatttaagtaattatttattcttttaatatcatttgattcattggtaaatatactttcatgtacacatatagttttacatatttcacaaattttttttaaataagaagaacggtcaaacatgtgctaaaaagtcaacggtgtcaaacattntgaaatggagggagtactttgcaagcatccttttcttcactgggagtaatatctttacgtctc

SEQ ID NO: 66356 - DNA, 376 bp, Oryza sativa
agcttgagcttaattatatactccctccgtcccaaaaaaaaaggcaaaccctgagtttccgtgtccaactttgacggtccgtcttatatgaaatttttttataattcgttttttattgttgttagatgataaaacatgattaatattttatgcgtgacttgtctttctaatttttttcataatttttttaaataagacggacggtcaaacgttggatacggaatcaggtttgtctttcttttttttttacggagggagtataattgatcgatcggtcacattggaatattcttgctccatttgcagccagcaggttgattgaatagaatatatcatcagttcaactaatccatgtactagtatacacttcttctaa

SEQ ID NO: 66357 - DNA, 507 bp, Oryza sativa
  unsure (1)..(507): unsure at all n locations
gacactatagatactcagctgctgtttancgngatgttgagtatgccgataggggtttttggcctggaaagctcatcagtatcaacttcttcgatctcctgtttaagtcatcaaacaagcaaaaagtctcattaaaatgaacatactcagaaaatactaattcaaccagttgaagcacatgcgtctgatacatttgtagataatgacattgaattagctcatatnctctccattagcacacctattaaactcatgtctaactctttcaatttcctattggcattagcactactgtaactcaaaataatgtacaaatatgtaacaatactaatcatgaggtaaggacatgaacatctcagcatgaaatatattggttgtagaaaaatgatattaaatataaatgaacaatgaaaggctccaatgatgtatggaaactgcaactgaattaatgcatccagagagaattcaatgtaaagtacctgaacaatatctttgtcatagataact

SEQ ID NO: 66358 - DNA, 418 bp, Oryza sativa
  unsure (1)..(418): unsure at all n locations
agcttaagaactacttcctccgtttcacaatgtaagtcattctagcattntctacatttatattgatgttaataaatctcgatagatatattcattctagcattttccacattcatatttatgttaatgaatctagatagatatatgaatgtggaaaatgctagaatgacttacattgtgaaacggagggaatatgtgaatccgccgctctatgcttaattagagggtacaaatctagtgacaagtggtagtggaacaagggcgatggtgccgtgatggccattacaatcgtggcaggtatgctcaagtacttggtattttttaagggtatcagttataataatctgtaacgggtgctaatacctagccgctatagatgaggtttcgacgtcacctattacctctcatctataacggc

SEQ ID NO: 66359 - DNA, 457 bp, Oryza sativa
  unsure (1)..(457): unsure at all n locations
ttggtgacaacagactgcagtanatcagcatctatcacatataanagaggtgataatggatccccttgccttacaccccttttgcaataaaaattccttccaggaaccccatttagaagaactgaagaagatgctgaagaaaagatcaaatcaatccaattcaaccactttgaatcaaaaccttnttgtctcatgatgtccanaatagtagagtgctctatagtatcaaaagctttctcaaagtccaacttcaacagcactatctccctttttgattgttggcactggtgtaagtactcaaaagaccaagagagacaatcctgtattgtcctgcctttgatgaaaccatattgggtttgatggatgagttctgtaattacagactgaagcctatcagcaagaacctttggtaatagcttgagagccacactttggagagaaatcggtccgtagtcat

SEQ ID NO: 66360 - DNA, 458 bp, Oryza sativa
  unsure (1)..(458): unsure at all n locations
agcttacatatacaagacaagaatagaaaattgattgtgttgcttgcacctgatagagatctactatctctcatttgttntccggcctgcagtgcaccatttcttatcattggcatcagtctaatccaaccaatgttgcaatttgctccgtgaaataattagtgacagtacaatatataatggtgcaaagtgcaacatttgcacaaaaaaatatatgatcacaatatgtatagagaactaacaggagaagtctcataaataaatggctcccaaacatgtatgtgccacaacatatcaacaatcagtagtagttagcaccaacaaattaattaacaaaacaaacacgaccttngtatatacaaaagaaacctattaagcaaacggaatatatatagacgaatgatctcgctagctacctaggaagaactaaataatgaagcagtcaacanaaataaatt

SEQ ID NO: 66361 - DNA, 438 bp, Oryza sativa
tataccttttctgctggtgttacccgttgttagggttggggcgtgattacttctctatcaataatataatgaaataagccaaagctagcttctcgatcaattttatttatgtgacgaagatatgtcttaatttcactatgtgcaaaatgttcacgctggttttagatcgtactactacgttaaaaaataaccaaaaaagttagtacgactcagctatagtaatttacggtagcactaaacaacaccctacgtgctactcctactctcacattaagtcataagcgcgccctctcccactctagatcccctcctagtatgaaaaaacctctcaccttacactgattctgtcgctagccccatgcacatgttccatcttcttcctcactctccgcctaacgactgacgtgaaaaagaaatactcgcaccccttccaacgta

SEQ ID NO: 66362 - DNA, 408 bp, Oryza sativa
ggaccttaagcacctgcagctgcagcttgatgctctctagcaagccagcttatattcgcagtgcgtggtgatgaatcctcgccatacgcgttgggcaactgcaccatgagggtgaactgcgttgaatgctgatagagctgtttacacctaaagctagcatttatgtttaaaactggagagaattgtcgcgatttgataatgttactggttttctctacaaggctggtctaaccgccgtgtattggccggtcagaccgttgcttgcagaccggtctgatcggcgtgcccacaagagcctacctagtctaccatattttggtcgcgccatgaaaaaagcgtgtccctcctaacgttatgcagcttgagaaagggaagaagaactctcgcatttctgacacgtatgctcct

SEQ ID NO: 66363 - DNA, 457 bp, Oryza sativa
  unsure (1)..(457): unsure at all n locations
tcatctgccattccatcttgcagctgtgccatgttttccagcaggaatgccatttcaaagaagctactgagttcatgaaatcgtgttctccatcatgggcagcatgctcatccgttatgtatacaattntccacatgatgctctctcgtttgatgctagtaataactaataaccacagaaatagttcttacaaaatcatattcttctttctgtaggctaacccacaactggtggcatgttgctgtttgttacttggaaggtgaattccctacaagtaaagttctggagatatacgatcataacttcatgacagagcttgagaaaagtgattgtgaggcagcagaggtattaatgctggccatttttcctgtacatcaatgttttagagacactgagtaatttctcatgcatcangtgtaccttaatgcactanggctgctactccgtttgcatattc

SEQ ID NO: 66364 - DNA, 206 bp, Oryza sativa
acttccatctagtacttcggctttagtgcctattcccaggaagacttctggaccgtaattgggttcaacttttttacaaactggaataaaaaggaactctgatcacaaactatgcggacggtacgaaaatacatagacttgacgttgacggctactgaatgggtcacccgctcacaatgtgaaccaaattgcgttgctaacagaga

SEQ ID NO: 66365 - DNA, 455 bp, Oryza sativa
  unsure (1)..(455): unsure at all n locations
ntgagctatatctgccaagtccatatcagctccaccgggagaatgatgtactgacaatgccggtccacggggagcctcaattgatagcttagacttgggaggtgtaagctccgtcggtcgacttggacgaggagtcatcttcacaactatgtcttctttgggccattgtatgaatgtcttgcgcgcatcgcccaaagtcatgatttcatcatttgggggcacgggcagcggatagcctgaccaggtgtcctttactgtatcgatggacaccttggcatacccagctagcaggtctgcgccgtggaccttgtctgtaaccgagggcttgaaagccatgccctcagcgacttcaggagcgaaagttgggtggactctcgctagtaggacacactgtgctgcgccctgcataaggtgaaagtttgaatttaatattggaatgtgtaaatgtcttttat

SEQ ID NO: 66366 - DNA, 463 bp, Oryza sativa
  unsure (1)..(463): unsure at all n locations
acctatgatactaagcttaagacanatacattaaatgtataagtgagagatagagatatgttaagaaaattatagctaatcttatagctaatctattatatgtgttgactttaggatgggctaatagtaagaagtggactatattattatccttgctcttacaaagttacgatagttatgggggctgatggccactaaacagcatcttattgatatgcgtgttagtcaaaaggtcattgttaatttaatcgttctttcactaatgaccatagtacaggcaacacgaagcacgttgaaacgtacggtgaaactcaaccaattggtgaaagcagcatccgatccattccatcacttgggaacattcacagccctcagcaacgcagcatgctgaaccgtgaactcgaccaacctatcggcgtcaggcacgacgtccaccacggccgggtgtgcgcagaagcgatct

SEQ ID NO: 66367 - DNA, 456 bp, Oryza sativa
agcttggagtgtgtgtgagaagtgaaggagtgaagtccttaaataggcagatatgacggtgtaactatgcaaattgtcggaaatgccccgcaaccgccatcaagagagcatctggagcatccataccaaaacctagatccaacggtgatcaccagggttcgcaaccagggctaggccagatggcccccagattcggtctgggcctcctcctcactctgccttatccatttctccggtagttgggtccatttactggtgttttgatggagtttaggagcccaactcttgtatggatagaattcttcttcactttagtataaaattcctcccaacttcagtggtttattgcctgtatccaaatatacactaatactcgtggaatatattagaattgaatcctatcactatgttggatgttgtattatctataatttatgtaggtattggcggcataaa

SEQ ID NO: 66368 - DNA, 420 bp, Oryza sativa
  unsure (1)..(420): unsure at all n locations
atatagagaaaacatattttgtacagaaatagtaacattcacaaaacccacagagcacatttcatgatatatattcactagtttcaaaaagtttgttcatttgtcatgagatgcataaataacataacacctgtgacaagtgaaactaagctatttcttgaaggatatactgccaactctaanagataattcagtacttagcattaatacttataaacttctgtcaaaatttggacgatattaccaaaggtacaaaaacaggcatttaagtagacaattcataaacctgtatgaatagtctactcaaacattgttgatagacaattgatacactttggatattacataaagttaaccaaatgaaagaaaatgtgcagaanagagaagaagctaatgaacaaaagacatgaaatagttata

SEQ ID NO: 66369 - DNA, 419 bp, Oryza sativa
  unsure (1)..(419): unsure at all n locations
agctntcagtcatctgtggtgagattggagatataatccatgtnttcttaagacttgtgttgtcagatattgacaatggggatttgttctcactcttgtgcagcctgacatcaagatcatcaagaggaggatcgaggatcttatcagcagggagtacttggagcgtgattcggagaatgcccagacctacaaatacttggcttgatgattggtcctgaggcgacttgctgactgtttgtctgtttactcaccctctggattcctagggcagtgccctgatgttgccaccagtagtctctgtttacttacatccacgcatcagggttgtacactcttttcctgctcaagtgaatgattagaggaaaaacagattatgagaagcagctatggctcggctgtgactgtgaaccacatttaca

SEQ ID NO: 66370 - DNA, 446 bp, Oryza sativa
  unsure (1)..(446): unsure at all n locations
tcgccagctcatcgtcgtccacaagtgaagcccctataaaggcggtggagtcgtcgtcgatccggccgggatcaaggcctgtcgcggaagcggggttcggcttgcgaggtgccatggtgaaaggtgtgcgcggtggcgaaaagggagaacaaccgaaagatctacgaaatcaaggggcgccgtgaaaggaaaaaatggagaatgagagagcgctcgcagtgaaaataatgagagtgcggcggtgaaaaagggaaggggggaatatatagcccacccaagcgacggttcgcctccccgcccaatcataagccgccacatgtcacaagggtaggcgaaacgggaaattcccatcgatcgagccgcacagtgataagcccacaaagggaaagcccatcactgttcatttcggcccaggaaanaataataaaaacggtttcgccgctcac

SEQ ID NO: 66371 - DNA, 451 bp, Oryza sativa
  unsure (1)..(451): unsure at all n locations
agctntcagtcatctgtggtgagaagggagataatatccatgttntcttaagacttgtgttgtcagatattgacaatggggatttgttctcactcttgtgcagcctgacatcaagatcatcaagaggaggatcgaggatcttatcagcagggagtacttggagcgtgattcggagaatgcccaaacctacaaatacttggcttgatgattggtcctgaggcgacttgctgactgtttgtctgtttactcaccctctggattcctagggcagtgccctgatgttgccaccagtagtctctgtttacttacatccacgcatcagggttgtacactcttttcctgctcaagtgaatgattagaggaaaaacagattatgagaagcagctatggctcggctgtgactgtgaaccacatttacatgtttagctttgaccgcccttgctctaccttt

SEQ ID NO: 66372 - DNA, 447 bp, Oryza sativa
tcgccagctcatcgtcgtccacaagtgaagcccctagaaaggcggtggagtcgtcgtcgatccggccgggatcaaggcctgtcgcggaagcggcgttcggcttgcgaggtgccatggtgaaaagtgtgcgcggtggcgaaaagggagaacaaccgaaagatctatgaaatcaaggggcgccgtgaaaggaaaaaatggagaaagagagagcgctcgcactgaaaataatgagagtgcggcggtgaaaaagggaaggggggaatatatagcccacccaagcgacggttcgcctccccgcccaatcataagccgccacatgtcacaagggtaggcgaaacgggaaattcccatcgatcgagccgcacagtgataagcccacaaagggaaagcccatcactgttcatttcggcccaggaaaaaataataaaaacggtttcgccgctcaca

SEQ ID NO: 66373 - DNA, 237 bp, Oryza sativa
  unsure (1)..(237): unsure at all n locations
gaggcacctctcccctctttccccctacntctctctcctagcgcggagtcgggacgagttgccgctatcgacgcgcgccgcttgcttatgctgacggcattaaccgtcgcctaccgcgcngctcggtgccattgtcggcgaacgtataagccgccgacgctcgacatgctttgaagccgagccgatcctagcgggcgcctcgcccctccccccttgtgacgctgactggcgaggccc

SEQ ID NO: 66374 - DNA, 444 bp, Oryza sativa
  unsure (1)..(444): unsure at all n locations
nggatgagccattngaaaaactaggagggatctcttctgatatgttgntacgcgaaagatttagctctatgagtgatgaacttcttgccaaggattcagggatggtaccttcaaggttgtttcttgcaagcagcagactttgcagagaagtgaggttgccgatgcaatcaggcaggaccccagtgagctccatggagctaaggtttatggagacaacttgagctggagatgtcgtgccacatctgacaccattccatctgcagaaatggactgacgtgttccatgagatgaaagcaccggtggggtcggttatgctttgcttgaagcatagtaaagcttgtaaatcggtctctgatctgttgctgggctgcgctgatgaaggtgttattgtgttgcacgataaaaagatgatgaggctgcaaagaagacatgatgcacgatgag

SEQ ID NO: 66375 - DNA, 445 bp, Oryza sativa
tggatgaagccattgaaaaactaggagggatctcttctgatatgttgttacgcgaaagatttagctctatgagtgatgaacttcttgccaaggattcagggatggtaccttcaaggttgtttcttgcaagcagcagactttgcagagaagtgaagttgccgatgcaatcaggcaggaccccagtgagctccatggagctaaggtttatggagacaacttgagctggagatgtcgtgccacatctgacaccattccatctgcagaaatggactgacgtgttccatgagatgaaagcaccggtggggtcggttatgctttgcttgaagcatagtagagcttgtaaatcggtctctgatctgttgctgggctgcgctgatgagggtgttattgtgttgcaggatagaaagatgatgaggctgctaagaagaaatgatgcacgatgaga

SEQ ID NO: 66376 - DNA, 427 bp, Oryza sativa
agcttggagctcagctggtgttcttcctcttctcgttcgagaagatccacgtggtgacccacgaacaaggggtgtgtcaaccgatgtatcatcatacagattaactgatactgttgcggaattccgttatatttaaattcatgatgtgttcgtttggtgtctctattcatgtagcactagccaaacatgatacgttaaagaggctacacatctagtaaatggttataaatcctgcgcacgcaacaagatttggcatgtttgtggcagatggattattgtttagtcacttaaatgggaaaccgcctgtagttatggaaatattataggatatgtctacttaaattcaagatacgggatatggtgcctttgattcggaactactgcaatagctctcctttcttttttttgttagaaccgaagctgccgt

SEQ ID NO: 66377 - DNA, 435 bp, Oryza sativa
  unsure (1)..(435): unsure at all n locations
gcacacccgnttccactattgcanatngatcgaattattatagagaaacggctcggaaaacaaaggctcgcgtacctcgaattctccaaacgcacggagcctctcaagaatctgctccataggagagcagaacacctgcagagaaaaacaaaaaacaaatcaagagattgattagaccatatcataatcatagtcaagaaccagcggcgcgactagaaacctcattcctcaagaaccggccaaatcaatcaataggcagccgcagtaacggcaacaaggcgaatcaaatcaagaaccagaaacgcacggcaacagcacgaatcgatcaaggaaccagagacgtccacacgaaagaacagataattgattagtgaacacaggagagatcgatatggataaaaactgaaggaaaccaaacaaacagtttattctgcg

SEQ ID NO: 66378 - DNA, 400 bp, Oryza sativa
  unsure (1)..(400): unsure at all n locations
agcttcccggccaaatatggatgattatgtatgaataatggttctatgctcagagcaggatcttttgttttccagtactgtcagactgtgatcagtgttagttccttttgtgtttgctggaaacttattttatatggctctatgcaggctaatttagttagctctgtatctatatgcactcctaaatgttttcatcatgaataatgtgtttaaattctggaatgtgctgtgctggaacataagaggcatgaatgctgatacaaaattgttgtctttgaggcaaaagatagaggaaagtggttgtcaggttttctgtgtccaagagaccaaaaaacaaaatttctctttggccgatattaggacttttgctcctaagcactntgatgcgtttgctttctcg

SEQ ID NO: 66379 - DNA, 450 bp, Oryza sativa
  unsure (1)..(450): unsure at all n locations
tctccatgcatttctcatttatatgacccaagcgacaatgctcaataaaagtgtgattcanatcattatgacgttgcctttntgcattaatgttatagactgaacatccatcaagattcacaatgtataagccattcatcatgggtgcatggacatataaaatgtctttataatagactaaacaaccattgtctacagatctaaaaccataaccctctgcttgcaaacaagaagcagagataatgttcttacacaaagctggaatgcaataacaattatttaactccaaaactaatcctaacggtaaagataatggcatagtgccgaccgcaacagcagcaactcttgctctattgcccacgcgaatgtacaattcgcctcttgctaagctcctacttcttttcagcccctgcaacgatttgcatatgtgagcaactgaccccgtatcaa

SEQ ID NO: 66380 - DNA, 352 bp, Oryza sativa
tatcctttggaggtgtccttaccattatcaactggagttgcaccactgccaatagcagtagtctgagtaacatcttgctccaactctgcaggttcctgaaaatagagatggcacggtgtattatcaaaagttcatttgtttagttgataaaaacagaaatgcagagcagcatacctgaggtagctcatcagaaatagtcctttcagaaagattgccatcatccacctgaacattattaactcaatagtaagaatagatgaatccacatcaagagcccatgtggccaattcgttttccagtttcaacgataaggtgctgaaatgacctgcatattaagctatcgtcactactg

SEQ ID NO: 66381 - DNA, 461 bp, Oryza sativa
  unsure (1)..(461): unsure at all n locations
agcttgcctcgttntgctggatgcatttgtttttagatattgaatagttttctttccttgacttgctcacatgactaaagatttgtagtagcgatctcgtccaagcgagcaattagggttcccggtgaccatagcttcttgcaagtaggattgtccaaaaaaggctcgaaggctcccaagcaacacaaagctttgtcggcatcagatttgtgttatagtgatgaagggtgttttggaaaactccttgtaggatcataatcctatattatcatttgaaataaagttttggacaccactgaattctataaaattcctatcaaataccttaatccatacaagttttagaaaaatttaacatgtgatcgaatctcacggagagtttctttgagtatctacctttcctaaaattcttcttttttttatcaaatgggtaattttgtatttntacatgttttacaatt

SEQ ID NO: 66382 - DNA, 457 bp, Oryza sativa
tctgagttaccggttgacccatttgctgggcccacttgggacaaccatgctcaaaccaaatgcaagatcttcctttggacggcgcacaagagacgtatctataccaatgacaggcgggtgcggcgcggactagcaacttccgcgtgatgccccttctgccccatcgacacttctgccccatcgacaaagatgtggaacatctcttccttcgctgctcctgagtggcagccatttggcactcctatggactcgatgaacagcaagtcgcctccctagcacagctcgaagacctatggggcctcccactccctgacaatgctctcacccctcgggtctggtgcactatcttactcgccgtcgtttggaacatctggaaacgccgcaacaacaagatcttcatctccatcgacgaaaccaacacgctagttcttcgtcgctgcgccaacgatatcgagtt

SEQ ID NO: 66383 - DNA, 459 bp, Oryza sativa
  unsure (1)..(459): unsure at all n locations
agctntcctcctcaaatgtgcactacactactaacacctgaagcatatttcaggtcatatatcaccaaactaatcactgattaaaaccctcccgagattgtactctcattctgaatttctaatctatttccattgcgactctgaatttctggccggtgagttgagtgtggccgccacgcgatatgatattatctggcaggaagtcaatacgagtgacgtggacatgcataccacatgagtggctgacagatgggcccagctgagctgcccgaagactctgacgagcacacacacacgttcgtgacgttggttaaaattggtcaaaacaaagagagtatcgatccgtcgcggtcgccttgccctagacgtattactgcatctgcgaatcgatcgaccgtatgaatccgaagaaccgaagcanacatatcatcgacgaaaaggtcaggtcagcaccactca

SEQ ID NO: 66384 - DNA, 447 bp, Oryza sativa
  unsure (1)..(447): unsure at all n locations
actaactcattccgtttgataatttattttgcacggtgagtattatccgtactcagcaagtcaccacagcaacaatgcatattaaaggggtatttcaaaggatggctatggctcttttgcgctaagccagntttgtaattcttttcacaaacctaagaactagcattgactgatcaaatttaataccagtgttgtatttaaacaacgactgttctgtccaccattcattgtgatcccaaggatagcttcccgccattgagtcgttatgtgtttctgaggacgcccaccttcccccttctcaggaagtggctccaacagcataaaaattcgtcatgctacaacccatcccacacaagttaagaatttatagactagcccagtgtaatacatgttctggtgctaataaccgcgagcaccgctattttaatagatttgtttactcacact

SEQ ID NO: 66385 - DNA, 456 bp, Oryza sativa
agctttgcaaattcattgctttattttgctgtttggtgggagtaagggggcatattgctagtcattgctctatttctgctattcttatgcatttgttcgttagacatatctgaagactactaatttggaaggttggctcatgcttgtcttttagtttggtggcattccatatgttagtttattgcataaaggtccactttgccacaaacttgtagactcgtgtccaaccacttgaaccacgtattattgtttggctggttatttattggtattacgctcgtggtatttagtatttgttttgacatctgcattgttgaaagcttcaaacataattccttatgtaagcacaagcattttgtgttttgaaattgtttacaaatataaagcatttctagagtgctatattttctaaaactcgtgtgaatgcttacatttatgatggattctaaaattagt

SEQ ID NO: 66386 - DNA, 422 bp, Oryza sativa
  unsure (1)..(422): unsure at all n locations
acatctgaagtgcttatggtagtgatgcaacttatcatttcaatcctcgtgtaaagtcaaattattagttaatccatgtgtaaagtgaaaacatgtggaggtaccatttattctactccctctgtcccaaaataagtgcaaccatagttttccatgcctaactttgaccattcgtcttatttgaaattnttttgaaaaatattaaaaacataagtcacgagtaaagtattattcatgttttatcatcttataacaacaaaaatgctaattataaaaaaaattcaaataagacggacgatcaaagttgggcgcgaaaactcatggctacacttattttgggacggaggaagtatattttaagcctttgtgcaaatgtagttgtggaaactattacacctcatttgataaatcanaataaattt

SEQ ID NO: 66387 - DNA, 454 bp, Oryza sativa
  unsure (1)..(454): unsure at all n locations
agcttggatctgctntccgaaaaaagatgatttcttatatatgtacagntctcataattatgtggtaattctctttggaacggatctgtactgagttgtgaatcctaaacctgatgatgcagtagtatgtccagatcacatgcataggccataagccaagaacgagtgcagagattccgatcatcatgataagccatgcccatgggaagagcaaagcacctgcataggcaaaattaacacgtagggaggaattgcaagtcagaatctgaggttcaaaaatgggaacatgggacggccaaaattactaagtagtatttgatcatatgctgaaaaggcatttaagttcgtacaacgattttgcattctggaatttacagatacctagtaccgtactctaattccccttttgcaatggacagttgcaatcagtctaaatgaagtgcaagtgacgaac

SEQ ID NO: 66388 - DNA, 337 bp, Oryza sativa
  unsure (1)..(337): unsure at all n locations
ttaaattgtgagcatgacgttcatggtaggttcatttggcattaagataataacattggagttattaacgttgagaaggcgttcttaatggaggaaaatttgatgatataccagtgttttggcacaaaaaaataaatttagatgttttcatatggaaaaaaactcaaaaagagtccatttcactcatccaaactattntaggttcattgagcattaagatatcacattggaattattaatattgagaaggcgttcttaatggatgaaaatttgatgatatactagtggtttggcacaaaataacattagatgtttttcatatgaaaaaaagatcatt

SEQ ID NO: 66389 - DNA, 452 bp, Oryza sativa
agcttgtcaatttcgtagcaaactcacaaagtctccagcataagcactgcaaaccatccctctcacttggccgttctcatgctggaggctcgatatactcggtccattcccacgaggacagggcggctacaaattcctgttcgtggcgatcgacaaattcaccaaatggaccgaagcaacacccacgggggaaatcagggccgataacgccatcaaattcattaaagggatattttgcagatatggattgcctcaccgcatcttaacggataacggctcccagttcatcagcgccgatttccaggattactgcatcggactaggagtcaagatctgcttcgcctcagtttctcaccctcagagcaacggacaggtcgagagggcaaaaggtatagtactacaagggatcaaaacccgagtctacgacagactcatgtcacatgacaagaagt

SEQ ID NO: 66390 - DNA, 455 bp, Oryza sativa
  unsure (1)..(455): unsure at all n locations
ntagccgcataanaaactcttctactgcaaagaaaatatgataaaaactctgcgtgcacagaaaaaaggaaaaaataataccggtgccaacataatcaaacagattttttgttttttactgggagatttttttcctttctctatagagtcggacaagagatgtttttttttactaactacgacggaagcttttcttttttttaatagctcgttaagtcggactttcttttctttctttatttaccttttttgattcggacttttctttctttttttttacgtatataagatgggaatttttttagtagaggtatagattaaaatcaaaacataaaactaaaactgtttcaaacacggatgacgtaccaaaattctggcaaaaacaccttgaacttttataataggtaaagatatacaccctatcttaatttatacatatatttattattaacatg

SEQ ID NO: 66391 - DNA, 452 bp, Oryza sativa
agcttccaacatgcaactcttctcggtatttaacctatatatccttacatatttgaattcgaaatcgaatggtaccagtatatcattttctcaaacataccatattctttccgcgagccataggtcagatgagccgtcgagaaatgccgtaccgttttcatccagtagaacttaggttgagaatagctcatcattgtcctgacgatgccgctccaggcccagtttgggcgaggcgacgttatcgacgtatccgaaagaggaaacccatcgcaagtccaaccgtacgtgcacgagaggctgcacgcgacgtcgcgtcctcgcgttcgtcggcggcgagcggccatctgctccgatgaagccgtgacaactgacaaagacggagggacagcctggcattggttattcatccactcgctctgacgctctccatagatcagggttttaaatatccc

SEQ ID NO: 66392 - DNA, 453 bp, Oryza sativa
  unsure (1)..(453): unsure at all n locations
ggcatatgcacaacatcacattcaattggatcatggtaggagcctatagaaaaaggtattttaaccaagcgggttaccttcatcttaccacatgtattaaaccactgaatatgatagggatgtggatgtggatgggtagtcaagccaagcttcttgaccatctcttcacttgctaaattgttgcaactcccgctatcaataatcattntgacggtatggcctttcacaagaactntgctttggaacaaattgtgacgttggttttgctcttcacacttctctttagcactaagtgctagcttgacaattaggctaggatactgatctagcgactctggatgcaaatggacttcctcgatgtcatcattatcttgtcctcatgcgtggtcagtggcagctaaagcatattcatcatcacaatcactagcagaagtatactcaccatcaacattc

SEQ ID NO: 66393 - DNA, 362 bp, Oryza sativa
agcttacgtaattacgtttcggtttaaagtttacgtaaaggtggagggcgcctccaccctcgccgtccaagtgccagcctgtactataaaaacgcccctccctggaaatttaaaaatccattaataattaataaaaaataaagctcgacgtcgtcggcgtctccctcgccgccgacgagtcatagaggcggcggcggtgccggtaccggccgggcgcgccccggacgtgttcccgccatgcccgacctcaccaaactccctttccctcgcccccgccgccgtcgctgccgcctctgcggcatctgcctcggcaccgcgctcctcgcccttctcgtctactccctcgaccacctcttctcccc

SEQ ID NO: 66394 - DNA, 449 bp, Oryza sativa
  unsure (1)..(449): unsure at all n locations
tgccaggcactngcattctgtatgtgcgatgagtatattctgatgaggctgacttgctcggacctggccgagggagcacattgggaggtggtgctcatggcgctctccgcggcagcaacggcactgctcgtgctcgcagctgcagcagcgatcgatgaccactactcagcgaggcacctcacgtcgtcgtccaattcaaacaaatcagaggctgacttcgactagatttacgccataaaggaaaccgcgagttgttctccgaattgatagggatcgggcatgacctccacggaccgattgagaaatccaagaatcaatcgcgaaggttgagcggagtggagaggagccacagaccacgtgaccacggaagaggaaagcatgatcggcggccgaacgtcgacatgcgcgcgcagtcaacccggagatgggccacgcgctgtccggagggg

SEQ ID NO: 66395 - DNA, 395 bp, Oryza sativa
agctcgcagcctagtgtgcaaagcagagagttttatgaatagaatccatcgaatcccgggaattgctttcttcctagcctttcgtaccacgtggggtcacacactaagcaagccaaaggcacgaagagtaagaatcataagagaaaagcgccgatgcgaactgaagaagaagtacgtaagatgactattaccagcaccgaatggcctccagcatggataactattcctagacgtccaagaggaaataccttccgaggtgcacgacagttgacccagcacctcctaagccatggtggcagagtatatgatagtgaagggtcagatcaagtctcctcggattatgaagatgactcctcccgacatcttcgggaggaagagatggaatcacaagcatg

SEQ ID NO: 66396 - DNA, 476 bp, Oryza sativa
  unsure (1)..(476): unsure at all n locations
ctcgaccgggatcttaagcgacgcggctgcaagctgtcccactaattngcacaggatttatctgattcggtagctggcattctgggatgtaacattggttctctacctttcacttatttgggattacctttgggcaccactagacatagagttgtggactttgcaccattagtagacaggatagaaagaaggctgacagcaagctccatatttctgcctcaaggaggaagattaacattgatcaattcagtcatttcatcaatcccaacctactacatgtcctcattgcagttaccagttacagtcatcaaggctattgacacagctcgaaaaaactatctatggagggggaataacccttcttctacaaggaaatctcttgcctcatgggacagggtgtgcaccctaaagagaaaggagggttaggagtgatcaatctgagagtttaaaacacagcccttcctctcaagcacatg

SEQ ID NO: 66397 - DNA, 408 bp, Oryza sativa
  unsure (1)..(408): unsure at all n locations
agcanngacttgaagaatccaagcatcagctngattttantattcagctnnnncnnnnnnncancgcgagccttataggtgccggttcttgaagctagcacctttgagaggactcacaggtgccgcttgccgagtgtcgcttgccaaatccggcaccaatgtggggttggcaaccaacaccaaaaggccattctgtagtagagcattgtggtaaaaaaatgttgaaatttcattaatatggtccatgtataactaaaaatatttgccatgagattgattaactttcttgtacacattacaacaaaaacaactgagataaacaaaattatgaaacatctattattacactgatgaggacatttgtcacgccctaaaaaagaacgtctaatgaaaaacacaatggttaat

SEQ ID NO: 66398 - DNA, 448 bp, Oryza sativa
  unsure (1)..(448): unsure at all n locations
agctngacatctccagggcgttcgactcggtattctggccgntnttgctgaggttgctacagtacaagggtttcngngtgcggtggaggaggtgggtgtgctctcttctcctgacggtgcacaccacggtggggctgaatggagaggaatgtgaatcaattaagttgatgaggggactacgccagggtgatccgctttcgcctttgctctttgtgctcgtcatggacgtcttgcaagccatggtaaccacagcaatggcttcagggacgttaagagggactggtactgctttgcagtcgtcggccatttcgttgtatgccgatgatgcggtgatcttcctccaaccaacggaacaagacacataggcaatcaaagcgattntggacctgtttagggctgcgacaggtctcatagtgaacttcaccaagagcactatcaccacgatcag

SEQ ID NO: 66399 - DNA, 447 bp, Oryza sativa
  unsure (1)..(447): unsure at all n locations
taacattngaaataattactatggtcaaagtcaattggtttaactacatgtgaacatcactattttgtgactggaaggagcacatcatcaaagcatttgaataaccaaaaagatctagacatacccttttgtcttaaaatacttcaggatctcgcgaatctcacaccatgataggaatgcggtgccttctacaccctcatcgtagaagttcatgccaacaaaggttccatcgaaacaaagaagaggccctccaatgccagcctatccaggtgaaatggagaagttataattggtaatgccaatcaaataatcatagttaactcatattctgatgcaactatttacttcaactgtgtagtagacaagaaaaatagaagctgttaccttagtggttgtacatccagagtaactaagaaatttgcagtcatgtgtgacaacagtgggaaa

SEQ ID NO: 66400 - DNA, 458 bp, Oryza sativa
  unsure (1)..(458): unsure at all n locations
agctnttaataatatggccgngatctgtcattacgtgcgactatctccactatagaaagaanaataagaaaggatcaaattntctagtatttactagaaaagggggctttctacatagggatcgtcaaaacaacgattttgccctatcagctgtaggaagaaaggacacttcacgagaatcataataggaagaaagaaagtatggcctatactactctatggatagagttctcaaattgatagagaaagcaccgtaaagatcaattagtgaccgactgggtcgatacaactaaaaaaaactgcttacttatcccatgatatggggcaaaatttaggaatccgcttatgtaatagagccgatccactaagggattaagcagcggtgtagtatcagatcccaaagatagtaagttcttttttcttgcttatggngaaaaagtctttttcaaggattctat

SEQ ID NO: 66401 - DNA, 461 bp, Oryza sativa
tctccagaccatacaaatgcacggcgagcccatgcgaagggtttgtttaatatatgccaaattccgccaaatacacaaatgaaacccaaccatacatgtcccccaattatatcttctaaatcatccacactaacaatccaaccctctcccccaaaaggggattttagtaaataaccaaatataacaccggggctaagggtcacattggtaatatttcttacatctcctcccccaggagcccaggtatcatatataccgccaaaataaagagctttgagtactagaagaaaagcacctatacctaacaaaattaggtgaatacccaaaattgtagtcattttatttctatctttccacacataaccaaagaatggaaaagattcttcaagagtctccggtcccagaagcgcgtgataaatgccaccgaagcctatgactgcggaggaaattagatgaagtac

SEQ ID NO: 66402 - DNA, 437 bp, Oryza sativa
  unsure (1)..(437): unsure at all n locations
agcttacaagggtgacaacttgaatgagagtgttctcatgtatgacaatatgagagaggcggacataagagaggatatattttcacatgttattctctcattaagattcatattttatctcgatttcgatagcatgtttttcaaactactagatggtgtgtttcatacgaaaattttctatgtaagttgatttaaactatcaaatttatccatttgttaatggtgtaataattaaaacttaaataatcatgtgctaatagctaaattaatttgtacaaaaactttctcattacatgcacatgattaattaagttctaattattataaacttaacaaatatatatatttgatattctaaagtaacttttatatagaattntttcacacaaaacaaaacatatagcttaatagttcgtaaaatgtgctaacggtaatga

SEQ ID NO: 66403 - DNA, 453 bp, Oryza sativa
  unsure (1)..(453): unsure at all n locations
ctaagctttgatggggttataagggaaaactntacgtagaanatctataatgactaaatcaacatgccanaacactacctaaaagtgaacagagggagcagtaggtataatagatgtgtataccttatctggagtatgttgcaatatcttagtgccaccaaataggatatgattcttatctcgctttacagatagtgtttcctcaggaccacgaccagcaactgagacctataagaatagaagattagtcagaaccagaagtccagaactgaaaattttgaacaaaaatactagggatagcacatttgaaagcaggacaaaacaaaagttggatgccacagttggttaacacaattcaatgcgtctttgaagcatttttctttaattctatttgtttctgataagaagaacatgggtgttccactggaccatttaattagagaaatacaacag

SEQ ID NO: 66404 - DNA, 385 bp, Oryza sativa
  unsure (1)..(385): unsure at all n locations
agcttattgaanacagggatagcaaaaattctgaacttttatatttctgatcaaattcctaatcacaaacatatgaatactgcaggtatatatacttggcagaattgctgcgtttcatgaggcacgaagaagccatcaaaacaatggatcttttcgaaggagcacaggagcacaggcgggttagcgagagatctataccgaactgcgcggtgatgatctttcacgatattgatttatgattacgagtgccacggtgtgcttgggtctttgcctatatcaactataccaaaatattggtgttgccaaaaaagaaaggtgctcatttggctcgcaactaaaattttgttattcctttggcaccaaacgaaatacccgtacctacata

SEQ ID NO: 66405 - DNA, 444 bp, Oryza sativa
  unsure (1)..(444): unsure at all n locations
tgtgcgctggcatgccgaagaacggaaagtcgatactatgctgattgcctcagcagattcagtgcagtggaggacaatcgataggatttaccaagaattctcaaatgacccaagaaacatgcgtttcgcaatgtgtacggacggcattaatccttttggtgatttgagcagtcgtcacagtacatggccagttctgcttgttaactataaccttcctccctgggtgtgtttcanaagaaagtacattatgcttgccatgctcattcaaggaccgagacaacctggcaacgatatcgatgtgttccttgaaccgataatcgatgacttcgaaaggctatggaatgagggcacacgaacatgggacgcatatgcacaagagtatttcaacctccatgcgatgctgttttgtaccatcaacgattatccggcccttggcaacctttc

SEQ ID NO: 66406 - DNA, 383 bp, Oryza sativa
  unsure (1)..(383): unsure at all n locations
tgcaagctcggcnnngaaaacacanacatgcacctggtcttcatatcgtctgaactgcgctagaagcgttcaatagaacactgtgtttcttataacaaaacccttatagctgttccctcacccagatggatgactagacaaatctgattgtccaatctattaacttattaaaagaatagaagaagaaacctccatattcgttctcacggtctagaaattgtcatattaatcggaaaaagagaaaaaactgagtccatatagaaatactgcttacaaataggtaaaattccgaattaaaaaataaggaatattggcaaaggagactagagcccatatagagaatacaattataaataactgagattcagaattaaaaaataaag

SEQ ID NO: 66407 - DNA, 404 bp, Oryza sativa
  unsure (1)..(404): unsure at all n locations
gcgcctcgatgtgaagaagaaatctgttgatatgtggcgcacggcgttcttccagcgaaggagatcatcgggtggcgaccggcatttggcgaagcattcccgactcccgatacgcatgaaatcgtggtatttgctcacttcttctatggcggattttctcttccaacctcaagattnttccggggcattctgaacttctacgggattagcttgcatcatctgaatccaaactccatagtgcatattgccaattttatccacgcctgcgaagcttttctgggcattaggcctcattttgccttgttccggcgcatcttcttcctcaagccccagccaaataagagcaaaccatgcgtagttgggggtgctggtttccaactcaggggaacactaagccaaaaata

SEQ ID NO: 66408 - DNA, 452 bp, Oryza sativa
  unsure (1)..(452): unsure at all n locations
agcntttgaccggaaagaaaaggttcataatgcaccaaaacatgattnttggacatattggagtgtattgtgggcgttcgtggcaaaaacttacttcttgattcgcgcggcgaacttttgtccattaatgccaatattgcaccacacgggtgcgatgtttttgaccggaatgaaaaagctaaaaaagcaccaaaacatgatttttggacatattggagtgtatttcgtgcgtttgtggcaaaaacttacttcttgattcgcgcggcgaacttttgtcaattaatgccaatattggcatatattggctcacacgggtgcgatgcttttgaccggaaagaaaaggttcaaaaagcaccacaacatgatttttggacatattggagtgtattgngggcgttcgtggcaaaaacttacttcttgattcgcgcggcgaacatttgtccattaaagcc

SEQ ID NO: 66409 - DNA, 426 bp, Oryza sativa
  unsure (1)..(426): unsure at all n locations
attacgttgtggttagatgaatgcgaagaagctaattaattgagggttttatgtgggcttaacaaagaaattcangacatgcttgattgtcaaagatatacatctctttctcatttgttacaacttgcttgcaatgctgaaagtaaaatagaggaggacatgaagaagcaacatgctatgtttttgtcttctattactaaccatttgcaggaagtgcataatcatgaaaaggaggagagagacatgaaagagccgccagtcccattgatcacactcaaagtcgaggcacctccattatctaaagagggcatcaaaggtaaacttaatggtgctgaaattaataaaggtgagtgtgttgttaatgaattgaatttgtccacttttcatgctatagcagagcaaccattattggaaccaactgctgag

SEQ ID NO: 66410 - DNA, 449 bp, Oryza sativa
  unsure (1)..(449): unsure at all n locations
agcttgtccttcanagtatcaaatgacttcttctgtgtcttccccaatggtagaccacccctatctttgtcaactcattcaagggtgtagcaaaggtgctgaaatctttggggaaacggcgatagaatcctgcaagaccaagaaaacttctcacctgtgatggtttggggaatcggccaactctttatggcttcaatgtttgtctcatccacctaaattccctgtggagtaacaacatatccaagaaaagaaactcgttctgtgcaaaagatgtacttttcaaggttagcaaacaaatgcgcatcacgtaaagcattaaaaacaacacgtaaatggttcatgtgttcatccaaagacttgctgtaaatcaagatgtcatcaaagtaaactaccacaaatcatccaataaaaggccttagaacctcattcattaagcgcatganagtact

SEQ ID NO: 66411 - DNA, 441 bp, Oryza sativa
  unsure (1)..(441): unsure at all n locations
ggcagcctagtgtgcaaagtagagagctcaacggagagaatccattgaatcctgggaaatgctttcctcctagcctctcgtaccacgtggggtcacatactaagcaagccaaaggcaagaagagtaagaatcagaagagaaaagcaccgatgcgaactgaagaagaagtacgtaagatgactattaccagcaccgaatggccttcagcanggataactattcctagaagtcaaagaggaaatactttccgaggtgcacgacagttgacccagcacctcctaagccatggtggcagagtatctgatagtgaagggtcagatcaagtctcctcggatggtgaagatgagtccccccgacatctctgcgaggaaaagatggaatcaaaggcatgcacccattgtggagaaattggacacgttgccagcatgtgtctcacaatct

SEQ ID NO: 66412 - DNA, 446 bp, Oryza sativa
agcttgtcttgaatcaacctcatgatgtattgtgcataatacattccctgagtgaatgtccctttggagatagcaatctctcgcatcatgagagacacaatgtcgaactgacgaccctgaatgattgcatcgatgacgtgccaagccacccccctaatgtcatcattgttgccaatgcgagggaggataatggctctcacaatcatgttaaccacactggggatagtcctcaagccggcaaccttcccatgtgtgtaccgtgctccatcttcatagaactgagagagatagtctatggagaatgaattgtgagtgtgctcctcatgcaaatcatctccaaaatccaagcgaatattgaggagccgccggaactacctccgagagatagaacactagagggtgtcagacatccacttcatctcactatagtctccagccacccacac

SEQ ID NO: 66413 - DNA, 447 bp, Oryza sativa
  unsure (1)..(447): unsure at all n locations
ntacaccggtcaaatattgtgttcgctaggcttctctggcatgcatgtttgtctttctagtatctatcgatcaatctcacctgtctgcgaaaaaaactccactgaccgatacgatatcgagcgagaaagaacacagcggacggaatatttacacaggaaaaaaaaacaggaattaacaaaagtgcacaggtggcatgcagctgatgggatcggtcaacaaaacgtagccttctgcaatctgcatcgtcgatcaggtgcatcacacccacatagttccgcacgtatacgtccacacgatcagtcaaaattgcacctggtataccatccccccaggtagggatgcaagtagccaactcccacaatccacgtaataacccatttgctagtttatcatttatattagtataaattttaaaagaaaaaatacactgaaagtgagataaacgg

SEQ ID NO: 66414 - DNA, 133 bp, Oryza sativa
  unsure (1)..(133): unsure at all n locations
cgatccagaaaatgcttagattatacagtacaagattatactaagggcttcttggttagattcatacacacgcaataagcgcnnnttactatatataccaaatacaagagcgcctaccactatacaaaataca

SEQ ID NO: 66415 - DNA, 438 bp, Oryza sativa
tgcgagtctaggactatcggtttggctaggaagtcaacttcctcaattctaaggttaacttccgggcatatttgagttgcccttatattcctcccaggggaatgtactatcattggtacacgtaaattttgggttttccaaccatttcttttcacaaaagcttgtgatatgaaagaatgggaagcttctgaatcaaacagaactattgcgggtacggagttgacagagaacatacccatcacaacgtctggagcatcctgagcggtctcagcttgaatgtggttcacccggcctcgaccaaagttgttggaagcacgagagccttgtccacttgcctgagagctaggacgagactgagctgccgctggagtaggagttctggcagtgctgccattagcatgccctgagttggtgttggtaggattctgagggcactgt

SEQ ID NO: 66416 - DNA, 399 bp, Oryza sativa
  unsure (1)..(399): unsure at all n locations
agcttgcanaccgaataatagagcatctactctgtctanagngcaagaatactctaaacggactgatagggaccaatgtgtcataaacaatattacttagtgaaattaaaacagtaccagctccttgccaactcacacaaactatatacgaccgaaataatttctaaagagttataaaaaatcacggttatttctagcacctaaatgtttcggtctctaaaagtgataacaacacctacaactaatagtcaatatgcaagacaatacggtaacatccctccataatataaagattgatgaaccctgagttccactcgtcactcaaggctgttgttggcccgatctttcggtgagttgagataactacgatttgtggaanaacgttgacgatccgactac

SEQ ID NO: 66417 - DNA, 441 bp, Oryza sativa
  unsure (1)..(441): unsure at all n locations
acgtcaccgagtgcctagcaggtagttttcgttctctttgtctagatatgatagngtagttgattagagatacatttgggtgggatttgtatttattattattttttattaaagggaggatcatgaccaagagagcgcaatcttccaagctcttattttatgatctttatggtggtggtgagaaagttcaagtttttgctgatgccaggtaaaactttgtctgttcaactgtattgcttaccttttatgccatttagctggtttgttcccagacactttcagcatttcactaaaatctcactatgtgcagatatgcctgactaaaatgcatcctttggttaattttcatatcagttaaatctattttttaatgttggtgaatttcataaagtttgtatcagttaaatatatttttcaacattggtgaattcataaagttta

SEQ ID NO: 66418 - DNA, 446 bp, Oryza sativa
  unsure (1)..(446): unsure at all n locations
agcttcgataggtggtggtgtgaatggattctgtttttacttcactaaccagctntgatgtatatgacagacctctttccagatgttgtccctcaagtaagcctccaacttcgctcaattttagttaaataattgtttggccgattaatcttaaccaatcatccttttggtttgcagacaacagaatcttcccctcctcaccaaagcaacagcggcaaagacatccagtatgccccaggtttgattcctaacggaggtgggctatctcctccagttatcggctatgatgcccccaagacctcagctcttcttcaagggctcgttatagaaccagccgatgccggcaaaaagaggaaaaccagatcgtcggctgtaagcatcatatccccaattaaggagaagaagacacagaataccaagccagctgatgatctgcctaccctgga

SEQ ID NO: 66419 - DNA, 442 bp, Oryza sativa
tgttacaaggataatctagtgctcgatgtctctcatcacctgacataaaaagaacagtacatactagttcggatcctgattcgtgatgccaatttattgcccaactttgactcttttcttataacttttacactacactcttctgatttcaccctttagagttgtttctcaagtagggcagcaaatccggctgcaaccaacccgcggctgcttccttcatgctcgcataatgttcgtgctgggtacaacgcttatgcgaccaaacaacccttttgtaggcacagtttgcaagagctggtactcaatctcctgcattcgatttcccctaaacgagtttattttggtgttaaataattgagatagaaatccatgttttagagatagctcgtagtcgcgtagataagatcatgaggaatattggtgtaatgctcaatgtcatacg

SEQ ID NO: 66420 - DNA, 449 bp, Oryza sativa
  unsure (1)..(449): unsure at all n locations
agctcgtttccttgtaactcanaagaacttgttatttttttaggagcagagtattatgtgatcaaaatgggatcaggaatgcctaatctgaggccatgtatgcacaaacaggtttgcagctgggttggtcagtgttttcaagggagtggacggcaacgctcattgcagctggtgccactacctcacctgcgtgccgacatccagctggaaatgcgacaaatgaacaggagatcagtgacgcattagcatgccatgcctcccacttgtcactgcaggggagagaatgccaccctgcttaagagggaacaatcgagatacaatagatattgtttctgtttgagaccacactgtaaaaattttacgctatatagaaacttcataattgccattcttacctatattcttctgtgaagtgttgatcagaaatctgcttgtatatgctgaaccat

SEQ ID NO: 66421 - DNA, 475 bp, Oryza sativa
  unsure (1)..(475): unsure at all n locations
acctgcggcattgcaagcttgcaagtatatactacataagtacatacantttgttcttgatagtgtctgatctatctggtatggtttgaacagcattatattggaatggtgcgggagaactcattaaatattctggaatttgtgccgggaagatcgatccagtcactgcttggggggctcgggtctaaggctgtatgcatatgtttgatgagttaaccaataataacttgattaaatccatttgtttaccaggtcatcaggagttatactgaacaaattttattgcagtaaacagatcattggctgtattcctttctaaaatttgcaggaaatctagaaaaaaaatgagaacagaaatacacagctattttttttgtgtaaacctgttgatgagtgattattactattttgcttatgtgacatggtatttaaatttgttcaataaatatctaggtaatctgtccgttttcatcct

SEQ ID NO: 66422 - DNA, 453 bp, Oryza sativa
gcttcatcgaatcttttggcttgtccaagaactcgaatacagatgtgtgttctatacacattcggcttcacgccatgagcctccatttcacgcaacaaccaaagaaccgtctcgacatccctcctcttcccgaacgccaccatcagcacagagtaggttctcacactaggcacaacaccatccaccatcatcaccctataaacctccaacgcctccctatcaaacccggacttcacaaggaaataaaccaggccattatacgtgtacgcgttcaagacaatcccggcctccttcatgaccggcagcgccaccggcgcgctccggagttccccctccacaccaagccctccgaagatcgccgcgaacgtgcccacgttcgccttgacgatctgcctctgcattacgtcgaacacctcggacatgtacccgacactgtcatggccgcgcatgaac

SEQ ID NO: 66423 - DNA, 448 bp, Oryza sativa
  unsure (1)..(448): unsure at all n locations
agcttgatgttcgcccgaagaacttggctattattgtttctntatggaccagngagatttgtaggtatctagtctgaggaatattattacaggtaacttaattctctacgctggtaattaactctattgtgtgttgttatgcgtgatcaatatgtgtgagtatgaatgccatgcttgccatttttaagatctatggaattcgtgtgttggtaattttctggtttcagtagggtctagagcttaattcataagccatggcttgatgacagtgttatgccacaaaaagattgaatccatctcaaaatacaccaatccgttacaaaaagattgaatcttgttggctacattgttcttgattagtgagacagtctgatgtgcagatgcacaataatgttctctcatttgagaaaagaaaaatcatgtacttactcgcttggaaccatagttg

SEQ ID NO: 66424 - DNA, 444 bp, Oryza sativa
  unsure (1)..(444): unsure at all n locations
ggatcgtgacaaaaaaaaatgaactagagaagatatttatggctgtgtttagattctaactnttctcattaaacttccaacttttctgtcacgtcaaatgtttggacacatatatggagcatcaaatgtagacaaaaagaaaaactaattgcacaatctgactgtaaatcacgagacaaatctttttagcctaattacgtcatgattagctataagtgctacagtattccaaatgtactaatgatggattaattatgcttaaaagattcgtctcgcagtttacaggcgtaatttgtaattagttttgttattagtctacgtttaatactttaaatgtgagtccgtatacgtaaaaaagaatttgacgatgaactaaacacggccattatctataacaaagatatttataccatccacatccttatctctctccaaaattaaata

SEQ ID NO: 66425 - DNA, 456 bp, Oryza sativa
  unsure (1)..(456): unsure at all n locations
agctngtgcatactcaaagttgtataaatactctttcatgatccaatcacacaaagatataaatacgaatcttgtgcatagcttcgtctgagatcatctctnttcaagatccaattgtacaaaaatataactactggttaaacttgaactgtactgctgctaacataacacacaaaactcctcattacttttagtggaaacagaatagttataacagaaacaaaacacagaaaagtttgcttacaaaattacaaatgggagacacaaaaaacatttcgtagtttaaaaaaatacaaaaattgacagaataacaaacacaaatgtgacaaaaaccaaaaggaacacaataaaaatacaagtcatgtttagtacttgacaaaactaaattgtgtttagcagatgagaaaactaacgggtatgttagtcattaacaaaaactaagtgatattattaact

SEQ ID NO: 66426 - DNA, 447 bp, Oryza sativa
  unsure (1)..(447): unsure at all n locations
ntagcactatagaagaagtagtattttctcacattagtagaatttgaaaaggagataagcagcctatgaggtactttgttcacatggtaaatgacatgcgagcgagttgtaagagcaagacaacaagtaataaactggaattcaagacgacagcatcgatatctcaaaaatatataactgatgggaaacaaaatcaatcaaatgtttgaaacatataattaaaaacatattacaaacatgtcatattggttatgtgatgcaagaaaattttaagaagtatttgtatagcttgtggatactaccaagaaccaaccaaaatggtacattagataatgtcttccaatgagatcaaatacagagcatgctttcatttcccatttaccctgttcatagcatacatttccatctaatagttggaatactgcttcttatgtntcatgcatatga

SEQ ID NO: 66427 - DNA, 411 bp, Oryza sativa
  unsure (1)..(411): unsure at all n locations
agcttggacaggtcaaggccagaaagggtgactcctcttaaccggactttatcagcctggatgcacttgatcacgtccttgcgagtcagctcggcctctgaagatcttccaatcttatcatcccaatcctcaatcctttcacttatgcaatcgatcaatccctagaggatcaaatcagaccaaaccaaaaaatcaatgtcaggttctcacacagcattggggtcaaaatccccccacacacacaaccagggtggcaggaggcattgctcatatacaggaagccggtagtactccgcctcccgcagcagctgccggtactcggcgtcggcgagcgcggngacggcgccgtccctgagccagttgagcacgtgccggaacagctccccgtcgcggtccacgaaacacggccca

SEQ ID NO: 66428 - DNA, 431 bp, Oryza sativa
  unsure (1)..(431): unsure at all n locations
tcttcacttatgggtcatgtgttgttcctgctggctaanaattggttggttctctgggcccggaggacctcttttggtctatgtatgtacattgatgtaagctggaatccccagcaagacaaatttgctttctatataagcagggtcgtttcgacattttctctaataaaaaagctttgaacattcatcctgcatatctggtttaatatctaaaagaaaaccagtatcagtctgtagaaacaaataaaaaatcaattattagttggtcagatgcaaacctatacgactcaattaggaatttaggaacagcgagcccagcgtcattntgaccgccactccaaacatgatcaatcctaccgtaaaaaataatattggtttcattttttttactgtatanattagttntatattttntctttttattaagatgc

SEQ ID NO: 66429 - DNA, 444 bp, Oryza sativa
agcttctccacatctttcagttgtttatagcttttcaacacgagggtggtgtggtctttggatgctaaccctcgatcatgtaacttctctaaatagtttgtgagattgtagatgcgtttggcatcaaggaacttctgtataacatatgatggttcaagatggccactggtgtggatatattgggacatggcctcatcatattcctggtttccatagagagggtcaccatacttccttagaacctcatcagttgaagcaggatcggcctgttgactctgtacaagattgattgcgactgtatacagatttttcttagacaacatatcaagcttactctccatatctttctctccaatgcacagaatcttttatcgctcattatcagaataatatatccccactcagagaccaagtgtgagacatccgccactggcatgctatgtg

SEQ ID NO: 66430 - DNA, 450 bp, Oryza sativa
tgtgattcaatacgtgccatgaatatattgaatcaatcattgtaacctagagtatgggttagcatcataacaaccaacaataattactgcagacctgatgattaccatgacttttataagtctcacacaccgcctaagctgtcatttactaataacaagatgtcaaaagctaaacttaccatataatgcattatagcctttgtaacagcatcttcgatactctttctgacaatgtcgtagtacgatatgatcaatagtttcacaatggctacctctgttgcatcctgtgcacgctggttttctgatggcttcacagtgatgggtggctggtaagaaatatacagaataatcagacatggaatattaaaatattttgaattccatctttgaaaactgacttgcgatagcgaaatcacctctcttaactggatgatagagagtaacgtatct

SEQ ID NO: 66431 - DNA, 451 bp, Oryza sativa
  unsure (1)..(451): unsure at all n locations
agcttgagatgccatccttccacgaactctgtttcttgaagcacacttgngatcatattttgttatttggacctgcaaaagcaaacaatattagcaactatgcaaaagttactccaatctgaattcagcaagcaaggtgtcaaattgcaaaggtaatttaaatggttagtataataccctgacactcttattangttgggtctttgctctaattatccatgggcaaccaattgcatggcatttccctctaaacctttctttgtcagacttttcagtctctagttcaaactcatgaacaatggcatattgcttcactgccattctgaactcatccatagaagggtaaaatgtccccactgacatatctgggtcatccctgtcccaatccaacacatcaatgggtacttcatcgtccactacaatggctgcatctaacatgtcttgctgaatc

SEQ ID NO: 66432 - DNA, 452 bp, Oryza sativa
  unsure (1)..(452): unsure at all n locations
ntanacctgtctctnttaattgtcattgatgtaatttggcttggtatgactgtttttgagagcagttgaacctgaggagcaatccgaaggaaaagttatccagcgaagggggcgttttcaggttacatcagatagtattgctcaaaaggtactggtttgttaattgagcagtcacatgaaactaacatggagggacgtcatatgcattgactattttgatcaatactccctccgtcccataaaaaacctagtaccaaatgtgacatcctagtactacgaatctgacacatcctagtactatgaatatggacatacgtgtcacattcggtactaggttcgttttttataggacggagggagtattaattaagcacagtatgttgcagttcaggactttgatttttaattaattatatttatgctaagcatgcctttaacttgctacatttata

SEQ ID NO: 66433 - DNA, 447 bp, Oryza sativa
  unsure (1)..(447): unsure at all n locations
agcttncttaatcaattcccttaactcgaatatagcaagaatccgacaactgacatcttgacaactctcatcggctaatctcaggacttcgaagccgatgttgactctaagccgatgattactccgggcttaccaaatttcactgttaacaatgacgccgtcaactttttctcatatgcttgaccatttgtcttattaaaaaaatttacgtaattataatatattttgttatgagttgttttatcactcatattactttaagtgtaatttatatcttatgcatttgcataaaattttttaataagacgaatggtcaaacatgtgagaaaaagtcaacggcgtcatctaataaaaaatggaggaagtatttgtcaataatagatctaatctaatggtgtaaaataatgggtccaccaactttagtaaaaatcgacggtgagaatagat

SEQ ID NO: 66434 - DNA, 449 bp, Oryza sativa
tcttcgcggcacctcgttgcccgcgtgccctcttctgtccaacggagggttgacttccactggcctcctccttctggttcccctccacatccctttccacgtgcccctcccggttcccctccgcatccctctccacgttcccttcctcgttcaaatactggtttggatcctcgttcccctcttcttcgttccagtactggctacttccctccgcgattgtatcatacaatatctgttcctcattacgatcagccatctgttcatacaggaaacatctgctaagtcatgagacatttatgttttaacaatcttatatgctaacaatcatatgctaagtctaggtgacgtatattataggaccctagctaatcaataaattatatagtaagtctaattacaaatctaataatcttatactaaaactcaaatagtgataaatgctaagtcta

SEQ ID NO: 66435 - DNA, 447 bp, Oryza sativa
agcttcttaattgttggtaccaaataaagagtctctgttttagtagcatcagctgcaataagggctcgttgtcattatgttaataaaaagtggttcagtggtatgttaacgaattggtcgattactaaaactagactttctcaatttagagacttaagagcagaagaaaagatggaaaaattccaccatctcccaaaaagagatgtggcaatcttgaagagaaaattatctaccttgcaaagatatctcggcgggatcaaatatatgacgaggttgcctgacattgtgatcgtcctcgatcagcaaaaagagtatatagctcttcgggaatgtgccattttggggattcctactatttctttagccgatacaaattgtgacccagatctcgcgaatatatcgattccagccaacgatgacactatgacttcaattcgattgattctt

SEQ ID NO: 66436 - DNA, 282 bp, Oryza sativa
ataaactggaactgctaatagttctttctcaacgcgggaaagtgcatctgaagcagccacgctctttgatcccactagaaactctgctgaatctgtgactctaacttgcacaagaaaagtctgggccatctaaaagaaacctgttgagctataagagggccttgaaacttgcaaagcctggtgaaagagaaaagcttcttgaaactctactaagagtaacacatactgagagaaaatacacttgcgctgcatgaggttgacaaaggagggcctaattttgaa

SEQ ID NO: 66437 - DNA, 433 bp, Oryza sativa
  unsure (1)..(433): unsure at all n locations
atgtaggcaacacaagcaagaaagcatttatatgctcaagttttcgaanaacttagttgttcttcaacttaagcacacttatcagcctttcagaaacatctctatcgagaatgataccattctccatcatatactcccatatctcataagccaacgtagctttcccttcatccagaagaccactgattatatacctaaatgtcaagttatctggttctaccccttttgtcctcatttccttaaaaaggtcaagggcctcaacggctcttgagctttttccaagccagtatattagtgtgttaaaagtaactgtatctggtgatacttctttctgagtcatctgccaaaatattttctgtgcatgtttgaaatgaccaaccttacataaattatgcagcataatattgtacacatttacattaggaacaatttt

SEQ ID NO: 66438 - DNA, 448 bp, Oryza sativa
  unsure (1)..(448): unsure at all n locations
agcttccctttcgtctgaaacctgtgtacactctcgcaatggcgtgacccgaaggtatacaaaatcacccactgcgaattccaggtcacggcgacggttatctgcataacttttctgccgggactgtgccacctttagattatcccgaaagattctgactttagcttcagcttctctcaggatatcagtcccgaacacttggctntctccaacttggtcccacaagagcggtgtccggcatttgcgcccgtacaacgcttcataaggtgccatttgtatgctggcttgatagctgttattgtaggagaactcggcataggggagactcttatcccaggtcttcccgaaatctagtacacatgcgcgaagcatatcttctaggatctgatttagacgctcggtctgtccatctgtttgcgggtgatacgcggtgctgaaatttaatcgg

SEQ ID NO: 66439 - DNA, 450 bp, Oryza sativa
  unsure (1)..(450): unsure at all n locations
tgtaaaaaaatatggcaatattntaaaacatttattaaaacttaatataaaaatatattcaatgttatatattatttaatgaaattaatttgttgttgtagatttcgctaagtttttctataagcttagtcaaattaaaaaaaattaacttaaaaatataaaacggcttatgatataaaactaagagagtaatatattttgcagacccctcgttgagtatgatctgataatggattaccttacgtgtggcgattaacaagtcacttgacaatattatcttttgaatgaggaaagcacagggaatgttctttntacttgtcctttggctcattttgcttggaatgtaattgccatggtgttgaatttattnttggaatgtaactgtccctatctatctttctgggatggtatgagagctatcaaaacaaaaatgaaatctcaagtggggat

SEQ ID NO: 66440 - DNA, 358 bp, Oryza sativa
agcttaaggaagctcatgacaaccttctttctactactcaacatggagctctaattgatgttggcatatcttgtgatttgcttgatgatagtgctactttccatattgcttatgttgcatcatctagcatttctacctcttgtgatgatcttgtggatatgtctagctctagctctagctcttgtgtatctatttgtgatgcctcacttgttgttgagaacaatgagcttaacgagcaagtggctaagctcaacaagaggttggagaggtgcttcaagggtaagaacactcttgacaagattttgagtgagcaacggtgcatccttaacaaggagggacttggattcattcaaagaac

SEQ ID NO: 66441 - DNA, 424 bp, Oryza sativa
  unsure (1)..(424): unsure at all n locations
ctatagatactcagcttgcactataaactgtgaagcgctgcctgaaaattctgaaggctgcgctgntgacatgcggacctcacatgtcaacaaaaaggaccgcggtagaccgagtacacagagacggtccacgggtcgactgaagcggattccgtgtgtcaaccgaggcgagtggccgacaaacggactccactagacaccacacgggctgcacacgtggaaaccacgtggttaccgagcgggcacactaacacggncaccacacgcacaagcgaacgactaccgacaccggtacacgggtaccggggtcgacaaccgcacaacggtcacgggcgacacctaaaggactaggacggtgcactgagagaagagagattcttactaccacgcgacgaggtgtgggaactatcactactaacgggcg

SEQ ID NO: 66442 - DNA, 451 bp, Oryza sativa
  unsure (1)..(451): unsure at all n locations
aagctttgnaacaacaacgatttagaaattcttctttttcttgataacaaanacgaatacaggaagactactgcccgtcaaaagctggaattggttagatactttccaaaatctggattttttttctcggaaacagaaatgcatttagatttttttttctcaaaaacgaaaacgaatatagtaaggctaatattcgttggaaaccagaatcggttgcaagctttccaaaaacgaatttgtattttttttctcacaaacataaacaaattatttttatgtagctgattagcttgatcattctctactttagatgctcagatttgtacacagtactgaggtggttagttgaatggatttttttttctaccaatgctttagatatgcttttctcttgtctaataactattttttattagaccatgccgtactgactaatatatagttcttgctt

SEQ ID NO: 66443 - DNA, 465 bp, Oryza sativa
  unsure (1)..(465): unsure at all n locations
actcaagctttcacgctctttnnttttcttttttcttccctttatcctctcttaatttctctcatgcaagacttgtgatccagaattttcgtactgctgtcctaatcgtgtctgttaattaatcttctttaaatctgggggctgcaattttgcagtgtattattcgcacgtctaattatgcgatactgggttaaattaatcttcttaacggacagcgattaattgagttcaagaacgagtaaaagtgtaaatttacttgtatgttttactcatcgatacaaagacttcgaagaaatcattttaattatacttgcggtagaacatcctagtatagatatccgcgatgtccatagcacacgcactacggcactacaatcctaatagtgtaatccattttttagaaaattgaggtgctagcggccgcatccgntaatcatttcgactaaattatgtgcatgacattgg

SEQ ID NO: 66444 - DNA, 457 bp, Oryza sativa
  unsure (1)..(457): unsure at all n locations
agctngaaagcgtacacacaaacacacagcatattgtatgcctggcctagaagcagttaaatacaacaaagatccaatcatacttctatattccttttgatcaacagcttcaccatcttcatcagaatccaacacaactgtagaaccaattggtgttgaaattggcttgcaattctccatcttgaaccgtctcaaaagatccttcgtatacttcgtttgatgcacaaaagtaccttgaggtgtttgcttaatttgcaatcccaaaaagtacgataactcacccatcatgctcatcttaaattccctgtgcataatctcagcaaaatctacaaccaaagcatgagtcgaacaaccaaagatgatatcatctacataaatctgaacaaaaagttgattatcaccatgcttaagaacaaaaagcgttttgtcaacctttcctattgtaaacctttcgtag

SEQ ID NO: 66445 - DNA, 438 bp, Oryza sativa
  unsure (1)..(438): unsure at all n locations
tgctctncttcgatgcataatctctatattgctcctctatgtggatagcgacagcctgccttgacatattgtctncctggagcagctaatagctacgagtagtcaggcatattgacagcactggcgagctgacctacgggcacaattttagttgtattttcagcacattctttgttggatttttctttatcttagcacatnttttggttgcattttcctttatcttggctgcgcgatcagttatgggtcaccatttattattattattattatttttggtggtaacccattatagatggggtcaccatggtgaaccattcaagtgtttatcgcgtgcacatgcgagacgagcgaaagcacgtgtttcactagctatcttcaccacatattactaaagtggctaggagagcgcacactcaccctcttttaagaagatat

SEQ ID NO: 66446 - DNA, 457 bp, Oryza sativa
agctggtttcacttctccatctttaaaagaaccggtctgtaacatcccggcctagggcttaataggattaatagaatactcatatcaacaagttgcaacttcttttccggaagccgatctccaaagaactccggggttaagcgtgcttggcctggagcaatttgggatgggtgaccgaccgggaaattcttcccgggtgcacacgagtgaggacaaagtgtgcagaaaagatatgtgttggtctgtgagggcagtctatgacatatgatagctatcaaatgtaagcgggcccggcctgggggaaggcgggacgttacaaaatggtatcagagccgactctcgtcggttcacgggcgcgtgtgtcgcagatgcgcaagcatggtgcgcatggctggtgtataccgggagttggtacacagcatggcacatgcgcccgcatgcgctggcactggataca

SEQ ID NO: 66447 - DNA, 413 bp, Oryza sativa
actctactaatatttgacaatgacatcaaaccaaacaaaaaccaattctaccagaacctgttataatgctaaaatatggtaaaagattggtaaagaaaacaatatgttaaaattctgccatttatgttaactgtcattttgctaaaatttgttaaaaataaattaatatgattttttaaagcaaccttcgtatattaaattttttagaaaaaaaatcttttatcactctatccgtaaaaaaaaagataacctagaaacggatgtgacatcaggttgtctttttttttttttaaggatggagggagtagtttctaaagcgggtgcttggaaaatgagaatgatgtgtcgggaactctttcaaaaaaacgcagccagtaagtcaacaagccgttgccatccccgtggaacgggct

SEQ ID NO: 66448 - DNA, 383 bp, Oryza sativa
tgcgagcctgtcggagctggtggaggcggctcagttctgattcttttctagaaacggagctctgcgaaagaactgagacacgctctcgagaattctgccagcttggatgtataggtggacaactggaacgatgctatgacaccatgtacgcgtatagaactcgcggagcagatgtcctcttacttaccttgcgaaaacggaattgcatgaactgccggagcctgccgcatttgaggtggtacctgccggggatttattcgcatcgaagtggttatttcaacaatttatgtgtccggattactgttgtgataacactactgaactacctgtgcctacgaacggtcattacttgccacattaggctcaaattgtccttttttgaa

SEQ ID NO: 66449 - DNA, 270 bp, Oryza sativa
  unsure (1)..(270): unsure at all n locations
nttagtggtgaaacttgaanaggtaacagagtggcgctggcacctatacactttgtaaaggtggaaaanaaagaaagaaaggaaatttactggtgcaatagctgtcattaaagttctcttataggcaagcttttatggttgtagtattctactacctccgtcccaaaataagtgcagnnntncnttttctnncttnccacatctcaccctccccaattctattttgcctcctacctccacttttcattcaaacacattgtgtgtttaatg

SEQ ID NO: 66450 - DNA, 452 bp, Oryza sativa
  unsure (1)..(452): unsure at all n locations
agcttaataaatgattatgtgctcgaaattctgacgaaattttattttagccaccatgcattntagttatatttgtctcgtccaaaactaaatgattgcttaaagcattgactatgtcaatgtgttcaggaaggtaatatttcgattaaattctagataaatttaacttgaccttgtttgaaacatgtgtgctgaccaaatgtctgttctactgtaatcctgtacccctgtcatttgtgctacactgctatcatgatgagtgaaacaataagaactgatggcagaagcttttatttttatgatgtccttttgaagttatgttattagtaattgttagccatgcctgtcaatttctgaagctgtcagatctgactgttgtaacttataaatactagccacagtctctcttatttatagaaatgtttttgtatgtttgacattggaattgtctt

SEQ ID NO: 66451 - DNA, 326 bp, Oryza sativa
aatctctgatatcataggtttttttttctaaccggacccatgataaaagattttatctgacctgaacttattttctcgtaaatatatttatcaaatacactctaccataatgattattgatatatattgaattgtggtcaggattgaaaaacggatatcatgttaagtgggaaatccatataaactggactgaacttttatatttatattagataattagggcatatacaaataaaaacagcgtaaacaaagaagtgttggtgcatggcaaaaaaatttaacctttctattatgctgatctttttttttaaaaaaaaaatctgatc

SEQ ID NO: 66452 - DNA, 454 bp, Oryza sativa
  unsure (1)..(454): unsure at all n locations
agctngctgttggattcggatattattatgcttctcggngaagtgctgttcgatgctctgctccggcgagatatggcacccttggttataggtgacattcgatgggcacgccgacatcgccgccgtctaggaaggagggacggcggcggccgcgttggtgctggccttgctgccgtcgtcctcgacgtcgacgtagccgtcgggcacgcgcttccgcttctggccgtggccggtgaaggcgatgtggcacgccctgtggcgggcgccgagcgccgcgggcttgacgacggcgtactcgtgcatcacccaccccgtgctgccgcaccgtccctcgtcggcgtggtagatgagcctgtgcttctcgaacacgactgcctctccgctgccgccgccgccggcgagccgcaggttgcccgtgcgctccacccgcttggtgattcacctgccgcggccg

SEQ ID NO: 66453 - DNA, 448 bp, Oryza sativa
  unsure (1)..(448): unsure at all n locations
ntgaactgcacttattaactgggctgtctattcttgaatatatatcttcacctttgaagaccttttatcttttggagtaaatctttgttgctacaaaattttcattatcccttgtgccccccatcttttagacaaagagatgtgccatctacaggatttggattttttttttcaattgttcttttaggacagaatcttttagacaaaagggatgtgccatctatggatatggattttttttttcatattgattctttaggatagattattggtgttgaaaactgacgttggagtcattgggccttctggttttagcggacgttggctaattgactgctcgattatggcattgcattctgaagatagagcatctttttcctttttatggccccatcgtgaaacgatatatttacaaataaaaagtaatttgtgaataaaatatttatat

SEQ ID NO: 66454 - DNA, 454 bp, Oryza sativa
  unsure (1)..(454): unsure at all n locations
catcaagctaggcctgcggactattgaaagtcaatgctcggcttgttgctaagggctatactcagaaagaaggcgaagatttctttgacacttactcacctgttgctagattgaccacaattcgtgtgctactttccctagcagcctcacatggtcttctcgttcatcaaatggacgttaagacagcttttcttaatggagagctggatgaggagatctatatggatcaacctgatgggtttgtagttgaaggtcaagaaggcaaagtgtgcaaattgttgaagtctttgtatggtctgaaacaagctcctaagcaatggcatgagaaatttgacaaaacattgatatctgcaggctttgcagttaatgaggcagataaatgtgtgtactatcgccatggtggnggtgaggggagttatttgtgcttgtatgttgacgacatactgatatttgg

SEQ ID NO: 66455 - DNA, 453 bp, Oryza sativa
  unsure (1)..(453): unsure at all n locations
tctcacttgtgtgatcgttgttggaaccggccagctatgtatggcttcaaccttggcttgatctacttcaattccctgcggagtcacaacatagccaagaaaagagactcgatctgtgcaaaatgtgcacttctcaaggttaccaaataaacgtgcatctcgtagagcatcaaaaacagcacgcaaatgaccatgatgatcctctattgatctgctatatatgagaatgtcatcaaaatataccaccacaaatctgccaatgaaagcacgtaaaacttcattcattaatctcatgaaagtactgggtgcattagtgagaccaaagggcatgactaaccactcatataggccgaatntagttttaaaagctgttttccattcatctcctaacttcatgcgaatctggtggtaaccactacgcaaatcaattttatagaacacaagtgaaccact

SEQ ID NO: 66456 - DNA, 238 bp, Oryza sativa
gagcctgctctaccttcttacgtaaaaaaaaatgtctgatatttttcatgaaacaaacgtcagaatttgccttttgactcttggctcgcttaataagaaaaaggcatgtcctcacacagaaaaaggaagaaaaggcctattcatgacaaaggcatgttctctccaagaaaaaggaagaaaacttgaaaaggcctattcctgaccgaaatatccgaactagtaatctattttgcctaac

SEQ ID NO: 66457 - DNA, 445 bp, Oryza sativa
  unsure (1)..(445): unsure at all n locations
ntgntaacataggtgctctntaattaaattgaccaaacttcataccataatatgaccatattagtgaataaccaaaatatcactcttgcaactatgcttgcagctgttcattgcattgtacaaaaatagggatgacttaattgtgaaagacagtgcagggatggggaaattggcatgacagaatcgaaaggaaccgttgttgactgcagctcanggctacatcatcacagttaacaaaagctgaagaatgcatcccagaatatgagcggtccctgtacccaaatatgacacagtgtgtattgttctgtattctctaacctaaatagtgacaatgtatataaacattgtccatgaaatcccatccaaagccatctgataaatattagtttgaatgtacatataatttaaccacacctccactttgttgaagaccctttctgattga

SEQ ID NO: 66458 - DNA, 348 bp, Oryza sativa
  unsure (1)..(348): unsure at all n locations
gcttatctagaagagaccgagttcaaagagtatgcgacatggcaagttatgtattaattaggaataattggttagtttccttttatctttaggaaaatatgtttagtgtcctataaggactttatcttttccttttatctttaggaaagtttctttcgtgtccgacaaggacttgtatcaacccatgcgtacaaatatgtacacccggngtctatgtaatctatcttcacgatcaatacaattcggcgcatcgccaccccttttaccttttctactttattttatcatccggcgggacttggcacctgacgcggngttgcatcggtgttcgatctccggcgaaggggt

SEQ ID NO: 66459 - DNA, 441 bp, Oryza sativa
  unsure (1)..(441): unsure at all n locations
ngtctgcaaagtaattacttatctgcaatatcagatatggtattcagattaaagttgtgtatgttagtcgcactagatgataatcccagtcccaatgttaatatatactccctccgtcccaaaacataacaacttttagccttcaggacttgtcccaaaatataacttcttcaccaacattctctccgcaaccaatcacaaccctccaccattcaattntgccacctacctccacttctcatccaatcacattgtgtgtttaatggcgcttccccatgcttggccgatgtcctccgagacatcgctaatgagggcgctctttggtgcctagcaggagctgctaggcttcgtgatctctttactaggacttggctgctattgcactagtttgtggttttttttcctttgcgtgtatgggattcttgtgtatccttgatgggt

SEQ ID NO: 66460 - DNA, 441 bp, Oryza sativa
  unsure (1)..(441): unsure at all n locations
agcttcggcaggaagcgcgggaaccgagcgttctgaccggtcctggcgcccaatattctactcgcgcgccgcgaatactctactggtgccgtcgtactacgcactacgccgaggaggatcccatgcacagtagcgccaccaccgtacacgcacgcacgcacgcacgcatatgtgtgtgcaccgcatggggaaccggcctgcccggctccccccccctcctccttctcacgtgcaccgtggaaaacaccaacaccaagcatcccttattgcagaggaccatgccttgcatgtgtcaaccgctgcatctgcatgaggcaagacagtgagttcagcagccagccagcgtgagacaatctgcatgctgtgcccagcaaccgacatttttctctctctgcanggcagaatcacggaagctagccctgtgtatttacattgatcaat

SEQ ID NO: 66461 - DNA, 447 bp, Oryza sativa
  unsure (1)..(447): unsure at all n locations
catgaacggtttacctttcaagattctcgttccttattttcattntggntcttccagaatttgtttctgcggtcaggattcgttcgttgacagagcagcgggtctagcaaacttgtatgtattcgatttggatagcagtgctacatacgaatgccgtgtcatccacggctatgtcaccatactgattatatgaatatctcaggaagtggtgaaatatcagccgtgaccaccaacccaatgaacaggtcgaaagcacgttggtttgaatatgaaatcaataccagatgtctggaaatagttgcgtgcatagtcttggcgtagttcatcacatttataaaaatcaagttcatattaatgacaggagaagaaaaggcgagagaatggttnttttttccaagtcccttatattgctctccctactctggatctctggtttttgacttcaca

SEQ ID NO: 66462 - DNA, 446 bp, Oryza sativa
agcttctaaagcacgatcacatccttggtctaacaaatggttcaattgagaaagataatgtgtgtagcgcgtatcaagccggcaaacaaattggagcacatcaccccgtcaagaatgtgatgaccactacaagaccattggagcttctccatatagacctcttcgggccaattgcttatctaagcattggaggtaacaaatatggtcttgttattgttgatgacttttcacgcttcacgtgggtattctttttgcatgacaagagtgagacacaagctatcttcaagaagtttgcaagaagagcacaaaacgagtttgacctcaagatcaagaacattcgaagtgacaatggcaaggagttcaagaacacgtgcatcgagagtttccttgatgaagaaggcatcaagcacaagttctcggctccatattcacctcaacaaaatgga

SEQ ID NO: 66463 - DNA, 428 bp, Oryza sativa
  unsure (1)..(428): unsure at all n locations
tgcatatcatgatagtatgaagtaacagttctggtatcttgntttaaacattgcagtttgttgaacaaaatgtcagcataatacatgggaacataaacatctctgaaatatcgtttcaggtcttttcaagattgtggtattttgttatgcctacaaagatgtttccaatcattagaagcatgtttaattaaaacactagaggcacacataaccttttgtttctccgacaagacatgattttgaaattcactatcaaccgctagctcccaattaatgtaagcacgaggatcataatttccctcgaaataaggcagtgcagatttgatcttacctagaacatcatcacttacctcataatggtcatgttgatccctcctcatgtctcgacgaagatgtcgatgttgagcacaagctatcccaattatctt

SEQ ID NO: 66464 - DNA, 440 bp, Oryza sativa
  unsure (1)..(440): unsure at all n locations
agcttcacagacgtaatgtaagtacacgctattctattacagaccgataaggttntcttacgcacaaacctgtgttcgacaagttatatgtgacattgcagggggctaaagacaatcactgaccgagaagtggcatgcttcatgatatcatgcaagaactcgacaaacattgactctgtcatcgactggctcgtgaagcactcaaaaaagaagaattgatctaaatttttagcttttgaagtacgcagattctctctttttgcatgttgcgtagcacttggcctgtaaattatgcaagagttattgttgatcagggaggttgtgttcataattttgtaacctgctttggcattatattggcagactgcatctggtattgtgcacgcatgtgcttcctttcgacttacaagaggttccaccctcctgttgcatactctgct

SEQ ID NO: 66465 - DNA, 390 bp, Oryza sativa
cagagagattgatacttacactcggcggagcacgcatagtccgctctgtgactctctggctccggcatagctagctagcccttctctatgtgccttgtggttcattttattgagaatgagtccgtgatgacgtagacgcacatttataggagactacgtcacacgctacataaggcgctgccgtgcttatttctgagtacatactatgccacagttgagtgatagatggcgatctagtgactaccgactgaacacttgcatatgcattgcagtgttgactcgacatatgttgggctatatgtgtgcccatatatattatgtccatctacggagaacccaatcgccgagcgatgtgaaaaacgaatgatcatagggggggcgccgggctac

SEQ ID NO: 66466 - DNA, 458 bp, Oryza sativa
  unsure (1)..(458): unsure at all n locations
agctngtngcattcctctcgaactctggtgcctaatctggatgaattcttgaaaactcccatgaactccctgttaaattcttgtctttcaaacgaatcttggacgaatcaactccaacccatctttcaacattgagattcatgtgctcacagagttttctgttaccactgtcgatgcacatttcttccaaaaccatcgcattttgagcgaagaatctgataagccggactccaaaacagttggaggccgaacccaactgaaactgcagatttactcttctgagacttctattcaagcaggcgaatgattttccactcaatccagagatgttagaaaacttatcatcatggtgttcatcgatcaaggatgatgaaaccgctgtcatcttcgatttgtgacgcatgaacagaccaacggatttgtcgaaatctggcttgaatttcgcatgaaatgaactc

SEQ ID NO: 66467 - DNA, 429 bp, Oryza sativa
  unsure (1)..(429): unsure at all n locations
actcagctaatggttctgttaattngcatgcagattatgtcagcgcactctggctaaagtttcttgtttgcttgagaatgcaatgggatagcatttttcccaccagtcttctcacgaacgcacgaaagaattgtacgttaatacattagcatttttcccaccagtcaacatgtcatgcataggacacagggtgaacttagaaataccatttgtgttagctcatgttagcttgggaagagagtattattatatatatgattggtacatacagccatacacaggacacccgataattttaattctagattctggcctgccagctgagaaactttggtattttagtcatgcaaggagaaacactttataaaaagaaaaaaaatcatgattaatgtgtatttgagtttcatgaagttttgctcgtactgcgaa

SEQ ID NO: 66468 - DNA, 451 bp, Oryza sativa
agcttcggatgggttattagcggaataagctatacgatatattttcaaataaaaggtaatttataaataaaactgttatatacatatgtttaccgatctaaaagcaaaagataaaaataaatttcgatgagaaaaccttaaaattagctttaaatttaagatttaaaattcaaattttggttgataagcataaacaaaaagataatgccataaatcttatcctactgtcaaatgatcatttactgaaatgagagtactatggaagaatatatatatttgatgtaccgtaaaatagaaacgtttgagcccatgtttcgccggtcaaacaagcacatggactggttggccgcgagaaccgggtggtagaccccactgtcaagcgtgctcagatttaccgaggagacgaacggcgtgccgccgccggtgtttaccaagcacaccggcgcccagc

SEQ ID NO: 66469 - DNA, 440 bp, Oryza sativa
  unsure (1)..(440): unsure at all n locations
tatacccctatatatatgcacaagaatgttatctcatgcaagctaccacctgcaaacacataacgatcattacatttgatgcttctcttggagaaatgcaaccagctgctgcaatctcttgctacatcagctgccttgaggcagcagcagcagccgttagcttctcttctcccagcatgcgacgacgacaacgacgactaacgacaccagctgctcttctccctttctctactgctcctgacaagtatgggctgcctcgacatcgatttgccccaatctctgctgccataaacttttccccggatggtgagtgatttcatatgattgtatgctcgaagaaatgtccagagttacaatcattaaacttcagacttgtttttctcaatgtgtactctatgtacatgatcctaanaacagcattctgatgagttcctgacaac

SEQ ID NO: 66470 - DNA, 450 bp, Oryza sativa
  unsure (1)..(450): unsure at all n locations
agcttatctggctgagcgagggactctctcaacttctgtccttgtgctggatcagtcatgtggctattcagtttcctgcacatgagaagatcaaagcttatctggcttgcacatgtttactacatttgtacactccagattgtgntttgttccacacatataacagcgtcatgctntaacagataatactacagtggaggcattatagtttggtgatgttgctgttgcttcatccctggcaaaagttgctgcgtcaaccttgacatatcctcatgaggtagagtcttttctttgaaattacgatgcatgccagtcttgttataagtgtactgaactttgttctggccaactggtggctatatatctgaaatgattcgntacaggttgttcgctcaagggtacaggagcacggagcacactccaaggcgagatatacaggtgttatggact

SEQ ID NO: 66471 - DNA, 449 bp, Oryza sativa
  unsure (1)..(449): unsure at all n locations
tgcttagctctagacgaaacgaacttgaagcattaaatatacacccggatgctaattgagtcgcagtcatgcgtacggccaaacatttcaataaggaatttggagttagtatttgactgatgagaaattttttttaacctgttatgtctctatctcttggcatatcaatgagctattccatcctgtttttcctaaattttcatcgnttaattatttgaaaaggctggtgggacaaagacgaggattaattagacaaattaacatatcttctcaaagcaccattgtatatatttggaaaagctagcaattgatgcatgcatggtgacatcttctgtttcttgggttagaaacaaaaggatttcgtaagataatggagtactgagatattattgtttaggatttgagtccatatcagacgatgatatatattgtccaattttaaagggaat

SEQ ID NO: 66472 - DNA, 459 bp, Oryza sativa
  unsure (1)..(459): unsure at all n locations
agcttatntatttctcttcatttctatcacaataagatggactctacccaggatgagaatggatcagttattaaatcttggatggaaatttcttttacctatttccctgngcaatctcttattaacaacttcttcccaacttgtttcactataaaataagataatacaataacagtaagaatattttcaacacaaaagtcctctcaaacaagagaaagaaacatacctttttcatagatatttcgaatatgttccctatggtaactgggttcatgagttatggtcaacaaacaatacgcgcagcaaggtacattggtcaaagtttcataattaccttatcccacacaaatcgtttacctataacgantcactacccctatgaaaaatcaattacatcggagcgtttccggnggcgaatccactntgaatttgataaatgtattgcttgtgaagtatgtg

SEQ ID NO: 66473 - DNA, 407 bp, Oryza sativa
  unsure (1)..(407): unsure at all n locations
ttgagagagaagaagaatctacttcaaccgatatgcccttaggcacggccatacataacatagaaatcacacgtggaaggggtgggcaattagctagagcagcaagtgctgtagcgaaactgattgcaaaagaaggtaaatcggccactttaagattaccatctggggaggtccgtttggtatccccaaactgcttatcaacagtcggacaacatggtaatgttgtggtgaaccataaaagtttgggtagagccgggtctaagtgttggctangtaaacgccccgtagtaagaggggtagttatgaaccctgtggaccaccctcatgggggcggtgaagggaaagcccccattggtagaaaaaaacccacaaccccttggggttatcctgcgcttggaagaagaact

SEQ ID NO: 66474 - DNA, 453 bp, Oryza sativa
  unsure (1)..(453): unsure at all n locations
acctgaggcatgcaagcttctgtcattggtgagccaactagtctgctagtctgttcttgtngtgctcctcccgctggggagtgctacaaccggtatccagtatattgagctcgcgttgcacaacccaggaagattcatttgactttgtggtgttgatcgagtactcgcggaagtatccatcatgagttatgatatagacaacagtcctgcaagtttttgcaaagacaataatgggtaagattttactaacccacagtagctatatgctaaataaagatgaggggcagaaaaaaggcgttttcatttcttaccttacagcaggaagtttataagaattgtgtgaattttcgaccttatgtaccgctacacagctgaaattcccaaggattagattagaatgacaataatggaaggtagaaagtagtggaaatcaaatgaactcaacacctcttg

SEQ ID NO: 66475 - DNA, 420 bp, Oryza sativa
  unsure (1)..(420): unsure at all n locations
aaaaaaatggtatgaaccatactatattttgatttacggctntacacctaagtactggtaatcttggctacttacaagttagtatcctcgaaatttcctgctgctaaacgtactgtagctggtagcatggaataatttctgagtgagatgtttcgtgggggattaaattattgccagctcactgaatcgatatataattattattccgtacacgttaatcacgcaccggtttggctggtccatttggtgcaagctcatgaggattaagacttagaggcgccttgataactaaactaagaggatgtggcctgcttaatttgcttgtctttaccgccaagattctgaaactgcacctgtcggtgctaggtagcttaccagtgctagtgcgaatatgcttgcagaaacaaatcatattcctct

SEQ ID NO: 66476 - DNA, 456 bp, Oryza sativa
  unsure (1)..(456): unsure at all n locations
agctntaacttaccgatatgtaatggtacgccccctgcattggatggaatggtcccaaacatgaagggcatgcaacgaggctggagaagatgcaaagttntaccagaggaaaaagcgggctctagcaattgggtataccatggctgtgtgtctgaaccctatgacaaatcagtccaaccaataactccataagctatttttcaagaaaaaagcgtgatctacaagatgtatactcatgcagccatcgaaggaactcacaacaactatcctggagaggatatcaagatagtctgtcacttgagagggagaaaagggaggaggcatcacgtagtctgtcacattatgcaacggataaagggcaggaaacacccgacctgaaacacctgtcaattggaagtactcaagaactatgaacacattcacctaatttnttgaaatatgaaaaagtcaagtatt

SEQ ID NO: 66477 - DNA, 455 bp, Oryza sativa
  unsure (1)..(455): unsure at all n locations
ntatattntcacacacggacgtgtatgctgatggtagtgtgcgtatggcacacataagcatatcaaacagaaaaaaagctttatattttcaacaggaaagcatgtaaacttataaaatccataacaaattgaaaacaactcattttagagtaaatcaaatttctgtgaactcaccaaatcaagaactttagagttattgcataaaactagacattcactgtacaaactttgtctctaaaattggtctaagataaatcatacataaagcatacacaaatttataaaatgcatataaaattcatctcaactcattttatagcaaactcagtttctatagatctaccaacttatgttttcctataaagtaaaatgaaatagtatacatactttagatcaaatgcctctgagactattatctttaaaatgactagttttaggtaagctgaactttagaa

SEQ ID NO: 66478 - DNA, 452 bp, Oryza sativa
  unsure (1)..(452): unsure at all n locations
agctnngaaaaagattgaanactttgtttgagtgcatagtatgtgcattntatgaaactaatgagactaaataattagtgcagaaaattntatcttaaattttgaaaataaaataaatttaataaattaaaatttgtatttgaaattttaataggacaatggatttttttattgagagcattcataaataaaatattgtgagcattggtagacctatctttgtatgaatgatgctcattttatatgacctttaaaaaataaaataaatacatattttttttatttcgttatctaaaaataaattntgtcataaataatatttcgcatagcaaactttatactagtgtgatgcgacaaacttttacattttcaataatgcaattcataaatttctatgttcatccaaagggtaaaatggtcatttttatagaacgaaatgtttgatttgagct

SEQ ID NO: 66479 - DNA, 436 bp, Oryza sativa
  unsure (1)..(436): unsure at all n locations
nggcctgtgaggagatagagaaaggggatgaaggctgagataggtggatagaatggggagagatcccnctcctcttgcccttgaagggctcattttattcatatgtaacgggaaattacattcttacccttgatttgctatatatgtacaacctcctcttgggggtattttagttctttatacattagtttatacaacactctaagtatggggttattccccaacatcccttgttgaggttttctctagtggctttatataattctttgccttactttacacaagtaatgagcgataaacatgacacatcatggcatcggcttaacttcatcagcctaaatctgtatacatttgaacttgtggttttctggggctgccattggacaagatttctgttgcatatgcgctggacttcgaacgaagatcaacacacaac

SEQ ID NO: 66480 - DNA, 423 bp, Oryza sativa
agcttacggtaaaatgtgagaagcacttaatctatctgctcgaaatggtacatgctattgatttatcatggatattattattgcttatgaatacatgcttatggaactatttatggctatatgccaacaatagacgacaccgcatgtgagcgggtggtacacaagataaagatcatgtgtttggtttcatggaccttcttatatccgggatggatatatagatatattttatggttatctcttatttaaaattgatataataatcaacccccttgtgtctataataatgacatagtttcgcccatccacacgatccatttgcctaacctgccgtatattgctccaattgaataaacttctgcacgcctttccgcgttctggcattacgcttcactcggtgaagaaatcgcatggtcatgttta

SEQ ID NO: 66481 - DNA, 413 bp, Oryza sativa
  unsure (1)..(413): unsure at all n locations
cgggagttgatcgaagntcgcggctcgaacgatatattctttgacatcagttctaaggcccactatgcgattcgcccgtttgcttcgcaattatggagtatatcgccgagtggaaacgatataaccaccgtgaccgagtggccttggaagtagtgggataatttcctgacggtgattagaacaccgtacaacagcttttgaacttgaggatatctcgtcttggagtcggccaaaacctcgctaacgaagtagatcggtcgctggactttctgaacatggccttcttcttcacgctcgacaaccaggaccgtgctcacaacctgagaggtggccgaatcgtatagtaataacggcttttgtgggtgtggtgaggccaaaactggcggagtagtgagaagtttcttgagatcttc

SEQ ID NO: 66482 - DNA, 438 bp, Oryza sativa
  unsure (1)..(438): unsure at all n locations
agcttagctcattacagcaaaattaaatgattcaagattataaaactcttgataataaatggtcattagcacggtaatagatgtacagtactaacaacacaggaatagtaaataaattttaaatgagaacagtaaaacaaatataaactgcatgtgccattagtttggtttaattaaaagagaaagacaggagaacagttctactttttcaatatttttagagggcttctataggtaaccatttggcataacctagggtcaaggaggctctgataccaatttgtcacgcccagaatttctatccaaaattccaaacgcttagatgtgtataaaccctcgtccaggaatcagtcgaggcacgcaataacaaattgataatagagcacacattattactctaattaataatcgaataanatgtcattacagaggtagata

SEQ ID NO: 66483 - DNA, 448 bp, Oryza sativa
  unsure (1)..(448): unsure at all n locations
tcgcatccnctataatatntgaagcaatcatcaatcatcctctgccaatagaaccccactctcctaagcaaccaattcatcttgtgggccgattgatgagttccacaaattccttcatgtacctctcccatagccactttagattgatcttcatctaagcactttaacaagacacaatctatatttcagcgatataactctccaccaaacaaagtgtatttgaacgtgtaacatcctcaaattttaaactaaaatttgactgcatcatgctggcttttgattaaatttgtttggttcaaaaatctatttgatgtttatttaaaaattggttcaagtattattagaacccttccaatttactctaacttattccctttattttaaaccctagtgaatttgagcaaaatctctcaaattcaaaccatagattatttctttagcctatcct

SEQ ID NO: 66484 - DNA, 456 bp, Oryza sativa
  unsure (1)..(456): unsure at all n locations
agcttgtagcanaaggtattaacattctcaatacatcaaaatatattcaatactagaaaaatacatgtgcatcgcaatgggtgaaagctatnttagtcttattattactgttatatggtttagctactgtgaaaatcatcgtgggaattttctcggatttttttagaaaatatgagttgtaattagtagtttgactctcatcccaagttagcatgcaagttttttttaaaaaaaaactcttagatatttccaaaagcaaacaaactcaaacacatatcagtatatttttagaagtgaacgaacttaaaaaccgactcaaacacgaataaccaaccaaagtactaacaaaaacatattcaattnttataatagcacagattaagtttaatgaaactagtttggtatcgtaaatattgctaattnttctaanaatataacaaactaanaaaatttaag

SEQ ID NO: 66485 - DNA, 442 bp, Oryza sativa
  unsure (1)..(442): unsure at all n locations
gcaaacttcttatattaattgtttatttaggagtaggttgttatatttctcattantaatgctntacggggttggatgtcttttcactttcctatgccttttcaatatcaggtagctccacttgctatcacaaactttgaggactcaactcttgttgcttcgtgcacattcctgttggaactctgtggtctctgtgctaacatgcttcgtctagatattgctgcacttcaacgtatctcctcctactataagtcatttcagcaaaataaacaatgtgatctatcttcaccgaggagtcctgggctacatgtactctcccatggagctgaccttgctcctactcttgcccgaacattagcagaagattatatccagtctgatcatcttcatgtattggagcagaagcagccctctagcgctcccaagagggaacattcatcac

SEQ ID NO: 66486 - DNA, 426 bp, Oryza sativa
agcttatactaactctggatccaatgttggatgagaatttaccaatgcaaattgtgtggatgggtgggtgtgggctgggggtttgggtcacgaatgcttaatagcttatccaattacctgttaccagcgattgaaaaaacttttctgtaacataatcttcctcgttggaattctcaaaggccaagctataattgtaagcgcttcaaagttccactttatcaactgcaccaggcaacatataaagttcgcataacatttctttcctcaaaacatatgcagtacaacaatagaaatacaaactagtccaatcataaaagcatcatttatgtaggcaaagcatttatcagattttaacaacacaatatgatataagaaaaggaaaaaatgttgccctggacagtgcatcaatgtccaaaacaaattata

SEQ ID NO: 66487 - DNA, 419 bp, Oryza sativa
tcacaattcttcacaaaagaggcgaggtcatgccacaatttctattgaatctattttggtgattacatacaaatcggaggtgcctaataggtttgcaacttcatcctccaatgtttttttttgtcatgctacatttgcacctatgttttgcacactttttttgtctccaaaatttagttgtaagttgatgagagagaaaatgtgtgtggggaagaaagaatatatagaaatttagttcatttgctaaacaaggttttataaaatagttgagaaggaaaactctagtgaaagttaatattatataatagaaaacaaactaaaataaaaattaaaagaagtaaaacacattaaaattagtttaaaactctacaaactagttctaagaaatatttggtgtgatattctatgaatttttgtat

SEQ ID NO: 66488 - DNA, 391 bp, Oryza sativa
  unsure (1)..(391): unsure at all n locations
agcttgtctgttcctcacgagtgatgttcttgtggggattagacccatgcaaagacgaagggctacatgacaagccttttttttgttcaccaataataagagtagctagcgttaaggtggactagattacaagggcctaatcattctgttgggccaacatagtgtgtccaagaatggtaggccttgttggtataatagtgtggtaaatngtggctgaacatgtttgctcggatgctgcttcagggttcaggaaggatttccattttctggacctgacacttgggatgggtattagggacatctgtttctctggttcagaaagatgaagccatgcctgtatgcactatctgatgatatttatgttaaatttctcagcagaagagacatgatg

SEQ ID NO: 66489 - DNA, 342 bp, Oryza sativa
  unsure (1)..(342): unsure at all n locations
tgatgtgatccgagtntgcgacgaantaattaataatttataagcacaagactgtcgcgaccgagaaaattgccttttcccgaacgctagtgtattaatccccgtcccaggaaaagccggggtacaccaaacaaacatgatacaaaaggaacatctttattatatcaaaaatatttacattattacaaaggcactttaggcctgacaaacataaataaacagcagcggactagcgggcctacggctccatcttcacaggcgctcaactagggtataagccaggactccacctagaacttcttctccaaagcttctcttactgagggggggggaggatacaac

SEQ ID NO: 66490 - DNA, 461 bp, Oryza sativa
  unsure (1)..(461): unsure at all n locations
agcttctagcagctgcagcttctcccagaattataagctccttcataacaatccagttttcgttcagataattatagttgtagaatccaganaataaactaaaaatcagaagctggaaccttagctttttcagattctcggaagctagctaccagccagctgattctcaaaattaagttcccagaacaggccctacacaaacaagcagtaaagacagtaaaattggaggaaacttacgattcaggggactcgaagccgcgggaggagcggagggcgacggcgtcggggagcgacgcgttgagcaggaggccgtggaggcggctctggtaggccgagaggggcgggtagtcgaggccccagtaggcgacgtcgttggcggaggtgttgcggtaccaatcggaggaggggaggtggagggtgagctccatccagtgccgctgggcctcgtagtcgccgaactt

SEQ ID NO: 66491 - DNA, 456 bp, Oryza sativa
  unsure (1)..(456): unsure at all n locations
ctttatntgttcagactcacaaatgttccccatttcccaatatgctagataatagctatgtgccatagcatgattataaaggatttctccaaaaagaaagatctatgagcaaatgaaagtaattggtgtactacataaagccataatagtgtatatgctaacacaacaactgcacacaccaatatgcagagagttgacggcattcaagtccagtacacactgtaagcaaaacattgtttggacagtgtctagatgaaatagaagacctaccacggaatgagatggaagcttttgaagacgtacagtcacttctgtaattacccctaaagttccttcacttccaatgatcaaacgagcaagatcgtatctgacattcaacagaagagaacaaaaaacccatcattgatgccaagaatacatgttaatcccacatgtatttaacacattaatgggcat

SEQ ID NO: 66492 - DNA, 343 bp, Oryza sativa
tgaagagaaacagtatatgggacctgatgatgatcttgtccaaaagatcttatggagccttatcgcatgttaacaaagtatgtcttattttctgtccgaatgctattcagatgatggttggattcttcttctttagaaaatgccggagaggtgcggttcatttcattaagaaggaaaaaacaaacacccatacaatcagggctcacaagccctccacctcaacacacccacaaaaacatcacacaaggtgacgcacggccaatgatggttgtattaagctgaagcaatcggcgatataaccgcgtatcccaattatactagattatgtgtactctgagaagct

SEQ ID NO: 66493 - DNA, 439 bp, Oryza sativa
  unsure (1)..(439): unsure at all n locations
agcttcattacacaatattgcggtaggcgaatcaatcctacctgtacagggaaacagaggaatcgatcaagtgcttataatattcaatccctgtagacaatctntcaccaaggagtctctttaaagcagttctcagaccaatgatgattataaaataaggaagacgaaccaatcttgtttatgactcctgatgtaaactagtgctacttacctctcgttcatattatataagactttctagcattgtccacattcatatactccaatttacggatatgtctataattattaacatctatatgaatgcggataatgctagaaagtcttataacctgaaacggaggtatgtatagttaccatgataatgacatcatggagcggaaatcatatactcccactaccatttggatttttacgggaatatggcatagaataataa

SEQ ID NO: 66494 - DNA, 455 bp, Oryza sativa
  unsure (1)..(455): unsure at all n locations
ctcaagcttggatagtagaagttggtgactatggcagattggcagcatgctcaatcaatgacttactgattcaactcttgaccacttagtatttgtgtagatgtagtgcttaaaacaccattgatgactttcagatggtctgtactgtatgtctcgagagatgatgttattgaaggctgttatgtgtcttgcaaccaccaccacctgcaagtttagatatctgaattctcgttctggaataatatccttgaacattatgtaatgatacgttttaacaattttcttggtgaaatgtaggtgcgccatgacgaaattgttgaacatgtttcatcaattctaaaaagcaatggcattgctcattctggggaaagcattgacactggaaaacttgaatggtttgacatctacttgctttatatatatattcagctcatgtttntgtgcatataatttat

SEQ ID NO: 66495 - DNA, 443 bp, Oryza sativa
  unsure (1)..(443): unsure at all n locations
agcttggatttattctatatttcttgatggcttanaaatgaagaanaaaagaggggagaaatcttcatccagtctcttatgggtgactgctaccgattcaataagagtttggcctatgaaccattgtttaagtcggtgttaatcatatctttttcattggaatatatcgcgtaaggttcctattgcatgattaaaaatacatcttcccactgccacaattgataatgtaaatattccattatggcttgacgaactgttaattgtgactattaatactatgcatatgttgtatgttgtcgtgtagctctttgaacttctatttaacgccttctatccctttgcgacttttcaatcgcaagactgggatagagggtttttcttttgctcccatgtaaccctccttcgtagggaatgttattcattcctatcttctataccactta

SEQ ID NO: 66496 - DNA, 450 bp, Oryza sativa
cttggagaggtcatgagaaccaagccgcccacgttcgctactgtctacgagcccatggaagcaaaagactggctacgcatcatagaaaagaaactgactctagtcagggtacgcgaagccgacaaggtgatcttctcagtgaaccagctggaaagacccgctggtgattggtgggatacctacaaggaagccctagaagacggtgctggagaacccacctgggaggagttcactgcggcgtttcgcgagaatttcgtacctgctgcagtgatgcgcatgaagaagaacgagtttaaaagactgcggcaagggaatacaacagtgcatgagtatctaaacaagttcactcagttggctcgctacgcaattggagaccttgcagatgaagaagaaaagatcgacaagttcatataaggactgaatgatgaattgcgtggacctatgatcggg

SEQ ID NO: 66497 - DNA, 332 bp, Oryza sativa
catctccagcgtactgatggagtgaactcgtccttggaaaagtatattgagcttgcttaaaccctctacattgcgacgtcaccttgatgaataagactgaagcggttatgttgcaggtggaagaagccaaccgatcaaaatccaactcgctgtacaagctgtaggaagcttaactggaatttgagacatgcataattgctctgcacgatgctctgaatagggcacacactgtcaatcgggggaagctctcagtggaacacgctgttcgaagatggctatctgagagtggctacaacaggcactcatttcatgattcttccaagtaaataatg

SEQ ID NO: 66498 - DNA, 251 bp, Oryza sativa
  unsure (1)..(251): unsure at all n locations
gacacacactacacatatgggtggactgtatatataccgaaccgaaaagatcgagaccgagaaattcggtcatcaattcgatcttatgcagtgaaataccgaatattgttcagtcaattcggttagtcttcttggttaatcgaatagaccgaataatgaaaaaaggcaaaattggttatatncncttcttgcttgctgcctgagaactttgtgtgcttaaacgattggctactatatatagtcatttcatc

SEQ ID NO: 66499 - DNA, 361 bp, Oryza sativa
  unsure (1)..(361): unsure at all n locations
agcttattccncctccctttcgctctcggtctataccctctcctagcctcacccacgaaggcctccattgatccacgcaggtcgagagggagctcgatctggtctacggcggcggcagcggcggtctgatgggcctcgtctccaagaccgtccacgacggcggccgccacgttctcgggtacgcacgacgacgcacatacacagttactgacttaactgtgcctgctgatcgatccatctgctgatcacgtcgatgcatctgtaaatgcatgcagggtcatccctagtgctctcctacctgaagaggtataacaagcgaatctcttgtgtggagctggagtagccagtatacgattggtct

SEQ ID NO: 66500 - DNA, 290 bp, Oryza sativa
acagtattacgcggaatgccaaatgcgtggaaggcgccggaagataaacacacttcaagttacgatcataaaacatactaacgcaaatactacacctctctcgcagaaaaaaaacaacctatacggagcgtgagacaactactaaacggaccttcggagcaaggaagccatcgaaccaaaggaacgtcctggaaacacactacgacaacgtgaaaccattgatatcctacctcaacaacgcagtcattgaacacatacaacaaactaccaatttgtagcgacaaaagcgg

SEQ ID NO: 66501 - DNA, 452 bp, Oryza sativa
  unsure (1)..(452): unsure at all n locations
agctnttgctgatggttggaacaaaaggtatgattgtctatgtattcatatntatgctgtaagaagttatttagatagccaagaataacaatattcttatgcaggttttacaaaatggtggagtagatatcgatgaaaagacgagagcgttggctgcaaaaccgaacaaaactgttgtgtgctacagtggctatattattaatggtttcaggttccacactatgatgcgtgaggctggccgctccactcaaaacagcggcgtagttaacattgctgatgatggtgttaattactatggcagattatcggacatcgtagaattgtcatatagaaaatacaaggtagtgctcttcagatgtgattggtatgacgtccatcataaagccggcatcaaaaaggatgaatttgatttcacccttgtgaacttctcccgaaagatacatagtggagat

SEQ ID NO: 66502 - DNA, 438 bp, Oryza sativa
  unsure (1)..(438): unsure at all n locations
tgacaaggacagatatcaagtaaacatggcacaagcgagcatatatgtaaaccctgaccccatataattagcaaaacatgcatatttatttgcaaacagtaaaacatttgtaaattgggatcaacatgctcaaggggaatgtgtgacttgccttgcttcttcaaaacaatcttccgaactcttttcctcgcgaccgcgaagtttcgaaacgacggattctacacgttggcacgcaaaacgaggaaaactctaataaaaaccaaggaaacagtacataaaaagtaaacaaacatgtagagctcaattttagatgaattttgcaagttgaatggcccaatttggagttcgtatgaattagatatgaattttagaagttttgagccattntaatggatttctggaattattattgatttatggcgcaattattatttattt

SEQ ID NO: 66503 - DNA, 443 bp, Oryza sativa
  unsure (1)..(443): unsure at all n locations
agcttgaaacacaaactcctcgtgtcgcactgtttctaatcaattntatttaaaaaaaatcaaattattatataaactagcatggtggtcatcgcatattgtacggctagcatcattatattttctcatataatagcatatatattttcttaatttattattaaaatatattaaaatgacaacataattctaaattttgtatttactttagcaaataccaatgtgtaatattcatactgtattgtatatacgttatagttattaattatttctaatattacaatttagttatttctaaattgtattcctatatgggctctagattcatctttcaatatttcttattttttaatttcgaattttcattttctgtaaattgtatttttatatagactcttggctcttcttccaatattatctttttaatttcaaactttagttat

SEQ ID NO: 66504 - DNA, 424 bp, Oryza sativa
taattgttaagatcaattggttatttgccactccctaattataagccttgagctactttacgcggagctatccactaatggatcgaaacttctgtcaatgaaattctgaagaacacttcgtactacagagtttgaacatttctctgagttgttaataagaagtaaaccagtagaggtagaccttacaattcaaccatgtcttgcgcactgtgcgacttctgggaaagagggatacagacattatagcatgtgtggcacggtgcaaagatcactctcctttgccttgctagacataggcacatagctgttctttttccatatacctagtaataatataaaaaggcacatagttacatgtgtggtgtgttatgtttaactaatggtgttatgtctctagagttaggattaatagaactagataaaa

SEQ ID NO: 66505 - DNA, 343 bp, Oryza sativa
  unsure (1)..(343): unsure at all n locations
agctntgctcttgaacgaaataattcttntgatatttctagcgacaagttttactcagtttgatgttatagatatcaagccccaccattggtttaggttgcgaactgattttgatgattgtgatgatttttgcagcgcggcacacaacacccagagcggaaaaactgtggccctgctggagggaataccaccttgcacggtgagccgaaacctcctccgtgcagggatctagatgcttgctaagtttgctttgaattacaggcacacaaataagttgggccacactatgattatatggtgtggaaactggaacaaagcaaggcgatgtgttgttggattttga

SEQ ID NO: 66506 - DNA, 446 bp, Oryza sativa
  unsure (1)..(446): unsure at all n locations
ngtnngatgtaagtcttatttagttcattgccctaccaaaatntagtagatgtttttttaacaaattaaacgagccatatgttgggatacatatgttgggatgtaagctattcaaactttcgccatacatatgttgggatgtaatcattctccttatcttaaaaactattgccacgaagttgagctttttatcttggaatcagcggtacctcatatgtgatcagacaaggtaaaaccctctcctgaataactttcttcatgcccccaatctagactactggacaagccaaatggcttccatctcttacaatgtccatctatatcttcttggtattggtcttatctaaatgacatccatatctgaatctagagcaacacaatcattttcccctttgacaatgtccaactaatcacggtttaatctgttaaccaagaatcaatacaca

SEQ ID NO: 66507 - DNA, 431 bp, Oryza sativa
  unsure (1)..(431): unsure at all n locations
agcttgagtctgcaataatgtatataacaggtcacaaaaactctgtgtgacagaaaccttttcacaggtatagattattttttttccactcactttgtcttctgatcaggccagatctgttcaccaggcccaacccagaaatttctggtgttcttgaaccatggctcattgtatgttacagacagtgatagcagttctgcagaaagaaaatagacgaatttccatgctgactccttaaacttgttaattttcttcctgctttcatctgtttcagcaagtttgtcatacccctttccaagtacaagccttcttgctaataactgcgaattgaacgagacgataagtctataatatatgcatgcaacggagtacaggtattgcacanatatgacacatgcaancattgcatcaacaattgtattctgctagta

SEQ ID NO: 66508 - DNA, 401 bp, Oryza sativa
  unsure (1)..(401): unsure at all n locations
ctgatagtacccgggtcagcgtgtgttgctcatttattcagccgctgcggctgggtctgtgtcaatgggttgggatgatgatggcgacgatctctgggcagagggggggantctctttttcnntccatcctcccncaatcgtcatatgcctccgtgcccttctcctttcttcctcacacctctgtttttttacctcttcgcccacttatttttatctactccttttctcctctcttccttctcctgttccacgctcttccacgctctttatctgttctctctcctctcctttcctgcgttaccactctcttctcttgctttccttcttttcttccttccccttattcttctcgcgcgctcttggattacccccttcttaattatgcctcattcattttctc

SEQ ID NO: 66509 - DNA, 451 bp, Oryza sativa
  unsure (1)..(451): unsure at all n locations
agcttcacgtcgtcaccggatcggctggcctgctctcaattttcaaattagggtgtgtttaattcacactaaaattaanagtttggttaaaattaaaacgatgtgacggaaaagttgaaaatttacgtgtataagaaagttttgattgatggaaaagctaaaagttgaagaaaaattctgaaactaaaccagaccttaatacgtgttgtccttgaattattgccactactagtatttattctgaacggcattgatacccgtacgttctagttcaactggaaatagtacacgagttggtactactactaaaccatttgtatagttctcagacattntagactgtgtttagttccatattaacattagaaatttgaacaaaatgaaacgaagtgacggaaacagtgaaagtttatgtgtgtagaaaacgtcgatgtgacagaaaagttgaaaa

SEQ ID NO: 66510 - DNA, 408 bp, Oryza sativa
  unsure (1)..(408): unsure at all n locations
tagcaagtgtgagttctggttgtgcgaagtcaaattcttgtggcacgtgatatctgctaaaggagttgctgtggatcccgaaacagtgaccgccgtcaccgattggaagcaacccaagacagtcactcagattcgcaggttcttatgtttggcaggatactaccggagattcatcgagaacttctccaagatcgctcgacccatgacacagttgttgaagaaagaagagaagtttgtgtggagcccgcaatgcgagaaggcgttccaaactctcaaagagaagctggcttcctcgccagtgttaatcttgccggatactcgcaaggagttcctggtgtactgggatgcttctcgccaggaatgttgtgcgtgcttatgcangacnggcatgtggtagactatgcttca

SEQ ID NO: 66511 - DNA, 436 bp, Oryza sativa
  unsure (1)..(436): unsure at all n locations
agctntacatcaataacaatcgagttgttgagtagggcatgcatatatgcaaaaatgcactttatttcctagctagctagcttagctagtatgctctcatgacagtgcatggttaaggaataaggaggacataagttctttcggtgcagttaaatactcttttcatcaccaagaggcgatatcgatcaagcccccatctaatccggctacgctaaccttaattaatctcgtctgttgcctgcaactacgggtaattaggccattcgatctcagtcagtcacagtcaagtctttggagaggattgaacgcctatgaaaatatataaaaacgacaattttatgtactacttcgatctgtgaatgacgctgataagtagtatcactattttatttgcactcaacaaatgttaggtgttggcaacatagcattgcataat

SEQ ID NO: 66512 - DNA, 439 bp, Oryza sativa
  unsure (1)..(439): unsure at all n locations
tgaccaagattattagaaaaagtagtaacattntcaactcatgacaaatttattatgaaaatatattcaattattaatttgatgaaactaatttagtattataaatattgttatatttgtcaataacttagtcaaacttgaaacagtttgactttgaccacggttaaaacgtcttgtaacctgaaacggagggagtatatatccaatggatggtgttttcacattaaattcttatccaatcacctctcttttctctcctttcatgcatctatccccttgtttttatttttggtttttgtgtagagatggtttcttacatgagaaatggtgttttatctttntacctctctactcattaactctcttgcatattagatntttgcttctgtgacaatataattaatgatatggacactatacgacatgtanggctggggat

SEQ ID NO: 66513 - DNA, 452 bp, Oryza sativa
  unsure (1)..(452): unsure at all n locations
agcttgaaggagaggacatgtggaagaagatttatagattcattcataattcgcgacggattgatattgttttgtgtgatgaattggcggattttaatctgaacaaacttttgtggcaaaggagcaaaacaaacgatttctcgataagttgagaggatgcaaaatggtttagacagtaattggtcctatctatgaacctacttttcatgttacaaatagatagtaatgcacaaataaaactcggtgcagtcgtacagcaggttgtctatttggtgaattcatatgattaatgatttgattgtttgttaactcaatattcttcatacaatattgagcgtgtgagctntacaaaatactcccacttattacaaatggatgttaatataataataggatgacatcactgtagaaatataaacttaaattgataaatgatgtgaacatgctacatc

SEQ ID NO: 66514 - DNA, 458 bp, Oryza sativa
  unsure (1)..(458): unsure at all n locations
cctataaanactcaagcttgcattaaacacctaaattcccgtgacttgctgagtacgattgtactcacccttgctctatataaatatatattggtcctccgccctgaagttgaagatgatgtgaagtgaagattaaggtttcgtcctggatcccagccgtcgcctgtggtattgggtgttagaccgatggttccgctgctgctgatgatgttggtgttcgcctcgtccgtgtcgtcagttgtattctcgggctgcttgagttgcaacctaagttaaggtaaataagtcctctatatattttaacgattgctatgattcatatatgtcaccgtgggtacgagcactatgttctgggactggtaccgagatcgcggtttcgtaagaaggcggtcgcgccgttttccctactacacactcctgtaggtgccgtctaccggcggatcaaattggggtgtgac

SEQ ID NO: 66515 - DNA, 51 bp, Oryza sativa
ctaagctggactaattcgcgagacgaatctttcgagtttaattatgccatg

SEQ ID NO: 66516 - DNA, 97 bp, Oryza sativa
tcccacgcagtccaacgaaactgctgcacgcttataacggcaaacaaccctgggacccgacaaaacaacctagaagaagacaaatctaaatcccctt

SEQ ID NO: 66517 - DNA, 453 bp, Oryza sativa
acctgaggcatgcaagctctgatgaatgagccaaacttcagtcccatgaaatatgtcagtgacatgtttgatcaacgtgctaatggctacaaaatacagaactgtcaactggtacagattttcaagacaaaacaagcctttttgtttctattatcaattctccttggatcatcacatatattggctagtgaaacattttatgtggaaactacagctcattgccccagttgaactaactggcggtacatggtcatgctacatttgggacatggagaacacgcaaatgcacattttggaccctgtcttgcagcatcgggagacttacaatgtgagtgctaagcagtaagcaccatcgaacagccacaatgatccacgcaggcctgttacatgtataaacaaattctatggcggctgggatattaacccaaacgaatggatgttttcgtactacac

SEQ ID NO: 66518 - DNA, 440 bp, Oryza sativa
  unsure (1)..(440): unsure at all n locations
gctgtaaacatgagcgccagatagagggtctcccagaagattgctcttggttatggtttggaattataacttggaacctcctctactcaatgtcncccctggctggtcattgcataagaaccttgatgccgttattcctgtaacataatattttgatgccatgccacccactgtgtatgctcgtacctcgtacaggtcacttctcttgccaagccagaagttcgattttttttttcgtttttatcggcatggaggttctgagttgtcagattgtaaaaatgagttgatcaactttctgctgttgacaggtggccatgaggctgctcagtgatgccttcctgaacaaaccgcacactggattacacgaagttgccgtggtttgatcctccagcaattgtcatatcagattatcagtagctgtgccaagcaagatgcctgac

SEQ ID NO: 66519 - DNA, 440 bp, Oryza sativa
  unsure (1)..(440): unsure at all n locations
tcagatgtcattngtatacacagattatcagcattgtggtgagggtgatgattgncgcggttgtgaagatagccgcctacacatgtggaatggattgaagacattacagaagaatcactgtaactaaaatgctcgggtaatataccagaacaaaatgcaaaagacttatgaaatgcgtagattagctgccatgccatctaataatatctcttgcatcatacaaacaatactgttcatatatagtatataccagaacaaaatgcaaaagacttatggcatatatagtcatatgggcccttaagaaaaaaatagggtacatctgaccatacctcattttctttttctatataccaaacaggcaagccccagaatgattacataattaattacaggtcaacgcatcacaaaactattagtaatacatactcttaacatgggac

SEQ ID NO: 66520 - DNA, 444 bp, Oryza sativa
  unsure (1)..(444): unsure at all n locations
agcttgcagctagtttgaaatgaaattgatatgtaatgcacagagaaaaggtggcatggctaggctgcataaattcgattcanagttcaacagaacaaaggaagttttttttctcgtgaacctttttcataattaggattttgagtatcatgaacataattaccagttatgcatgctggctatctggagcttttccagtgttatgattacatgtgcaatactatactgcaaatatcaatgaattaacattttcttggtgtacttgtgtctgaattgtaggtaaatagtgtcaggctaccacgccatatctcaaacaaaaaacacttctgtggcactgccttagttgaattntcagaagaggatgaagcgaacattgttttggagaataatatgttctttgcaggggcaaatctggaaataaaactaaagtatgccactaacata

SEQ ID NO: 66521 - DNA, 427 bp, Oryza sativa
actcagcttccctggcaatacgggccactgatcaaagtttgctactctgctcagagaagagatgcacacaaaatggccgcgtcgcttttgatttacacacgacacagccatgaagtagctgagatactagaaagggttcgcctcgactgaaatgatacggtatcaatctcaacaggccaaaaagcttccagacgcatttccatctactggccgccttcttcctcatcttcattgttttcatctgtttgtgatgccagcttcacaatgtcttccacacggatcttcccatctgtagcatattaaaaaagacagaggaccagttaggaaacagcacaaacaattgtgcatgcactatcatcagcagaacataaaaacatcatggaggacctttgtctttagagaggttgctgacaagctcttggacgcc

SEQ ID NO: 66522 - DNA, 453 bp, Oryza sativa
agcttctgtttacgcagggatctgctttgttgcttctgttgttggagcggtggtgattgagcgagctatcatgaagtccgggagggtgtcgctgatcgtgttcttggtaactggcatcatggcggtcagcaccgtgatcatcaccttcttcggagcattggatgtatgggcgcagtatactagtggagcttacatgggtttcaagttaccttgctgacattgtcagtaagctaaatatgtgcacacagttacacaacaaaaaaaaaaaaaaacatcgagtgagaggtgcttgctataaatgggcttgcctgaaaaaagattttgttgtccgtgtcataacaggtagttattagcttacagaattctcactacaataaataccatttcggcatttttgatgcccatactgaaaaagaagcctgacttacggtgatccacgtagcagtagagtgc

SEQ ID NO: 66523 - DNA, 452 bp, Oryza sativa
  unsure (1)..(452): unsure at all n locations
cattacggacctataaaactcagcttgggcagctgngatgttntctggcttgactcggcgagggaagattcttggcatcgatctgtccggttccaaatccaattcccaacgaagctactccctccgtcccataaaaaaccaacttagtatagaatttaaaacatcatagtactgtgtctagattcgtagtgctacaatatgtcacatttggttctagattcgttttttatgtgacggagggagtacaatctaaggccttgtttagatcgcgaaaaaataaatttgggtgtcacatcagacatttcatcggatgtcggaatgggttttcagacacaaatgaaaaaattaatttcaaaaatcgcctggaaaccgcgagacgaatntattaagcctaattaatccgtcattagcacatgtgggttactatagcacttatggctaatcatggacta

SEQ ID NO: 66524 - DNA, 420 bp, Oryza sativa
  unsure (1)..(420): unsure at all n locations
agctnttcactcctacgaacttctcgttcttatttcgccaatcaccgaaaggaggccgaacgcaagactntcgcctaaaaccctgccaataaggcgtagagtatggggccgtgtcaaagacacgacaaataatagggatactggcgaaatcagctacacgtaacaagaaaaacaagtaaatggcaaaatattaacatttcattaataggtacaagaccagtcaaggctacaaaatgataatggccactggccgaatacacaaaaatatccatagatagtctaactatggtggtaaggctaaaaagtaaaaaaaaaaaagcgagggcgaagagcctcacacctcggggtgatcttggcaggcatcccttgttttgcccttcaccccggcgggctcctgtgcggtcagctcctcctcacaat

SEQ ID NO: 66525 - DNA, 418 bp, Oryza sativa
  unsure (1)..(418): unsure at all n locations
tctgctggtctctaatatgtttatatggccggtcggtctatgtaattattaaattgttgtaagtcttatgtttttttcatcttagttgtgtttgctatgtataatcatgcttaagatgaaagtgtgaatctagggcacatcctgngtactagattcacatgagtatgagttagggatatttgagaggttgtagatctttagccatttttgtcaagtctcctgaatgtgtaacacatctggtcgctgccttcgagtggtttgacgggcacatctcaggctgaagttgactggcaggctaagggcctagcaatgtcttcaatattcctctctcgaggcgttggatgtttcattatgcttgtttgatgacttgaattattcatttcatctctcaaatataatggaagggtccgagaggcta

SEQ ID NO: 66526 - DNA, 171 bp, Oryza sativa
  unsure (1)..(171): unsure at all n locations
agctngtacacagagatcttggatagtaacctgttagtctggcttcaccattaaacccatagtagacttgccaatcaccagaatttggatcctgaaatcatcaatatgtagcatagtgtcatctttcatatatatatatacacgaggagatatctaccattgaatgtccta

SEQ ID NO: 66527 - DNA, 425 bp, Oryza sativa
  unsure (1)..(425): unsure at all n locations
tgccatgtaaaagatcaatctttatgtcagacaaagtaagattgaaccaaatgcagatganaacaggtagagagttaaaagtgcagatgaacaggtgataaaacatgcatcttggatacctagcacaagcaatttggattaaagtttgagaaagaatcttaatatattgtccacagtataccttcttttgttgatttacttctctacaaattacaacatatacagaaatacgggaaagcatctgtacatttcacttctctattcaatcttattacaatgcaggagcttgattgataaacaaattacaaagtaaacatgtatatgattacgacccgtccatctgcacatccacctagctggtgttatattgaggttatgcttcaaagtaacagcatgtacaagctagaaaggctaggttgtcgttc

SEQ ID NO: 66528 - DNA, 393 bp, Oryza sativa
  unsure (1)..(393): unsure at all n locations
agcttagctatatgctatacactntctcacgtctcagtactggtgaacctatgtaattgtacacatgatttactctgctttctattatttttttttatgaattgactttccttgcacactatataactgcatctcatcaattttagtaccacacaactaaaatatatggtccaccattactgtatatagttcttcaacttcaataatgctccctccatttctgtttgtcatctttgaccaccttttgtgtttgagaacaattgtcaccacatttttaaagttcaggttgcctactttgtccttttgtgggcttaataatgaatttaaccatacaattntattaactttgtatcttgacatcttatgaatccctcgattttgcttggtattttt

SEQ ID NO: 66529 - DNA, 323 bp, Oryza sativa
  unsure (1)..(323): unsure at all n locations
aganacagtaacagaaaggggttcaaatttgattatcttccggaaaagtcgntggtaacaaaaatcgtcctaaagatcatcaccacacagccaaatgccaatacactacacactccataaaactcttttgagtttcatagcactgctgcatctgacgcaggaaatttcgctacatatgcttcactgcatcatgtaacatgctgtcatgttaccgggacaccggcgcacctaccctccatactccatgacccatgtttcctcgtctttgacagtgcgagcctgcgtgatgtgcgaagtgtaaacactagacttttgcctctgca

SEQ ID NO: 66530 - DNA, 440 bp, Oryza sativa
  unsure (1)..(440): unsure at all n locations
agctnggaggtctcccgacgtggctgatcctcatgggctgngtgatccgggttagtaatgtcgtgtgggtaaagtgtaccccccctctgcagaggttaacaaactgttcgaacagccgtgcccacggtcatgggcggatgtgaggtgattcctaccgtagttctgtttgactactgcttgtgaaattgctgttgtggaaaggggttcgatgtttgaaaaatctgcagctgatgggatcagctaggcccgggtggccgtttgaaagttgtaggcccgggtggccgtttgaaaagctgttggccgggtgccaaccttgaatcaagtctaaaggctgatacattgcacatactccgaccggacgagacgcactgtctcaaccgtgtcgtttgagaagcactcacttagttgttttcagaagagagttcaactaacatcaattg

SEQ ID NO: 66531 - DNA, 443 bp, Oryza sativa
  unsure (1)..(443): unsure at all n locations
ntgatggcttgtggtgagatcaacattggtgtccgcagtattggaatcttctcttgatgctaattcaccgagttccgtcaaaattcttggtatagcatgcttgtaaagattctttcttgagttcacaaatccatgatttatccctgttaaagttaagaaaaatcaaatatctcaatgttagaattagaaataattcctaaatgtttctttaacacatacctctcaatttttatttgtcaaattttgtaaggcatggagacatttaagtatatttgaaagtgatcatttcttgtaagtttgtaacaagcagctatgattgtgtgaacaaattccaaatacaacattcaattaatggtaccacctctattaataaaaatacgatatantttgtgaaatcattgagttaagtgagggaggttactacttaccacaccaattagata

SEQ ID NO: 66532 - DNA, 428 bp, Oryza sativa
agcttaacaaacgacctttgtacatggatttgtctatgctagcatagcacacttagtatcaagtgtcaatgttaagatacaaaatgtactttcagttttttttttcatgaattacaaaactctcaagagaagataacatgatgttcaaaacctaccctaaaaatcaaattcatatgtcatagagttagtacataccgctaaaaatgcctttctctcctccttccgttgagctacggcaacatataatggctttttcccaaccattttcccgttcatttttaaaatctataatatgtttaaaaatattaattgcataatactgaaaaatatttagaactatgcgaatgggagtatgacgatagcacaacaaaatcattttttaacatacagcattgttagcgtcttcaacagttgctaaagatacaaat

SEQ ID NO: 66533 - DNA, 380 bp, Oryza sativa
  unsure (1)..(380): unsure at all n locations
tgaagtggagggattgtcagcttgagataatgtatgtggttctacttgcgcngacgaagaggccccttgntgtggctccctatgacgcacgtctccaagagccaatcttttgattgcttcgctagggtcctcctcttcacctaacacatgtgagtcgacttgctctacttgagagccgttagtatcgtcaaatgtccatcacgcgcgatctcaacaataccggaggtgttgttgaaaacgcggtatgcgcattcatttgacccatgcccaagcaagaacccctcatcaactttaagagcaaactctgaggatctagccttcttattaagaatgtagcacttactaccgaaaacacgaaagtaagagaaatttgtttgtta

SEQ ID NO: 66534 - DNA, 425 bp, Oryza sativa
  unsure (1)..(425): unsure at all n locations
ctttcgttatcagtaaaatgttatttcatgtctggttgagtggntacatattgaaggtatgctcacctttcctttttgaactgaatgcaatgtaatttcgttatagacaaagagtacttgtgattggtggaggtggggctgttgggctagcttgctgtcagcttgcagtagctgcagggtgtatcgtttctgcaacctgtggaactaaaagtattgaacaagtgttggccgctggtgctgaaaaagctatctattacactgctgaagtaaacgctttcagaagtccatactcttgtacttatattttctttacgatgatgatgatatagtgaattcttttgcccttgcactattttctgtatcaacgcaggcagaccatatccttaatatgactagctatctattccatcttgttcatcatatta

SEQ ID NO: 66535 - DNA, 291 bp, Oryza sativa
ttttttttttgcctatcaatggcatatttttggcaaccactctttgtcggtacctctttaatagcccacatgcctcctctgggcaattacggcaggcccgctagcctaccaactaacaccttttcatacggccgcttcatccacatattatttcacaccacccatacaaaaagttcacttattttccaagggaagagagaacattccctgaccggaatccttttgccctttgccacttctcatctggctctcgtactcgcgcttgcatcactttagcccctattcttcttc

SEQ ID NO: 66536 - DNA, 397 bp, Oryza sativa
  unsure (1)..(397): unsure at all n locations
agcttatctcttacgctccaggaatggatcattcatatcatcaccaccggctcgccgtcgtcgccgccgactggagtcttcgcctatacggttggttggaaacaccaccgttgttgggcgtctacgtctttaccgactggccgcttcgtccaccgccgactggtgtcttcgcctatacgagttggtggtcacaccaccgttgttgggcgtctacgtcttcaccgaccggcttgccttcgtcgccgccgactggtgtctccgcctgcacggctggcctattatgccaccgttgttgggcgtctacgtcttcaccgaccggccgcctcgtccgccgtcgactggtgtttcccgctgcaccgctggcctattatgccnngcgtgttgggcgtctacgtct

SEQ ID NO: 66537 - DNA, 421 bp, Oryza sativa
gaaagccatgaatccctattatgcatatctggatctagattctgcttaacaaacatataggatgagtagtatctaatataaatataatactcgagaaaaattcaagtattttaaaatatttataaatatgtatttctactcttgtcaattttgatttccccgagcagatgactctgtacgtttaaacactctgcccgactagtcatagccccaagcactgggagtcggcctatgcacttcccaaacatgcatatgagtgacatgagttcgtcattaatggaataaagtttcacgaatcagaatttactactcgggtacttttgcaattgttaagagtaaaaaataaattatcttatctctatgcttttgatttcttccgagtaatacttagcaccttgcgttactcggtctatccaacgag

SEQ ID NO: 66538 - DNA, 473 bp, Oryza sativa
  unsure (1)..(473): unsure at all n locations
tgcagcttgaatattatattagcatgctctttcttttcgcttgattctccttgtgaggaaatagcatgaaattggtatgtgccagaagctaaaagctctggatgatcatcagcgaaaatatgaaaatctctccttaatctgattatataacccaaagtatacagatgcatgatcngaattcgcatgcagattcaaatatttacattctaaataaagttacactccatatatataacacttggcataatttttctccatgaaacatacctcaatcatatctatcggntacgattctatagccctttttgtttggacctcctatgagtgctttataagtctaaaagccaaagtctaaacacactagcaatattntcaattggctttttacagtcatatataatccataaaccattcttgcaccagttgaacacagaaactatatgtgagagactatatngacttatatatgtgga

SEQ ID NO: 66539 - DNA, 398 bp, Oryza sativa
  unsure (1)..(398): unsure at all n locations
ctgagacttaattaaacaggcatcacccaaccagccaccagtgaagcatgcatgtgaagtatcaagcattatcaatctttcacaattagttggattcaagctctaagtaaaactgagacacaagtttaccttaatgggacatgcatgtgaagtaccaagcatcattaatctttcacaatcaggtggattcaaactccaagttaaaaaggaagatatgcaagaaatcacttgactcacttcatctcttttcctatttagctacagcaaactgaccaaaggcaacagactntccaaaggaaaatgggagaaaaaggaccacagactgctcgattgctacttgcagacgaccgttgtgaatccatcttcacacagctacactcctaaactgtatcatgtac

SEQ ID NO: 66540 - DNA, 429 bp, Oryza sativa
actaagcttcgtgcgacagagttcgggttgaattcgatacgcgcttttttattacttacttccggtctaaaataagtggatctataaatatccggatttagcgtttttactatccggcttaattgaaaaatttataaaaaatattaataaaattagtcacaaataaagcactatttatggtttatcatataataacaataaaaatactaattataattcttttttaaataagacaaacggtcaaacgttaaatatgaatagtgctaaaactacacttaatttgggacggtagtagtagcacgtaaaactgcgtaggacggctttttttggttctggatgacggcggagtcgccggggtgagtcaccgccgtgctgtcggttggttcaacgaagcgtgagatcgacaggatgcagcagcagctgaatgat

SEQ ID NO: 66541 - DNA, 134 bp, Oryza sativa
cctcgcgtcaatatctccaaaacaaaaggattgatctctcctgaccaaatagaagacacgggaacaaaagagggttttattacggacaacgggccacgaaagaacacaagggtcagaagaaagaccacgggggt

SEQ ID NO: 66542 - DNA, 407 bp, Oryza sativa
ttcatggcgttacgcagatgcatgcaagataggaatgggaacctttgttcttgtactattcaaccatgctgaggacaatatggaaaaggggatcgaaatgtgggaaagaatagaatatctgcgtgttaaaggactatctatatccaacaaggagaaaagtttactggataaaatgggtttgaatggacatttaaaggagttctcatcagatgaagcgcttgagcaagcttcaaatatgagatcacagctgaacatttcatggtgtaccattctctatgagcgttcggtagtggaattcaagttaggattatccaactgggaggaaagtcttacttgagcaatcgaaaaatttaagactgggggagcatctctgcctgacatcagtgtgatgataaagaaccactgtg

SEQ ID NO: 66543 - DNA, 433 bp, Oryza sativa
  unsure (1)..(433): unsure at all n locations
ccatgacaacgcgcggcgtattttcttctacccaacacctgcgaggatccgggaagaagcaaacccagccactgagacagttgccgaaggtcatccctcgacaacggtggtcgaacaacccgaaattcatggtaatttataggacaaattttcaccacatgaccacataaattttagctagcaccccttagcaaatgttgccttctgtttgtgctgcagaattgccgcaggaacaacataaatcgatgttgggcgggacaagtgcaagtaggtcgagtagaaatccccggtcacaaaatatatggccgaccacagtgcaagttataagagaggttgacgctagtggtaggcccacggcgcccaagactgtcattggaagatggtctaactactgcgggctggcggcacgtgagaaacttggatcctncataaa

SEQ ID NO: 66544 - DNA, 211 bp, Oryza sativa
caacataggtagcctaaaccatatggcccgaagctagggcctcccgaaccacccgcgaatcacatgttctcggatcaagctcctgatagtattactcaccagggtggccttcacccatgggcgactctctatgttgatgaaatcaagaatcggtcttagtgcacagcggaaacgaccccggacgtcccggtcggggttggaattaatagtt

SEQ ID NO: 66545 - DNA, 460 bp, Oryza sativa
  unsure (1)..(460): unsure at all n locations
acctataaaactcagcttatgagttccacacgcatgacactgctggcttcttttttatccatcatacaacggcatctggcaatcttccaccaacttactaaacttctcataatctctgtcgntgtcctctgcgtcttcaatgtcatgcaacattgtagatagacattgagtgtccaaatctatggtctctccacctaaaggagaaggtacgaacatgccttctcgagctgcggcggtgttctctacatcctgatccaacacttcttcagctgcgacatcaggtgcctcttgctctccatgcttggtccagcaggtatatttcttcatgaatccattcattatcaaatgagcatgcacttcatccttgtcttcgatcatctgttcattcttacagtccctacatgggcacaacatgtgcatgctcatcctactttntctgtcattatccgcanatgtgaca

SEQ ID NO: 66546 - DNA, 312 bp, Oryza sativa
tttacgcgttcgaaaaaaattataagtcgctaaatcttgaaaaactataattgagaacgtgccatattatccaaaccgattacaactcagtattttgtttcacctagaattttgaaactattaaaacaatattcccccgtaccaacttcgactacacgttcattaattatgattttcaaaattaataaatcgtgaggcataataaactaagtctcccatgcaaatacaactaaataccacttattttcaaatgtcggatgtgtgtgtgtggtgctatatatatatatatataataaaaaattgaagatgttt

SEQ ID NO: 66547 - DNA, 461 bp, Oryza sativa
acacaaaaactaagcttagattctgaagaaccaatgcagaacattctatttggttgttcacatgcatataagaaaagatccatacgaattcagacaaatgcatggatcttctaaattaatcaaacaagaacagcatataggatgcatctctgaaacgaaattgagcattcagataaagttctctgttcaattcacaccagaatccaaggaaaacgtgaccccccaaacttgcacccgatacgaactaatgaagaggaaaacatccccgattgatctagcactgaattgttgcaaaaacagctgaaaccgaatcccacaaatgaaccacatgccaacgcgtagacagagtaattgtatagacaacagacatttcatcagaagaataaccacataaatcccaagcggcatggcgatggtgatgggaccggagagcgccggtgtatcgggtagacgatggatgc

SEQ ID NO: 66548 - DNA, 345 bp, Oryza sativa
cagcaacttgcatcaaagatgcatcgttgttaacactgaagattgggtccttttaattggataggcttagacagaagtccaagaagattcgccttgttgattatggcctgtatcaattctgctccaaggacatgagcactagagacaaaggatctccctatcctattcctattttacaatgagaaattattggctcggttttttagtgcctggttaataaataactgacacctatgatattgggattgatttttactataaaacttgcacctatagttgcgaacgtttctatgatccttttcccggaaggtggtaatggttatatgtgtcgttttgctacaccta

SEQ ID NO: 66549 - DNA, 455 bp, Oryza sativa
  unsure (1)..(455): unsure at all n locations
tactcagcttttagacgcatataaaatacatgcccgcgcaatgtttgttctattcttctaganntatatcaaaactcgtaattagacagatggctagcgccgcaagtagataactctatggcgtgggatccattctcactcctgagtgggttatgcaatatttattgttcagttatccttgaatcttcaatctatatgatgaatataaatttgaaatacttggtgaaaagactgtcacatattttccaccaattccgtttgacttttttcttgtcaatccacgctgtttgcacccataactacagaaaggtaaataggtatcggcactatatgtgccggagtatgtaaaaccgacacgtataatgcctttcccacccttgcacccacgcgcaaatagttttataaccggcacctcgatatccaaataggtcccacacataagtgccggttttaag

SEQ ID NO: 66550 - DNA, 298 bp, Oryza sativa
actacaaggaagaagattttttgtaaaccttttaaacttggatgcagctacgagcgccaggaagacgagaccgatatgagccctcttctaggaatagggggaagcctgcaagagccataagacaagaagaaagattgagatagagtggaagacacattcgacatagcaatattatacaacaggaacattaatagcccataaaaccttagggaaaaaaatggctgacccgatcggtgaatcgaaaagaaaaacggcccaagcggaacagaatccggataaaaaacatacacaaaggcat

SEQ ID NO: 66551 - DNA, 175 bp, Oryza sativa
aactactacatttaaacggacgaaaattttcgattccacatgaacacagccagagatctttgatatgtagcttaatattatttcgatacgggtgagatatcatacggtaaaaaggatttagaaagaagtgtgattatgaattcagattattgcgcctgacagaaatatggattga

SEQ ID NO: 66552 - DNA, 374 bp, Oryza sativa
  unsure (1)..(374): unsure at all n locations
gcttctcaagctcaagcatatacttttctatttagagatcaacgtcttggagctaatgtgggatctgcccaaggacccacatgtttaggtaaatatctaatgcgttcccccaccggagaggttatctttggaggggaaactatgcgttnttgggaccttcgtgctccatggttataacctctaaggggccccaacggcttggacttgagtaggttgaanaaagacatacaacctctgcaagaacgacgttctgcagaatatatgacccatgctcctttatgctctttaaattctgtgggtggcgtagctaccgagatcaatgcagttaattatgtgtctcctataagttgggtagcgaccttccatttttgtct

SEQ ID NO: 66553 - DNA, 422 bp, Oryza sativa
tctggcccagtaggtccataaaactcactctgattatctgtttattgaaccagacaaaacaacaagcgataaaaccaaagacagataaagcgcctaaactataagacaagtaagcttcttcagaccatacaaatgcacggcgagcccatgcgaagggtttggttaagatatgccaaattccgccaaatacacaaatgaaacccaaccatacatgtcccccaattatatcttctaaatcatccacactaacaatccaaccctctcccccaaaaggggattttagtaaataaccaaatataacaccggggctaagggtcaaattggtaattattcttacatctcctcccccaggagcccaggtatcatatataccgccaaaataaagagctttgagtactagaagaaaagcacctatacctaac

SEQ ID NO: 66554 - DNA, 437 bp, Oryza sativa
  unsure (1)..(437): unsure at all n locations
gtgacaaaactctgcccaagtaacctccactgtttctggttgtgttccacgcagntatcccactaagcagaagcgggaccatgcagctggtgtgtagcaaaagcaaccttctcttggtctgtgcattgtagaaagttcggcttcttctcaataacatgtatccagtcgttggccttcattgggttggaggtgcttgagaaagtgggtggctagatacgaagaaagactaacagtntggacaggtgtgaaggtggaggaccaaactgctggttctgctgagcctgctgcaacatctgatggtaatgttgttgcatctgttgcatcatcattgtcatcatatgagtgaccgctgggttctcgggcggtggagatggaatgctgctagacacaccactgatatgagctccatcgggctgctcttcgctgccactggcgtc

SEQ ID NO: 66555 - DNA, 413 bp, Oryza sativa
cttgtgcaagtatcctattgacttccaaaaataattcatcatgtactgaagctttggtgttttctcccaaggcttgactagagtcccctgatttcaagatttgtactttattttcggcttcagaaaagagtagcctccattttcaaagtaccttgaataaccaagtatattaggattaaaatatgtaattagctaaaaagaggatgtttcagaaaaatatttggagacaatgagacaaacattattaaattcaacttccaggcattctcttttgtttgggttatgaaactccaaagtcaatggcggcttaaaggcagaatatatttcaacagatgagtatctgaacatagcaactttgggtcccattctgcaagtcatgaaacaagtaactttagtgatgtcattatgaaaag

SEQ ID NO: 66556 - DNA, 337 bp, Oryza sativa
  unsure (1)..(337): unsure at all n locations
ctgcagctaaggctagtaatggctggtcggacattagttttacagaacttcttgagctattaaaggacctggtgccagaggggaacaatctaccgcatacgacatatgaagcgaagcaagtattatgtccgttgggcctggaggtcagaagaattcatgcatgtccgaacgactgcantttgtattacaaggaatacgctgcttggatgtctgcccttgttgtggggcatcaagatacaaacgagaaaagagtgaatgtgaatgaagtaagtcaaagaggggaggcccancaaaggtggtgtggtatctcccaattgcggagcgcatgaagagaatg

SEQ ID NO: 66557 - DNA, 439 bp, Oryza sativa
  unsure (1)..(439): unsure at all n locations
tatggagtctaccttgagatggttttggtcccacgttaatatttctaccgagctgggggaatcaggcaaacaagccacgtacctcatccagtccgaatctgatttgggttttgatccttatagttggtgtgtcgcgggcttagcccaagtgggtgtgcaccctaaggacgttatcgtggcaatattgaaactgtactttccagtactatcgctgctgttttttttttgcagctttcgtagttgccggaactatggcagcttcgataactgtcatcggcataccgtgtacctatacatccagtcaaggttcgggatcgagggaaagacacatgtgcatgacatgataaaacgtgatatttcactgtgttcagtaactcgttccctcactacaaagaaacctttcatctangtgacttgaaccccattcaactcaactcga

SEQ ID NO: 66558 - DNA, 449 bp, Oryza sativa
gcttggcaataatgccccccaccacaaacttaggattttcaatagcaccaaactgagacatctcacccataatcgttaaaagatcatgaacctgcctcaccactgattggttggcaatcatcttaaagtcatgatattgctccacgacatatattcaacgttctgcatcttgaaccgaatatttacgggccagtgccttccatagctctgcggcgctggtgtaagcaccatacacgtcgtatagctggtcagacaggagcgaaagcatgacacctaaagccacatcattactggtctcaaagtccgcatgctgctgttgtgcaacggcctcacttgtggaataacataccacaatgtctgcgacaccagattttgacgaactttggattgccaacgcttaaagttttcaccaacaacttctaggcctcatcagatcaacagcatgagca

SEQ ID NO: 66559 - DNA, 376 bp, Oryza sativa
  unsure (1)..(376): unsure at all n locations
aaaaaatttagtcacaccttaaggtcctattcaggtttaatcacttattattattaaaattcttatggttgaaaccatcctattagaagggatggtaaaccttaaacagggaaacctcccactgcacttaaaaatggaacccagaagtatgctcttttttttaaaaaaaaaaaaactatagtttgttgctatcaagcgatgtatatatgtacgaattaccactagtaggaaaccattttcctagacanatactaccattttctagcctgcaagatgggaagggaggctatatggccgaccgcctgngaaatggtgatagcataatgtgaagaaacacannatatgcatggcantttattgaacttgcattttttga

SEQ ID NO: 66560 - DNA, 367 bp, Oryza sativa
gcctaacatactatcaccaatggtggtgctaatgtaattcctacgactccccatcgacatttatgttcaaatccagttgtatcctccaacaagacttttcctttggaagctcggatatcgaaattatccattcaaaatgtcaaagcctactattgtagcttggaccgaatagtttccacaatccgggccagtctctgctgttacatgctcatgtatccgattttgtaaaccttggaggcgaaaaccaagcataatgtctaaattttattggaatgtattctagatcaaacctctatctagacctatctgcaaaaatctttacttgcagctcatgccagaatattatatcatttattctttggtcatg

SEQ ID NO: 66561 - DNA, 452 bp, Oryza sativa
  unsure (1)..(452): unsure at all n locations
ttcctggcactggtctgaccacacaaacttctcttccttctttatttttgngncaatggtcgggctatcttaaagaatccttcaatgaacattcgatagtatcaggcccaacctaaaaaactccgaatctcaatcacagaattgggtgccttccattccgtgacggcctcaactttagcaggatccactgccaatccaccggctgagattacctggcctagaaaagtgacttcttttaaccagaactcacatttactaaactttgcatataatttatgcttccgaagtttctcgagtaccaatcgcaagtgcttcacatgctcttnctcgtctttggagtagattaaaatatcatcgatgaatactaccacaaatttgtccaagtaatccgtgaacactntattcataagattcatatagtacaccggggcgttggttaaaccaaatgacat

SEQ ID NO: 66562 - DNA, 382 bp, Oryza sativa
  unsure (1)..(382): unsure at all n locations
acactaaaaagcttcgtctttatttttgtagngggtcctcctcagccattgccttctcttggatctcagcttcacgttgcatagatgctaccattgctcccacatgctttgtaacatccgtcggatcaccttgaacattggcaaagacatccataaaagggtcacttgacaaagtatttctcaggttgttgctgctcttcttcctcttcttagagcttgaagcaattgaatcgatgcttcgtcgaggtgcggctgaatcgatgctccgtcgaggtgcggctgaatcgatgctccgtccaggtgcaactaaatcgatgctccgacgaagcgattctctagacactctctcttcatcctccttatcttcgtcatcttgagtatc

SEQ ID NO: 66563 - DNA, 313 bp, Oryza sativa
  unsure (1)..(313): unsure at all n locations
tcaagcttttccattttttttcatctacgttgacacataattatatatgctttgattcaaaataattcctgaagtcaagctgtctggagaacatcctganacggtattcaaatacaaaaatggcgatgatgttcgggagatagccaaaattaacattactctccaaaaagaaaagggtggtttatactaattacgtggattggattttaaggggtgcttcttttctggacagaacttcagtaactatgatattcaatatgtgaactggggaacgtcattgtttgatgttgatactccgtgtatttttaatgcg

SEQ ID NO: 66564 - DNA, 333 bp, Oryza sativa
  unsure (1)..(333): unsure at all n locations
taattaccttgataggtgatcacaattaacaggatgaaccattttcactgttacataacagaagcacatatcacatgccatgaatcagagatgtgctcacatgcgatgaatcagatatgttgctctactctcttcnctctttctgctgcaccaccttgcccaaagcccttataatatttcttgacttgggatatgcaattccacaaactaaataagtcgctaagcagacacaaataaattgatgactacacatatagttgccaaaatgcaatgctgaatcattacagaagtagtgcttctgactaatatccactttacagacagaagcacaaa

SEQ ID NO: 66565 - DNA, 453 bp, Oryza sativa
  unsure (1)..(453): unsure at all n locations
aggccgagccgctctttctctcgggccgcgccctatttttcctatanaagactattttccctccctctttccttttcttttctttttcttttccaaaaaggatttaattaaatcctttttcctttagaccaaaaatccaataatcttagaaattcaatatcttcccaaccgtaagtccgtttgactccgttcaacttccaaaattcctcaaatctcgagatctatctaatggcacgcttagaggtcattaatagggctttattttcgctgtttgttgagttagcccgtttcgcgtgtagttccggagcccgaagacccgcagtgcgaggatttcgaggatcaagctccagatctcgagcaaggcaagccacctttgaacatcttgagcctatatttgaatataattatgttgcttgaaaaatattatgcattgataggatcgcactcaatctg

SEQ ID NO: 66566 - DNA, 457 bp, Oryza sativa
  unsure (1)..(457): unsure at all n locations
ctctcttttttttgtcagagtaccttagccatcttccatacatatttttcaatctattcaagaatcaccttttcttttgaggcatgtgcaagttgtaacatagcaagtttgcaactaaaattggtgtgctccatgtctaaaatggtttgctcttttttactgtcagatgtaccgaggaaggctaagcaatggaactccggtgacaatcatgtctctgaaggtgaagaggagccagacttcccagagcttcaatcaccacattgagatgatctccaagctcaagcacacgcacttggtcagtgcacttggacactgcttcgaatacaatctcgacgattccaccatcacgcaattgtatctcgtcttcaatacgncagaatggcacctgagggcagaattcacgtagttacatctttctgaatcgtctcaaaataatactcgttactgatgtactgac

SEQ ID NO: 66567 - DNA, 157 bp, Oryza sativa
  unsure (1)..(157): unsure at all n locations
ntactcncggctgacgttaccaacttagtcccggtttgttattttttccggaaaagaagagcacataagcatggtgtgttgcaccgcggatcggatcaatacaaactcctaccttccatttttaactcatttcctcaaagagagacgcttatctatt

SEQ ID NO: 66568 - DNA, 457 bp, Oryza sativa
  unsure (1)..(457): unsure at all n locations
atacgcatgcttgcttatcttacctagcttagctgcgtgcgccaatggccactgtcaagcactgagatgtacagagaagggccacctctctaagctactctaccactagccgtagcgatcaagggacgaattattggccatgagatccactaataatacgggtcacgaaacaataattccccgaatgtgacggcgatttcctgtagcactatgaaaaaagttatctcctgatctctctcttccagtccatctgtccccaggctaagcatatgcaacagggaatatggtcaacgtcgcgcatgcgctntaatctcttcgtcgatccatcgngtntgcgagagatgaccatgtcgacattgctcattatcatgtacctcgcacaatgtggtttcttcacaggagaatntgatatgcaattcgaatctcatgcatagtattcgactatttgngaaggctg

SEQ ID NO: 66569 - DNA, 454 bp, Oryza sativa
tactctagatttcatcctcttgtggcagcgtccttgtctctacttattggctacgtcggaggacctaggggaagaggagttccattcttctctctcaccctcacgtcggaggacctacgggaagaggagttccattcttctctctcaccctctctccctaactcctgatggcttggatagagtgaggcttgtgttgattgtaagggtttgataacgatctggcccatgtagggttggccgacgcccaataacttaaagttgcccggaccccaacagttcataggcacacccactcggggaaaggcccaatctccctaaaagactagtccgataggggaagggtggctctcctctttaaggaggaggactagtccgataggggaagggtggctcttcttttaaggtggcttcctctcccaagctaagcatggtgggattattcagaggctcacac

SEQ ID NO: 66570 - DNA, 275 bp, Oryza sativa
tacgaccgttacgccgatgcagctcatggctggcagccagtgccaggcgggcaccactcattcccaacggatggcctaaggcgatagcgcctccgctggggttaacatgtggagcatcatcaggcagccccaattcgcgtagtacacccaacgcctgggccgcgaacgcttcgttcaattcaatcacgttcatatcgtgaatactcagccctgcgcgttccagcacccggcgagattgaagcaccggaccaaaccccatcatggcgcggttcacc

SEQ ID NO: 66571 - DNA, 432 bp, Oryza sativa
  unsure (1)..(432): unsure at all n locations
tgtccatggtgatgtttcaggcctccatccttactctgtctttctctgcgtnnatgacggtacaggagtccagtttattggcatgctgcttgtcaccatggtctttgcagaccttggattcctttctccatcaaacaggggtggactgatgacagcgatgctcttgctttgggtattcatggggttgctcgctggctactcttcttcaagtctttacaagttgttcaagggcgcaaaatggaagaacattgcattgaggacagccttcactttccctggcagtgtattagctattttcttcttcctgaattctcttatttgggggcagaagtcctcaggcgcagttccattcaccacaatgtttgcccttgtcctcctttggttcggtatctcagtgcccctagtatttgatgggagttaccttggttcaag

SEQ ID NO: 66572 - DNA, 222 bp, Oryza sativa
  unsure (1)..(222): unsure at all n locations
ctcgcatgacctccgtgcgaggtatgcgtangaggtagcatgaggggtagtcgtcggcgagcccgtctaagctcgagctctcttgacctccgtgtgagggaagcaaaggcgaccagagagcctgttccgttcgagaaggagagggaggcaaggggccggtgagctcgcactcctgtgcggtgcacatgttgcgccattcctcttcgcagcagcgcacgagct

SEQ ID NO: 66573 - DNA, 456 bp, Oryza sativa
  unsure (1)..(456): unsure at all n locations
tataaaactaagcttagagactcctactgcaaccgcgcgcatttttgacctgttcattaattctcggctccatctgcttttattcatcggnttcattaattgtttctgttacatactggagtagtaaggatagatagacacatctagttctatcngtttggttactttcgtgtttattaggtctggccacattgctttgtacgtgtttaatttgttgactaatgcatgtttctctcatcgatcttataggttcattgtatacgcaacccaaatatttcagttcagaaccgcacgtttgtcaaccatgcagataccattaaacaatttagagcatcgatcggtcgccaacatgcatgggcaagcagcagatgaaaactgagtgcatatgcacggaaaaactctgaaagactctctctgagtacgttagtaaacggcgcaaactccaatttaactagc

SEQ ID NO: 66574 - DNA, 240 bp, Oryza sativa
ctcgatgcgatggatgaacacaatattagagatgaagccgagagacttcgcctgtgggagctgcagcagcttgcatatgatgcccaggatgctgtcgatgaatacaggtatgagttgcttcgacggaggatggaggaccaaagcaatcaaaggcagagcagcagaagtcgcaagcgcaagcgcaaaggtgacaagaaggtaatattatccccttatcctagctataaccaatgctacatt

SEQ ID NO: 66575 - DNA, 458 bp, Oryza sativa
tgtttagaaccttcaagcggtgtatggcataggaactattgtctgtgcagttgttaaccctctcaatctcagcactgacagcattttccctatccccttgctgggggcggccctgatcgcaaacaaaatcagcttttgatcagcacaccacatatccacatcacaatctgatgaataaaattagtgatactgctactcataacaaatgagcttaaaatcatatatgcataaattcggtctcaaaaaccataagactaagcatttccctcaaagaacctactcaactctcaacccagaaacattcactaatggcatctcaatcaaagaagtagcagtgctccttgcccgttccaagcaaactgttcagcctccgctttccccatacaactaagtggatgagacgattgataaactgagtaaccgcatctacagagaatacaagcaggagaataccctga

SEQ ID NO: 66576 - DNA, 327 bp, Oryza sativa
  unsure (1)..(327): unsure at all n locations
cacaccaacctttcaacgggcccaaatgttgctcctgcactaattaatcactntaattacagctacgcagagcattttggctaacttgaactcgtttaagaataaatctaaagcaaaaaaaagtcacctgtcactcttgatgtgtcattgtacagctggaagtcagacactgcgagctctcttcagaaaatgtatttgcacggtcaactctntgatgcacattatatggactctgctgaaagcttgaaattgcaacaaattactgctttgattgataaggcctggtttatggctagcttctcagattgggacaatgcttacatggat

SEQ ID NO: 66577 - DNA, 435 bp, Oryza sativa
  unsure (1)..(435): unsure at all n locations
nggatgagtgtaccgtcaccatcatgaacttcaagattttagtttatatcaaagaaagattccacaactcattattttcccacctttggggaaaatgatagtttagtaggaaacaacaacatccactcactacttcaatgagaacttgtcctgctattttcgctccattaaactgtattgtattcttcaaatatatttgatatagtcattacaccatgtaataagataatgtatgttattttctgtttatttgaaacccgtaggccatagcaatgcataagcacctaactagtacacatcatgcttgcaaaagatatgataggatagatatgacttcagcgcatgatgctaaagtgtatcataaggaaaaaaaattgacagagcttangatatccgtaccggtagttgtaacaccttaattaatttcgacaactc

SEQ ID NO: 66578 - DNA, 334 bp, Oryza sativa
  unsure (1)..(334): unsure at all n locations
gatgtcgcaggcttgctcgccgcggatcctgcttggtgcggcttggtcggatcaccgatggcggctgttgcttgccaccgcctggctagcgcaccgatgctgtcgtcgctttgaccctcgccgcccgtcgcgggagaaaaagagagagcggcgaggaagagaaggaactggaggaaggagagagagaagggacacgtgagtctcacaatttcttttgcgtgtcaatgataaatcggtcccacacatanttttaattctaaacgccacctatacgccatgtcaatcccacgtgtaaaggagacccggtcaataccgctacgtaggcgtcacgtca

SEQ ID NO: 66579 - DNA, 462 bp, Oryza sativa
actaagtattcttactgagatctcaagatcatggagagccttcctcatattagttcacgtgccgctcaatgtgttcgtcctagcttgctggatcgaacacctttttccatggcaatgcaagcttgtagtcatagtcagagatcccgccgcacaggtgatctctgagccgcctgcttataatgatgtacactattcgtaggcgggcgtggccgagatgaggaatccacatgcccacgcaaacgctcggcttactcgaccacgtcgtcagcctaaacacgtccgccgcggctaccagcgtgggcaagatgacctcatccaggatggaatccatggtagcttgcagaaggaggcagcgctccaccaccacgcatccaagggaggtgccatcacgaggtcgtggatcaggcgagggtacgccgctgatgcgtccgctcccagcgtgtccttgagcgcttctaccat

SEQ ID NO: 66580 - DNA, 425 bp, Oryza sativa
  unsure (1)..(425): unsure at all n locations
gcaagcttggtaacagccgaagcgacattctgtctcatntctnctgcatatccatgcatgcatatatatatgaaacattcaaactaattgtaccttaatttcatcaacaacaattccaacaatacagagacatgcacagttagctacttcttcaatttacctttcgagaataatggcgagaggcagcaagagaagagtggcagcagcctgacgatagaagatgaagacgaaggtgttcatcccctgatcgaaggccgccttggaaacaacatacaaccccgtgtagatcacctgtatgatgatggcgatcacatatggcttcttgccatccatggcagcagcaacttattacaagactaactaattaacttgctttctgatctgctgaatataatcctgagacaactagctaaagtaaatatctt

SEQ ID NO: 66581 - DNA, 407 bp, Oryza sativa
tgcatcatctcagaatagctgtgttgtggtatgtatattcttttaacatctgcaaccttgaagcgtttaagactgttacacacctacgatacttaaatcgacattaactcttcatttgagaacagtacataactacatatagttcagtgatattcttatgtgttcaaattaaaaaaaagatacaataaaaatactatggtggtgcaggaggaactagaatcacttttggatgactctggacatctgcggacgcttgcattcttatatggcagtaaaggaatgtgctccaaatcccttggtatctggcgtatcttagcaaggaattacagcactggtttgtggaaggatcatgcaatcctacctgaaactgactctcttgaaacttctgttggtaaaatgtctggtga

SEQ ID NO: 66582 - DNA, 456 bp, Oryza sativa
  unsure (1)..(456): unsure at all n locations
tcacattngcttaaataanaatgttagtcctctctaatcttattgtaattaatcaccaaaatcattaggggcctagatgcactttcaatctccccctttttggtgattgatgacaatacgattagaacacaagagagaatgagtataatttaaggttttggtgcaaaggtttagtgaaagctcctcctaagagtgtgcataaaagcaagtagagagctccccctaaatctttgcatccacattgaagctcacaagacaacaaatatatcacatttgctcatcacatccaacacatcacatgcataagaataattacatctcatcacacacaccatataaagaggataaggcattgcaccacattaaacataataagatccattacatctcaagcatccataattaaacaataaagtcttacaaagcattaaacttaacttagaaatcacacatagt

SEQ ID NO: 66583 - DNA, 446 bp, Oryza sativa
tgaactaacccaaagctaagtactctctgtaactgctaattacctattagagaggggactagactaagctagaattcacaattgtgaagagggatgcattggtgaatgcagcaatgtgcattcacagtatagacagagagaagccaaaagctcaccagccttttgagggacagcactccagcagccaaggccatgcttgacaatgtagtccctcagcctctggtcctcctcaggagaccacagccccttcctgtagttcatcttcggcttgtcgcaggaccggcaccccattgctctcttctttccttctctgaatatctcctcctgttcttcctcctgcaacctgtatgttggtcttgtctcaatatgagctgttgcagtagcagagttgtgccagtcctttcagcaccatgtgaccccttgtcatttaaagggggttctcacat

SEQ ID NO: 66584 - DNA, 369 bp, Oryza sativa
  unsure (1)..(369): unsure at all n locations
ctaactgactactagcatgtctgtggttgactctttggttaagttcgatactagcttcatgagcttgcctaaactcctatttctccaggttaattgttttcaaagcctgtttgcttactgacgtgtcttttcattttctaggtcatgtaactctatagaccaaatgaactaggaagagggaccaaactatttctttttatatcttaagatgatggagtaaatctaactctttggttcatgtgaaattgttgcggtcagacgtagtctcttgatcagaagactctctccatttccataagttctcanggtttggatatctacataggttctaaaatatatgcttaactatgattttctattataacacat

SEQ ID NO: 66585 - DNA, 461 bp, Oryza sativa
  unsure (1)..(461): unsure at all n locations
acacatagaaactcaagcttgactaacccgagctaagtactctctgtaactgttatttattctttagagaggggactagactaggctagaattcacaattgtgaagagggatgcattggtgaatgcagcaatgtgcattcacagtagagacagagagaagcaaaaagctcaccagcctttgcagggacagcactccagcagccaaggccatgcttgacaatgtaatccctcagcctctggtcctcctcaggagaccacagccccttcctgtagttcatcttcagcttgtcgcacgaccggcaccccattgctctcttctttccttctctgaatatctcctcctgttcttcctcctgcaacctgtatgttggtcttgtctcaatatgagctgttgcagtagcagagttgtgccaatcctttcatcaccatgtgaccncttgtcatttaaaggcggttctcac

SEQ ID NO: 66586 - DNA, 335 bp, Oryza sativa
cttggaggtctcccgacgtttgtgatcttcttttgctgtgtgatccggattagtaatgttcgtgtgggtaaagtgtacaccctctgcagaagataccaactggtcgaacagtcgtgcccaacgtcatgggcggatgtgacgtgatttctagcgttgtatttgttgacttctgccctgtgaaattgctgatgtgaaaaaggcgatcaatgttggaaaaccctcagttgatggatcatatatgccccagtgtccgttgaaaatatttgcctggctccattcttgatcattctaaagactgatacatgctattctctaccggacagacacctgtctat

SEQ ID NO: 66587 - DNA, 408 bp, Oryza sativa
cttgctagctttaggttgttactggagcatttgtttctgttttttatctcgcgatcgcgcggcgcacggacacgcaacgttgacgcctctcgcgcgctggatcgatcggcggcgcgcaccgtgcggaatgcggcgaaatcgtcgcgcgcgcgggacactgcagcgcacacgtacatatgactcacgcggtttgcgtgctctgcggcgcgccacgcttcgatgatcggcaccattcgcgcctcgtgcgacttcgagatccttcgcgcgcatgtcgcggcctccagtaacaacgaccgagccataaataaggcttgaaagaaccggcgataagttcaaacagccagaacgttgtaagttcaaacttcaagtttgtggtttatcgtcaggtgattatctggtaaaatttga

SEQ ID NO: 66588 - DNA, 383 bp, Oryza sativa
  unsure (1)..(383): unsure at all n locations
gattaaagactagtttagttcatgaaaagaaaaatttcgaatatcacatcggatgtttgaccagatgtcggaaaggtttttcggacacgaatganaaaaataatttcataatttgtatggaaactgcgagacgaatcttttgagactaattaatccgtcattagtatatgtgggttactgtagtacttatggctaattatggactaattagactcaaaagatttgtctcgcgatttcctccctaactgtccaattagtttttcatttatctatatttaatggttcatgcatgtgtttaaataatcgatgtgatgtttntggaacctaacagggcctaatattgttttcatttcttcttcnccgcgggagtggacgatggatga

SEQ ID NO: 66589 - DNA, 376 bp, Oryza sativa
  unsure (1)..(376): unsure at all n locations
catcgcatatagagttgcaagtatgttctctattatcctaatgtgattgcacaggtagcatatgtattctcactaactgctcttacactatcaatgatgaatcagactagcagagagagtttccaagcaaaattgatggcacatgttcaccaattgtgatctttaataggtggcattataaatgctcatcttttgcctgcctccttcttcccttagattaattacatggtgtggcaagcagcatcctaaacactttaaagtaggactcacctaattgaagaacacacaaatagctctaccttgcctatgatggtcctncatatatgagcacatctctcatgggtctgtaacagctcatcctgctcaagggtgacta

SEQ ID NO: 66590 - DNA, 454 bp, Oryza sativa
tgaggataacgtatggatgtcaaatctatataggttgaatgatagtgggctattgtctttcgggactcttttacagctgatatgacctcgactcaaaggagcgaaggtatgaataatgtcttcaagaaaagatttcgtaggaaacttggtctttctgagctccttgtagaatgtgataaggttgctgccagtcttcgtgaaaatgagttggatgcagattttaagtcaagaaactcgagccccgttacttgcatcccaaatttacctatgttgaagaccgcagctgactcatatacaaggaagatgtattcagagtttgaagaggagtttacaaaacaattttcattgtcatgtaagttgttgcaaactgagggatcaatattgacattcatggttatgcccatggaatcagatcaggaagcaacaattgtgtataacactgcggatatgacca

SEQ ID NO: 66591 - DNA, 274 bp, Oryza sativa
accgcctctgcatccatgaccggataaaggacccacatgtcccggcctctgccaaaagtgagggcggtggagccaacattgttcggccaaaccctggacaagccggctcgggtcccccttacacgtggacgatcaggatgaactacctatgacgggtacgatggtaaaatggatattgcgcatcagaagaaccggcataccgaccctataaaaggaggagctcacgtcgcttctcaatacactcaagcaagtcaagattcctcttcatacttta

SEQ ID NO: 66592 - DNA, 455 bp, Oryza sativa
  unsure (1)..(455): unsure at all n locations
ntagacatattcagaccctctcagtagcgataataccctacttctgtttagtgattatatttgcttggtgttgtattgatatgacaatcttggtgtgtttcactatatcctcttgaagggctccccacccttatataggttaggaggtaagggtacatcattatctaaaaaaagaagctaagggtacaagtagaaaacccgaccgaactcggcataaactttctttagtattacaaaatattacctggttagaacctagggtcatatcctaaccggcaaggaaactctagcaactaaaatgtatataaatacaaataccacagccatggtccatcttctaatagcagtcatatatattgaccttgtagacatctggtgtctataatctccacacatgcatcgggtgtattgcggtncgtttgcttattatgggacatcttaaatttaccactttt

SEQ ID NO: 66593 - DNA, 450 bp, Oryza sativa
tgccaggcaaggcatgacatactctctccgccccattattgatttagacaaaccctagattttcgtgccaacatttgaccgtccgtcttatatgaattttttttatatttattatttttattgctgttagatgataaagcatgattaatactttatacgtgacttatctttttaatttttttataattttttcaaataagacagacggtcaaatattggacacgaaaaccatgtttttttttccggagggagtataagagaagttaattgcatcgtaatgctcgtcaaagcttaacctttttcaattcttggtatccgtggacgattagcgtgaacgaagcctatcgtagtatccgcacgatttgaccttaagagtaataatataatgtgaaaattactttgtctggataatgtaattaatgttgacataaacattattttacagcatgc

SEQ ID NO: 66594 - DNA, 349 bp, Oryza sativa
  unsure (1)..(349): unsure at all n locations
tctatactgaatctctatagatgaatctatgtaataagatgtggcattcttagggttntctaaaattattgcatcctctatataatgtatatgttngattcatatgattctatttagtttcagatttcaagttgatcattttgtcattctaaaattagaatatactccctcctattctttgttgtgttcctctatgctcaaattcctagaaatccagtcacttaccaaagtaaccaataaaaacatgcagcggtcaagatgcaagtatgaatgccttgcctccaactgcatccatgcatgaatagataataagtatcttgtagaggagcattactgtatcagagaaaca

SEQ ID NO: 66595 - DNA, 430 bp, Oryza sativa
  unsure (1)..(430): unsure at all n locations
tgcagtaaagtactgcctacaattaaacttatgattattgcattatagaattgtttgattcgatcgacaatacgtacatgaaaatttccatatttgtacatgtctctaacctgcatatatttaattaccttcgtatcattttacccaataaaagtgcagatgatttcaaacttacaattatactaacagatatttcatcgtgtttaattatggtatatggtatttgtatagcgctagtttttaagctgcagtaaatacattaccctagtagaatattaagaagaacttcagaaagcttgattgtataaattaaaattgttgaaaatataccggcattggcacacagtattcatacattaataaagntcacttcattctagaaatctcgtattagaactggcaattctatacccaanactaaataatcact

SEQ ID NO: 66596 - DNA, 382 bp, Oryza sativa
tatcgcttatgttcctatcgaaaggaatcatattgtgtaatgacacacgaccgataataccgtactatctgacaaagggacaaagcccatgctacatgatattgaagaatgacagaggaaataattactaaaagatgacaagagctcgcaccacataactctgcagggcttccaaactatcacgatcgatgaccatatgcaaaactgcttaatgcaagcacatagctctgatattattgcccagacaatgtctgggaagataccccatactacaaccgcaagcatctgcgacatcaacacatcgacactatgaaactctcgagttgaggagtatccagacggtaccctgatgctctccaagcattcacacagactgttcttc

SEQ ID NO: 66597 - DNA, 417 bp, Oryza sativa
  unsure (1)..(417): unsure at all n locations
agctntacagggcactacacaatatacttgttaatatcttttctaatatctcagggatcctataatatctcatctcttattctaatttagaggcatacgtgcacactatgttacttttatactacctacaagatggcgccagggcatggcagcgtggtgatgcgcacagatgcccaatggtggcgggatgactngtgcaagatggcggtggcagtgattgtgtgcccgttgtctagacaaacatgctggcggttcgtcagagcttggcgacgcgtgaagaacaggttctactcctctggtctgctaagcgccagggaaagaaaaatggaannatacgttggtagtttaacagaagggatcactttttaangtttgggaataaatttagatgttctcttggagagaatctgttttcta

SEQ ID NO: 66598 - DNA, 448 bp, Oryza sativa
  unsure (1)..(448): unsure at all n locations
taaagtaatatacttgttaatatgattgaagtatgtgtttttatcaaagaaagtaacaaacaaataatttatttgggtaaaatgggaccttttatcaaatctagaattgatgttcagccgagtgccgacctctcccgtctcttccctcactttccacttcggcacaaaatcgacatggcatatgtatatccatggactagttcatttaatacacacctaaaaagtgtttaccaagaaaacgtgtgcttggtctattttgccgaaattgctaattagtgcgtatgcaccataagcttaactcgcgcgcgtttctggcccatacttgtacatggcccacacactcccacttacccatcgcttcctctnttttcgcttctttcctgccgagcgtgcacaacggctgtttcttttttttttaaaatctgtcccttttttctcaacacgtgtg

SEQ ID NO: 66599 - DNA, 416 bp, Oryza sativa
  unsure (1)..(416): unsure at all n locations
cagcttatcaccttgatgaatcaccacagcttataatatcaggaaaactttgggagttaactagcgcattttaaaatacacaaaaaccaaatcatcgctcctgtgttaaattatttcccattgtagacatgtatgaaacattaaaggaagatatcttaccagattgcaaatgaatattttctgccattgcccaagtgaagaataccgaaaatggcactagttacaaaggcacttatccagttcagtccaaagataggcatcaatgcccctcgaaacagcacctcctgacatataaaaactatacatcaacattntcttcggaatagatccagtattctagaaagaagacttcaaacaaattatatatttacctcgcttatcccaggaagacaagcaactacgatataatcgaaagt

SEQ ID NO: 66600 - DNA, 434 bp, Oryza sativa
  unsure (1)..(434): unsure at all n locations
tgtatattgtgaataaagaaatntccaaagtattgggcatacgccatgcgcacactgctttaacagatgtacttaagtccctagaagacacatggtttcaccacacctggaaatatatggcatatgtggtgtaaaatccgagtaaataaactcataaaggatttaccaaccgcctagaaaatgaccacaatatataatcagcctaagccataatattggtcaataaaaatgcacacttacgtggcaaaaagcaatgatattgtatccaatcaattgcttaaaaacccaaacagcaccatgactatataaaaaagtcagcgggccagctatataaagctttactgtttgacaccttttaagatgcattgtaccaacttctaaaaagttaagtaactgcggtataaaaggattttaaggtattgggcacttgatca

SEQ ID NO: 66601 - DNA, 361 bp, Oryza sativa
ctgcagctatatatattaagatttaacatgatctttttatgtattaggaaaattggacaacgaactaaatacaggtactttctaacaattttataaaaaaaaagatacggttgaaaatagcattaatctgaacacgccctaattaagcttccatggactcatggtcaggtacgtaccggtgaaggctggcgacgttgacgacggtggcgttgggcgtgccggcgtcgacctcgtggaaatagaagtggagatgggtcagctccgcgtccacgacgctgcagacgatgatcggcaggaggcagaggacaatgagaggaaaccgagcaacggccatggagtgagctaattatctcctctatct

SEQ ID NO: 66602 - DNA, 408 bp, Oryza sativa
  unsure (1)..(408): unsure at all n locations
tctcgggttnttagtctctgcccgaggcatcgaggccaattcctagaagatacgagctatagagcgcatgcgccccccagcaagcttagggatgtgcaatgcgtcaccggttgcatggccgccctaagtcggtttatatcaaggctgggagagaaggcgctacccttatttaagctcctcaaacgctccggaccgtttacctggacggaggaagctgaacatgccctcgcccagttgaaggcgtatctcagctctcccccggttctggtcgccccggagccagatgaacccttgctactttacttagcggcgaccccgcaagtggttagtgcagcgttggttgtggagcgcgatgaggataatcctcattcgcgcattcccaccctgtgctggcttggcccgggagag

SEQ ID NO: 66603 - DNA, 468 bp, Oryza sativa
  unsure (1)..(468): unsure at all n locations
acacatagaaactcaagcttttcgttattcagtaaatgttatttcatgtctggctgagttgtttcatatngaagttatgctcacccttcctttntgaactgaatgcaattaattttcggtttagacaaagagtacttgtgattggtggaggtggggctgttgggctagctgctgttcagcttgcagtagctgcacggtgtagcgtttctgcaacctgtggaactaaaagtattgaacaagtgttggccgctggtgctgaaaaagctatcgattacactgctgaggtaaacgccttcagaagtccaaactcttgtacttatattttctttacgatgatgatgatatagtgaattcttatgcccttgcagctatttcggtatcaacgcaggcgaaccatatccttaatatgtctagctatctattccatctggttcatcatattataaattgctttgactctcttctagt

SEQ ID NO: 66604 - DNA, 56 bp, Oryza sativa
ctgcactgattaagaatcgcaaccgaaccctttgtcgctcgccgcgacaatctatg

SEQ ID NO: 66605 - DNA, 55 bp, Oryza sativa
cattacacctgcccacaggtccgggaaacttgctcactcctcaccgcaaaggact

SEQ ID NO: 66606 - DNA, 201 bp, Oryza sativa
acctatgaccttatcaatagagtatattaagagcctctgtacatactggtttaggccagatagataaacacaactagaccgaatcactggaagagtaacggagtcattacgattatccgcagagaatagttcatgtttggaaggtagactagagcatgtggaattcgacaaacggattatggaattgtatacacatcatat

SEQ ID NO: 66607 - DNA, 376 bp, Oryza sativa
ctaagctaaattcattttacaagttgtacaaaaataacaaatatatttgtgattgtatgataactatcttcagtttaatttgttattttttttaacttgaagaacttgaattttgtcttgtatatttatggagtaatatatctcatattaatctatgttattattttcttaaaaaaaattaataaatgcatagaatgagcacaggggatgcatgtatggtggatcacgtaccgacgagacctttggcctgtatggcgagcgttggggtggcccggaagccgacgaaatcgtagacgccatcgcccggcgtgttgctgggaacgccgtcttcgatccggtacacggtcttgccatggccggggtaccatatgatgtc

SEQ ID NO: 66608 - DNA, 457 bp, Oryza sativa
  unsure (1)..(457): unsure at all n locations
tataaaactcagcttgtggtgagtcatcacaatcagctacggtagcaatatattaaattttttcngggctatatctcggaacagctagcttagcaaagcattctttttcttttggctttttatccgtcgctgcggatattgcatttgagctgcaaactggagaaactgaaacgtaaataatgtgctctgctcttccgttttgtctccctccctcaaaacatactctctgaaataggtgaagcaatctgaattactgtggaaaaaggcagcagaagtaaaaacactcaacacaccgatgatctgctgctctgtatccctagatcgccccatttgtcgcgagaatagaactgctgcaaccagtcccctcccttcctcccctccttgtntctgtttttttttccccattcagctgtaaatgacaacctttacttctctcaatacaaagatgcgcaattct

SEQ ID NO: 66609 - DNA, 312 bp, Oryza sativa
  unsure (1)..(312): unsure at all n locations
ggggatgcagaaatagtggcttaggatccattacgcgttcaaggccttttgttcttcttcgcatccgttattttggcacaaagatnttttggttctcaaataaaaacagtctgaaaagggtcaattgtacgatatgaatctctaggtcccgggatttcttaccatcaagttggtaaaaagccgcgaattattggcgattgctagaattctctatgatccattttggagatcttcttttttttagactatattttgttgcgagatgttctgctgcattccttattctatatctcatgccaaacaggagaatgc

SEQ ID NO: 66610 - DNA, 469 bp, Oryza sativa
  unsure (1)..(469): unsure at all n locations
acactatagaaactcagcttcgataaaacggtatacccaatacgtcgaaacttattttttttggttgagaaagaccgtttccacatcaaaaacaacaaaaactagcgcaaacatgtaatagcgtattcggaattgtaaccaagccccccccatgggttctatacccgattcataactagaaagcttctctggtccttcacgaaccggagctaaaagtgctgaaatccaaaatgctaaaataggaataaggcttgctattattagaaatgcccaaaaaatatcatattcgtgaagcagaaacataaatgtactcccattaatgtggaataagcggaactgaattagtcaattcaagtcagcattgtcaatttatacagaatttctctcttttcctcggtgaaacaaggatcggtttttctcanaccanagggcttagtttagcctttggttcctctatgccacgtcttct

SEQ ID NO: 66611 - DNA, 451 bp, Oryza sativa
gcttcgacatctcggcatgcattatgatctatgatgccgtgttatattattacaacaagaggcgttccaatctataatatatctactcggacatcttgcacatacattttcactcaagcaatgactactcgacgacaagaaactacaggtctcgactctatgttcagttgtttcccaactaaccaaagagtcgggggctacacaaatacaagactgtcaaaattcgacaagctgtatgtcaagacgaagcaatcaactaatcagccaaagagttctacggaatctactccaagagtcattatcttcgtctttgcttcagagcaggcattctatttcagcaacttcaattatatcaccgtcaattttggcttcgtcacgccgccacaatctactccagaattctcaaatatgaaggttgagattaatcaacatgtccgcgagttaaggtatc

SEQ ID NO: 66612 - DNA, 439 bp, Oryza sativa
  unsure (1)..(439): unsure at all n locations
atttctagttttctagacagcccagaatacagcatctatactcttgttcttatcaagttttggtgttggtcgagaaagcaaaaagcccagccccccaaaggggttggcagtctttatctgttttgagatcaaaagcacattgtattatattccaaattagtctgacaagagagcaatcaaagaaaaagtggtgaaatgattcctgtttggcacaaaactgacattttgtatcaccctttctccaacctctcctaaacaaattgtccttagtcagattctcgcctctcaaaagaatccaaatgaaaattntaattttcaaaggaattttgaaactccaaactttcttaagaggaatggtctatttgtgaacagatagtgcattgtagaaggatttcacactgaagacccctgtntttgtcagattccagacaagcttatc

SEQ ID NO: 66613 - DNA, 383 bp, Oryza sativa
  unsure (1)..(383): unsure at all n locations
gcttcaaccagacatccttcactttgcctggctgtagatccttcagagtaacttgagcacagccaatcaattcagattcctgaataccatcatcatcataaatcttcactgtcacagtctgagtatctgcatcttcaacaataaactcaaagtgttcattccagatagggttcaagtcgctgttctgtaaatntgaagcacataaacagctgtcagtatgcattaaaaaatatacatatctattggagcacataaacagggaatagagtagctgatacttacaattgttttacttctcttcattntatctggcaaggggtcgtacatacacaattgcaaaagggtcagattttcctatcagatctttgttcgtcaaatccctc

SEQ ID NO: 66614 - DNA, 445 bp, Oryza sativa
  unsure (1)..(445): unsure at all n locations
tttgtganaagaaatggttggaaaacccaaaataacgtgactcttgatagtacattcccctggaaggaatataagggcaactcaaatatgcccggaagttaaccttagaattgaggaagttgacttcctagccaaaccgatagtcctagactcgcaaagcttggacatcatcctagggatggattggttggctaagcacaaaggacagatagattgtgccgaaaagtccatcaccttgcaaggacctggggaaaagcaagtccgctttacccctaacactcctaccgcaagtcggtctatcttaacctgtttacaagtcacctccttggagtcggtgcccatagtgtgtgaatatcccgacgtatnttcggaagaattaacaagaatgccaccagaccgagagattgagttcgccatataactggcgccaggcaccgcaccaatt

SEQ ID NO: 66615 - DNA, 271 bp, Oryza sativa
agcattaaatgctctttgctagctttaattgccagacgggagaccctacagcctataatagaatgcaaaaagaataattggtcgtcttgaactggacgataagcgaatgattgcctgagagctactgcccctctggccaaacctattacatcatactgccgtaaaccgggataccaaatatttgagcctcagaaatatgtcattggtatctgaagcatactgtagcacttatggctaaccattgactatccttatctgacaagaatatgga

SEQ ID NO: 66616 - DNA, 462 bp, Oryza sativa
  unsure (1)..(462): unsure at all n locations
aactaagcttaaccattcatggcctgcaaagtcatttcttcagttctgatcatcacttacaggaaacagaataaaaaagttactttgcagtggtataattgcgagacgtatgatttttcagcttanaataagaattcagaaaagctaatggtacatcatgaactggtaaataatgagaaacattaccagaaagctactgccactctggccagtactattacttcatactgccttaaaaagggttaccaaatatctggcaagcagataaagttcattgctccctaaaccattatctagtactactttctaaccattttctttcctataaggacaaaatatggacaccagagttatatgttggtgtgcctcaaccaaaagtggaaacaggatcagaactgcatgctccagagaaccggctgcaataatgcaatcacatcacgtagggactcctgcaatatgccg

SEQ ID NO: 66617 - DNA, 434 bp, Oryza sativa
  unsure (1)..(434): unsure at all n locations
ctagctagcagtagccgtgatcgatgtgttggtgtggtgtatctggtacacggcccatgcacggtgaaggccgcgtgagtnttcccttgtgaaagaccgtagaatcggagttcggcccgtgccgggttttttcagtttaacccacaccaaacgagtcacgcacgtaatagcggagccaacacggagttcccacgaagcatgggaggctatataatatgcatgcagatcgaccacactcgacacctcgtcttgtgcagagagctcgcaggtagctattagctaacgagttagctctgaactcgcctttggcttaactaagcagtgagctgcaatgaagtagatacttgtgcaagctctgagcgagagatacaccagtgtgcaatcgtagaacttgtgttagacacacacacagagagaggatgagctcatataat

SEQ ID NO: 66618 - DNA, 442 bp, Oryza sativa
tgtttcctgtgttctggaagttttgtttctctgaaagttgtttcattgagatgacttgtatgttctgacttgtgagttggtgccttgtgtttcttcgcatacacgtagcaaagagcatttcaagtggagcaagagcattatactattagaggatctttacagatggattgcgcacatacagctgcaaagacagccaatgaaacaaataataatatagtttgttaagatgaacttttatatcagaaagtcgaagcagaagatagggacctctcaacagactaactaatattcaaaatttattgtactaatcccccaactaacccacctaaatctccacaaaatcagtaatacagttcacttcagtttaaaaattcccagtacagttcacgcagagcaaagcaggaaattttcttcagttcaaacttttgacaaccatggaaat

SEQ ID NO: 66619 - DNA, 335 bp, Oryza sativa
tcctttacattacagcgttatcaagcgtcactatactatcttgtccaagctgcaactgcgaactatcacacagatgatgcaaacagagaggagctccagtgccgtacacgatctgagttgaagagccctaactagctcatgcgtagcttagccgtctctcactctctctttctttcttaccaccactaccactattacccgacaactcgtgcgaatgcgaaaaggccacacttgtggaagaaagaaaatagctatctcattcatgttgcgcagtgcgcaggtcgaactgacacacccatcagataaaacccccccttttcccttgaccgatgaaa

SEQ ID NO: 66620 - DNA, 403 bp, Oryza sativa
  unsure (1)..(403): unsure at all n locations
ttaaaactaagcttaaaagaatagttaaaataaacatagtactccagatatgtntatctaaaagaaagatctttgcattatcagagatgttttatctaaaacaacatcagatatgtcgctgtggctcgatggttatacagagaaattcgctgactaaattagcagttctttttctaagtctgacggcgcttaagcggatagaattgatagttccttcgttaccaactgatgtactttgacacatttgatttcactattcgtattttttctacctcctccatttaaaaattactttacacgtcttaaaatactgtaatctatatcttatgtccgggtttataatattaaaacggaggtattttagataactccctctatttcaatttcgtatattattatattc

SEQ ID NO: 66621 - DNA, 393 bp, Oryza sativa
ccttatagccgatgcaattcttcaacatatgactcgtcggctaacactcttatgaaacattaggatgaacctatcgacttaacaaggaattagatatatcaagcagtcttatgtagaaatcgaacctagctcgatgcgagcaccaggattatatataataataatataatactcaataagccgagaaatctgtctaatgtgatggatataataaatctatttaaaacaacattgtggttgtagagatatatcggctaatgcaaaagatcagatctaaccgagataggcacaactaaaccgatccatctcttaacacaatgcgatgttaggtaggaagatatattaccaaacaagagcaattttagaggacgaagcgatgcagccttgaacaat

SEQ ID NO: 66622 - DNA, 448 bp, Oryza sativa
  unsure (1)..(448): unsure at all n locations
tgaatcanatngggaaggaccataccttatcaagctctttttcttacaggatcttttcgattggcgacactagaaggtgacgagttcaaccattcctggaatgctgcctctctcaagcgcttctatgtctagaacgggtggcacccaaatcgccaacttgtaaaaatgtacatattgtcatattagcccctcggcactacgtaacccccttggcactatgtaagcctttcggcaagaaaaaaaaagaaaaaaagaggaaaatgagaaaagacaaaaaaaaactggatgtagggctattatccactacggaggcccgaaccagtataaaacctctgtgtcctccgccttctttttatttttgtgtgattgacagtttgtcgaaaaaccccaaggcaaacgcctgatcagcgaataaggccagtgggcgaaacgaatcggccgaagcatc

SEQ ID NO: 66623 - DNA, 426 bp, Oryza sativa
  unsure (1)..(426): unsure at all n locations
gctggtcactagaagacgtactgatggtatgaaaaagatngatcagcacaaaataaatgaggggctatgaaggacaactactgtgctctcgcacaattatgcgattgaaatggtgatcattattattattaggattctcatcctgctaagccctgcacganaagaactatgactacttttgttcgttatcttgtccatgaaatttttcttatgaatatgctcagtaacatacgtttaaaaagacaaaaaccagtgatacatttctgatcttactaaagtcatattaaaagcttatacatgtgtgtgcataatattcgtaggaagtaggaattcaaccttgataggtgaatatatattcgtaagaaacaaggttcaatcaaattctattttttaataaacatgctcatatctaaaatattattcatg

SEQ ID NO: 66624 - DNA, 456 bp, Oryza sativa
tccattactatgcacatggcatgcttctctctaaaccagttcttttttttttttgaaactattctctaaaccagttggccccacattataaaaaacatactcagccaggtagacttggcaatgtatgcccacacatcaccaaacaaagcatcttcatcattgaattgaatcctcctttcctaatactgattcaatacttcaatgtaatgcggcattaatcaattgattaagagaaggcagggagcagagcagacaccatcctcatacaatacaattaattaacacataacaccttgcagtaataattatttgtttgatggatacaccatgaagataattaaacaaccttttcatggacaaaatacattgaggtccctttgagcagggtgcctttacattttgtgccattaaggtaaaaaaaaaacagagagaaagggaagaacagggagagcaaaa

SEQ ID NO: 66625 - DNA, 373 bp, Oryza sativa
  unsure (1)..(373): unsure at all n locations
tacttatacaaattacatgctcagttatatatattatcnggccaactgagctgtgctcaccaaagtgctgaaactcggcctgctccacaatccaacactatggcggtgcatagtctggtaacctccgacggacctgcataatcgacgctttaatccagataaacacttcaggagacaaattcatctcgctgaggacaacaacaataaaaagagctgccgttcttggacctcacggagcacacagtggcacgcggcgtatatggctggttttcggaagcaacttatgcgaccgggtcgttctcgccgtaccgaaggccgatttcttcataggcagaccgcacctttcaccgcgccggccgctgctcggcgcctg

SEQ ID NO: 66626 - DNA, 455 bp, Oryza sativa
cattacggacctataaaactcagcttcccgagataaaacatggcgacggctcggccttactttgactgcgaattccggcggggtttggcgcaaaggaacgggtggccgacgtggagctcggctttgtggagccgacggtagcggcaacatatggcggcgtctaccgaggctcctgcgaggggcggctggagcgatggccggcggcggagagaggagccgaacgtgtggaggcggctagggctatggaaaaactctgggaaaagagggaaacggatgaggaagtctatggactgctatttatagccggaagagggagagatcggctcgggaacggatgaaatcagcgaccgattagttagggttcgccggaaaataggaactcaaaaccgcgtcgaatccatgcgatataccacgggattcaagggggtttcttgtggataaggtagaggagatca

SEQ ID NO: 66627 - DNA, 361 bp, Oryza sativa
  unsure (1)..(361): unsure at all n locations
gcttatcttcataggtatggttacactctatatatgcatctaaattattataaggattaattatgtttggtcttctcctaacctgaggtgatgttatttgtcttcattttcatgcccctataattattacacatgaatgtctttangtttgcttagttaagntatcttgtattcatgttcatgaacctaacatgaaatgaaaaccaaaatccaaattacataaaaaaaactcaagtcaaactaacgcacttatgtatatgcatgcacacatttatgnttgcactcttgtcttaagttataattgaaaaggttnnntaatttgtctcaatttttattcatgcaagagttcgatcaacttcat

SEQ ID NO: 66628 - DNA, 203 bp, Oryza sativa
tctctccacgcctaatactgttggataaatcaagtttttcttccccgttaaaagctatctaaaaagttaccacgaatttattgggtaatggaataacctaatatacactttaccatggagaaccggcaaaaacaggattagaagatgttcaattgtggctgtaacaacacttataccattggtaaacacagggtggtcaggcg

SEQ ID NO: 66629 - DNA, 340 bp, Oryza sativa
atctttggtgctcatcataacatcattgacaatgtctattaactgagctgcaaacaatgctggatcttaaaacccgctagcatgacgacactcaacgccctctccagacagacatgagatagtacgctggcgcacagaaacctacttaaaagagattccttctctgtctgtggacacgctgacaggcaacaatatgaaactctagctctatcataaatataacacactataggcatacttaaccacgtatgatgcaactcatgtttacaacacatgcgcatgcaactggagcttgagtatatagcttggctttattaacaaaaactaactttacacatca

SEQ ID NO: 66630 - DNA, 435 bp, Oryza sativa
  unsure (1)..(435): unsure at all n locations
tcgccattgctgcctagctagctaatacgttcgtgcgactctagcttcctggctaataatgctgtcttttggtcgatcgatggcttgctaggtacttagaagctagctagagaggtgcgtcgatttgcagagctccaccgtgtatttataaccccaatgctgaggtgcatgaatttttaagttagacatgttcaagttcatggttttgcttacgctgatgcgtttcagcacaagagctgggtgatgcttgtcagcataagcaattccatcgttttgcttctaaggaataatggccgattagtggatctagggtggcatggtggatcaatgaagggagtaaatttatttgagagattatatatgtattggtgcttccctanacgggtagttattggaaaatttgtaaattgagaactaaattattgagcatatgat

SEQ ID NO: 66631 - DNA, 451 bp, Oryza sativa
  unsure (1)..(451): unsure at all n locations
gagcccttaatatccattttaactctgacagactcctcatgggctngcatctttatagaaacactatggctcctttcttgcttctgttcatggtcaatttcatccatagaaccttcacttaggtcctcacccttatcactatctacattaaaagaagtcccaaggattgagcactggaagtggttcagcttctcaacaaggcttgggtggatagccaatggaagcgaaatgaagtgagagtaatctagtattggacttttcacggcctgaaataaaaaggaggagcctcaccgtccagggtgataaccatgattagctgacataaataggaattcaaacatgactntatcanatcangtggcagtagaatatatttgtgagtagctcactggtgatgggagacacatacttacaccttntgacaactttaactttgactagtctagtgcta

SEQ ID NO: 66632 - DNA, 348 bp, Oryza sativa
  unsure (1)..(348): unsure at all n locations
tctcatcatggaggagatgaagaagagctttgctcggagagtgagccagtgaggcagtcaagctagcattagcaagggcggcgacatggacggcgagtcgccggcggcggcggcggcggcgctgcggctggccgccgtggcgaagaggtggctggagaacccccgggactcgctggcgaggagcagagaggaaggctgcggcgacgcgttcaacacggtggtgatgcccgggttccgcgtctccctcgccgagcccggccgcctcgtctgctccttctgcgtncccgccgccgtctgcgacgtgcgtcttcttccttttccgcggccatgctcctctctccctgtgtt

SEQ ID NO: 66633 - DNA, 308 bp, Oryza sativa
  unsure (1)..(308): unsure at all n locations
ccgcaataagtgggtttctgcatttgtgatccaagaatataacccaggttaatntattacatgttgatgctagtaatatgtgctatagaacatctatagccaggaaggtatntatgttccttttgcctcgtatgcatctgacaaatttcattttcattgcttcatggatatttactgttatctattatataaacattagatatgactagggcttcgtgaaattcctactccaatgctcgttttaggcaattactggttccaatggatttggtcactacgaatggtaaccgacgcacacatgattaaaa

SEQ ID NO: 66634 - DNA, 413 bp, Oryza sativa
aaatactaagcttaagcatgaaacgacgaagatgtccatggtccaagagttgttttcttgagtaccgtcttcgcgcttgagtccgtatgaacctggtcgggtgacttcagagatgataaatgggccctcccataaaggagataacttgtgccgatcccgggtagtttgaattttcctcaaaaccaagtcgccgactagaaaggcacgggatcgaacattgtgattatgataacgccgcaacccttgtaaatatcgagccgaccgaatcaaagctgcttcgcggacttctttcaatctgtgcaagtcatccactcggtcctcttcgtagcgttcttcacggaaaattcgaaagcgcaaagaattcaattcgacttcacttggcaacattgcttttgcccatagacaaggaaaaa

SEQ ID NO: 66635 - DNA, 453 bp, Oryza sativa
  unsure (1)..(453): unsure at all n locations
tgctgctatcgccatagccgatattaatcagcagattgctcttcatcgtgctgcccgtaaaaaaggcgtcgtccacgtgttgacggtcaaagcccgacatcgggccggtatccagtcccagcgcccggcaggcgacgatcagataggccgcctgcatggaactgttgcgaaacgctgtttcttcggcaagttgtgggctggaggtaaaccaactgcgggcatcaccgtggggaaacagtagtggtaaccgttcataaaattcactgtcccaggcgacgatagcggtgacgggcgcggtcagggttttttgcagattgccgctggaaagtgccgggcgcagacgttcttttccttctgccgtgcgggtaaacacgatccgtgccggagaacagttagctgatgtcggcccccatttcatcanggcataaatctcccgtaacgtctcatcgctga

SEQ ID NO: 66636 - DNA, 321 bp, Oryza sativa
  unsure (1)..(321): unsure at all n locations
agaaaattcaggaaactttttatgatggatttgaacggattgatgaaccctaatttggccggcgcagttntgtactgtagcaaggaatggggaaaatggcgagagtctctgcggcgaagacgaagagacgttatatttcacttcggtgctcttagggtatcgggagtgctaacaaggcctgggcctgcacagtacttcagcccaattttattttcagcgtggctcgttgtgatcttaggacttngcactttttgctttacaatatgtgctacacgatgtggccaatgttttgaaatcctttaatgcggttgatattcttgg

SEQ ID NO: 66637 - DNA, 451 bp, Oryza sativa
  unsure (1)..(451): unsure at all n locations
ntttcgactaatgtccgaccggcggcatgtgacccacagatcccttcatatatgtcgaggaggaggtgtctgctgtcgtcagatgagacgcattttatgagtaccccgtttggtgccttcttgtataggtcattgccgatcatatagtaaacttttgctttgcgggatattttctcggcttctgcgtcgtcctcgggcaactcttcgctgcttatgaatttaatgagtggggtgcgccagtcgtctgtggtctcaatatcggcaacggcgcgctctgcctttgtagcccccgagccgatgttgggggcgaccgagctatcttcgccggttgcctctttcactgatggcctcgtcaggacgtccagaaaggtgctacgttcaagtggttctcgtctggacgcatgtcgtgctagatcatccggttcgatgttgtctttgcggtatacatgtc

SEQ ID NO: 66638 - DNA, 302 bp, Oryza sativa
  unsure (1)..(302): unsure at all n locations
tnctttagtagatcaatttccttaaccgaatatagcaagaatctgacaactgatgacttgacaactctcatcggctaatctcatgacttcaaagccgatgctgactctaagccgatgactactccgggcttaccatatttcactgttaacacacacgtgggtgcgatgttnttcaccggaacgaaaaggttcaaaaaacaccaaaacatgatgtttggaacctatggagtggattgtgttgcgttcgtttgaaaaacaatccgtgagtcgcgcgatgaacatttgtcatttaatgccaatat

SEQ ID NO: 66639 - DNA, 433 bp, Oryza sativa
tactataggacatcacaacacttaacgcaatatattatgactctgactactgatggctcgacaactctcatcggttaatttcgtgactttgaatcgacgctgactgtgcgctgatgagctcatccgtgcttacctaaaatcatctgatacaccacacgtggcgcgctatgatactaaggcgagaaagactgtatgaaatgcaccgacctatgatgacgggagactttgtacatagttgtgtgcacgcatcttagacataactaattcgtgatacacagctgatgaacatattgatattgaatgggcgtatggtgacacgcattatcgatgagtttgaaccgaacacatcactacatgagatgaggacatatggtactggctatgcagagatctgttagaataataatatcgcgacacgcgtaggtcaactaag

SEQ ID NO: 66640 - DNA, 455 bp, Oryza sativa
  unsure (1)..(455): unsure at all n locations
taaatactcagcttgcatcttagcaacacccaagttgctgcacttgttcttatgcatcccttngcatggccattctcatgctgggggctcgatatactcaggccattcccatgaggacaagggggctacagattcctatttgtggcaattgacaaattcactaagtggattgaagcatagccaacacgagaaatcaaagccgacaacgccatanaatntatcaagggaatattctgcagatatggattgtctcaccgcatcctcatagacaacagctcccaattcactagaggcgacttccaagattactgtactgaactaggaatcaagatctgtttcgcttccgtatcccatccttagagcaacngacaagtcgagcgtgccaacggaattgtactccaagtgatcaaaacccgcgtgtatgacaggctcatggcctatgacacaaaatgggt

SEQ ID NO: 66641 - DNA, 455 bp, Oryza sativa
  unsure (1)..(455): unsure at all n locations
taacgaaatggccatggcaccattctttcggaagcagagtataagctccggttgagctgtatcgctagtactaccatatttgtgatgcaagtttgacctaaaaacgcagggtcccttgcttgctctggaaaaagaaatcagaagacgattgcagacggtgtttgaactcaaaaaatcaaaatgattggccctgaaaaagtctgaccacccacagttaagaggaacacaaattgttaactgttgcttgcactgaaggacattgagcagtgaattcaccaggggttttaacctacaggtttgcagcaagcgtaatcttggtaataggttgtaacagcatattctaatgactaattagtcggccaataataattccaccagatacaaatgtctgcaaaactctgaatactagtacagtgcattntgtgaggtgcaatgcacactatagaatctgaatc

SEQ ID NO: 66642 - DNA, 366 bp, Oryza sativa
acaactatatctatatgggacacatgaatccagcatcggagaagaaaagcttagcggctatagtcggcttcaccggttattaaagggacattcatatataagatgaagagtttatcatattaattaactagtagatgcggcatctttaaatatctacatatagaatcggatacctgtaaagtatgagtacttgcgtatagaaaacatatgaatattatatggcattaattatttattgcgtttattcgtggatagagatgcacttctaactattaaaaaatatctatatttcaagacaacgataataagtactggtgatagatgacggcacaaagattatgtgatggacttattataattatacgc

SEQ ID NO: 66643 - DNA, 445 bp, Oryza sativa
  unsure (1)..(445): unsure at all n locations
tcaagaagatgtcacacagtccgtgccatggccagatnttcttatctgatggtgcatgcgacattttggggctaatttttatagacaattcaagagtaagagattgatggacctgttcaagaagttatgcaagcagaatcaacaaagaaagtttgatgccatatgggagcaactggatcatttgaccactacacacatggaagaggttaggaaaaaacccatagttgccagacaggaggagccggagggacttgaacccattcctaatgaagcaccaagtattactcggcgcacgaagcgtggaagggccacgaagtgcttcacggagtgggtagaatttgagccaacggagaaatggtcgttgttgtacgatacaaatggattgaggtatggtgtgatgacaacaaatcttgctgaagtgtataattgggttatgaagaataca

SEQ ID NO: 66644 - DNA, 260 bp, Oryza sativa
  unsure (1)..(260): unsure at all n locations
gctgatcatgtggacgccttcatggatgtatatcaacatacactcctggtcattcgagaccttgacagcaacttcactgtcaccgcctttaaagccagccacttccccagcaccgtaatgttcctcttctaaggagactccttcggtcatgtcctccacactagcgactgtcacttgcccctctttcacctnctcactgactacgtcttcctcaaccgcaccttcgtcgccacctactctctccacttccccaccaagca

SEQ ID NO: 66645 - DNA, 268 bp, Oryza sativa
tatctctcacgctctaggaatggatcagtctgaacatcaccatctgcttgtgggcatcgccgctgactggtgtgctcgcctataccggtgggtggtcacaccgttgttgttgggcgtttacaccttcaccaaccggccggcttgttcaccggcgactggtattctcgcttataccggcaagtggtcacacacgccgtggtgggcatttacgtcttcaccgaacggcttggcttcgccgccggcaactggtgtcttcgcttgcaccggt

SEQ ID NO: 66646 - DNA, 302 bp, Oryza sativa
  unsure (1)..(302): unsure at all n locations
cattctaaagtatgtctaacatactgatcctgaagaatatgacatgtgtcaatgttatcatctacgtaggtgggttcttttttaagaaaaaacacacctctaagtacggttactttactcttaatagaggctgtaaatactacactagtgttaaaacgacgcatatagntaaattaaatcaaatacataaaggtttaaccagcgagatttcagccaccggtagtggcccgcgtgacatagcggtgataatgctcaagatgcatgtcgccgttgaaattgcggaaagaaaaacacccataatg

SEQ ID NO: 66647 - DNA, 444 bp, Oryza sativa
ggagggtctcatccctccaggcctcggcgatatcgcatgtctgcgttatctttttctcaatgcaaacaacctttccggcgaacttccgctatctctgtacaatttgtcgtcgctgatgatgctccaggttggcaataacatgctgcatggcagcatcccttctgacattggtcgcatgcttcccggtatacaagtgtttggattggatgttaaccggtttacaggagtcatccctcattctctctccaatctttcaacactcacggatctgtacctctcagacaacaaattcaccggatttgtgcctcccaacttggggaggttgcaatatcttcagtatttgtatttggtaggaaatcaacttgaggcagataacaccaagggctgggaatttccacttcactgtcaaactgcagccagctgcaagaatttgtcctcgctaac

SEQ ID NO: 66648 - DNA, 109 bp, Oryza sativa
gctaagaatcgctcacggagacgccatgaaaaagaagagttatagctataatacaccagatacgccaacatgcaggacagggcaaaagctaggccatcaaacaccccac

SEQ ID NO: 66649 - DNA, 379 bp, Oryza sativa
ctaataattgccgagaaatgaagaaagcaatgtaactttactcgttagtcgtaaagcaaatagtttggaccttattatctatagtatgtcacaatttcttgtgtgcgcaaatacaatagcaacaggtgatgagtgtagttgattgttatttgctctgatgtcctctgtcggtagttcagcttgactcatctctagcctcttcatggaaggattgtgtgggagaaggtcaacccaccactgcagcgcgcggtgcagaagcaagtatgcagctcttcctttgagccttcataatgttcgatcgagtaagaaaccattactctcttatggctcaaataatattttgcactgctaactatttcaaattttaagggggtagatg

SEQ ID NO: 66650 - DNA, 335 bp, Oryza sativa
  unsure (1)..(335): unsure at all n locations
cgtctggtctataatattcctgaccatgttccctacatacatgaaagtgtcatgtatacctctcccacggatgaaggcgctctgattcgttaggatcaacgattgcattattggcttgagtcngattgctagcactttgggagaagattntccctaagccatggaccanacttatcggtctatagtctccgattccctctgccccttcttttttggggattagcaccacgttggcagaatttaggaggttgaagtgcgtgtttcttgaatcgtgtaaggcgttgaaggcggccactacatcatttttgatgatgtcccaacacgaattaaagaac

SEQ ID NO: 66651 - DNA, 455 bp, Oryza sativa
tagcatatatttgtgaagattgatttgattcctgagtgttctccactcgtggacactagtgtgatccatttgatccagaataagatgcatcaatttgcaatcaatacatgtggcctatcatcatgggttactcgctcttgtgtagttgtgtactgttctagcatagctgtaatttgttgactccgcatgcacattccggttaaaaatgtgtgagatgtatttattcttagtaatgtataatttgatactggatcccaattatttggaataaattgtgcagtttaagctctcactgtttaaacttccaaggaaaaaattgtggcacagtttccttcaagttatcgtttcaaagaccttccagatgctgatcgtatgggaacagagtaaatggaagtcttttttacaccaatatggtagtcagtgtctcagtgactgtcatattcataagatatttc

SEQ ID NO: 66652 - DNA, 409 bp, Oryza sativa
  unsure (1)..(409): unsure at all n locations
agtcgaactcacctcacagccacatgcgtgtattcgatatanataatatacgcgccacagtgagaattagttactcgcgtgcgttgggtgagcaaccttctgtaataaaatatgttatgggatgaaatctcaaaacatacagtgacaattgaggttgtttgtgcaaaaaaaatttcaaaacaaagcatgggtatatacgcatgctttcacggaagaatctgtatatgcacgttttccatgtggtggctatattgcttctgagcacggacttaattaacaggtcgacagtcagcatttcacttctacgcaatgcgagaaactcatggtattcatttaggagaatgattggaccatgaattatttttccaccccttttacatgataatngcatacggatcatcacagtaca

SEQ ID NO: 66653 - DNA, 459 bp, Oryza sativa
  unsure (1)..(459): unsure at all n locations
ggaagacgacactgtagcanggaagtgaattagactttcactgttgctttntttctccagcccgattgaaggagggacaataaatggacttcagaggaggaataaagccagctgaaaggaagggagtatgagccgaggacttaaggtgaacttttccagtttcagcacgaaaaggaaaaggggattttaattacttttccaattaaattaatcactgaaatgatctctgaattgttaaaaatacttccaatgctcaaataatttcaagaaaaatcctgaaaatacttggacacccaaagtacttaacaagattataataagaccatttaatgattaatttaatatgtggataattactgaaatgttctttgtatgattaaaattaggaattgagctccgaaaaatccgagaaaattccagagagtacaattaaccatggangaattaataaaaattaaa

SEQ ID NO: 66654 - DNA, 409 bp, Oryza sativa
  unsure (1)..(409): unsure at all n locations
gcttgaatgaacttgagcgcatactntggagagggaatganaatgtgttgaaatggggtggatttccctctctcggccgggtggctcttatatggtacccacaacggtcagaaataacatgtgagacccactatccattaccttgccaaaagtggcaggtaacccgtgcctggccggttcggccgaacctctggtgggccaacccgccccactttcggcccgtggattctaatggtcagtgtgatcgtggcacagtaaatttttggtgaaaattttattttgggttgctctgaaaaaaattcatttgaagaatttcctcaaaattcaaaaatcctaaatgcaattttgaaattcanacatgtgtngatgcanaaaatcaaanntgtgaacataaatatgcggatacata

SEQ ID NO: 66655 - DNA, 448 bp, Oryza sativa
  unsure (1)..(448): unsure at all n locations
taagttattntaatatgatgtgaagntgatttgtttgcattgcaagncacttattgtatccacaaggtggatgaaattgacaccaactgcctatgctactattaaccttgctcttatccatactctccacagtagcaggaagcttcacctcataggtgcaccatgaaccgctcctcttcctctctaccttgggggaggatgtagttagtggcccaggactaaagacttgggggaggtcaggggtacaaaccttgggttacttcccacttggactaaagacttcactcttcaggtgcttccacgtcagtggcaaaaaataattaaatgctacaaaatggcaatcctagaactgatcgattcccatatactgtcaagggagggtggaaggcttaagaatagataagagggaacttatggtgtgtttggttcattgcccacacaaaaaaaa

SEQ ID NO: 66656 - DNA, 442 bp, Oryza sativa
  unsure (1)..(442): unsure at all n locations
ntaatatatnttttgaatacttacactggatgaaaatcatatgttcattacagnggatgttgatctatatgtaaatatatgtgtttgaactactgccctgtgattgaacttactgcattttgttattaaacacctcactctgagtttatttgtagaattttccaatctaaacttagatatctcttgctctaattagcgaagatagttttagttgtaattctgttagtttgctgtaaaatacaccatgaggcaactttaaactgtgggaagaccaagaagtacgtaatacattttcttttgataaggaacgttcagtgactcaattntaaccaggattntattttgcttatggaaaaatgtgttctatcaaaccgattgttggtgtgacctatattcgttatatgtaggggatgcaattgttaccaatgggcatctgctagaa

SEQ ID NO: 66657 - DNA, 343 bp, Oryza sativa
  unsure (1)..(343): unsure at all n locations
actaattctaaggacagttccaaacatccacctcagctagttggcatagtgttaaatataatgcaacataagcaaaaaggtaggtgacaagagagttaatgcagaggggcaaaagatgaaatcgtttctcacgcgtgaaaccaattttaagcatgaaccaagaatgataagaanaaagaatagatgggtgaaaggagaaaaaagagttgattggatgaagaatttaaaacaaaatctgcttattggtctagatcaacatcgatctaccctgaaagaagatttttataaaaaaaaacatcgatctccctgcacttgtcagctaacatactgctgatactgatat

SEQ ID NO: 66658 - DNA, 445 bp, Oryza sativa
  unsure (1)..(445): unsure at all n locations
tctanagttagtttcatcaaagaggtactccatccagagtggctagccaacccagtcatggtgcggaaggccaacgggaagtggaggatgtgcgtcggcttcaccgacctcaacaaggcgtgccccaaggatcacttccctctccctcgaatagaccaactagtggactcaacagctggttgtgagctgttaagcttccttgacgcttactccggctatcaccaaatcagcatggcaaaagagtatgaggagaagacagcattcatcacgccgttcggtgtattctgctacattaaaatgccgtttggactgataaccgcatgaaataccttccagcgtacggtctaaggggcacttagcgatcagctgggtaacaatgttgaggcctacgtcgatgacattgttgtcaagaccaagacagacgactcattgattgacgatctac

SEQ ID NO: 66659 - DNA, 301 bp, Oryza sativa
ccgacgacgatgacgatgactccttcggatcaccaccatctcacggccggatctcgcagctccctcgccgtcgacgctgacagactgaatctagagaagcgaacccctagagctgacaatatgaacaccgataacagaggaagccaccggagatgagcctataaagaagggatcttcgctcctctccggataatgacgtgaaggcaaagcaagcagcaatcctaccagaagaaacaatgcatccagcaataataatagtagtaataaagatttcaattactctcataatcaatactttcta

SEQ ID NO: 66660 - DNA, 463 bp, Oryza sativa
ggacacataaaactcaagctgtgaattggaaaggcactcagtagactaaggcttatatgtttgaagcactcggttcgattcgatgcgttcgagagaagattatcttatcgactataaaggtctcaggggctatttatgaagattatgggtactatgcatctgcgcacacggctgggctatcggactggttataggggatagatcatgtatatggaatatgtaaaggattgggactcacgtattacgtttacttgtgtatcgaggaaacgacttatagtgctggttcggcaagattttaaagtagttgtaggagatttcaacgggattgggttgaatctctattttgtaaacatatctcctccgcctatataaagaggacagcgtgtgtcccttgagagcataaccacaatccatattgtcggatcaatgcaacaataagcagattcaatccctaaatagaagt

SEQ ID NO: 66661 - DNA, 450 bp, Oryza sativa
  unsure (1)..(450): unsure at all n locations
gcttatcatggatatggatcatacttatcttgttgnnttgacacattaaacttatttccatagatatgccatggagaattaccatagttggccacgcaagaaacttgcaactactatgtgcacctcagttatacacctacaaatatgccaccagacacgctgaaatgactgcagcgcctgcatcactgatttcccccttatatcagattcgatacggtacttgggcttcgatcttaatttctttctagctagctgaaccacagatatttaaaaagaaacgatggagctggtagctagcgatagatactctgaagtctgaacttacagtgctttggatcaggagtgccgtcaactgcacgagaacatatgcaaatcgagtgtgtcgtgctggcctgcagctacctatctgatcaataattaatatgtgcatgcatatctcatgttaattac

SEQ ID NO: 66662 - DNA, 456 bp, Oryza sativa
  unsure (1)..(456): unsure at all n locations
tgacaaanatgcaataacaaatatataacactctagagttattattgtttactaacaacgttaagaagcatgatatatcagtaagtatagttcgttttgcaaatgatccatgaattgtaaagactgaataagagcaaatcaatttaagagtataaatctcaaaggtaaatacgaaatgctttatcaaactttgtggccaaagaaatttattttgatagtggggattaaggtctctaggctagaatctatggtagtcctgtgtccatatggaccaccagctagctacgcccctactgcggtgctaggcttactcctgcagcaggaaacattccatgtggaagctacgacctgctgcccatccacctcggcaagaaaagtcttcaacttatgctgataccgtgccccaatggacgcttgtgctaaactctctggctgcaaaatgttgatgggagttgc

SEQ ID NO: 66663 - DNA, 387 bp, Oryza sativa
  unsure (1)..(387): unsure at all n locations
agcttgaggtcacatgatntgcctcttgcctcacgtcactcgaaaggaagaaatgccacaatggtctccccaattaattcctctgaacaacttcctcgtagtttaatggcactgctataatgtgtgtacgtatgtatggttcattatcgtgcaacgcgctctctctggtctcttctcctctcttcgtcttcgtctttgcccatgaaaattccctgccttgtccctccaggcaacattgccaggtcaaaattatatacaggagagaagagggccacttcggggagaaaaataatctaagttttgtttctaggaccaatcatggggcgacagctgggcggcactggccattgaaggcattaacaacacggagaacctcccgtgcttaac

SEQ ID NO: 66664 - DNA, 439 bp, Oryza sativa
  unsure (1)..(439): unsure at all n locations
tgttgctaaacagcatcaactgctctggcccggtattgatttgtcacccaggtataacaaaacctggtccaaccttcagcatgtattattaagcttgagcttacttcacaaccacaaaataacaattaagaaacaacaaaatattttaaaaatgtagagatacagtagatcatgtcaaagagttatctaaaatggtcatatcacaggggacaattggaagtgctaatacgaagtttggagtatgaacgcactaaaatccgctccaattcttgaggcaaattctcctattaaatcctaaataaactcgaaaggccataagcagaagaaatgtaatcttttaacgaccaaatatggcaacaaaacaacgagcctcaagcgagaaacgcaccanggagatcttgctaccgctgacgccgagccggaggagctccctggagtc

SEQ ID NO: 66665 - DNA, 379 bp, Oryza sativa
  unsure (1)..(379): unsure at all n locations
tatcagntgatacacatgagatgacagcaagattattccacggaacaccacgatattattgggctgccattttcattcttagttgggtactgtacagtgcttatttgaaggctgaaagtgaggtgctgtaattgtatggctgatccattacaagcacatgtntatatatgtttggataaacatattgacagcccaactcggtagcttagttgattcatcctcgttggaatcaacctgtagtttcaaatatataatctcgcttcgtcactcgtcatcaacttggcaagttggcaagggcattgtcatgctattaatgattatctctggttcgcgttatcaatacaaagaggactannaatcttaaatgtcgatgaacatg

SEQ ID NO: 66666 - DNA, 439 bp, Oryza sativa
  unsure (1)..(439): unsure at all n locations
ntaaaactaccgttgcatccgaaaatgaacgcatgagatttgtccaagtctctacatattttccttagtatgattggaaaagaaaattcaaaagtctttgaattgggatattccatgttaaaggaagctaacatatattaattacttcctctttattttcttataacctttgaccattcatcctattaaaaaattctataaatatgtaaaattataaattgagattatagatttttgatgataaaacaagtcatgataaaacaaatatcatttatatattttttaatacaaatggtcaaatgtcatatcaaaattcaaaagtgtcatacattcaaaatcattatgagtacttcacaaacattaaattggtaaacacactattttaggctattaaatatccctatcctaatatcccatctacgtatgtagaattcgacaa

SEQ ID NO: 66667 - DNA, 226 bp, Oryza sativa
  unsure (1)..(226): unsure at all n locations
atgggagccctccccttggccaatgccagacagggctgatggtaaggggatgaggaactncngatggagcaagtctgtggtgatggaagatggacattgcgtggatcggtccttcacaacatctagatctcgcggcgaaggttgatatctaggagtcttttcgccctgacgatgcggcgctttgattctctccgaggactctgtcatcccctcctacccaagctcc

SEQ ID NO: 66668 - DNA, 368 bp, Oryza sativa
  unsure (1)..(368): unsure at all n locations
tncggctaaccactctatgcgggggagaagatctttttccaatcgggaaacccggattaggacagaacaaaaacctagctagattccgagcagcagcagcagcttgaccgctacaaaacgccgacggtgccgccgttgttcgctagcaccggaatccgcacggcttcggcgagcgatcgcgactccgcttgatccgtcacgccacctccaactccaacttcttcgcttccaaatccgcactagagtagaccactccagcgggagctccggatgcaaccgacctcgaaactttccccgcgtactcgtactccacaaaccaaaaaaaaaaaccacaaatccccatttcacagcacacacagcgacaccca

SEQ ID NO: 66669 - DNA, 374 bp, Oryza sativa
  unsure (1)..(374): unsure at all n locations
tcaccgcagtaaagtttaaccaccacaattcggatggattggtgtggttcctctacgcctangacaccagaatatcgaaccatgaacgaggaaaggcatgagagaaatattggctagtaattgtgaagccccaattcttgactggaagggacaccaaaggcctctgcccttcctctctatctatccaagagatggaagggcagaagctttttttggttttttcatcttttcatcaaagagttgaacaatgaagatagatggcaagtgcctgatcgatttgatcaggtcgtgtaagaacaaggttcannnatcgtcgttcgtaggatgcctcagctgcatacatcactgcactttcacttgacacctaattaaac

SEQ ID NO: 66670 - DNA, 397 bp, Oryza sativa
agcttggggaagggatgctgcacatccaagttgtgcttgatgttttcaacccacatacttccagaccacagcgtaatgttggatctgtggtctggaagctaggattcatgagaacagagacgcctttatcttccaaaatattagagaaaccagccctcttaaatattataagagtaagaaaaatggactattgatcgaagggagaattttaacagtgaggttgctccctttgtagttgtgaagatgaaaaaggtgatatctgacgactggtgattctgatttaaggttgggttcactgtgtttatttcaattgtacaaccccaattagtcaaggtgtattcaatagtttgggttcgtagctctctctcttaaaaaatcttgcagggaaactactggc

SEQ ID NO: 66671 - DNA, 457 bp, Oryza sativa
  unsure (1)..(457): unsure at all n locations
acacctgtncanggaagtgaatagactncactgttctttttttctccagcccgattgaaggagggacaataaatggacttcagaggaggaataaagccagctgaaaggaagggagtatgagccgaggacttaaggtgaacttttccagtttcagcacgaaaaggaaaaggggattttaattacttttccaattaaattaatcactgaaatgatctctgaattgttaaaaatacttccaatgctcaaataatttcaagaaaaatcctgaaaatacttggacacccaaagtacttaacaagattataataagaccatttaatgattaatttaatatgtggataattactgaaatgttctttgtatgattaaaattangaattgagctccgaaaaatccgagaaaattccagagagtacaattaaccatggagaaattaataaaataaatccatccatgc

SEQ ID NO: 66672 - DNA, 358 bp, Oryza sativa
ctgaagcttggcactcctccagctccttgtttttcttaacagcgaccatcattcctcccgtcttatcacccctgccagcagcgttgcccaagaggtaaacaacatcatcatcgatgcaactcaaggccgggtaacacaaacgcaggcgacctatggacaaggaagaggttgccccttgaccttgagcctcctccctgtgttcatcaccgctgttgctgagcatgaggctatgaagcaactcgtaatggtgacttgggttggtgtcaaaatggacttcacgcgattcagcagtgcagtcacggcgccagtcgtcccatgaagtgaccgggataagcatgctccatgtagtgattctcca

SEQ ID NO: 66673 - DNA, 434 bp, Oryza sativa
tactaagcttaagccatgaatcctttatgcatatctggatctggattcttgttaacgaacatataggatgagtagtatctgatgtaaatataatacttcgagaaaaattcaagtattttaaaatatttataaatatgtatttcttctcttgtcaattttgattcccccgagcagatgactcattacgtttaaacactctgcccgactagtcatagccatcaagcaccgggagtcggcctaagcacttcccaaacatgcatatgagtgacatgagttcgtcattaatggaacaaagtttcatgggtcggagtttactactcgggtacttttgcaattattaagagcagaaaataaattatcttatctctatggctttgatttattccgaataatacttagcaccttgcgttattcggtccatccaacaagcccct

SEQ ID NO: 66674 - DNA, 373 bp, Oryza sativa
agcttcgtgaagaccttgagcaaggcaagtcattctttgtctcaatgctcctataatcgaatatatcattattattttgtttgcaacatgcattattagaatcacccgtttaacttgcttggcctcaggttgcatgccaaaccgacagacctacctagtagtcgcactaattcctgtaggctatactaccctgactccttgtagcttcacctttgtggtacctcggtatccatgttctttgagcgcgtataccaaatatcctacatacaccgttgtttgtcgaaaacttgggaaatgggtttgagaagccttgaaaacccaacatgtggtgtcggagtgtttgaaaataaaataaattgtgaaaactcacgat

SEQ ID NO: 66675 - DNA, 446 bp, Oryza sativa
  unsure (1)..(446): unsure at all n locations
acgaactctttagcaattccctataactcccgcacgctcctttttcntagtccccgccctctcgctccgcctcctctcacacgccgctgccgctccagcgcccgccgccgccgccgattcggcgcccgctccccgcatacgggccaatgtaaagaccgaagagaaggggggagagagaggaggaagaaatggagagagatgatatgtaggccccataaattntttttttgtctgaatgacaaatgggtcccgcacatatatgtttgtttgaatgacacctaagcgccacgtcagcgtcacgtggaacagataccaggtcaacaacgccacatagacgccacgtcaacaaaaccgttcttcaaaaccaccgaggaagtcaaattacagcgattntaatagttaggggtgttgagatacccagtattgtggttcanggatacgaatca

SEQ ID NO: 66676 - DNA, 312 bp, Oryza sativa
  unsure (1)..(312): unsure at all n locations
agcttgctcgggcagctggaggagtatgattacattatataggggtgggactttagtcccggttggtagcaccaaccggngctaaagatcaccgggatcattagtcccgggtggtaacccagttggtattaccaaccgggactaaagataagatctttagtccccgttggtatgaccaactggaaccggcgctgaagattatcttttttgccagctggtaccacagacggtgactatagaggtaatttgtccgtaaccctattgaaccgggtctaaatatcatctatagacccggtctttattgcattcggg

SEQ ID NO: 66677 - DNA, 414 bp, Oryza sativa
  unsure (1)..(414): unsure at all n locations
aatgccaacaacgggagatactcagtcgcagactcgcagcatgccagatgctaaacaaaacctcctgcagccgctgcaatcgcttctccgctgtgaaaaatgatctttctgccagcataagtttctgaacatccagcagatggcactcaggatgaaggtacagattggaagtatttatagtagctctgataccttccatgcccacactgtttgtgtttgttttcatgtatgacaaatagaatttgctctttgctggaagcgagattccacactntcttcatcaactctcactgtctcaatatgcatatatgctcaaatctggtgcctgttgcctcanattatatgctgatcagcatcgaatggacacccgtatctacagaaaanaaaatcgaatgtacgtatatggtactcgga

SEQ ID NO: 66678 - DNA, 393 bp, Oryza sativa
  unsure (1)..(393): unsure at all n locations
gagagtggctcttccttcagatggtcacacagactgtgtgagagatgttgcatgggcaccagtgttgggcttagctaaggcgaccatcgccagcgcttctcaagatgggaagggtgtcatttggagtagagggaaagttggtgataagtgggagggaaaggtcatgcacgacttcgggtcccctgtttggagggtttcctggtccttgactggaaacatattatctgtagctgctggtgagaacaacataactctgtggaagcaagcatcacatgggcaatgggaagaggtgatgaaggttgagccaacaaaacccgagtcatcggaagaggtgaagaaggctgagcagtacgaagattgtgtgacggcttcagttnttttgcatattcacat

SEQ ID NO: 66679 - DNA, 376 bp, Oryza sativa
  unsure (1)..(376): unsure at all n locations
atccttaagtcaccagcggcatgcaagctcgaccaactccacagantctcttgtttgtcactattaannccagcccaccccattcaagatatgtccttatcaaaactaactcttatcgatgtttaccatcatcgattaaatttgagagtttcataaactactcgattcgattatgtacacaatacatggcatgcctaattcacctgcagcacgaatagtactgtaatttttcagagtcagaaatcttctcttattattgtgatatgtgatgccatgtccataatgcatattttatagatgatatatcacatctttaaaatctgagggctctcagcttaattgtttattccagaccaaagctggcgtgtgcaaaaag

SEQ ID NO: 66680 - DNA, 456 bp, Oryza sativa
  unsure (1)..(456): unsure at all n locations
aagctttgtagccatttcagagtggaatggttccaactggtcctgtttatgttatntcctggttatatatctatgttgattctatcttgacatgatttcttaaatataagagatttaagatgtcctcaagcatcaattattgggaataacaatattaagcatcatataattgtttagcatattatgcaatttgaaaactagttccatgtgggttcagctaattcattttcataaactatcgtgcaacatatgtattgtctaatatattgctatttattaaatttcctttatttcatggctgattttaacagacttcctgtcaaatttctccctccattcttttttagacgtagntntatgggctntgttctctgctagatgccgctttaggtattctaggttggtgctgggagaggtgccatttacttgtggagtaaatttgtgtacatggactat

SEQ ID NO: 66681 - DNA, 407 bp, Oryza sativa
  unsure (1)..(407): unsure at all n locations
ctcatatagtatatgtgtggtgcccactatatctcnttcatatatacgagaagatgtacgtaatgtgcatatatatattatcatcgagttttcacggctgtttgctgctctcacagtacacacgcatgtgtcgaagattctaagccaacgtctgtactctcgcacggttcctcagaaaaaacttgaagcccagactggatactcgtactatggctgatcgagggcgggcggcctgcggagagagacgcgacttcgtgctgcgtaagtcggagcctcgtcgcgtgcagtgcggagcctctcgtcgcgtcatgcatcattgccgggttggtcgaaggcgtgcagtgtggaccttgtgtccttcctggtgtctcggcctcttggggctggtagatcgatatgcatgcttg

SEQ ID NO: 66682 - DNA, 382 bp, Oryza sativa
gcttgagacatgaactctggaatatgattactgcactttgagcatgaaagcttctctttcaaaattccccaagagtcatgctcacataaggaatccccagggtcctattagtttagtatcgctttcttgtgcgaggaccacaaccgccttttggccatcatttctaacatgattagaagtgtggttgtggatgcttatatttatcataactattgcaaatctcggatgtgtttgtggcactaactttgcagcaagatgtctctatggctgagcttgtgaccataaacaaagcactgtcaggagttaccccggatatcatggaagttttttttttcatgaatgcaggaccagtttagaatagtatgcccatcgggtttcttgt

SEQ ID NO: 66683 - DNA, 392 bp, Oryza sativa
  unsure (1)..(392): unsure at all n locations
tggtcctggccaaaagcaccgttgaagaacacagtatctcaaaggtaccctttcagaccaagggtattttttgtagcttggtcttgctcactccctccagtgcaaaaagaggggtaaaggtgtcattntggtgccatctctaatcaaacatttaaaattataatcaatctcttctaaaatatttagattggatataatatgtatagatatgtcttgtccatgatagttgatttaacacacgttgaatngaaattaacggtcaaagttatatattttagagactgtcagtgttcacaacaacatggttctgctgctcgacagagtagtaagatatatttgattcaaacaaataaccaacctactagcagctaatgactagttcttgctatcga

SEQ ID NO: 66684 - DNA, 337 bp, Oryza sativa
  unsure (1)..(337): unsure at all n locations
agctncaatcttagccatttatttgtctctctngnnnncancacancgagccattcatttgcatctttcaatcccacctctcctaacctatttatcaaacacactcttagcctatgttcggttattgtggttggtaacccatctcccccatacggaaaatagaacggtccattagcgcgtgattaattaattattagttaacttttttataaaaaatggattaatttgaactttttaagtaactttcgtataaaaacttttttaaaaaatacactgtttagcaactagaaaagcgtgcaccgcggaaaataagtgagaggggatggaaacttggagt

SEQ ID NO: 66685 - DNA, 393 bp, Oryza sativa
  unsure (1)..(393): unsure at all n locations
ttcccggtcttggtgtttggtgtagaccggatttgctagatagacgtcgtactatcaagaggggtctatgaagcgagcttgtggatgatcttgtgccatattagttcatatgcatgtaggtgcactttgtgggcttgtctaaccaagtgtgatgagttttctcaagtcctaaaccaagagagaagtgggcatgtccaataagagtgagtgacatcttgtgggtatgtccggtggatatcctttggagtgtgagccttctatccttgacttaagatgtgtttcttggatgggattttcatgggttggatggccctttgaataagcttttcatagaggccaagaaacgcaaanttcgagaaccgagtcaagagatattggccgtttactaaccgg

SEQ ID NO: 66686 - DNA, 413 bp, Oryza sativa
  unsure (1)..(413): unsure at all n locations
tgtatatatatatataacatacttatgtatagntaaatatatgtttttatagtttaatggttccgcatttgttaccggtttccgatctgtaccgacatgttttcgtccgtattgttccgtttccggttttccgatatttacgatatcgtttttgtttccgactttatcgtttcaatttcgtttccaagaaaaatatggttacggaaatggttgaggctgttttccgatcgttccgaccgttttcatccctaccttagatgagtgtggcagcgatgttttgctatgttagtcccactgattgatgtggttaacagaagtcattttaaaataagttttagaatgattattttaatattaaaaaatcaaaactcaaaacataataataatatcgagcggacatatagggactacaa

SEQ ID NO: 66687 - DNA, 369 bp, Oryza sativa
  unsure (1)..(369): unsure at all n locations
tatgaaaacactgattaattctcgcgtttcattattttctttcttttttagtctagtttgattgtctaaaaaatatattaaaaattacttagtgattntcatagcaatgcgcgggggaatcacttctactcaacctattatctactccttctagcatataattgaatgattaattaattagtacccgtttacttgcgatgcatatgattctttcttataggacgttgggtgactcacgactagctagtggtcaagaactcaagattcatgttgctctgtctagctagctcctcgagataaacgacagataagaagtttcagcgctcgaccccactcaatactatttctcgcaaaaagataccgacacaa

SEQ ID NO: 66688 - DNA, 454 bp, Oryza sativa
  unsure (1)..(454): unsure at all n locations
gatcttaagcacctgngctgcagcttgacagcaactattgattccaaatatgtgttntacaagagatagagcatctggccttttccttttgcttaatatgtctaacagcagtaaggattaaggaacactcagacaacatactgtaatcataggcaatgctagatttcaacacatcatgggatctgatatgtgactataacatgccatgtaaagatcgctccatacataggagatgttaatccaacagtggtaatggaccaattgcataatcctctaatttttttcccattgaactttgttcaaaaactgaattgatagaactacttgtaataaaatcaaatgtcctagcctacataaaaatagtaaaattctataacagtacaatgacacggaatgttaaagaatagaaaagaactctttgcattaataaagctaattgatgggactacaaata

SEQ ID NO: 66689 - DNA, 270 bp, Oryza sativa
gatgacattctactgagctagagagatgtcactctactgcaggaaacaaagaaattcttgtcctcaaaatttgacatgaaagacctccgtgaggcttgatatgtctagtgcatataaattcatcgacatataacaaagtttgcattgggactttcttcaagaaatatttacaaacgtgtttagaaattaacatgactaatgcatgctacacctgtccttttgaaagggaaaaggtgggcatcccatgtttagaaatatatgagctcagtg

SEQ ID NO: 66690 - DNA, 397 bp, Oryza sativa
  unsure (1)..(397): unsure at all n locations
agcttggatcgattttacagtcagatcctcgtcatgtgccatgtacgcccgcaactatccatcatcactgcccgcgagaagcaatcaacaatgatatcctgacccttttgtaacataaacagaggtagaggcctactctatttgggctcgttgtgttgcttatgctaatacttatctgtacttttttttaagtaataatagtagtagtagaagtaaaatttgtatatacatgtctttaacgattaaaaataaatacgggtaaataatatacaataaaaaaactctaaaattgatattaacgtataaacataagcctaaacgaaatggtagcattggatntgctcgtgtgtgtatatgacattaagtatagaaaggagcaggggcaagacatctattg

SEQ ID NO: 66691 - DNA, 459 bp, Oryza sativa
  unsure (1)..(459): unsure at all n locations
ctaagaaagatagntggcccactggcgatattttgttttctattattgtagcactaacataattttaaaaagctaattaacctaatagcatgtggaacttctgtttcaaggaaacattatttgactatgaggattgccctgatatttaataagcaaacggagaaaaaaagtcactgcattacaaatcgattttttaattttggtttagccctttattttcaggtgcataagttaaatataccttccaaatcccaagtgcctgctcaaacagttgtgtgtattcaacagtatacattaaagtgaggtttcaaggtcttgtggcccatctgccatttaaaaattatatttggagcagttccagcagtaattgtgtagatatttggcactcactttccttagatgacanagattaacagcatgtgttaggaacatttcctagatctctaattgacaatatat

SEQ ID NO: 66692 - DNA, 461 bp, Oryza sativa
  unsure (1)..(461): unsure at all n locations
tttgtcatctacgttgacacataataatatttgcttttgatttaaattatttcctgaagtcaagctgtctggagaacatcttgaaacggtattcaaatacaaaaatggcgatgatgtccgggagatagccaaaattaacattactctccaaaaagaagagggtggtttatataatttacgtggattggattttaaggggtgcttcttttctggacagaacttcagtaactatgatattcaatatgtgaactgnggaacgtcattgtttgatgttgatactccgtgtatttttaatgcgcctgcttacaacaagagtaatgaaaaatcattaaaacctgtgagcgaaaacgggttaagtggagtattgactgatcgtaataatanaataaaactcatcacgggcgtggcaccattcgatgatattttaattatgggatgatgacttgatgatagntcctctg

SEQ ID NO: 66693 - DNA, 324 bp, Oryza sativa
agcttgatcagctctgatggcccaatcaaatctattattgatcggcttgaggctcgcaagattgagctcttggcacagcttgaagaacgcaatgccgagctggatatataacataaaaagctggccgatctcccaaaatccgttgaaaaacagaagtcacgattaaaatcggctatcaagaatgttgctgagctgaccaagtctttgaaaatcatccctggaaccgatgctcaagacgcccaagccattgaagaagtagaacagattaggcatagggcaatatcggctatccagcactatttgtctcaacgactctttgtataa

SEQ ID NO: 66694 - DNA, 391 bp, Oryza sativa
  unsure (1)..(391): unsure at all n locations
ggagctggttatccttttttttttttaaagngaccgagcccgctgtgcctgtgacatcccgaccgcaggcccgaagagccnttgtaataatgtgaatattgtcgatataataaagatgtgcctcttatatcatgtttgtgtggtgtaccccggctttccctaggacagtgattaatacactagctttcgggaaaaggcaattttctcggtcgccacatgagtgtatcacagccatctcgactgtatgataagccaagtggataaaacctaatgacatattttataaataaaactatttgcgaaagtacctttattctccttcccctaatgctatgtgcataacgtatactgccttctaccttttcagatttcaactagtacttcatggtca

SEQ ID NO: 66695 - DNA, 348 bp, Oryza sativa
tacctatgtgggacatgtgaacgactcaccgacgacattaacgcacccgatgcgcacgataaacaaagcagcaagaggcacagaaccctagtccaaaaccatggagcgatatcaggtgaaccgcacatcatagacgaaagtccgcgcctctgccaagggggagcacccaggaactgcgaagtcgaaggcgacgcacgacaccgtcagcccggggcatgctaagcagcgcacgcacacacacactgacgcaaaccaaacaagccaaacggcaccacccacaaataactcacacgcacccaacccgtgagcacagacaaaatagactgagcgaactgactggaacgccca

SEQ ID NO: 66696 - DNA, 222 bp, Oryza sativa
gatgtcgtatgactcaaatagaaacacaaattttcagcgaatattaaagaaaaaaggttccaaaattcattattaccaggctatttgtctttttttttaattttgcacaatcattagggtttcatatatagacatcgatatggttagtcttccaacgagaccatttgtggagaatatgagtaccgggtaccaacatgaccttcatatttgactagggatatg

SEQ ID NO: 66697 - DNA, 418 bp, Oryza sativa
  unsure (1)..(418): unsure at all n locations
ctaagcnttggagatactagccactcttctggccctattaatttggtttaactcctcatgatgctttacttccttctctttgctctttgatgaactccaggaaatttaactgtcagtactcctggatcttcaattcttttgcagggagcgagctggaacataaggtacagtctgcatggatgaaccaatatgatgacgcagaggtctacatgctgttatgcgtactgtatgattctctagggcaagtaatagtgatacgactgcgattaatcggctacttatctgcgttgtgtaggatacgtcaatgcccaccgctcggtatgaggtgctatcagttctacacttgatggctctgatgcgtgtgtcccaagcaaattcccttcttgttccatagacatccattgacggataccatgct

SEQ ID NO: 66698 - DNA, 433 bp, Oryza sativa
  unsure (1)..(433): unsure at all n locations
agcttctatntaccagcctgctagctttgctggacctagctggcagcccacaagatctcccaggaagaagatgacaccaaagaaaaggcccagaacttgaactttctggttatatgttggaattagccaagtgttggcggtagatcattttgctccatgtgtggagaccaatatattatgtctggacctatgtgctatgtagttctatggtggaataaacccaacatttgctggcagtagatcattntgctccatgtggctcattatgctatcctaccatgtgttatctgaaatggtgatgtgaacatgccctgctatcccgccatgtgttatatgaaattgtgaggtgaacttgccctgttatccttgctgcacaaattatgataattgctttaaattcgggagctggtcccttataatacacagctaattt

SEQ ID NO: 66699 - DNA, 445 bp, Oryza sativa
  unsure (1)..(445): unsure at all n locations
caagatcttaatataaatggctttatttttatgttaatcaatcatgtaacgtgaaagtggttaaatcaagtnagatcggctgaaaccccaatactactctaatcggcaactagaaagcaggctagagattaatattctaagcacgatttagtagatcaaacttaactgatgcagcactaaatatgaaaaaaaaaacaatatctagacaatcaagccgctggatgtttcatagagtggtggatatcctatataatctaagccaacattgctatttaacctaatcggctgccttctaacaatagatgttagccggntgtaggttaaataacaatattgtcgtggattatatagaatatatgataactcggcgaatacatagatagattagagtatcataaagatggaagcactatatctgagaacgcaagaccgcataacaagttta

SEQ ID NO: 66700 - DNA, 417 bp, Oryza sativa
  unsure (1)..(417): unsure at all n locations
agcttgccacatccncattgtcgcgttttatcagcacatttttttgaagtcgcccgctagagtcctgtgtgtttcagcatagtatagaactgagaaatttaacagcacattgatgcaattcaaccaatcaaatgataagcacaagggcaaaacccaattagtggaaaatcaaatggtataacgtaccttggcctcttggccatccagttcatcaaatgccttctctacctcatctctgtctccaaatgaaatacatgtagaataataatcaccccgaacccttgaatcaatctattgagaaggaaataaaaccattagactataaaagtacatgtgtattgagcaaatcataattagtatgcaaaaaccttctcatcaatactgggatttccagaaaaataattgagcagcttctga

SEQ ID NO: 66701 - DNA, 459 bp, Oryza sativa
  unsure (1)..(459): unsure at all n locations
atagnacacgagagtanaaatggcttatcgactttttcttcatgttgctaaaatatattaaagctgggattgaaacacgagagtagaaatggcttatcgacctttgccccatgttgctaaaatagattaaagttttgatagaagcacgagagttgcccttgccccatgttgctaaaatagattaaagctttgatagaaacacgagagttgagtttgtcaaggatttctcttaaaacaattgccaatcggtcgagtttactttttttttttcagtactcttcgttgtgaacgcgtgcggtgatactgaattttctgaggcaactcatgtgaattaactaataagtccactcgtgagagagaaaattgtgattctgcgctcgcaaaatagtgggttcgctggaatgctattccttcaactgattcactaaaatgctatcctaaactagaggtggtcaccaa

SEQ ID NO: 66702 - DNA, 429 bp, Oryza sativa
agctttatgagtataattacacttagcatgttgtaaaagaatatgatatatggatgatggctatgatgaaagcgctataaagcatctaaggatattattttctagtggcctaatgtatgtttagtgtttggctccaactatatacgatgtataaataagtcgcgtatctataaataatctctgcaattaaatatacattgctgggatggaattggatcagaactggtgtcttttcaagtgattttactacacttgtgtatcttctaataaatcatgtttggattgcttggatagcctgcttatggtggattcaaaattcacactccgcttttttatatataacaacatggtgtcttacatatcttttaccactctcaattaaaaatcgatataaaatcattatttgttacacttttaaaaatattaatt

SEQ ID NO: 66703 - DNA, 430 bp, Oryza sativa
  unsure (1)..(430): unsure at all n locations
cacgcatgacaacntgntgtgtttcgtctttcatccatcatacaacggcatctggcggtcttccaccaacttactaaacttctcaaaatctctgttcgtgtcctctgcgtcttcaatgtcatgcaacattgtagatagacattgagtgtccaaatctatggtctctccacctaaaggagaaggtacgaacatgccttctcgagcttgcggcggtttctctacatcctgatccaacacttcttcagctgcaatatcaggcgcctcttgctctccatgcttggtccagcaggtatatttcttcatgaatccattcattatcaaatgagcatgcacttcatccttgtcttcgatcatctgttcattcttacagtccctacatgggcacaacatgtgcatgctcantctacnttttctgtcattatccgcaaat

SEQ ID NO: 66704 - DNA, 224 bp, Oryza sativa
cccacgagggagaggcgtccactggctcttgcgggcacaggagacaatgatcgcggcaaccagagctcgaggaaaatgcggagggaccgaggtgcccgcgggtgggagagatgacatgacccaaaccggaaccagccactaccgcggtgggggcggtcaaatccagtgtccccccgaccttctgacctccgagaggctggaaatggcacccctgtggctccatg

SEQ ID NO: 66705 - DNA, 354 bp, Oryza sativa
acatggaaagtcacgtctgggggtgggccatacatctctccacattgtattctcaacatccttgggtgcctcttccagtgttccttctctaccccttgctacctcaagaagcctgatatcgcaggttcagcccccatttatgccacatcaccctatgccaccagctatgccagcgggtatgcaacaactaccattgactcatccacatgttccccaggtatttttcttcacttctaaaggaacctttgtaattcaatcaactttgtgttaatttatgataaaccaaatatttgagataaccaatgcagagcctcttggaacctttatgctcaaacagcacaagttacttagcta

SEQ ID NO: 66706 - DNA, 374 bp, Oryza sativa
  unsure (1)..(374): unsure at all n locations
agcttaatgtttctaaatacatggtttctgtattatcttngattatccattacctggtttttttaggattatggacaccgtgtgagattggcaacccatgcaaactttaaggagttcgttctaacggctggtctggagtttttccctcttggcggtgatccaaaaatacttgctgaatgtatgaaaataaatccttgtattcacatagttgattttttttcagtttctacgtcacgatgattaatatatttggtatattcatatttgagcagacatggtgaagaataaaggattcttgccttctggtccttcataaatttctattcagaggaaacagatgaaagaaattatattctctttgctacctgcgtgca

SEQ ID NO: 66707 - DNA, 368 bp, Oryza sativa
  unsure (1)..(368): unsure at all n locations
aggactctgaagccgcatctgattttaggccgatgacatcctcgaggttaccaaatttactgttacaaactgtcatgtcttgctcaccgcgtttcttgccattgcaataagtgccataaaaccagaacatttgaaagttgctatcacaacgtngtgctgcttttttaatgcaatctcacagaaggtcattaatcatgatgagttagcaaatctttctacattctcacatgagacacagtgccaacttgagatgtgtttccctccatcaatttttgatatgatagagcacctcatcgatcacatagtgcctcacattgatgcacttggcccattggaccttcatcaaatgtgggcatactaacgttaca

SEQ ID NO: 66708 - DNA, 396 bp, Oryza sativa
  unsure (1)..(396): unsure at all n locations
agcttaatggtttcacttaattacgttntagtatacatacttaaagtngnactgggtcattctacgtatcgantcataattcatttttggtgtggcagactgggagacatctattctcgatcaattattaagattcaacagacaaagcaagcaaattctactggtcttttagtgttggaaaaattgactccttggttcatgataatgctcaatatttgtgcctttgcatgctctatctgggttgatgcgttgtatgaaggggagctatggtaaattgtctaatttcgaagtcactccattatatgtttcctttttgggtgatcatacaccaactctcttatatgtttaattggacatatatcgcgtttaaccgtttatttgcatacccaatttgct

SEQ ID NO: 66709 - DNA, 190 bp, Oryza sativa
tccctctgatacccctgcgagtgcacaacacatacatgccgagaggagaccatctatttgctatgagccactacgctgtaggggcgaaggacattatgccccgtcgcgctgtgttgtatttggggtactgggggctgcggtgaattagtctgcatgatgcctactctgtagtgtctcgcacttactgcct

SEQ ID NO: 66710 - DNA, 369 bp, Oryza sativa
  unsure (1)..(369): unsure at all n locations
agcnnctcttactgaagaggggaaggagtgtttattaatgagtacaaccacagcactcagcaagccacaccggagaggcacaatcaaagcaaaggagtacaaggggataataacatagggttgaagaaatgcacgaaacagcatttaaaagtcacttagctgcccaaagccattttgtaaagacgatcctagagctacacagtattataaaacaaggccgagaaccctcacgaacctgccctaacccaaagcctacgaagattcggagctaactggcaacccgacctgagatccagctcgtacgcaaccaaccgaggccaaccattccacaatgtagatgatgagcaatatttaagaagtagaacactg

SEQ ID NO: 66711 - DNA, 413 bp, Oryza sativa
gcttatgcaaagggcaagtgaaacacaagtgattcgccgtcttagttttctgattacagatgatgcatgccgccgattgaacaatttttttctttagcagattttggtttgtggacagtctattcctgacaagcagccatgcaaacagctttacctttagaggcgccctgcattcccatatccagaaaactccaaacttaaacaacacctaaatgtcagatcggtgcaaagttaactatacccctgttgaggtgcaaagtcccgtttttttgacaaattgacccttttggaaaacttatttcgaaactaacccctgccaaagacttcaaccaaaaataggccgtcgcctcagcgccaaacacattggcgctgacgttgggccgtgtcaccgcaacgggactggcgctgacatt

SEQ ID NO: 66712 - DNA, 367 bp, Oryza sativa
  unsure (1)..(367): unsure at all n locations
cctgcagctgcagctaatgcttcattgtgaagcaagttttttttgttatcccagntaactgtttgaatagctctcttgcttgggatgctagtttatgcatgctgtttttatcctctatgttgctcggttctttccgccccatcttttcggttatgcttatgcttatcagccaaaaaatgaattttcaccttaaatttggagttgattctggggtttttctcatcaaagtttatttttcagcattttgcttttagatcagaacacatatataaaagtcttattcgcaaattatttttctgttgcaaatatgccgcttcgcttattgaggacctttgtgcctcttataaaagggacaatttaagctcat

SEQ ID NO: 66713 - DNA, 381 bp, Oryza sativa
  unsure (1)..(381): unsure at all n locations
agcaagnaaactaaaccatgtatatgcaaagnaggacaaacaaagaggaaagaattntaacttaagcaaatcagcactaccagccttaccacattgatcaacaaaatggccgatatgctccattgttgttctagcatcctcacctgtgaatnttgtgaagttgggcacatcaaatccttgcgggtatgggaccgaatctatgtgttcaggatatggcctttgatatgtatacatagctattttggattctatttcattaccatcccgcaagacattgtcactatcttttccaacattcacatgatcgatttgtgactcggntgtatgtgacaatactatntcactttctcttgtaatacaatttgaaccgtcacttagttc

SEQ ID NO: 66714 - DNA, 271 bp, Oryza sativa
ttgactcttcggacaacgccatactatttttcttaatatatcacctctacgtctcatatggctacatatctaccatcattgaccaagccttcattgctggctgctgccctatgagactcatcaattctactcacaccttacttttctaaccatgcatcttctgattgtgactcttaattttgaaacacagctcccagtatacttaatcaacaatagcttttaattcttactactacacgttctagactagtctaccacacttcctatcttg

SEQ ID NO: 66715 - DNA, 417 bp, Oryza sativa
  unsure (1)..(417): unsure at all n locations
cagcttgtgcctggttggagagatcatctttatttatttatgnatgcccggtcgcggggcataaaatacatcaccaaggctgctcccgtataatgagcgagggaattgaatggatcaggggaatccgccatttcagctactacaatagtgtatttcatggacccctcttcatggaaagtagttactacttgagctacggaggatgctctttgaccgatagctacataaacacatattacatcttgccctttttgattggaaattgtatcttgagctactgctgatttgccggtttgtctgtccccaataattaactctcgctgaccgcgcccaacaagaatcatcgaatcgatagcaatacaccccgtctgaaggggtcatatacagaacgcctggatatatacccggagcaggaga

SEQ ID NO: 66716 - DNA, 392 bp, Oryza sativa
  unsure (1)..(392): unsure at all n locations
gagagatcatcataaaatattaaagtattttctttttcggtacanaaaatactcagccagggctggtcccgtataaagagccaggtattgttatgtaacacgggaatccgccatttcaactactacaatagtgtattccatggccccctcttcatggaaagtagttactacttgagctacggaggatgctctttgaccgatagctacataaacacatattacatcttgccctttttgattgagaaatgtatctgtagctatctgctgttttgccggttgtctgtccccaataattaactctcgctgaccgcgcccaataggaatcatcgaatcgatagcaataagccccgtttgaaggggttcatatacagaacgccttggaaatatacccg

SEQ ID NO: 66717 - DNA, 420 bp, Oryza sativa
agcttattaagagatccgcgtgcgaatatttatttgtcgttagggatctgtactaaacaccatccaaatatattttttacaaatggatgttctttaccctcatccctgatcgaattgggggtgtcttgtaaatttgtgttattattagggtgtatggggcagagaatactattattaacattggatatagtgttttttataacttgtacaacgtagtacattgtgtttttctgacatctaaaccaattttccatttcaaaatcagtcaaccattggtgatgagcaaaaaaggagacggtcgtctagacttatgtgcggattctgtttaccaaaagttcagtgttttacaaccttaagtctcaaacagaccatgcatctgcagctcgaatatttaccatttagttattctaaacattatta

SEQ ID NO: 66718 - DNA, 438 bp, Oryza sativa
  unsure (1)..(438): unsure at all n locations
tatttaaccctctagccgaccccatcagtancttggtttctgcatgacgtaacatttcctctaggtcgattatgtcctcaacagaaccatcgtcatgcaccatgttttcaacttgtgtcggaactacattttcaggcccgtccacttgttcttcgccatgacgtgtccatatttcgtacttgtccataaatctacgagttactaagtgctccttcactttaaaagcatcgtcaaagtcccaggctatttcattcttacagtcagcacatggaccaattatcttcctcatattgttcttctcagcgtgtgccttggcaataccactaaaattagacacttcgttctatatggagacaaanatctcggccaatgatacatccattcccgactttccgtatctctaanagaatacacgtaaaataattgcacaattaatac

SEQ ID NO: 66719 - DNA, 270 bp, Oryza sativa
tattgttgctatgaactctgatggtcacctgactatcaacggtaacggcgacgtaaacaacggtactgaacttgataacagctctgtatacaatagtgtttgctgaacccggtactacaaagtttctatcgacaacgcaactggcgctggcgccttctgttgattacaaagataaagatattatctacgtaaacgacgtcaacagcaacgctaccttctctgttgctaacaaagctgatctgggtgcatcacctatcaagctgaccacgc

SEQ ID NO: 66720 - DNA, 464 bp, Oryza sativa
  unsure (1)..(464): unsure at all n locations
aagtcacctgcggcatgcagcttatctcacataagtagtctgcgtcattatatgatgcgggtttgncttttcggtcctaggattcatgttgtcaagatctctgtcatcggtttccgatgcgaaatgatgatttcagctttactcgtggacctgaagttacacataaaatcgataaaagttcctttgttaccctcctgttctttttcttctctctgcataaaaacatgtaatgctatatacatattgattaatgttattgtttcgccatagtcgcggtgtcgtgccttaatgttattgtttccccataatcgaggtgttgtgctttgccggcttgttcagtcttaaagccaacttggcaaaattattactcggatgacaggcgcgaantngtcatagctaatgactacacttattcacgggtatatttgctacccctacggttcgcctaattacgatatatttta

SEQ ID NO: 66721 - DNA, 474 bp, Oryza sativa
aactaagctttgccaaataaccaacctcgttgaggaatgtttttttgtttctctggattatctttcatcatgaatcctgcatttttgtaaagaataggccaattagaccccaagtaaagacacaaatgcatgatattaaaatgtctactgacatgataaaaatgactattcatcatgtattcatgttaaagataggatattccttgaaaatatgttaacgctacacacaacatctgttaggtaactttctttttttttgcatattaattaactattaaaaaggaacatagtgttgccatgttcatgtctggaaatttaagcatagggttccaaaaaggaaacaatttggaaatgggctaaacgtacatatcctcttaacagtgatgcttagcaatggaatcagcggttcagcagtagtagttcccgaatagagattaaatgaaatcacaaaaacaataatatatgacttcgaat

SEQ ID NO: 66722 - DNA, 424 bp, Oryza sativa
  unsure (1)..(424): unsure at all n locations
gctcttggatctactacacattactgattatagcattgtggattgagttcctctctttggtttggagtgtagaatcttgttgcacttcaattacttcacctctggtgttggctgtccctccgctcactatttgttgaaaatgttttctatttcagatgtcatctgtcaactttatacatgggcatgcaatatttgcgaatgcaccatttcaaacttgcagagcaggtaataacttgagaaatcctaccgagactaattttcttatgaggcttccactctgataaagagactatacttagagctgactgtgttccctataatttctcattaccatattatgcntttggcaaaacaagaagtttaatgtggtaatactagttggtcagatgctgaaaatacatcctgtatttgtattatggatggg

SEQ ID NO: 66723 - DNA, 357 bp, Oryza sativa
  unsure (1)..(357): unsure at all n locations
cccgaaaatagctttcccatgtagtattataggcacatgccaagatatgtttgagttgcttcatgtggaaacgggtttgctcagtgcattaagagatacccttttctttctgcttataaaaatgtttttttacctgtaatttatttgagttggaactggctcaggtaaagggggccattctcttagtttcaaatttaccctgtaaatctctcaaagaaggtacatgttccatgtgctctgctcttcatgtgccctgtgaagatgtcatcctcgaactctgccangccaaatacggaaaacccagagaatgcgtacagcatgatcgtgctcacccatgtacgactacgaaagttttta

SEQ ID NO: 66724 - DNA, 430 bp, Oryza sativa
agcttctcctcgtgcttcacatcgtcaagctgttctatcttataatgagggtattgaatcatacactcgagtttggaatttggtattctacttcatcttctatatgcttaagtggatattccaatgttgattatggtggttgcagaattgataggaaaagtactattggaacatgtcattttcttggtacatcattgattgcatggtcatctaagaaacaatctagtgttgctcaatcaactgctgaatctgaatatgttgatgctgctagttgttgttcacagaatttttggcttttatctactctggaagattatggtcttactcttgagaaagtacctctctcttgtgataatactagtgctatcaatattgctaagaatctttgtcaacactcacgcacaaagcacactgatattcgtttcacttt

SEQ ID NO: 66725 - DNA, 324 bp, Oryza sativa
ttgatgaaaagtactcaaagcattcttaaattcatgagcagttcgaaaatgcgcaacacgatcataatccgaacgagaaataccactcaaaagaatattgcgagctttgcaatattgttcaaaagcagttttttcagcagcagcattaatagcttcaggaatcacataagtatgagaaactcttctccaaatatcatgatcttcagccataatgtaagattgcatcctactacaccaatgagaaaaatccgttccatcgaaaatatgaggctgagttgaaaacctaacaggagtagccatggcaaaaactatagatcgataaaa

SEQ ID NO: 66726 - DNA, 371 bp, Oryza sativa
gtaattacagaactcatccatcagaaccaatatggtttcatcaaagccaggacaatacaggattgtctctcttggtcttttgagtacttacacaagtgcctacaatcaaaaagggagatagtgctgttgaagttggactctgagaaagctttttatactatagagcactctactattttggacatcatgagacaaaaaggttttgattcaaagtggttgaattggattgatttgatcttttcttcagcatcttcttcagatcttctagaaggcgttcttggaaagaagttttatagtcaaaggagtgttatgcaaggggatccattatcacctctctatttgtgctggtgctgattactacagtctgtgtc

SEQ ID NO: 66727 - DNA, 364 bp, Oryza sativa
  unsure (1)..(364): unsure at all n locations
tacagcaacctatagcgtngtcttctgtatgggcgggcatcttaagtgatacacctgggaaaaaccatctctattccaactccttttatattctccacatccatctctctctttctgccactcctacctaccctggccactccccctctcttccccactcctcacttcggccaccttctatctctacctcccgcaacagggcatcttaagtgatacacctggaaaaaaccatctctantccaactccttttatattctgcactcgcatctctctctgtctcccacttctacctaccctggccactccccctctcttccccactcctcacttcggccaccttctatccctaccttccgcaacaac

SEQ ID NO: 66728 - DNA, 366 bp, Oryza sativa
agctctgcggctcctcctgctcaatttctgtcttcttctgcgccagccatatcccctgacacgccgtcgatgtcgacgctatgtactccgcctcacaagaccagagcacgaccaccttttgcttgatggactgccaactgactgggttggctcccatgaagaagacgaccctgctggtgcttttgcgagtatccacatcgcccgccatgtctgcgtcacagtatccgacaggctcgggcggcgtcttcctcctcttgtagtatcagcccggatcaaccgtgccggcgacataacgcacgatgtcgttcacctgcgtgtcgtgctcggttgttggagcttccatgaagcggctcacgtatccaacag

SEQ ID NO: 66729 - DNA, 178 bp, Oryza sativa
tttcatatgcttctttttacctcccacggggctctctgcaccacaggctggtgcgcgtcactggaccgacacggcgagacggcaccaaggacggcgaacggggcggacgcccggacgagatcgatgcgaccactgtcgcgccagggacggagacccccaggcagcgagtcagccagct

SEQ ID NO: 66730 - DNA, 388 bp, Oryza sativa
  unsure (1)..(388): unsure at all n locations
agctntatntcttctggagttgagtacaatctacaagaggagaagcangagaccgaagatcgattgtcctcgccttggaccttctgggccctatttataggcggaggagggtggaggcttacgtcgtaagccttggaccttctggctagcgtcgtaagccggcttacgccgtaagctggcttcttctgtaagctggcttcctctgtaagctgacttgtgccggaagctggcttcctctttaagctggcttctagcgtaagctttcttctgaagtaagcttcccacttataatttaattcgtccacaataagataggtttcataacactccctcttgacgaatttaattatcgcatgcctataaaactatcccaaaacctatgggaaaa

SEQ ID NO: 66731 - DNA, 370 bp, Oryza sativa
  unsure (1)..(370): unsure at all n locations
gctttagccatcttggttgtattcctatatccctattttgtnatctctcacaggaggaaattaattaaattttttacttgctggttactctgtacaagcattnttttagataatggatactctgtataagcatggttggctaataagtgaaataatcttacctgccatattttaaaattaggattaaaatatacaatgttaccatcatgtcaatctacatcactaggtgaactttaaattctgaggtaaaagtccaaccaataaagttcgaaattgtttatttttcaaatgatggagtttatattaaaacatttttcaaccagactataaatctattagatgtattctattttcagattagatatgatct

SEQ ID NO: 66732 - DNA, 367 bp, Oryza sativa
  unsure (1)..(367): unsure at all n locations
tcttgctcctcttgtttttatcacacatatcnctatggctttctttcctactgatgataccggaagtatgccagtatcagaactagatacatcgtagatgtcatcccgtctagacaggatcccatggtatatagcggtctcctatatttttttatgggtttcacaggaatattcatacttcaaaagaattggcagagatatactatcatcgtggcataagaatgtgatggaatgatgatgcacgttctcgcatcgagggaacgcggcaatgagccacaatcgtggttagtgacacgaagacattggtcgaacagctatatcggcagcggcgcgcggcggtaattactagttcacgaccctatcgcga

SEQ ID NO: 66733 - DNA, 422 bp, Oryza sativa
  unsure (1)..(422): unsure at all n locations
ccccaaacccagctnaattagatgctcngccaagctgacgcttttttgcattatgttcatacatccgncagaatatagcatgttttttttcattctaacattatcaattttgtttgttttgacgtgcaactaattatatgtgtgcatttggtttcaggtattctttcaatgttgcagaaatcatatttatgaaggcttttagtttgcttgaacaaccaacttggtggtatacccctccaatttaacaaattagaacacacttctgttaagagagacaatgttacgcttgctgaatgcttaagtaacatggtctactaaagtggagattgatcnatggatggctgagctcaaggcgaccatctgaatttcttgagtgcagaaatggaccatgtttaaaagcatcatactgatgagaatcaaag

SEQ ID NO: 66734 - DNA, 275 bp, Oryza sativa
ttttcccggatctcacctgaacgattgagaagttaaaggttccactcgtatgcgttgcacgcgaccgtagcacagtagcactagcaacggcggattttggttctgaaaaatttagcccttcctgggctctacttactgcctctcgggccgcgcaccctctgccgcgttctgcggtctgtcggaagcttgcgtttggcccgcgctaagcctgtgcggatgagctacattggcctgcgtgaggaagctagcaataccaaacttgaacagtcttggat

SEQ ID NO: 66735 - DNA, 379 bp, Oryza sativa
  unsure (1)..(379): unsure at all n locations
acggatctaacacgagctgcactcactcgaagggtcatttttgtanacacccttttaaaagatcgatgaaccatatattcactcctcatttatatccgttgactatttttacaaacttgttctacttcgaccaaattcatagaaaaataaagtaacattctttttacgaaacaaacatattatcaaaatatattcattttttagtataataaaactatattaggggttggcatgtagctaacttttataaatttaatcaaattaaaaaacatcgactgagaaaaaaattaaacgacttatagtataaaacggaagagtagtattctatagttttttgtctaaaaaatgaaaacgccttgaattgtagaattcattctct

SEQ ID NO: 66736 - DNA, 407 bp, Oryza sativa
  unsure (1)..(407): unsure at all n locations
acccagtcatggtgcggaaggccaaccggaaatggagaatgtgtgtcgatttcaccgacctcaacaaaggcgtgtccaaggatcactttcctcttcctcgaatagaccaactggtggactcaacaaccggttgtgaagttgtgagcttcctcgacgcttactctggctaccaccaaatcagcatggtgaaagaggacgaggagaagacagcattcatcataccgtttagggtattctgctacgtgaagatgccgtttggactaataaccgcaggaaacactttccagcgcacgggtcanggcgcacttagcgaccaacttggaaacaatgtcgaggcctacgtcgatgaaattgttgtcaagaccaagacaagcgactcattgattgacgatctgcgagaaacggtc

SEQ ID NO: 66737 - DNA, 402 bp, Oryza sativa
  unsure (1)..(402): unsure at all n locations
tagagtcacacgtgggggcagcattatatgtttatctaaaagctgaaacagaaaggtgatcagtcagaggactaatagtccattctttagaacgagataagagaaagctaacctgagccgacacttggaaagaatgcaccttcactttcacaattacatttgctatgctggcccaccgaatcacaggttcaattaccaactctttttctctcatttcataaactntaattcctgcttgtcaaaatatcgagtagtataagaatcaatcaatcttaacaagagttgactgacagcgtaagtgcagactacagatnttgaactgctctaccaatctatattatttacaacatagactngagttatacaaggatacagaaacactgtacttataatgataatcat

SEQ ID NO: 66738 - DNA, 430 bp, Oryza sativa
agcttgaactagtttcagtccatccatcctttttatgtgtgagtcacaacaatagttgttggccagatgacacaatatcaagataccattcaagcattcagctactactaaatttgattatctacattattcagaccatgcattatgtgaaataatctgcaacattcggattaatcctacaacattcagataagcccaaaatgcatacaattggctgacatgaaatttcgacagataaacgcaaatatatttcacttctgcagttctgctgttagtattcttcagactacatcttttttagaaattctacaacagagaatctacagcattgagctaacataaaatataaagaaaaccgagatactgctacgaatgttcaactgactgggtttgccactttgcagcactacacacgagcattaagctcttt

SEQ ID NO: 66739 - DNA, 461 bp, Oryza sativa
  unsure (1)..(461): unsure at all n locations
gcctgagaggaagtgacacgtatgttttctatttaagtttattttttaaagagnngcattagatnttgcattagattcgtatcttacatatatttttgacacagatgtgagcttgtgttcgagaattgttttgtgccccatgaaaacgttctcggggaagaagggaaaggtattaactgctgattgtcgtaaacttagtcagaattcttgttgctatcctgagatatttattcagttgtgtacagtacagttgtttgcatctaccaaactgccactgtacacacagaaaactgtcataattctagccattgatcctgttatcatcctcaaagagtgaacagtttttttcttggtgcaggtgtttatgtcatgatgtcanggctngatctagaaagacttgtgttagctgcaggtcctatcggccttcatgcagcatgccttgatgtagctgntccttatgt

SEQ ID NO: 66740 - DNA, 403 bp, Oryza sativa
agctcctcttactgaagaggtgttatactttgctttaatgagtacaaccacagtactcagctagctccaccggcagatgcacgattaatgcaagggggttcaaggggtaataatataggggttaagttctgcagaaaacagcatttaaaagtcacttagttgcccaaagccatttataaagacgatcctagagctacacaatattattaaacaaggccgtgaaccctcacgaacctgccttaacccaaggcctacgatgattcggaccgaactggcaacccgaccctgggtcctagctcgttccaagccaacccaggccaaccattccacattctagttgttgatcaaattttaagaattataacactgacttgggtacatagctcagcttgcccataaccaa

SEQ ID NO: 66741 - DNA, 365 bp, Oryza sativa
  unsure (1)..(365): unsure at all n locations
gcttcagactcttaggtttgatcccttatctttccctcattacatcagcaatcacatcggcccactggtcgtgatgagttgccccttgcgactgatgcttcatgggctcgaactgaccgtatgcgaactgaggttgagcctctcctcctaactaatattgggcttgtggggaaggaggctgatattgtgaactcacgttacccccttggtaattgtgaatgttcggcttaaatattgcgcatctagtgctcatgatcaacctgaggcattactgtgccttcaggtatacatggtgaacaaatgttctgggacaacttgtttaaaatttgtgncatgctgacaccaagtgtggaacccgccaagca

SEQ ID NO: 66742 - DNA, 401 bp, Oryza sativa
  unsure (1)..(401): unsure at all n locations
ctagtgatgcttggaatgcataaatatgttaaaataataatattccactagtattaggtctactaaccttttgcatagaataacaataaagtggaggagaatcgatatcaactcaaatggtaaatcaatcggacgatgtcgagaattagacttatgcatgaatgggccaagaactcagaattgacatgaatgaatgggccaaaattcacaaatctacaaagtgaagcaatagaggaggtcgccagccgaagatgggctggtttgggccagcccatggttcggctgaacccggnggttcggccgaacccccatctccaccattgaggctagagttcggcatggaacgtcaagaatgcaccccaatgacggttggagggtattttggacaaattcccttcaca

SEQ ID NO: 66743 - DNA, 382 bp, Oryza sativa
atgtaaggaacgatgccaaatgtactaggaaaatatattcctaccttcatgaaaacacatattctactcacgaacttgcctgaggtttggaacccattgaagagagaactttataagcataagtggggaccaatccgtgcgtctgttgataccttgcaagtcaagaattccaatcaagttaatcagcagacagtgaaacgagtagcatattaagtactcaagtatgttaagtgttctgacaatgtaatacaaaattaacaacttacatttttagagcccaaaatctctttctcagacaataacttgtgaatttctgtttaaacatggatcagaataacatcctgcaattgaagaacataaagcataccggagaaaaaaatgt

SEQ ID NO: 66744 - DNA, 392 bp, Oryza sativa
gtatgactttgctgaggccaaaacagttcaacaggtggagtatgtaaaaaaaaaaaaaagtcatactacccaaaatttctcacaaacatacagatcgcacaaacatcgatcctagcatcccgacgtccctttgctgtggctcgccatcgcatcgatctttccttccaccctgccaccacgacgtcgtttctctcagcactgccgcacgtcaccagcagtaccacagcagccgtgacctcattcactttgctctgctacctccacaaccgacatggtcgacatcgaaagtactccctccgtccttataaaaaaaaaagataaaccctggttgtcgtgtccaatggtagaccgtccgtcttatttgaataaatatgtaaaactaaaaagatagt

SEQ ID NO: 66745 - DNA, 420 bp, Oryza sativa
  unsure (1)..(420): unsure at all n locations
cctgaggctgcaactatgaaattgacctcctcgagtgacttttatctgctcaactccattcgtacaaaagctaaataccgtgtgatacaatgctaaaatatncattgttttatgacgcaaagtacaaactaacaactatcaagcctcataattatgtgctccattttcctataataaaatctgcaatttcctttatgtgattgttccagggtccgctcaagcgtgattatttggataagctgggttcatcatctaacaagaactcaaagggtaagatgttttccatacttcattggtcaatgattctttatattaagctcgaactattatacctcattagtaagtacatcaatttcctctaatacatggggcactcaaaatttaaacaagataattaccggctgatcatggacataaatt

SEQ ID NO: 66746 - DNA, 401 bp, Oryza sativa
  unsure (1)..(401): unsure at all n locations
agctgccgcgtnccgacgcgtgctcacgtcgccccgcttctgttccccgncgcgccgctatcttctccacatggacttgacaagtcagatacctacttgcattatgaattttgaattccgatgattatgcttttttttgataatggatatattaacccggctctacaccttagaagtgtacacagccaaaccacaataagagtacataagactcctctattacacgagataccaataaagtttacaaacggtaaagaaaacaacagtctaacctgaggtttcactttaggtgacttcaccgtcacngagtcgccggtgggatgagcggggcgaaacaactaacccgctcgtcgactggtggcagctccgcatctgtcgacacccgactcacacgcggaact

SEQ ID NO: 66747 - DNA, 353 bp, Oryza sativa
  unsure (1)..(353): unsure at all n locations
tcttcaatagtttcaccaatattgttctttgtagaccganattcttgcaccctcttgggcaaccactctaaattagcttctttactcattatacaaatttatatagcctagccgtgctacactagccggctttacagagataagtacaaatttgccatcggagatactaatgaaatcatagctagaaagatccctccccgataagcattggatattcccatgacgccattcaaatgtagcatcggccattgcaacctcggccgatgtatccgttttaacaatctcaacatcatcgccgtcccattgaatcaaacattgatgcaaggtagaaggcacacaacaattggcatgga

SEQ ID NO: 66748 - DNA, 405 bp, Oryza sativa
atttaatggcatagaagaaaaagaggggaggcacgacaaacattattactatgtttgacactcgcttagatacaacttttagcatttatatgaaaatttcgttgcgtaatgatataatataggatacaagagttctagttagaaaacaatatctaggtgcattaaaggttaaagaccatataatctcggttgttgtatgaagttagtctctatatggaataaagctcatacctgactctatattatttgtagatgcccttctcagctgagccattgctctgctaagcatcgatgctttatgattaacacctctcttatactaagtggcacgacataacagttattttcttattagcacatacgtatgcttccacattggagatggccatactctctcacgatatt

SEQ ID NO: 66749 - DNA, 465 bp, Oryza sativa
cttaaaactagcttacaacaaggcgcagcggatgggctctcttttcttcttcatggatatcggcaagaagcacaacacctttgttccgaggaatgcacttcaggaggattccattagccgcgcgccgatagagggtcccttctaccagcacgtaacgtttggagatgcgatggacgcgttcactcccttcgcggtcctcgggtagagtcttatctgtgaggtatgcttggatctcggcgatccaagcaatcaatctaagggagttgggagcactcccctcgggtcccgaggcctggactccgacaggcctcgggggccggtcaggcgcatccgtctcccctaaggggtcgggtcgcgccgacggctgggcaagcctttcttaaaggcgcccggtggggtctgggctcgcgaggacgcgagccgtgagagttcgtcggcaatcatgttatcccgtctgggcacatg

SEQ ID NO: 66750 - DNA, 371 bp, Oryza sativa
  unsure (1)..(371): unsure at all n locations
agctntctagcagtgtcgccttcgtcgtctcttataaccagcttcctctngcgagaatatggctggccgactggatcaagagcacttggttgagtttcagaccggattcttggtcctccgcttccctgaccagtttggcggtgaggtgattggcgttgagcgattggcggatccgatttcatcagagcanattcctgngcgtgacatcctctatttgtaactgattcaacaaacagataagaccgtattctgtgaaaagttgaagtgttcggttacataccggtggaggaggattaaaggcattgaatggcacgactggcagcaagtgtgaatagctgaccacgatagcattagagaagatcttatacatc

SEQ ID NO: 66751 - DNA, 379 bp, Oryza sativa
  unsure (1)..(379): unsure at all n locations
gctcagctcgggatgctcgtctncaattggcgccgatgtctttttgccctcctccgcctcgccgccgctgccgtcgncgacgagctccatctggtcctccagatactgcagcagcagcgccgcgcggctcccgccgccctcctgcttctccggagacgtccgctcctccccgtcgacgaagcagcagccgggcgccttccccttcctcgcggccatcctcagccgccgccggcggcggaaccggacgacggtcacggcgaagcagagcagcgggaggcagaggagcgccagcggcaggacgaccggcagcaggcagatcgccacggccgccgaccgccaccggcggccgccatgcatctatgtgggggagagccggaga

SEQ ID NO: 66752 - DNA, 398 bp, Oryza sativa
  unsure (1)..(398): unsure at all n locations
agcttgccgcggcaaaatagagctttttgctttttgccaatatccactaagtctaggccgtaagactattattcatgtgtctataagagtataagactttatgtcccaggctatacatgtgtctctaggtcccacgctatacatcaattcctatgaaggctaatgtacttgaaggtttggcccgaaggtattaccgatatattcctatgccaatggataaaaattatgccttttgggttccaggttactcgtgaaactctggaccgataaacatattcattttgtcgtaatgataattagtcatgaattttggccgagagctataactcacgaaantatatgtgggaggatagaaatcaccaaatttggtgtcttaatgtaaaactcatgaattattt

SEQ ID NO: 66753 - DNA, 455 bp, Oryza sativa
  unsure (1)..(455): unsure at all n locations
ccaatcatatctggcacaagaggagtgttttgatttaatactgntagcagacatatctctaacatgcttgcttgtatccacatgtaagaatagaccttttctttttctttgcgagactaaccttaatgcaaatgcaactaacagcccaggtagaaggatgtcaccgaatccaatgatgctgtatcctccccatggatcaaacattcgtggaatttttagtaacatggggacgccgtcttcatcagtcttgtcaccacgagctacctttgagaagcacaccagcataaccaacttatcttanacaatgagatcaccaattaccagaagtctagaataaatttccacaaaacttaccacgatcatcacgctctcatgaaaccatctcttggagaacaacacccagaagatgtcataaaagaaggcacagctgaggagaactgaacccacctcgtcat

SEQ ID NO: 66754 - DNA, 357 bp, Oryza sativa
tatgatgcctgtgcatttaaggataccaacagcaacatgctccgggagagttggccttcaacatgtggcaagctccatggatgcagacagaggatctcatttttgaagtgtcaagttcacgctggtctaaagatgcaaaggttacgacttgtgagttttactgctggatccgatgaatactgtttcgtctggagagtatgttgtgcacgcgtgggcttggtattctgtcgctctattcttcttagaattgaagggttttttttaaaagtacacactcaaatctgtgaataagctatagacacgcctaaattctacacatacacgaatgcttacacttgtttagtacaaatggactat

SEQ ID NO: 66755 - DNA, 401 bp, Oryza sativa
gctaatgaacttagtgccatacatggtgtttgtgaataatataaaaaaaaagtggaacatatatcgtttagtctcgaattatttcttttattcatgtataagaattaagtagaaaatcctagtttaccagtgtaccttctggctcaaaaatgtcatcaccaacaatgttgtaatacactcctttggcaattggcttgcttatctgttatcactacaaattatgattcactcagatacaaactgaaagtagtgaagtgctagtaaaataagtgcataacgaaacatatcgtacatgtgcgagtgtaatttacaattgttagcttaatgaagtacacatagttagaaaggccctatttaaagttatgattctctttgtcatgtagaaattaaaatggtcttga

SEQ ID NO: 66756 - DNA, 368 bp, Oryza sativa
  unsure (1)..(368): unsure at all n locations
cacatgctcaaatgatcgacaagcccctcgtacatgtaggccagctttgtggtcgtccccatcctctggccacaagctccgcttagcccacatctncccgccatggccaaccggctgcatgccaatgtttgcagctnttgcatcatcgccaatcaataatccaatatgttaataaatcatcggtgcggctctgagcattatacaatcctgatatcttctcaataataccggcattatttcgtgtgtggtgttggctctccgagtgttattattgggagtggtaataaacggtgactgatcatcatcattcggtgcaaagtgtgtgaatccgaccagatcaaaacacaaggctgactcacacaacacac

SEQ ID NO: 66757 - DNA, 450 bp, Oryza sativa
  unsure (1)..(450): unsure at all n locations
ctggtatggcttaattacagcttaatgtatgtcttattgttttaaactaatgctcgaatcagccgttcacaacataatttatgttctctttgttttaaattacttatcgttttaattttatcctaaattaaacactcatatctttgaccctgtttggcatatctttaaatcactacctatatatcacctaacaattttttcattaaaatcacacgaatgtaactacaatataaatatactgtaattactgtaatataactagcacgcaagtctcatctaaatataagaaacgcttgtacctgagtaggaaaggtatgtgtgtgcgacgtgaaggtcgtgggattcccgcagtgacacnaatnttatttgtaatttctttaatctcttcacctagccgcatcgacacatgatgtgtgtactcatcaattntgggccaagctagattatatg

SEQ ID NO: 66758 - DNA, 341 bp, Oryza sativa
agctttgatcagttcgtttcggaatcgaacacgttaaccaaactaaataaatcctaagctcagccctccaagacgaagaaaaaaagcccattgccgcaacgagccaaggacacagaccaactctagacaggcctagaaagatttacaccgtccgatcagcatcgggcggcggagagggatccttgcggaggaggaaagaaaaaaaaggccaaataaaaagaaaaaaaaggaggagaaaataaactccccgcatccacgcgagcttctctcttctctcgcattcgcacccccaccttctctccacgactccacctgaagcgcctctcgccgccgccggagaa

SEQ ID NO: 66759 - DNA, 458 bp, Oryza sativa
  unsure (1)..(458): unsure at all n locations
ggacttatccggacatccggaattaatcctgttatttctaaccaaactcaagccacgtactggtaatattgttatatttagctagcctaaactatcttaattgaccattgcaaatttccggcatgaggaaaatttgcaggtcctaatattctgccaaaaaaaatttaaaatattgttttcagcatcatgaaccttcccaaataagtttcatattttttggattgcctcaaggcttcaatcacagattcgcagttgcctcaaacatgtgactgacaaggaggcacatggtgcaaagataaatttcctagattccgaaacttttgatctatatttggttggcacaggtacctggatcaaaatggcctgcagttagttntactgccatgacagtaataattgtacanttgctgggttcaattggacttgaacatcttgtaatgtgtcagctgctatacttt

SEQ ID NO: 66760 - DNA, 382 bp, Oryza sativa
  unsure (1)..(382): unsure at all n locations
agcttgattgtactgtatggcaaaacacatttacattctgctacttcataaccaatcagggacagatagttggacatggattattgnggtacaaacaaacaaatcgttattagtacgtatcaaggttaaggcggtaaattaagaggaaaaaaggttgcagatccacagatctagaagagaagttattagggttaacgcaagcaaaaaattggagaagaaagtgtgagggtagagagagatgaagaagaggattggattgaatggatgctcaccaccgacgatgcggagagagagagagatgataaagaggattggattgaatggatgctcaccacccatgatgccgagagagagatgagaaagaggattggattgaatggat

SEQ ID NO: 66761 - DNA, 330 bp, Oryza sativa
  unsure (1)..(330): unsure at all n locations
gctacacaatgagtttcatgtgtttttgtttgcaaaggtacttgcttgggcgaaaaaaaagagaccgagcgtaaggaatgcatagatgattgaagaagttgattgggaaccaaaccaagacctttttcaagtcttatttcatctcaccacgtcacttttggttcatagaagacaagagataaagttatacacgttttgaatttagattcgggtctcctgacagcatcaacttcaaatagatctagccgctgttctagaaggaatttcngtgcccatgagtactttgttgaaagcttatggnagtctacttcagatggatttggtcccaca

SEQ ID NO: 66762 - DNA, 399 bp, Oryza sativa
agcttgtcaccatgatatgtgctctgcatttctttgttaattctcaaaattaacttgatccgtcatctgtagcatttggattaaaacatttgctttaactagaagtttccatacacggttttcttcagagcgtgtagctgtcagttccctattggcagttggagctgtccatcagcaccttgtctcacatcttgagaggacacgcataggattgttagttgaatctgctgaacctcgcgaagtgcaccatttttccacccttattggatttggtgctgatgctatatgcccttatttagctatataagcaatatggcggttgcaaattgatgggaggatttctccttatgatgggaaaccttatacacaagaacaacttatcgagaatatattttatgc

SEQ ID NO: 66763 - DNA, 402 bp, Oryza sativa
  unsure (1)..(402): unsure at all n locations
tattgaactcaaaattctgagaacacttccaatcttattactttagtgcacacagacaaatgaaactgtttgcaccgatcagatcatgattaattctttcgtagcatctagtgtgcatagtggttgatcatgagtgataatgagaacaacaagatcaagctttcacttatgctaactggaacagggcctagtgtttaacacctaagcaaaattatggcgattgatgcatccaatgatgaaagcggttagcaggccaggtggatcaaggcgactagttaacagtgtccaaatcgaacccagacatgcaatatgttacggaaagtgtaaggtgagatcgcttaaaatgcangcaaattgtacaggttgatcgatcgagctcacccgggccctgcagcatgtact

SEQ ID NO: 66764 - DNA, 328 bp, Oryza sativa
tgcttattgaccttcgagcttcaagctgttttatcctttaatatcactgcaattaaatgtatgccaagcggagctaaactgttaacatttgcctcacgtgctggtcaagccgtaaagtatcacgtacttgacagctgcaagctcgacaaaatggttcttcggtctgacttcatctgatgcagcttctacgagatctccaatgctgtatttgtttacaagctaaaaccattgacacatattcacaccactgacgttcctagtgtctgccatttcagatgatacctgttatccgaagcgattgacactatctgaggttgacagcctctct

SEQ ID NO: 66765 - DNA, 294 bp, Oryza sativa
  unsure (1)..(294): unsure at all n locations
tctttcgtaccgaaaaaaaatttctatatgannaaattggttctataaatatcaagaattaatccattnttttaaagtttggtaataatataannactcaattaatcacaaacgttattactacctcgatttgcataatatacttaatctttatcttcatgagattcaatcaccacattagttgtacataattaggttcatcgtggacgcttctcatgcatttaagaaaattcaagcttgagttgtcatagcgttgggccttgcaactttgacaatatgtgtcatcgtggagat

SEQ ID NO: 66766 - DNA, 436 bp, Oryza sativa
agcttggagtgtgtgtgagtgaagtgagattgggtgctctatttatagtcaggtaatggcggttatgactatgtgaattgtcggaattgcccggcaaccgccatcaagagagcatctggagcgtccataccaaaacctggatccaatggtgatcaccatggctgaacctggattgggccagatggctcctacatttggtctgggcctctttctcactctgccttatccatttctcctgtagatgggcccaatttctgatgttttgatggagtttaagagcccaactcttgtatggatagaattcttattcactttagtctaaatttcctcccaactctagtggtgtatacctgcctccaatatgcccctacactcgtggaatatgtcaaaattaagccctaccactatgttggatggatcattatctaagtattat

SEQ ID NO: 66767 - DNA, 472 bp, Oryza sativa
  unsure (1)..(472): unsure at all n locations
aactcacctcgcagaaagttgaacagttggaaacaggtcttatatttgtatctttgaacaacaggttccaaaagagataaaagaaagttataaaattaacatgctaaatttatttccttgcagcaagattaaataaaacaatattgtaaaacttttgctggtaaatgagccattagtgcagtaatagatgtacagtactaataacactggaataaattttgaatgagaaccactaaaagagattatgaagtgcatgtgctattagtttggtttaattaaaagagaaggggaggagaacagttctacttttccaatatttttagagggcttctatgggtaaccatttggcataacctanggtcaaggaggctctgataccaacttgtcacgcccggaatttctatccaaaattccaaacgcttacatgtgtgtgaaccctcgtccaggaatcagccgaggcacacaataacaa

SEQ ID NO: 66768 - DNA, 361 bp, Oryza sativa
agctggggttaggttgtgttctgatgcattatgggaagggtggtgcctatgcatctcgtcagttacgtccgcatgagaagaactaccctactcatgatcttgagttagccgcagtggttcatgcgttgaagtttggcgtcactacctctttggtactcatacggaggtgtacacggatcacaagagtttgaagtatatctttactcagccggatctgaacatgagacagcggagatggttagaactgattaaggattatgacatgggaattcattatcacccaggaaaggctattgttgtagcagacgctcttatcaagtaaaagctattgcattgctatggaagtaccacagttgccatg

SEQ ID NO: 66769 - DNA, 221 bp, Oryza sativa
agcttactgtgttgcccccgtcgtcaacttcttcagcccacaagtcagttcttgtgggtgatatgaaattggctgattataagcaattcctggcaaataaaggtttgcaggtaagttttcattttcaaatatgttagtactgaataatattaagttcttggatatactggcccttcacgtttcactgtttagagagagatagagagagacagacacatata

SEQ ID NO: 66770 - DNA, 373 bp, Oryza sativa
  unsure (1)..(373): unsure at all n locations
caaaaaggtgaattgggaaaataagaactgcagaaagggccatgtgtaaaaagtccagcatctaaacagctgctcctaagtgacataacgactcaatgcctcgcatttctttctttctttctgtgttcgaaagaagcatcctgagcggcgtggattgcaaaacaaaaattgactttgatgtgtacatctaccgctgaatacatagaatacataaatataaattcatgcagcgccgagcatgagttcgtttccttaggtccaaactcacttttctcaatattttacgtgcacgcttttcgaaatgctaaaacaatgtggtattttttaaaanaaaatatacgannaatacttntaaaatatacgatggttgatg

SEQ ID NO: 66771 - DNA, 433 bp, Oryza sativa
  unsure (1)..(433): unsure at all n locations
agcttgcacttagcatgacgcttgaccgatcnttgtctatcagcgcaagcgaaggagtgatggccgagaagaaagcctggttgaccaagcgggccgagtaacgctgatctctcgtccagcgcgagacaagatcgtcttcagtgctcggagagagttggacaggaagcaccatgtcccgaaagcaccaagaactgggggatggacgagacaggtagtgggccatggatgtcccacagccaagagttgccggtgagggcaaaagcgcaaccgttcacgaagccctgagatgtggtggccaccgagcgaccgtcgatccattgattagtctagaaaagagctgacgtaccatcccctatcacgaagaaggtggatgccgcaaatatgtatgagacgcttagctcgacagaggccttcagacccattcagtaggagt

SEQ ID NO: 66772 - DNA, 289 bp, Oryza sativa
  unsure (1)..(289): unsure at all n locations
aaaactcacagctcaattggatcatttcacgtgtcatcttgtttctgactttgcatggtccagagagatcatggaactggatgtgacaattagtgaaaaagatacatcttgttgtcacgaggacgtgataaaatgtacacagaatgctttggcttcaggtttccctgcctttatcacggacttcctgggagcttatggcttgcangaagcctaactcagagatctggtcgaccttgtgtccactgctttcttgtaatggcttcacatgcatttacttgatcactttgtt

SEQ ID NO: 66773 - DNA, 428 bp, Oryza sativa
tctaagacacctgcagcatgcaagcttggcatacaattgatgtggccgcaactctttcacacccgacggagaagttgctgatggtcctcctctgattgcgagtacaccatgatgtcgccgatgaagaccacaacaaacttatccaagtattccatgaacactttattcattaaggtcatgaagaaggcacgagcattaattagaccgaacgacatcaccgtgaattcatacagcccatatcgcgtggtgaacacggccttcgggatatcttcttcacgaatacacaattggagatatccggagcgaagatcgatatttgataagacagtgccacccataaactgatcgaacagatcatccgtccggggaagagggactttgttttgatagtaacttcattgagagctctgtagcaacacacatcctct

SEQ ID NO: 66774 - DNA, 243 bp, Oryza sativa
gggagcaagaccactgagatcagtcaacactctatatatgacgcacctcagtttcccaacaacctgggagcatctctatacataagtaggtgggcggacagacatcttacaatattggggcgatcagcatatattacccaagctgcacaactggctaagacactatactgtgcccgaggccattacaaaaaccctttggtggcaaaaagatggaatgacagcctctattcgaatatgagtaca

SEQ ID NO: 66775 - DNA, 358 bp, Oryza sativa
ccagcttctcgagcttgatgacgatgactatctgtatcgtctctacgaacctcccgcatatgcaagaatctactactaccctcccttgccaaggcctgaccttgtgttctgcatcaagcctcactccgacggcaacctcttgacgattcttctcgtcgactaagatgtcagtggcctcgcatttcatagggatggcatgtggtccaacgttgaggcaactccttacacattgctgatcaacttatgtgacaccttggaggtaattggcctaatggcatccacacatccaatatcctacttctttgaatctcaaacaaccagtcctctctccgcttatttcataagaacttttagcatt

SEQ ID NO: 66776 - DNA, 392 bp, Oryza sativa
ccagacatcatagttgcgatggctattaatcccacgaatcgcgatatatcaagaagtatcttgtagagaaatatctttccgatgacacctgaaccatcgataaaaaaaaacctagctcttcttattaactacatgatctcatcaaattttgtacattgctcatcattatgttcttgaaaaatttacttgattgacaagaacaaataaatgcatcaagaaattattggtaaataggataataaaatttaataaaaataaaacataccggtataaaaataatctcacctcggaaaggccgataatgtatgatatacattcctattgaatgaagcaaatgatgtacttcctccatcctagaatatagctacctagtaccagatgtgacattaccc

SEQ ID NO: 66777 - DNA, 453 bp, Oryza sativa
  unsure (1)..(453): unsure at all n locations
agcttgggggccttacttattggattgtgttctctggccaagttntcatgattgttcaattatttagagtcagactgctagagtacaaacacggtactccctcaatttcaaattatttatcgtcctaggattgtttttattttaagtaacattttaatctttgaccatagatttctataaacttatatagtttaacatcataaaatttatacttttagatttattattagaaatattttcataatatataattcacatgttaaacacattcatcagcagtcaataactagtcattaacatttaacatgtaaataatttttattttactttcctagttggctttgaacaatgatctgtntacacggtccatctgtacccaaaaacaatttttagaaaagaagaaacatantttgagcagatcccgaagcgaggcatcaccattagtctaaatct

SEQ ID NO: 66778 - DNA, 406 bp, Oryza sativa
  unsure (1)..(406): unsure at all n locations
attagtcaagaacgtggatgtacgctaaaggagtcccttgattggtcgagcggatatcatcgatgtccaccaatgtaagggaacgagagagatttgagatggaagactggaacttgatcttcgtttccatctcttatgcaagctatctcccacaagcatagttgttgcggagattagagacgctgatgtgacacgaacaggaggaagaggcttctagatggttcggggtccggngaggagctgaagatgaaaagaaaagtacaaaaaacttattcataaagttacaagtgctgaagcgggcggttttatgaaaaaataccctatatggatgtggtccttcatattaagatcaaagggattatataatgaccaaatgcatgagtgcacaactactgacgagtgcata

SEQ ID NO: 66779 - DNA, 307 bp, Oryza sativa
  unsure (1)..(307): unsure at all n locations
agcttatagctcactattatacttgctctgtgttgtttgtaatctcgggaattcgaaggactagtgccaccatcttgtctgttctcccgaggcttccttttcagccagcggcactattgtctcctctgaagcctctcaaggaatgcctccattcctgcatgtgccaacaggagccacaatatcaacgcctgatccaaggctcttggcatgcaagtatcctcgacatctaccagcggagaagaagagcatctccacccacacttcttctataagactccacantttggcctcgtcatctaagcccatc

SEQ ID NO: 66780 - DNA, 374 bp, Oryza sativa
  unsure (1)..(374): unsure at all n locations
tctccgcgtggtgtatatgtactactttgctaacctacctaacccagctgtttgaaactgagacatacagtaatttgtatgtactatgtttgttaatttgtatacactgagacatacagggatcaagtgtgttaattggtgtagcttgaggtagctaagctagactaagctgatcggtatgatattgagctcaaanaagacatgtaattacttcacttgacgggatgacacatggtatgaggcctcttatactgctcatttgtgaacctgctactacaacagagatgaaccatacattaatcaaataataaaaggtgtgatccaataatctaacataaaaattcaatatacgaatatctctttagtttgacaca

SEQ ID NO: 66781 - DNA, 371 bp, Oryza sativa
acaatgcaacagctaccggagaaccttgcatgtcattgtttgcaaacagaatatctacaaaactgacaatatttccaggtgttccagattctgtgaacctccaactagacccacttccctcatatagctacaaagcacggactagcctctctaacaaaaagtcgcgggcgataggctcaaacatagacttgcgcacactgacacacgagaggccatcagagttgctacctaattggcggaagcagacatagtgcgatagatatacttgcacagatgtggcatgctcttcatgagcagtgaaataatactggccaaaattccagcactattggaccggtcacactcttaagagcgacagcagttcaccatag

SEQ ID NO: 66782 - DNA, 372 bp, Oryza sativa
cagcctgaaatttcttatgctggccagcaaatttgtctccacatgcatgaccctcgagagccgcacctcgccgctctcaagcgtgttcttcggtacgtacgtgggactcctgaccatggactacacattcatcgcacccgaggagtggatttggttgcttattccgacgctgatagggcgggttgtcctgacacgatgcggtcgtgttgcggccgatgctgttcgagtgcatcatgtgccaaccacttcgcagtacaccgacatttttaccaaggggcttcctagttatggttttacagaagttatgttcagtctcaacattcgttccaccgacgttgtgattgctgggagaggtacatgtatctcatgtat

SEQ ID NO: 66783 - DNA, 427 bp, Oryza sativa
  unsure (1)..(427): unsure at all n locations
gcttctttagctgtttgctatgtgatatttaataatgagncgactttaagttgcacgcatcatattttacaaagcagtcggtatatcacttggatcatattattcagggattcacacatcatatgctattatcgaaaccactcggttggttagattatttattccttgactatgtgtttggtttgttcaattaaccacatagtcgggggctacacctattaggtgcatctagtcgatgcacctgactttatttttcagccctccacagtctttatatttggtaaaagtactcgggaagtcatggcacagatgattgaagcactcggctttggagtaatctagttcgagagaatattatcttttcgactgtgaaagtctcatgggctactgtggagattattggtaccccatacccacacggcatggt

SEQ ID NO: 66784 - DNA, 378 bp, Oryza sativa
agcttcatgtatcagggtatctagagtatctttgtgtgcagacgcactgagaaatgaaaacacatggtcagagaatcaaatctaagctagtgaaagatctctgtgtactccagcaaaataaatttaaaagtgccatgcccatgtatgatttctttgctgagcgaattaacaaggtattataatgacaaaatggtaaggcataaagataaggctcatagttgaagagaagggcaacataaatcgtagataggtggatgtcatacaagaaaaacttgtttgcacccatggatcaagggtataagagatgctggttctacctgaaaaaaaaggggatatgccaactttcgaattcatcataacagaaagtcgaacttataa

SEQ ID NO: 66785 - DNA, 456 bp, Oryza sativa
  unsure (1)..(456): unsure at all n locations
aaactgcttaattgtagttactcttatctttatttctattnattctaagaaaaacaactgaattgtacccattttgattaatctgtgaccttttcatgtccttcaaatttcatcatcttctgcatttgttgatctaatacggcccagccacctgttttttttttcattcatagtctgcatgatcatcgcgcttcaccctgagtgggatcgatcctgatctgccaggtaggcctctgntctcgtcgtcatcatggtgctttgcccgtgagcatcgcttgtcgttctttgttgagtcatcgtcaagctgttaacaccaaaatttgatacggttgtttagaggattcagttaaggaaagaagtcaatcaaccgatcaggacttatatcntttcttttatctttatgagacttgtatcttgtccgattaggactaatatcaacctaagggtataaatatg

SEQ ID NO: 66786 - DNA, 375 bp, Oryza sativa
  unsure (1)..(375): unsure at all n locations
agctntanaaacaattggagagaaattcttttgatttatcaaccngaattggttccagcaggtacagttggatagtgctgaaatgcttaatgccacttttgaacttgttatttggcagccttccgttccacctgccacacaagaatattcaatatctcagaaactacttgcttgatcaagaaagcaatattggtaaatactctatctcatcttctgcacacactcttaattggaggtaaatggattcctttttcactacgtcaagagtgaacgtgatacgctttgcagttaatgcattttatatgtgccatactagcataatcaacatcgaacatgcctaatgatgtactaattaaagaacattctttattcaaa

SEQ ID NO: 66787 - DNA, 62 bp, Oryza sativa
agctggctcgggctggaggaggaataacatatatatatatataggggggggactttagtccc

SEQ ID NO: 66788 - DNA, 436 bp, Oryza sativa
  unsure (1)..(436): unsure at all n locations
cccgcangtacaccgaacacacacnttatcgtttgtntattttttatgcgggcggagcggagactctcgagagtttccgctagatctgagagtaacgtttcctggttgcgcgtctttacaaccaagtcatcgacataagcctcaacattacgtcctaattggctacccaaagaaattcgagtagtaccttgaaaagtaggacctgcattctttaacccgaagggcattgtcgtataacaataggttcctatgggggtaatgaacgcagttttttcctcatcctccctagccatgcgaatctgatggtaaccagagtatgcatctagaaaacacaaaaggtcgcaccccgcagtggagtcgacaatctgatctatgcgaggcagggggtaaggatccttatgacatgcctttgtaacgtcngtgtagtcgatgcaca

SEQ ID NO: 66789 - DNA, 401 bp, Oryza sativa
agcttgtatacatatgtattactatatttttatacacgtatacaaagtttgtatacacatatataaagttcgtatatacgtgtattttttaggtttttatacctgtatacaaagtttgtattcacgtattttttaggttctttatatgtacacataaactgtatatatatgtgtatatttttttacattaaaattgtatatatatatataattatacgtatgtatatatagtatatacatacgtatatatattgccgtagagaagagagactatagagaggagaagtgaccgcgcgcgctcctcccccatgtaatggtcatgtctgatgatgaacggaactgttgaaactgttgttgttgatagtatcagaactggtgttgatagtgtatacgggattgtt

SEQ ID NO: 66790 - DNA, 252 bp, Oryza sativa
  unsure (1)..(252): unsure at all n locations
atatgngaccttgcagacaaaacaaagtgttggttatggtattgtggaacaagaggagaagaattgcagagaagatgactgggaacatcttgcctgctgtaacacagaagcttaaggcaagaactaagggtttgggtcacctctcagtagtgaaatctgatagcttctgtgcagagaatgttgacaacagcaccacccatgagaaacatgttgtgaatgcttacaatcagtactgctcatgtgaggagtggc

SEQ ID NO: 66791 - DNA, 443 bp, Oryza sativa
agcttcttggaggcctcgcctgttctcatgtatagcactcctttcaattgctacttcgctgtgttgtcatggaggatgcatctgtgatgggatcttgtggtgcaacgtactaattgttttagttggttactcatttatacttagtacttatgaattcatcttcgtgacatatggaactattgaagggaattgtagtactgcactggttaaatgttttgtcctgcttcctgcccatgtttgtgggatactggaaccggtgcataaaggaaatgctgctctctgaagcggcgacggccataccaccgttgagatagatccacagatgaatggcttatgcgtcagtttgctactaattctattctacattttcatgcacaattcgatcactttgatgctctacagttaaatctagcaagtggcatacaatttatgatggaatgttt

SEQ ID NO: 66792 - DNA, 331 bp, Oryza sativa
  unsure (1)..(331): unsure at all n locations
ttatgctgccgctcgagtcgtcacgcatggtggtggctnnaggaacaacataaaaatggggggagcgagtggcgagagcccgataaatgtggggaacaaaggtggtgctgtctatattaacgcgacaatgggcagtgcccgagggtcacaataaacgggtcgggaggcaaaacagaggaagcaggcgcacaaattaaataatgctagcaacatccaacaaccaaaattcatgtcagggaagaacaacttgaaaagcatttgttctcttcctttatcattggcgatcgagcggcccatccttcatataatagtgcaaacagcaaattggtat

SEQ ID NO: 66793 - DNA, 426 bp, Oryza sativa
  unsure (1)..(426): unsure at all n locations
tcttaagcaccgcagctgcaactttaaagngctcgatttgctcttgttattgtgtntatgctttaacaaagtagaattcatccagggctaccacaagacaatgatctttcaatgtccaatgcagaaagtgaaaatgttcccatccaatgtcattcaattaccatatggtcattgatttctgtacatgaattatttactgcactccttaagttctgccctttcttgcttcttgatattattntgtcacatcattgtctcgctctatagatctctttttgcagatgatcttggaaaaattattgccgtcttcagtgcaacattcatatctacaagttcatcagatttcgggatgagatgaataacgccagtgtatcaactacacctttatttaatagcttgatgtttcacgtgtgagacaaacttgga

SEQ ID NO: 66794 - DNA, 353 bp, Oryza sativa
  unsure (1)..(353): unsure at all n locations
caaaacaatgaattgactgggggaagaactgatattgaagcaggcattttgcaagagaatgtgcgccatgttgattgggataaattcttgagcgaacaagactattgctcctaatgagcttgagctatactataaagaagatatactgccttcgagtgatgaatttgatatcttaacttggtggaaggcaaactcactaaaatatcctgtactctcacgcatagcacatgatgtgtttgccattccagcatcaacggttccatctgataaatgcttttaacacaggagggagggtaatcaatgactacagaagtagattgaaacatgagatngttgaggctctcatttgtcta

SEQ ID NO: 66795 - DNA, 335 bp, Oryza sativa
  unsure (1)..(335): unsure at all n locations
gccgggtacgacactcgacgctcattctcatcaccatgatggaggagttggagacgaccgggctgcgcatgctccggagaacgatgggcgtcccggtctatcccatcggtcctctagtgcgtcgccggacggagcactccgatcacaccggtgaccataacgacgattacgtcaagaggtggctcgatacccaagaagagaggtcagtgctgtacatctcattcggggcttataactcgctactgcttgaccagatggttgacctcgccgtggcactggagctcaccggccggccgttcatttgggctatcttgtcgccgttcgggtntgacatc

SEQ ID NO: 66796 - DNA, 382 bp, Oryza sativa
  unsure (1)..(382): unsure at all n locations
tggatggctggacaaggccctggacctcatcgcctggatgccatggtgtggaacaagggccatgagggtgtgccctgaacgaagagaggaaaggaacaaaggcctggatgccatggactattntctttcttgatctccaattaacatgtgtcataacaaaccaaaccagtgagttgaaaataacaaggactaatagaaaatagatcatatgctattctacttctcctggggaagtcttgattcttatctgaacttggcttggcatctcgatactctgtgctggatgcggtggccgcactggacatcgaggccagcaaggccgccttgcgcttatgccgatggtacagtcctaccgtatcattctccaacaatgaccgtgctt

SEQ ID NO: 66797 - DNA, 357 bp, Oryza sativa
agcttatctaccggagataaattttataatttaaatggtaatccgagaaaagaatttggtgttattttcaccgtggtccatttcttagcatttattttaagccgctaataatatactctctttgtttcacattgtaataagttaatctaagtttgtcatacctcagattaaaaattaaactcaaccaatttaacagaaaattacaaaaacatttctgacataaaataaatatactataaaatatattgattgatggattcaataaaaatactctacgcgtatggatgctaatatatattctctataaacaccccaaagtaacttataatatgaaacgaacagaacagagtagatgtg

SEQ ID NO: 66798 - DNA, 231 bp, Oryza sativa
  unsure (1)..(231): unsure at all n locations
cccaacacgganacaacgccaagcacaaaccgcgccctgaaagtgacaactgattgcaattgatggcaagagttcggccaagatataaccaccatgtcaaaaggcgagcctcattgcacacgacacttggagtagacttggagaccacacccggggagctcgctgccctgagcttggcggagatctcccaaccagctaaacagggtagcgggcccaccgagcaatgacatt

SEQ ID NO: 66799 - DNA, 427 bp, Oryza sativa
  unsure (1)..(427): unsure at all n locations
ggacctctaaancgaccggcagcatgcaagctcaacagaaagagagacgcgaattattataagtagggggtnaaccgccgaaaccagcagcataaccaaggggtttaacaatctaacggcacgaggggcagaacggggaaccccaaagatacaaggcgcgccgcagtggcgggcaatggcagctgcagctgttgaagcagctgcacaacgtagaaatcacaccaagcacgtaaaaaaatgggcgaataagtggcgcacctacacccggtcaccactactaccccccgcaacggaccaccataaccaacaccttctctacccctccccgagctcacacaccaacgcggagaagaaaacagatgcgaaaaacaggagagagtggccacacacacacagntcgacaccataccacaccgcttctgaacat

SEQ ID NO: 66800 - DNA, 398 bp, Oryza sativa
ttatgccactatatacacacccgagtgtgtgtgttttctacacttgtatttttatgccgcagattgtgcaaattatgagattagggcaaaagctggagtatgctgtatatgccactgcaatgtgctactattctaactcttgagcaataaggttcgaaacagaaaaaaaatattgtgcttgtcctagtgctttttgtccatttcttcaacaaactggatacaaaattgtccacaggtacccagtgttcgtcatgaaatgaaatgaaaagtttgatgtcaattgccatacgctggtaacttgttcatacttcggtacttacttcctatatattccactggtatgacatagttacatatgagcttgtacagcgatgtgaatattgaaatttgatatacat

SEQ ID NO: 66801 - DNA, 395 bp, Oryza sativa
  unsure (1)..(395): unsure at all n locations
agcntccatataagcgagactaagcattatatgaccgcgnattttaccctctgcttctggctgtctcgcaataccttctacagcttgtcctgcagcactaccttgaccaactccaggcccaatagaagcaagacctacagccaatccagcagcaataactgaagcagcagcaattagtggattcatgatgagttcctcgtgtcaaaaaaaagaaatggttaaggatacaatcaaccaagaaattcatatttcttagctctattggacagaagtaactaaaaagtacaaatcgaaacgataatctgaattctccgaactgcttcgagatctcctttatagtatctaagaattagagagtatgggactcaatattcatttatctgtccttccaacca

SEQ ID NO: 66802 - DNA, 417 bp, Oryza sativa
  unsure (1)..(417): unsure at all n locations
acaattatggactagttgtggcactggcgcttntattttctatacccttttgttaatcctaaagaggaaaacgagtcctttagattagatactttcttctttttttagtaaattggtatttgcttctgcaattccaattatatcaatactttactcctaatttattactcctagagttttctatttatggggacagacaataccccaccccacgaatagctgatttgaggatgatcaatttagaggatatgttcgccgtcttgcttcccgccctttgtttagggcagtggaaagtatttttccttttattttagggaatttgggaacatttcaacaaaggaggtctttcacaggtcanacgagatctaagacttaatctaaaagaaattactaaattgaatctatttctattaaaaa

SEQ ID NO: 66803 - DNA, 110 bp, Oryza sativa
  unsure (1)..(110): unsure at all n locations
agctntactgctgaatgagataaaatgacttgttctattgttaggacngnattacaagtttcagtgtgtgaacagaatatatgatgacaataacataatcatatggaccc

SEQ ID NO: 66804 - DNA, 388 bp, Oryza sativa
catgaaacaccagaggacccaagcccaagggaagatttgattcgtatcactattagatattataacttttgttagcagctcctttatctgctagtttcgtcggcccatgggccgaccccttagcaaggcccgccatgagctgagggtgtgtttagttacacgctaaaattagaagtttaattgaaattggaacgatgtgacgaaaaagttgaaagtttgtgtgtgtagaaaagttcgatgtgacgtttttgggggttaaagtttgaaactaaaccgggcctgagtatgtttgagagcttgccatgctaagcctccgaaaacgtaagccttggggcagcataagtgatgacccataagaatggggcataagtagcttgcacacatgccg

SEQ ID NO: 66805 - DNA, 417 bp, Oryza sativa
  unsure (1)..(417): unsure at all n locations
agcttcccanactggtaaacgatatcttttttntataaaaaatacgagagttgctttaaaaaatcatattaatctattttgttaaaaaaatagctaatactaaattaatcacgtgctaattaaccattttgttntgtgtatatggagggagagttcccaactctgcctaccaaacacagnctaaaggtgttctgagctgagaggatatgtagcagtggatatgtcaaggaaaaaagttgaaaatgaaatattagacctaatcgggttttacatatggtatatacctacatacgagtatatgagtatgttacttcatagataaatatataagctatgagcctaattaattaataaattaataaattaataacttatcaattaatacattattaactaataaattaatatattaattaa

SEQ ID NO: 66806 - DNA, 340 bp, Oryza sativa
  unsure (1)..(340): unsure at all n locations
accgaccggcaaacagttgcgccaatgggggcgacatcaaaagagaacatgtagagcaagacattgtgattccattcctctacttttcccagatagtggtggctgaacccgcgcaggcggtggctgcaagtggcagcgagttcgtgacaccatgcatgcagcgttgcgacactggatggctcgatctattgcatgcatgtagagaacatcacatgcaagaaaaacatacattaaggactttatcctactgctaagaagccacatttcagcttgaggtgaanggctaaaacctcaccaaaacanggaaagcaagaaaccgagctctgtcagtcaagtaaaa

SEQ ID NO: 66807 - DNA, 425 bp, Oryza sativa
  unsure (1)..(425): unsure at all n locations
agcttgactatnttttctgtcaacatgttcatccttatgatgcgactggaaacacaacctacaaattnggtatccgtaatgagaaactacaatggttcttagactctatcaagtcatactcaaatgatatcacactggtgggcgttcattgtcatctgggatctaccattacaaaggtaaatgaattatgatgtactattctttggttataattgctggaaactttgagttgtaataagtaggtatttgttatggtgagcttgttcgtggtggtgttttgtaccttagcatcttgtgctcaacagacattttgtcatacagtacaagcaaactcgccttttgttgttgccacaaaaaaatgtaaattctaacaaaacctgacgttagtaagggtttcttcactaaatntccatgttttgcaacat

SEQ ID NO: 66808 - DNA, 343 bp, Oryza sativa
  unsure (1)..(343): unsure at all n locations
aacgctcggggatgacgtacatcgntaggacaatgcgcgtcaccgattttgctccgccctctccatatgtgcactgaggacacgctgcacaatgaggttctcataatgctctgcatcattaaccctaatatgctcttctggcggctcctcattatttgcatggtcagctgcaagcaaagcaagcgtatcctcatcgaaatcactagaagacaaatattcaccatcattcttgactaccaaaacatgcttgctagggtagacacgctgcatgtgctcaaagcccctgcaatggtgacactgaacatctcttgtttacccgtggatgcaaatgatgaagcactcg

SEQ ID NO: 66809 - DNA, 173 bp, Oryza sativa
aaaccacaagtgggactacgtttctcagtttacgaggactactcaaacctttatatccgcgctccctacgtgaataccatcttctaccgcccggtcagctcgtcgtggacacaagtgggagactgacacgaacatggatcggatcacgacttcgtacctggtagctactactt

SEQ ID NO: 66810 - DNA, 446 bp, Oryza sativa
  unsure (1)..(446): unsure at all n locations
actcaagcctggagccatatctgccaagttcatatcagctccacccggataatgatgttctgacaatgcccgtccacggggagccccaattgatagcctatacctgggaagtgtaagcttcgtcgggcgacttggaccatgagtcattttccaactatgtcttttttatgccattgtatgaacgtcttgcgcgcaatcgccaaagtcatgatttcatcatttggtggcacgggcatcggatagcctgaccaggtgtcctttaatgtatcgatggacaccttggcatacccagctagcatgtctgcgccgtggaccttgtctgtaaccgatggcttaatagccatgccctcatcgacttcaagagcgaaagntgggtggactctcgctagtaggacacactgtgctgcgcactgcataaggtgaaagttngaatttaatattggaat

SEQ ID NO: 66811 - DNA, 381 bp, Oryza sativa
attaccccggaaacacaaccatgatcgttgactttcattctgttcatgccctttgaattataacaaatttatcatacaaatcttgcaatccaaggagaagtacacgaatccaaggacgatgatacgagagcatgggcacatcgtgcctcgaattatgccatgattgaatctgtgaattgcgatcaagagccggccttcaagatccaacgtatgaaacaattacaaaatatactttgtttgaaatcttgatttaaaagaacagtacaatctttgtgtggaacataacgcacacctggatatggtccaatatcacatcagaaagagcaccatgaccgagcgtcaagatgttcccattcacaggatgccttttaatgccgatca

SEQ ID NO: 66812 - DNA, 424 bp, Oryza sativa
tattgggcattctccatgctctttctgctttaacagacgtgctttattgcctaatagacacatggtttcaccacacccggaaatatatggcatatgtggtgttaaatccgagtaaataaactcataaaggatttaccaaccgcctataaatatgaccacaatatataattagcctaagccataatattggtcaataaaaatgcacacttacgtggcgaatagcaatgatattgtatccaatcaattgcttaataacccaaacagcaccttgacttatatataaaatagtcagcgggacagctatataaagctttactgtttgacaccttttaagatgcattgtaccaactcctataaagttaagtaactgcggtataaaaggattttaaggtatcgggcacttgatcacgccgcacttggcata

SEQ ID NO: 66813 - DNA, 426 bp, Oryza sativa
ctgtaactgaccttgcactctgcagttatgatttttctttacatattagaagtatttactcacacttgttcataatcatgaacccatttccgaaatattccaatattgtcttcgcgtattatgaacgtgaacatacagattgtgaagatatctcatatcacttttaatacgcgggatagtgcaaacaccgatcgtctattgaaatgtggacatgatactgcattccatgcggccaataaggaaaaaatataaagcgggtagcgggctccgatgatggtgtcgttccttcaaaatgtctcctgaatcctgactatatatagctattaccttcttcaatacatcttcctgtatattgtgttctcaatatagtgttcttgcaggctgctatatggatatagattatttacgtccctcatcttatcactg

SEQ ID NO: 66814 - DNA, 222 bp, Oryza sativa
  unsure (1)..(222): unsure at all n locations
acgaactacaggaattccttcacaacaagatggacacatgctagccatcaaactgccgtggttagcaactctaggcattaacccatgcatgttgcatgggctatttatgtgatcattatctgcatattatataatagtanatacaaatctggtgcaaacagtttgttgtgaacgtcgtgcagcacacatcagatcagagatagtcatgttcaaagaaaaaaa

SEQ ID NO: 66815 - DNA, 308 bp, Oryza sativa
gcttgcttctcgtcactggttatggagattatcatgctactcaaaatctaacacaagaacaaatcccaacaccgatctgctactcacctcccaagcatcgtcgctgtcatccttggaaaccaagcacgtccccatcatgctattggaggtgaaagagtgccggaagggagcaacgtcttcattggcggcagtggagcgcggcgagggatcggaagaggggtcgcccttgtcgaatatggatgcgcgcgaccagcgacgggaggaagggggcgacaacatcgtcatcgttacgggtggattacggtgag

SEQ ID NO: 66816 - DNA, 450 bp, Oryza sativa
  unsure (1)..(450): unsure at all n locations
tactaagctttgattatattcgaaatatcatccctgcttattatcttcgtctcgactctcaagatgtggacatgtcgaactcgctcgccatcgtcaaaaccgctgaaccaataacaacatgatctgtagctgtatatatggacggcaaaggttagaggtactaaaaccctggaattaaccttcgacgaattgtggatttgtgttgttgaatgcatctaagcgacggcttatggcaaatactggagtcaacattcgatgaattgtatacttgtgcggtatctangcggtagcggaaggtgtcgcatagaaagaaataattaattttaatggaaagaggaagccatgaacatagattaacgatcactatgcatgcatctttgtatggtcgagagacgtcccgttgagtatagatagaagctacggcagaatgatcctcatgattggctgatt

SEQ ID NO: 66817 - DNA, 408 bp, Oryza sativa
  unsure (1)..(408): unsure at all n locations
tcatatagcacgatttatttaaatctatagntagtctaaccaatagatactctgtaaataaattaactcatgcctaaacattttgaactaatagatcctatataacaaatagttcttatgcataatcaaaagtcatgcaacgcccgactacgtggcttggtttggaggaatatttttgcattctcacgaaaaggcagaaattccaaaagattatagacacccactctaacttctttntctttcataacttatgtcatgggatggaataccaacgtctaatcctttattttctattggtatgttccgatttctgaacatccaatcctaagattcctctggtatctaatccttcatttttttcacgtgtataccagatctaatacctccctcagatatcggatgtgatac

SEQ ID NO: 66818 - DNA, 426 bp, Oryza sativa
tactctgctctgagtctcgacctacttgtaccttttatttacttttgatcacgatcacttgtcgagttgaccaccccactatttaaatctggcttcaccactgtacacgaacagtgtattttcatgcttacgcatgatttagttcccaactcttctctttaaacttttaacttttgtatcacatcaaaacttttctacacacaaacttccaatttgtacgtcaaatcgttccaatctcaatcaaactttcaatatcgatgtgaaggtaacacacactcatttcctttaagaagatcatctaacggcttcgatccttgatactatataacattgcttcaaatcatttgtgcagaactgctcatctaccacttttcgatgaggccgtcaaacaactcctgtctatataaaaaagagcatctgatggat

SEQ ID NO: 66819 - DNA, 398 bp, Oryza sativa
  unsure (1)..(398): unsure at all n locations
gttgtttatctaggaatgacttgtttttattataggcatttccctggcgtgttatatgcctgttntcatgagtaatagtcatggcctacgctattcgacttatttattaccataatcctcataatacttgatgggtaatccttagaggttttattcggatgcctgtcaagtgtgttcattcgcgaaccttatagagtgtaaaccactcggatttcttttattatggctaaaaagcacgcggctagcatgcctatttaagcgccgcgtacgctnttgtcatataatgcacaattgtgttattattatgtctctcaactatatgtgtagtttgttaactaatcacataggtgggggctacacctaattaggtgcatctattcgatgcaccatattcttca

SEQ ID NO: 66820 - DNA, 350 bp, Oryza sativa
gaagcaattcaagaacatgatgatgaagaagttctatcagaaggcgcttgatgaagcatttgcggctgttcaagaatcaagcgatgttgagtttgaaagtgatgaagatgatgacaaggggaacaaaggcaagaatgatgtttgtctcatggctagaagcgtggatgaagattctgactgtgataatgaagtaactcatactcctagtgttgaatatcttcaagaagtgatcgctagacttggttataaaatttctagatttgagaaaaaagattaatcaacatggagctactattgaatctcttaatgctgaaaatcctagaataaaatctcttgtctctgataatgat

SEQ ID NO: 66821 - DNA, 399 bp, Oryza sativa
tgcattctgtcccagataaccattcatcgtggatcctttgaagattgccattctccgacaatgtcaagattgctgttgacaagtcctcagcaagaggggagtctcttgggaaagcctgaaacagaataaactatattcagaagatatcctggaaagctggaacgaaatctctaatatacaattatagtccaagtcacttacaaatccccacccacttttcgtgaaaacctgtccaaccgtcttgaatttgcagtattttgacaagaagatctccacgtatggaagttcatcaattattgcatcaacaccaccatttcctgatcctaactctatcgctcttgcataatctgacgggctgtttattggtaccaatctggtctcggcaatattgagctcctg

SEQ ID NO: 66822 - DNA, 189 bp, Oryza sativa
tgttgttcgtaagatgcgtctgactttttctggtaactactaacgaccccgctttcaggctgcgtgagaaagacacaaacacactataattatttttgttcttcggcttttttctgcacctaggtggattgcttgcaaacgcgttcccaacaatttgtgtttgactcggtgacaccgaatcgtggcgta

SEQ ID NO: 66823 - DNA, 391 bp, Oryza sativa
  unsure (1)..(391): unsure at all n locations
tgtcatttctaacccccgcccgagtagactattcttgctccattgtgcagtatgaagaggcgattgtctcgtctattcaaagggtccaattctccatcaagtcatcatggcgagtctagtactcgttcatcagctgatgtctcaatggaagacgccgacgctccgtgacaactcctaaacgacgctgacctcgaccttgtcagttatcgggagagacaagcgtactacatgctgagcgaccaggagtatgctcacacgagataatactcaccggagctgctgaaaaagataggtatggatgttgaatttcactctatttggaaagctgttggttggcagagaattgctgtggtagatgagcctggttctcgtttgcttactntacaatttt

SEQ ID NO: 66824 - DNA, 365 bp, Oryza sativa
attataacgaatctagtccgttccaaaactgtctcaatgtttgtgggcatcatagaattatccacattaactatattcctcggttaattgcatcatggtccgcagctcttggtcttattaaagcgagaatactagattgactctcgcacacatgctaataaagtatggtcaataaaatcaggaccgggacaacatatgctatatcatcgacaggctttttacaatagactatctggctatgaatacaatgaattcatactaataaatgattacctgaatatgcataaggccacttctgtggatttcatatgtgaatgctccaactaattcatgatatgttatgataagtgtagaaatagatcaat

SEQ ID NO: 66825 - DNA, 393 bp, Oryza sativa
cttctttccgttgtcagtcggcggctatcatcataataatggagctgtgattgtttatcaattcagtttgcttacttgagttatcattgacttgcttggtttttctactcaggtagcgaagactgacagcttttcaatagcttctgtgggttttaagctcaacaaagcttaacaaaaacttttaataaatcaaaaacttggcaagaatcatcaagcacagcataaatacaccagtattgtacaaattgagcctccatgcattacattcatgatcagtcagaatcagtcatttcatcatcagagtcattgttactcggttggaagtctgttgtgcggaattgctctacgacatcactcgcaattttgtcagccgcattttgtgcactgctgata

SEQ ID NO: 66826 - DNA, 337 bp, Oryza sativa
ctccattatacatcatcggtgggtgcggcaagggaccccatttattccatgttgttcatccttgcaatggacgctctcttggccctctttgccctcgctgagagtgaagtgatcactacggaccttaagtgttcctcaccggatctccttgtatgccgatgatgtggtcgctggggaacttgctgcagcacaatggatccttgctctctctggagaggcctctggtcttcataccaactttaccaaaatctccgtgatccctatcagctgctcggaggaagaggtcacattactcggttactccctcccctgcccagttgatgagttcccatgcaaa

SEQ ID NO: 66827 - DNA, 349 bp, Oryza sativa
ccgggatatgagacctacatgtaacaaaaggaccgcggagaccgagtcacagagacggccacgggctacggaagcggatcccggtgtaaccgaggcgagtggccgacagacggactgcactagacaccacacgggttacacacgtggaaaccacgtggataccgagcgggcacactagcacggtcaccacacgcacaagcgaacgactaccgacaccggtacacgggtaccggtgtcgacaaccgcacaacggctcggacgacaccgaaaggatgaggacggcgcggtgagaggagatagatccttaccaccacgcgacgaggcgtggggacgacaacgactaacgggc

SEQ ID NO: 66828 - DNA, 325 bp, Oryza sativa
  unsure (1)..(325): unsure at all n locations
ttcgttacccagcatggatagcggatgatgtgccaatccagataccggatttcttcatcccggttgacttcatggtgctggacatggacatgggaaaagaaatgcctgctgcatcacctccggagatgggtagataatctgcaactgaactggctataagtacagtcttggacgtcggacttttaatgacgcgaccttcgtcaataggtaaattggtatgaatccgcatatttgctttcaacaatttgaaattttgcatatccatgtttgaatntcaaaggtgcatgtagtcattcttgaatttgaggaaattcttctaatgaat

SEQ ID NO: 66829 - DNA, 389 bp, Oryza sativa
ttatatatatatatatatagggatgccatcactagaagggataccatcatctcaatcgggcggtaaaccccatctcaatcgggcacggcattcgtcacaagctagaagtcacagatgtgaagagttatctcaatcggacaaacggccgtcacggatgaatctatctcaatcgagccctaattaaagcccgtcaccgagagctttgacccaaacgaccagtcaaactatagcccgtcacggatgacctatcttaatcgggccacaactagcgcccgtcacagataacccttatctgtgacgggcattaactatagccatagttaatgtccgtcacagatgagtataatccaaaaataaataaattttattctttggctagccctcactca

SEQ ID NO: 66830 - DNA, 333 bp, Oryza sativa
  unsure (1)..(333): unsure at all n locations
cttatagtatatgtcacctgtgggtgtattctactgtacctttgtaagttcattacacgagctgtgcactttgaccaaattgagaacccttggattggattggcgcatatgtgatttccacaatgaataacttacatacgcggataattttgtttcatcacttggaaaactctgtagatctaacctacagtatntgactctcatcatgccatggtcccttgatattttattggaatcttggtacccacctactcatttccttgagatgttaagaatcacaggttggcatctcagtatgattccagtgtggatggactcactggccgacctcac

SEQ ID NO: 66831 - DNA, 346 bp, Oryza sativa
aataacttttcaaactgggtgaaacccttttaattttttttgcacccggaaggattacgacttttcatcttttacttatatggcctgcggtgttaaatcacacgctctcattgtggcctcatgcggcataaatgcatcgctcttgcccgttatcctcccctatttacaataataatcctccgctaatttgacagtgctgataaaataataaatccgaagatccaactcatcattttatatcagtacaccagttccttacgatacaatgggggacgtgcaccattaaaagacagcttgtgatgactgggcactcattcctcacactgcgcaaatttcgagtttcact

SEQ ID NO: 66832 - DNA, 433 bp, Oryza sativa
  unsure (1)..(433): unsure at all n locations
catgcaagcttgtttatattttggagaagaatgancttgatcttatatgccgcgctcatcaagtaagcactaattattttgatctttattttggctgtggagatctatataacaatttcaacatgaatgtctttatgttgttgatgatggctacgagttctttgcgcaaaggagattaatgacaatcttttcagctccaaactattgtggggaatttgataatgcgggtgctctgttgagcatagatgaaagtttaatgtgttcttttcaaatcttgaagccaaatgatacaggggctccacattcaaagaaaccaacttcaaacaaggtaaaatatcaagtttaaaatacttcatcttttcataagctagcatagtggacaagctgaagtatttatttatcctcttgaaatgtttattggacagtacatatc

SEQ ID NO: 66833 - DNA, 406 bp, Oryza sativa
ttgtcctcaccatgtgcatctgaagatcctggacctgctcatggtttgaaccaacatatcctttgtgagaatatactcttatatgccactgaaagttcaccggtttccctatttgccatcgttcattatctattcccgtatatgccatcaaacgaaattttcattcacctatgtgccatacatgtcacccaagaatgacgtatatagcgttatttctctttgaaaaatgacaaaattgaccctggactccctttcatgctatgtaaagaacaaatcatgatgtgttacagttaaatatatgactataactttagcaatcattttctatgaaacacacaacctatgacggatacgaaagtgtatttctcttccatttttatagtttatttatagattatagaaagaa

SEQ ID NO: 66834 - DNA, 465 bp, Oryza sativa
  unsure (1)..(465): unsure at all n locations
acactattaatactcagcttatattttactgtgccgaagccntgtattgttccctttttataatcaatntacgccatgtttaatttcatttatggttatgttctataaacagaccttatgggaatcccatggcagaagaggatatatgtctagtagacaatgccaccactatcacaatcttaatggaaactatgtattttcacaccttaactaacaaaactaaaaatattatgaccattgccggaagcaatgctcatatattatgcaccggaagtgctactctagttctccctatgggtacccatatctttgtaaaagatgctctattggatcctgattcaaagcgtaccctcttaagacttaaagatatccgtgcaaacggtttccatatataaaccgagattgagcaagatgctgaatatctgctcataagaaaaatagatggatatcaaaagcaagtggtgg

SEQ ID NO: 66835 - DNA, 75 bp, Oryza sativa
ctacttaaaccgatatgcccttaagcacggccatacataacttacaaatcacacgtggaaagggtgggcgattat

SEQ ID NO: 66836 - DNA, 383 bp, Oryza sativa
cagaaggatcttatatgaatcgtatgatgaaataccacatgaatggatatatatgaaaggaatccaaatctgccgaatcgctcatgttatgatcctctacatactatgtctccgcgttccgtcatctggcttatgttcttcatgtagcattcagatcgaatgactctatgaaattacgtcgatacttctacatattatgggtaacgtatgagacatccctattttcccacggtggtcttaattaccactgattatctttcaattcgcctctgaccatcaaattaaatgtgaataacccgtcctcctctctttgaaacaagggtgcgcttcggttctgtgcgtgcttcatacaatagtgtcttctccatattaccatatctcta

SEQ ID NO: 66837 - DNA, 384 bp, Oryza sativa
  unsure (1)..(384): unsure at all n locations
tgagagcactctagtatattccactctattttttgtgtggagctgaaatgtttggctcagtttcaacttcnggtttcaacctcagaagagatggacggggagccgaagttctgtcaaacacattctatatacatattgcacatatatatactactgtcaagtagttcctccaaccatatctacggcaccaatttttgcggtggttgccatatcgatcatgtacatggaatgaccaaaacaaattctttagacgacgctgcatgttagctagctcgttcagtcgttctagacttgaagtctccagttcaaacagactaccaactagtgttgcatggctttcacttatctagaanaagatcgatccggccgtnccaatccaatcct

SEQ ID NO: 66838 - DNA, 364 bp, Oryza sativa
attcttcatgagtgctgtcacggcaaaagagatgtctttgacccagtaggtgccctatcggcaagtgacgaattcaatgatcttctgtagtggaacactgctatgctataatgtacctatatgacaatatttgaagtgacaatgtataaaaatattggaatatatatattttggcaacacatttgagctatgcaatatatgtatatttctcatcaccaaatgcgtgataatcttccaatatatgtaccatataaattacctgcaagaatttctatttaatagattaaaagtaatctacggccaaattgtaattaaatttcaatattttctaactatcttcgcatgcggaagtttttattatttt

SEQ ID NO: 66839 - DNA, 311 bp, Oryza sativa
  unsure (1)..(311): unsure at all n locations
gtactctcataactgctgtctcttgcatataancactccttttctatcctctntttttacacacttatcatcgtgcattatctccagaggataaggtagagagaaatttttgctatttttaaccttttaaatctttatttttcaaatataatatatatttatttaaaataaatctagagctttaaccacaccacctccagccactcgtacttaccaatgttgttttcacattattccaactggtgtgcaggggcggcactagaacaaaatgaagagaataagagatgtaccactcgcttaatctactctac

SEQ ID NO: 66840 - DNA, 396 bp, Oryza sativa
  unsure (1)..(396): unsure at all n locations
tcattattgtcttcacccataactctaggtgtnttaaagaaatatcccataactattgtttggctttctattggtcgttcaacctttgtctttcatcatcttcttcttgctatactactcgctggagtccagattacattcgtcaatgaaaggatggagctaccaactttctcgccggttcactatcagcaacggcactctcaacagatgaagaatggcgttataaatggctctcaccaaccaacttttaatattagataagaatagaatttggtatttacatgttattcaaataattatgaaaaaaatataagacagaattaagaagatacatatatatatgtgatatataacatttcacacatatataagttataataatttaacttatacaag

SEQ ID NO: 66841 - DNA, 340 bp, Oryza sativa
atttgaaatttaaagccaatgtggtacaacaagctataagttactgcccatttccagagtattaacaaacaatgagacggtctgattggaaggcagaaacttacttccatgcatcaatagagatcatgtggctagcagattagcctctgtctcacgcaattataagcatcagtaaaagtagaatcttacatagaggtgctgcaaacatgcaattacagctattcatgtaacgccgaaccacatcatgagcatctatattcttgagtatctcctccttgtcgaccatatcatctaccatgttttgttgcccacatctattgatttaaatatgggacaccct

SEQ ID NO: 66842 - DNA, 352 bp, Oryza sativa
tgttggtatttcttaacgacactactataaatatatttcccagcgatggcgcataaacacttctggtatattacggttacaaagtttatccgcaagtgcacggttatatcattgaagcatttcacccgatagtattccaaggttatcataattgttttatcccgtgtgaagattataatttagacaacccgtcttataatttctatattactcgtgataaccacagtctacgcacgggttaatataattcaaagggtagagtgacactaagtagaagcatttatactctcattcataataatctaaccaagtgaaataaaaatagaaaaacctattcctatactttattttc

SEQ ID NO: 66843 - DNA, 435 bp, Oryza sativa
actttgtagcctaaacccaagaattattattaactttcaagcctctctgattaagtagaaaaaaccaaacaaggcaatgatagaccaagtaagcaaattaaattgataaaaaatcacactccattattatgatgatagcccccgactgacaacttcaagaagagaacttgatgttgacagtcaagatagggaagtacaatgataagcttaagcgtagaaacgacgaagatgttcaatgttccaagagttgtcaacgagagtaccgtcttcgcgcttgagtcgataggaacctggccgggtgacttcagagatgataaatggcccttcccataaaggagataacttgtgccgatctcgtgtagtttgaattttcctcaaaaccaggtcgccgactataaaggcacgggatcgaacattgcgattatgataacgtcg

SEQ ID NO: 66844 - DNA, 332 bp, Oryza sativa
catattttgccaagcagtcagtatatcacttggatcatattattcggggattcacaccgcatatgctatatattggtatcaagtcacttggttgactataattattaaaaaccactcggttaattgtgtaatttattccttgactatatgtttaggttgctcagctaatcacatagttgggggctacacctattatgtgcatctattcgatgcacctgactttatttttcatgcctgcacagtcttcagatgttggtaaagtactcgggagaccatggcgaagatgattgaagcactcggctttggagtatctagttcgagaagaaggtatc

SEQ ID NO: 66845 - DNA, 385 bp, Oryza sativa
tatcataagcacctgcctagaattactctaacagctcaatgaatgtaacagcctacaactaagttggcatttaacaccaaatatggcagcatataactggtactgcaacaaattcaagaacacacacctggttaggacctcgttcaactcatctttaagaagatctacaaatagatctgtcacgacagatttttcaagattgctatagccatccttgacagaaatcaaaaagtatgtgttggcacgacgtacattatatgtcatgtacatcttgatccacagctttattaatggttcattcacaatgcatccacgattatcatcactcacgggttttggcatattagcacttctcataatataagtccctgcaataaattcattc

SEQ ID NO: 66846 - DNA, 376 bp, Oryza sativa
cgggttttagttcagatcatcagaggcaggatatcattgtcgaaaatgagaacgtatctatatgcacccaccatagtgacataaactttggacctaaggaccagcctagttaccttttgaagagtcatcattaataagaaaaatactatgataacaatatgttaaaataatgtgtacagtatctagacgacaatggcggatgtatgaagaaatacaggagggtctgaagaaactagacaaggttgtagcccccttcctatcacctatagcacaaaaattaagggggcttcgtggggctccatggcctcatactagtagtggggctcgagaccccgccccatgctacatcagcccctctagatgaactactttacat

SEQ ID NO: 66847 - DNA, 368 bp, Oryza sativa
ttcatcgaatgcttcaaacacaacgttcttcattcccgcatcgatgtttcatggagctgttactgcttgctggttgtagtatttggaaacaaatgaaatgggctaatttccaaggaatacagacctctggtggaatatgggtgaagattttgaagtctgatttgagcctacatataatagactcaaggaaagtaacagacctttagtacaatcatggattgatcagttgtaatcggcttaaacctattatttttatcttgattcttcttttgtaaatattatatgcttatataatatataccgtgggggcctcccccactgtcttatgatcaataatattagacacatgcgactgcataaatatatga

SEQ ID NO: 66848 - DNA, 194 bp, Oryza sativa
tggggtcaaatatccccatattttgcgaatatagtaaatatgctcacctctgcaaagatcgatcgagatactatataggctgccccccgatgttaaaaatcatcaatgaaagattcttaattgaccatgtgtttgataaattattgcagcacatcgattatttatcgcattatacacaggactttgaggtttag

SEQ ID NO: 66849 - DNA, 306 bp, Oryza sativa
attggcttatattcaatattttaaagaggataaatacaacttcactccaatcatttcccaggtacttgggtatctgaagaatactgtcatatttagggtagggcagatagtttctaatagctggaaagcttcaaaatgtgttatgacatcagaaacaatcaagcataagcctcttattatctctttacccttaaagactaatgcttgcaatgcatcctccatcgttatctatctgccatttggaacacacactatagcttatcaagctaagcgtttttgccaccacttcattcaatgagtaatttt

SEQ ID NO: 66850 - DNA, 164 bp, Oryza sativa
gtaggcaactgggctgatccttcacgctgtaatcgaaaagctcagcactctactcaccattaaaaaactattcccctcctggggaaaaatatgctctatatgataatcgaaaacctttaagaaaccagcggagcgcagcatcatatggctaactaaacctagaa

SEQ ID NO: 66851 - DNA, 252 bp, Oryza sativa
atgatgacgatgcaaaaaacgatctgaatatgaatagtgatcatcctcagtattacctcactgaggacatatcctttcaagataaaagctccttgtacgatctacaggagcacctaccgacaatataatgctcaggtctctgacattacagagtcaggcctgtccatcatacacatactcatctaaacattcattgggcctgtatcaaattaatctaaaccattccattacacaaatatggcgagtttggca

SEQ ID NO: 66852 - DNA, 291 bp, Oryza sativa
ggaaccaagtttttagcttaaatgtttttttgccacaatttagagcctttacaactctctttcaacgaatattagtaagaggaccacattctgtaaccacgactttagtctaatggaagaccaacggtgcctaccttgccgcccagtggaacttttgtaggagttgaaacggaggaatcctgtgacggagattttggccaatgctctgtgagacctgcggccaccagcgggccttcgtgtgatagcgaggctcctgacctaaccttaggtctggaaacttaatttgtgctt

SEQ ID NO: 66853 - DNA, 428 bp, Oryza sativa
  unsure (1)..(428): unsure at all n locations
gtcgatcgtatctcgtcaattccaattcagacttataacataacctgattgtttgattgatnatataatctatctgtgagatatgatgatactctgtctgcattgcaatttatttatcggtggcatgcatggcttggcaggtaccaatagctagcatgcagacaggaagattcgttgacgatgaccacgaataaacgaggctagctttcagattgatttgtccagcataaaaaggaaagcgaaaaggcatccttgattgagtggcaactggactactactgccataagcattctttttgcagctactccgtatcggatatgaacactaagtatctttcttgttaggtttttgcgctgccttgaaatattaacagtagcaagctcccttttgtgtccgtacgtcgaactatcattgagtccttcttgag

SEQ ID NO: 66854 - DNA, 424 bp, Oryza sativa
ctactggctggatatgtatagcccttctttgtacccgggaagagatcttggctgctgctgggctagatgctgttgttttcaataaaattctaatattcaagtatttttacttccctgcattggttatatattattagaaggcggtatctgatcgctgagttcttaaacttcaatatgggcatgaatcataatgagaagaaaatttgtagctgtataaagcataagttcctgacttgttgtaatgcacagtatcacatcccctgtcttttatttaaagatttatattccttattttgtacctctatccaaatttacatgctaatacatttgtttttcaacagcttacgcatcttctctctagctgccattctgtgtgtgtttggaattctaccactgaactactttggcaagatatacatatgtt

SEQ ID NO: 66855 - DNA, 376 bp, Oryza sativa
catgtaacgggataatcctatgtactcgtgtttgtgatttttatgctgtgtacaccctcacaaagtgtatatgccgggtttaatataatccattatctaaataaaatatgtattgttcatcaatatacctcattttgaaatatgtatggcgcccattgactttttttataacatttgaccattcgccatatcaaatatttaatatgaaaaatatattaaagtcacaacagaataaatgatatttatatataatattgttaataagaagaatgatcaaacattatgcgaaaagtcaatggcatcatacattctgaaatggaaagagtaccttcaagccttatcatatttataggatcgatccgcataacgcatgcaa

SEQ ID NO: 66856 - DNA, 306 bp, Oryza sativa
atgaccactggatattctgagtgtatttggaagcatacttcaactatttaagatcaaaagtcgtatctatagttcctcctactttgcaacccatttatagataaaaacgtctcatagtctcagcaaactggaagtttcagattttggacattcatattagctctaaaacaacatgtgaaaggtagataaatgacctcctacaactctgaatatattttgaaataaatatcaactatagaggatcaaaactcatgttgtgatcttcttcaaacttgcaacccattaggagatacgaatatcacacat

SEQ ID NO: 66857 - DNA, 340 bp, Oryza sativa
tactttgtccgtttgagataagattgtctgagggtgtctctagtgtgctcctggttgtgaaaaaaatatcataaaaaaaataataaaaaataaagttgtgcctctcttctcagcactagagagagcatacttttattaatacaaatattaatgaggtgtcggtgtgcacaccacaccatttccccctttgtcaacaccttacaccaccaattcttgatttcaatgctgttagggattgagttttgtggcagcctttgtggttaggctcgcgtctctacttcgacttagctaggaccagcactgtacactttaccctagagcgattattcaattagctttg

SEQ ID NO: 66858 - DNA, 378 bp, Oryza sativa
  unsure (1)..(378): unsure at all n locations
gggagaatcataacggaataatctcccacttgaaaccatcatgatgcttcattattgcagtaaggtggaacaaagatacatgatggccgattggtgaaaaaaggagtccttacattggttctctacaatggataatagggaaacaggaaagattatatcaagtgctgcttcttaaatcagntttattgcttttgattagttttatgttgcaccaacatttaccatacaactatgtgcaacagcatggcatataaataacaagcacagcgattctacaacatttgcacgtgtactatgttatttcagtgaagtataagcaaataagcaataccctgatccatacataagctatctgggatacatcctttctttcttcac

SEQ ID NO: 66859 - DNA, 399 bp, Oryza sativa
  unsure (1)..(399): unsure at all n locations
ccgatgtgtgcatcatctatactgaatactatggttcttccatttttattttctttccccngaacaatttggtgagtgcagctagctcattactgtatgtaagctttatactattaattaattctagtttgtaggttactacaagaaataaaatacttgctttctgttgacctgttaattcgacttccataacatttcttgaacaaaggaaatctttctgtatatatgcttgtaccacaatcataacatctaattagggtttctctccctccatatatttaccaagttggctattctattttcatcatgtcatggaatgcactcctcaactactttctacattgataaagaacattttttcttgttggttgcttgtttaacactcccaaactgcgattc

SEQ ID NO: 66860 - DNA, 311 bp, Oryza sativa
ttaacaatttttgggaataaatcaacaactactgatgccaggagacctcacttttttttctcaaagtattatgaacggcgcccttgcattgcttcattatgtttagaaccaacaacacgatcattatctttggtcttcaaaaatttgacttacaacatattacttgcatatttagtcaaaacgtccggtttaccttattattaacagatcaaacagagtggataagaaagatacaaaacatgcatgtgtcttgtagtggaagctgaaacaatgcaattgcaagcaaacgaaacattatatgatctggtacg

SEQ ID NO: 66861 - DNA, 168 bp, Oryza sativa
  unsure (1)..(168): unsure at all n locations
tctatcagtggccagtatatccattgtcgaaaatgatatctaatctatatgcacccacaatagtgacatatactttggacctaaggaccagcctatttacctttngataagtcatcatatataagaaaaatactatgataacaataagtaaaaataatgtgtacagta

SEQ ID NO: 66862 - DNA, 357 bp, Oryza sativa
  unsure (1)..(357): unsure at all n locations
atccaacgctacaaacacaacggtcttcattcccgcatcgatggttcatggatctgttcctgcttgctgcttggagtatttggaaagaaagaaatgggctaatgttgcaaggcatacagccctctgtttcttattgggtgaaattgtgaagtctgatttgagcctacatttaatagacccaatgaaagttacagaactttattcaattatggattgatcacgtgtaatcggcttagtacttatctttttatcttggttcttcttttgcaaatattttatccttatataatatataccgtgtgggcactccccactgtantttgatcaatataatctgacacatgcgaccgcataaat

SEQ ID NO: 66863 - DNA, 243 bp, Oryza sativa
cttgtttttaggggtgacatgttgtgctgtttttgacatatcttgtcttctctgcgagcaagacaggcttgctggaaggcaatattgatgtccttgaagtctcttgtttgtcactgtaactgcttaaatatctacttttgttaatattttgatcaacaagaactatctttatgacgctgctttttcttctgatttttgagcacatcagtgggacagcgataaatacggtcaacacctttgtgc

SEQ ID NO: 66864 - DNA, 438 bp, Oryza sativa
  unsure (1)..(438): unsure at all n locations
tctgtcaaaatggttggttagagacatgctatccaattgtttcacacgtttatcagttntctatggtatatacttctccttactaaggagtccttatttgtcacttctttttcatgaaacagtagaagagggctctactgaaaacatactactgctatgtataatagatttatgtcaaatagacctaatgatccacagtatccaaaaaatagttacaaggttcatgtgatacatgcacgaatttatgtaaggcataagataaatgagttgcagcatacttttcctaaagatactagtttggtatatccttgacatattggtctacaagtcatttttaccttcccttcttttcatattgaattaagaagcaaacgatgtatgtgaactcatgaaatgatgggtgaatggcacaataaacagtagaagtaccaacttata

SEQ ID NO: 66865 - DNA, 358 bp, Oryza sativa
  unsure (1)..(358): unsure at all n locations
atagagccctctttttaacatttgggaaaaaaatatataaagtgctcaagacctgttcgctgagggcttctcttatattattgattaaggntattctagccatggtgacactttcaagttgctcaatgcactgcttaaggactgtctcctgcccttgaaggtcagaaatcaacaatgatccttgctgaatacctatgaaataaaaaaggagtaaggtgtgcatagattattttgatccacgaatcgaagtgaaaggatgaaagcattatagtgtcaaaagatgatcatctcttcatatccaactctgtaaatataaaaagtcaaggtacaggtttccgattagagtgaaatgcatggt

SEQ ID NO: 66866 - DNA, 400 bp, Oryza sativa
  unsure (1)..(400): unsure at all n locations
taaatatgcatgcgatgctcatgctatgaacaaaacaaatgtgatctgagatacatcataacatgacatctgtatcctgagccactgacgcaattatgcaagcgcctctactgattatgtgcaccgttggatcttgatcgaacgggtggaaatgcataacgggcaaccgcttgatcgagcaattcaatctgacttcttcggtgctataacatagtcgctggtttcgacaatgcaaactgaacatagatcgacaaaagatgacagacatttcaatttacatgtacaaattaacacaaagcatatcatgcaagtttttttttttttactatgcgtgaattgaattattggtcctatttatgcaaataaaatatcttcaatcaatgaanttcactggcaagca

SEQ ID NO: 66867 - DNA, 384 bp, Oryza sativa
  unsure (1)..(384): unsure at all n locations
acaccctcgagaaaatctgctcggatctctccttcaatctctataacccgtgtgatctccccgatgctgtcaagtggtgcaaaaatgctctatataactgccgacgcaaaagatgcatattatagtttggcccttcagcttcggttatcagcgtacttcgtcaacaaagtatactggaacataatccaaccatttgtatttaccttattgagacgcaaaaggtgacatttgaatgtgaaggtgtgatcaacacatgaatccagcatctgttggcaagtactgtcatggcatatgatgcctctcccagctttgagcttacatgcaccttgaatctcctgaaataccgctgatacatgacacanagcatagtgtttggtttacatt

SEQ ID NO: 66868 - DNA, 376 bp, Oryza sativa
tactaatcttgcacaatggcgaccatatcatccatgcatatgtatgttttctctcttctaccacgcctgtgcatcaccggttgaaggccatccaatatctccaagactaatcctttggcgactcatgattcctctgcgcacatcgtacgcacagttctaaaccacaccttcctccgtagttagcctctatagtctcctttctgtctctctgcatataacaactgaactgatcaattattccagagctagctagctctactgctataagcatgcaacaacgaaattgagattgtatattttactgtttgggccaaaaaaaaaagtatattttactgttgcattgcatatgtacaatgagatgatcatatgattgcat

SEQ ID NO: 66869 - DNA, 315 bp, Oryza sativa
gaaaccgacattactcacggttacaacacttgccaattgcgatattaaaaaaatgaaatttttggatcctgtggttgccagctaaaataatgaaaagtgaaatttgctggggaaaagaaaataatcttatagtacatgcagtataaaaaacgaaattatgggatcctgtgtttgcgaaaaataaatgaagagtggaaaattgccggtgaaagaaaataaccttttagcgaggggaaaaaaggaagaataatgaaatttgcagggtaaagaagagaaatttgaaatgagaatgaaaaagggaaggtgaatttcctg

SEQ ID NO: 66870 - DNA, 347 bp, Oryza sativa
  unsure (1)..(347): unsure at all n locations
tcatggatgcnnggaaagcgtacatctactacagtatgaatattcttaaagctattcgaataggcgtgctcgcggttatcgggcattgggactcactatggcatcatggatagaaacctaattcgaaattttattaaatactggtgcatttaaaatattacaagctttctccttctactttctcagctttctgcaattaaacctagctccactcagatactatttcatacattcatacttgatgcaatagcttgctgagtacgttgtactcacccttgcttcaacccctctttttcagagtctaattggagtttttgccgaagctgggagttcaatcaaataagata

SEQ ID NO: 66871 - DNA, 324 bp, Oryza sativa
attaagatcatgctattgcggttccattcctctacttttctcggtcagtggacatcggagttacagcagctgcgagtccgagcggcggctgtgcttatgctgctactgcatgttgagttggtgctcgattctaagtgaatgaaatgcatgaatgcaatcctatgggctcaagggtgctcaccgaaccttgaacgatgcgcgggaaagtctggacagcggcagcggtgaagaagatggtccggcgacggtgtatagctccgggaagacggcaacggctcgatccactcatcgaattgacatgcatgtggtttcatgggggtagtg

SEQ ID NO: 66872 - DNA, 235 bp, Oryza sativa
tttgacagttcataatattagcaatttctctatgttttcatgcatcgcaattcataaaagcgaatagtttgcaaaagtcgacgactaagatcagctacggatgtcagattctgaaatttacgattggtgggtacattaagttcatagtgacgtaattgacatctcaaattggctctcttgttctaaacaacaacatgatagaacttgaagctagagacacactttatcaatgttg

SEQ ID NO: 66873 - DNA, 348 bp, Oryza sativa
  unsure (1)..(348): unsure at all n locations
tatcatacatgggcgaatgaaatgacatcataaatcttgcctcacattccattgtgtcacaccccaatctggcaccaccgtacaacggctcctgacaggagtgtattgtaagaaaaacggcgcgaaccgtttcctacgaaaccgcgatcttcagaccaatcctaggacatagcgttggtacccacggtgacaaatatgaatcattgcaatccttataataaatagaggacttatttaccttaacttaagttgcagctcaagacagnccgagaatacaaccgacgatactgacgaagaaacaccaacagcagctgcagcggaaccaacggactaatacccaacaccaca

SEQ ID NO: 66874 - DNA, 226 bp, Oryza sativa
cgccaagcttttcttgtgatgtttttgtttcgcattcacgcctgttagaaagagccgctagcataaatcctgttttacgggaaggaattatgactgctttaccactttttgagacacaatctggagaccggtccgtctatattcctactaatgtagtctcccttacaagatggacaaataggcttatcctcccatctattcaatgcccgcattctgcctgatatta

SEQ ID NO: 66875 - DNA, 328 bp, Oryza sativa
tcatgtaaatgatattccgatcatgttccatgcttgggttgttgattagttcccaacaaactgtgtttgtatgcgtcttaattcctcttcggtcttgtcacgcacaaagagtgacctaccgacatagacaattgcaagaggcaagccttcacatttactaactatttgttgtgctagtactgtcaagtttgtgggacactcatggtttttatatattggaaaagccgtcttacaaaaaagttcccatgactttttttctgatagaggctctagtgttatcctcttgtccagaaaagcgaggtgggctacaccatcaatgcgtgttgtt

SEQ ID NO: 66876 - DNA, 291 bp, Oryza sativa
gtacctcctcgagacagttcttgaactcacagactttctcttgggtgacatcaattgaactgaagttccccatggacagtgccatactggtgtcgaaagacaaatgcgtctatcgaaggacagacttcacccaaaggttggaaagtaaagtggtaaaatgtgctgatcttttaaaaattggatctccattacatgcccttggggtttatatatataacagcgagtttacgtgggtgcccctatgacaaggtcacttacacgggtgatgacaatattttagctcagttacac

SEQ ID NO: 66877 - DNA, 393 bp, Oryza sativa
agtcgctactatgctgcatgtctcaaagatacaggcgcaaggtatttgtactctctcagattaaataatttttggcacagtggctgacccttacccctgattcccacgagacactgcttctccttgccttgggcgattgtaagacagaacaacaattagagcaccaatcacccgatctttattcaactcttattccagaagttgtcaaatgattttgaaaaagaaagccaagttcctcaaatgattcactcagtctctctaagtttatcaatttgaattcctcaccaattggtgccgttttgattcctactctaaggttttgatatgtggagctcggcaaggatcaaacatggtatactagcattacatttattactaagtcaaatcttatag

SEQ ID NO: 66878 - DNA, 383 bp, Oryza sativa
gtggctcacctaatcttttcttctacctacacgtgcaattattgaagcatttgttaagcttcatgaaacaaggcttatatatcaacgtatataatataatcattcacctcgctctattacaaatgaagcaaatgtgcataatcttgtgctgatattatgtgggataatttcagtttttaattctttccctaagttttttctgtcagtgttacctaattttcttggttgtaagttcaaattgactatggtaacatatttagtgttgatagatttagtactaactgatttttttttatacaaattcagtgtccatagtttgaacagtagtgaaggtacaagaagttggggcatgtggaataactttatttctatgaatggatatc

SEQ ID NO: 66879 - DNA, 304 bp, Oryza sativa
gacctgtctttcttatttatttattgccatcttatcatcaccatccttgaactcttcattctttagtataccttcctcctataaccatactttttcttctgccttatccttattatcactattgcattcttatttcttgcactgctttatttcttctttcctctcatcctcatcgaatgtcatcgaacttttgttgatatttatttacctgattttttgagacttactttacacgggacttgcccatatctgaacaacttacatcttctgacacatctggttgactcatctaactcctctctat

SEQ ID NO: 66880 - DNA, 298 bp, Oryza sativa
atcacaaattctcaatgcacaacttaataataccccctgttagcaagacattataaggattatgtgtacatatacattacgctgcattacaattcacaactctctatacaagcaggatcttaaaataaacattggaacaaaatgataaatatggttaattgaattaccaagtttaaacactcttgacatgctttcacgttctgacaccatacatactaaaaatagcttcacctgcccaacgcataagagaacagaatattaatgataatgttctgcgcaaaccaatgatccatcattg

SEQ ID NO: 66881 - DNA, 388 bp, Oryza sativa
atgtcttcagatacaacccaaaaaggcttgcctgttcttagtgcataaacccttgtgatcatttcgcgaactttgtgtaactcttccacttctagtaaaaattctggtgttcttgcccgataataagcactagcaggttggtgaagcataatcctcgcgtgggggaatgctatacgcttggtgggttctcctccaagcagaatgaaggacgccatggacgcggctattccgaggcatattgtatatatatctggtgtcaccgtttgcatcgtatcaaaaatcgccattcctgagattaaccacccgccgggggagtttataaacaaaaaaatatcgctaattccatcttctatactgagatataccatgagacctgtaatatgattcg

SEQ ID NO: 66882 - DNA, 428 bp, Oryza sativa
tctctggtccttcacgaaccggagcaatattgctgaatattcaaaagctaaaataagaattaggcttgctattattagaaatgcccataaaatatcatattcgtgaagcagaaacataaatgtactcccattaatgtggaataggcggaactgaattagtcaattcaagtcagcattgtcaatttatacaaaatttctctcttttcctcggtgaaacaaggatcggtttttctcaaaccaaagggcttagtttatcctttgtttcctctttgccacgtcttctttaaagattcatccaatggaatcccgaccccctttctttttgatttcctttctatttaggtatggtggagacataattcttatagaaacaaaactctctcgctttactttgtctcattttctctagaatctctagaataaggaat

SEQ ID NO: 66883 - DNA, 378 bp, Oryza sativa
  unsure (1)..(378): unsure at all n locations
tcagcatttctgtgatggagttcatttgctctccggaaacagcattcccatttgttattgttagatatgctgcccatgattngagactatcttccactcggcagtgtaacacgtctaacattcttttaactgtgttcatgaatgttcctaactgtgatgaaggaaaaccaagtggttactaacaaactaaacaccacagcctacagaacacttgacaatgcaaacaaacctgattcggtacaacataatggcttatagattgccttcttgtcaatctttgaacctgcttctcaagaattttcggtatgccgtctctcagaggtagtagagtttccatgtattgcttctccagtgccttcataatttctctctccacat

SEQ ID NO: 66884 - DNA, 379 bp, Oryza sativa
cgaagccactgaccgttggcttcttacactgatcaactcttcccagggtggtctatacaatgtctatttgagtggttgcaaaaacatcacatatgcatctgtttctaccctgttgaatgggcatggataatctctgaaacaagttactcttgaaggctgcagcaagataaccgatgctagcctctttgccatctccgataattgcactgagcttgctgagctcgatctgtccaattgcatggtcaatgacaatggtgttgctaccctgacatcatcaaagcacctcatgcttcgtgtcctgtcactgtctggttgctcgaaggttactccgaagagcgtgtattcttgtgcacattgggcagtcttttgatgtctcaat

SEQ ID NO: 66885 - DNA, 395 bp, Oryza sativa
ataaagtctggtatttcaatttgggggtataattcggccgaccgcaatatttgatgggaggtaattcatactttttccttatttgaatagagaaaaacacaacggttcaaagatgtgtaatatcgagtatacaaactcctactgaagatcggtatattaagtatggcatggatccgaatttatggtttctggtttgcggccatgaaactataccttggttactactatgagatcaaattccggtgcaagattaagtggcttgcaagatctcattcgtgaattgcacaatgggatataagaacatgtttaggtgaaatgttaatttgtccaacatatatcacaacgaatacggagactaaaaagatatttcaacacatttgttggacacatataat

SEQ ID NO: 66886 - DNA, 410 bp, Oryza sativa
  unsure (1)..(410): unsure at all n locations
tgatcgattacccctctgtttcaagaagttctggacctgtatgtataagatcaatcacttggcgtacatccgatgcatcgactatggatatntcatattcccccttttctttacgcagtatttttcttactacacctgttgacgttgcattatataccgcattgttactcttgctaccatcaagataaatctgtccccttcctcggtttccccccacatatatgggatattttaagaaatgaacgtatttcttcataacagggtcgggggaaagaatgggaaagacgatttcactatatttcttaccgggaacaaggcctatcacaagaatatttgttttattgcgacgataactctgaaaagagagatttcctatctttactttcaactcaggagaaatacagtcgggc

SEQ ID NO: 66887 - DNA, 356 bp, Oryza sativa
ttccatttcgtattacaatatattactcttttgagatcttgatatgcccaattacattgtcatgatggtattatctaaaaaaaacctttctgtgaagtacatcctctgtgttaggttataagaacgtttgactttagtcaaaagcaaaccggtttaagtttgactaaggctatagatgaatatagtaatatttataatactaaattagtttcatcaaatcaataatcaaatatactttcataatagatttatcctggggttaaaatggtactattgtttttataaacttggcacaacttaaataagttgattttgagcaaaatgtttataacctgaatggaaagaaaacaactaat

SEQ ID NO: 66888 - DNA, 368 bp, Oryza sativa
  unsure (1)..(368): unsure at all n locations
ttgtatcactggctnttgtctttttaaacgtatgttactgttcttattcatgagaaaaaattcatggacaagataacgaacaaaagttgtcatagttcttttcgtgcagggcttatcaagatgagaatcctaataataataatgatcacaatttcaatcgcaaaattgtgcgagagcanccgtagtgtccttcctagcccctcatttattttgtgctgatcaatcttttatcatccctcagtacgtcttcaagttgaccaagctagcaagttgtgggggctaatacactacacatgcatttatataatccaacaacaatcaagatatacatatatattctttacttccaatgatcatacttgtctccg

SEQ ID NO: 66889 - DNA, 386 bp, Oryza sativa
acatgaagaaacgaagatataatgttatattggttggtgagtgggtatagaattgatatgtataggtcaagcaaatacctaataagcgtcatgatctcatttaacccaagaactgcaattgccaccatggcccattgaggaggcagcctaccattgccgcgcttgtgagcttgctggagtaataaaagatgaatattcaaggaactgactaatgaaaataagactctttgatcaaataggaaaagatcaaaccatgtacgtgatccatattgtggaagatagcatatagatcctcccatattatggatacacacctgcgtggataccgcttgtgtaatggcgaactcatgttctgcttgaactgcttcacagtgacttgcattgag

SEQ ID NO: 66890 - DNA, 357 bp, Oryza sativa
tttatgcttctgattgctaactgctaagctattcattgtagcacttatctatgttcattcttgttgtgcaaggttgacaagaacgctgatggaaggctcacagcagaaaaggttaatgaggtaagtcagaaaacacaaaaccgaaaaaaaatataacaatttctatatgttctgtgtttaaatggtattaaatggatgattatgcttttgcagattattgcccttagtgcatcagcaaacaaactttccaagatcaaggagcgagctgatgagtacacagcactcattatggaagagcttgaccctacaaacttgggatacatcgaggttgtgccaattccaagcatcaaagtaata

SEQ ID NO: 66891 - DNA, 467 bp, Oryza sativa
tggtatgtattgcatctgactctcttacattctggagcttggtgttctctttgtgaaccgcaatgtatgatttctgcagctttactacattactgcatttagagccagaacccactacaaaacaagtgagtgtctgtatggaaacgagtattctgaaatccagatgcatgtgcttctaattcaaacaaccatgagtgtatacgtgaccgatcgaaatcactgtcatcatttggttatgaagtcgacggatgcaatatcaatcagatatgtttaacgtttgtaactatatagaatgcttatgtctccgggaagtgcttttatatatagttttgagagatccaagtacactaaatgatgtagaatccttggtcttagttggatcaaccgcatctctgtactcaatttcaatgctcgcacagagctatattttgccaaatgctgatattgtctatcaacaagtacatcac

SEQ ID NO: 66892 - DNA, 433 bp, Oryza sativa
acttgtctcataactttcttgtggagcatcggcatcttatattgtgagcatgcattcaattgtgcagattgatctttcaacgaaccaaatatcaggaagcattcctacctcactatgacaacttgagatgctgacatccttgaatctttctcataacctattgcaagacaaaataccatatacaattggtaagttaactagcttagcgacgatagatttgtctgacaattctcttgtgggaaccattccagagtctttagccaatgtcacttacctcactagcctgaacctttctttcaacaagctagaaggtcagataccggaaagaggtgtcttctcacacatcactcttgaatccttggtaggaaacagagctctttgtggtttgccacgcctacgattttcagcatgtgcaagcaattcttcgtctggc

SEQ ID NO: 66893 - DNA, 473 bp, Oryza sativa
  unsure (1)..(473): unsure at all n locations
taagcttactctgatagatcaattntccttaaccgaatatagcatgaatccgacatctgtttacttgacaactctcatcggctaatctcaggacttctaagccgatgactactacgggcttaccaaattttactgtttacagaattttatgacccgctagttccatatgactctctccgtgccagaatataagcatttttttggttaacacagacattaagaaagtacgtggaaatgattaaaagaagtgtgtgattggttgagaaaaaaaaaaagtagatgaaagagaatattgtgattggctgagaggaggtacgtaaaacgtagatttatgttattttaggataaagtacattctatgacggaggttagcagtggcttatcctgccactgaatggtgcacgcgaatttcgaccgttcgcatgcactcacacagaatcaatcacccctgtgcctacaataatttcggtgat

SEQ ID NO: 66894 - DNA, 399 bp, Oryza sativa
agcaacacatttatatcaaccttctcgtttttgttactcaagtacccaaacctctttacggtatattttatgtaaaagaatcaatacactaagctattgtataaagaagcgaaaaaattcatttttaaaatatttaatagtggcattaatcatgcgttaatgattcctcccagcttttcaaattgcgaacagttccattcgaactaagccttataccgaccatatgcaccaactctcgccttgaccactaatgaagctttgatttgttagcactattatgggcaatctctcatattatgcattattcaatcatgccctttcttttttttgggttttctttctattgggctttcacaagctccttggatattataatgtgctatcgtagattgatttcat

SEQ ID NO: 66895 - DNA, 440 bp, Oryza sativa
tatctgtctggaagatcaacgcaacattatggactgtttaagaaaggcagctcagatcatgactcctcaacggaacaatcagaagcctcgcttcatgatgggacaactgtgtgggccttgcaccctgatcgttcgtcagcaccatccctataatccgggcaacttcaacaacgactacaacggtggcagtcacaacaacagtgaacagcaccaccacaacttgactccacccccattaatggcaccagctgagtcataactaccatctatgtcagctcatttagaacagctcaagaatgagtctgcatgaaagccaataccctacttcaactgtggcaagctgtcacaccctgaatatcgctaaattataaatcgttgtgaaaaaggaatgtttagaaaatacttaataattaaagtaagtgtgtgaataaaatctatga

SEQ ID NO: 66896 - DNA, 340 bp, Oryza sativa
gccgacattttcagaaatcgacatttcaattgtcgttgagagtcaccagcatatcaagacggatatcgcccgcgtgattcatcggttcaacgccatgcctgcgtgtatcgcgccatcgccaatgacacagacggtgcggcgaatttttgccttcttttcgtgagcaaccgcaataccaaattccgcactgatggaagttgatgaatgcccgacgcttaatacgttatattcgctttcgccgcgccacaggaacgggtgcagacccgctttctgacggatggtgccgattttgtcgcggcgtccgggcaataatttatgcggataagcctgatgccccaca

SEQ ID NO: 66897 - DNA, 211 bp, Oryza sativa
aagacgtgatacaacacttttttaattcttaacggataccagcatttcatgagatactaagcgggccaaaatggcacagatctttacaccgcactttcacctcacaacacggaccacgagcaggcgaaccaaatttggatttgtatcacctgatgaagaacgattctgtctctatcttgttgcttactatccgctctgtgacggaacccag

SEQ ID NO: 66898 - DNA, 333 bp, Oryza sativa
  unsure (1)..(333): unsure at all n locations
ctcacgctccctcctttttaaatatttgacaccgttgattntgtaacacatgtgtgatcgttcgtcttattaaaaaaaattatgaaatatgtaaaactatatgtgtacatggaagtatatttaacaatgaatcaaatgacatgaaaagaataaataattacttaaattttttgaataagacgaatggtcaaacacgtactaaaaagtcaacggtgtcaaacattttgaaatggagggagtatctttttagagatcggatgggcttangacgtgtttagttggttacacgggaagtggntcgtatctcgcgtgcagcaaccagcaacatatttt

SEQ ID NO: 66899 - DNA, 334 bp, Oryza sativa
ccgctctcctatcgtgggctacccgctgggcactaccacactcgtgacattccaacccgcgctggcaccccctccctctacctgttgccccgacctccatcgctctcctcttgcttggagtcagatgagagaaagagagacggatggccatcgtcgaggtctccgcgccgtatgctcgtatccccgccattgatgccgatggggagaggggaatgggaatgatggtcgtcgccgtcgtcgtcgtcgccgtcgtacccttgccgtcgcggcactgcgtcgagcactcgctgacgcgtgccatgccggcgaaactggaatgagagatggagaagga

SEQ ID NO: 66900 - DNA, 371 bp, Oryza sativa
ggctattccctccaggacgtcaaatgaatttatcctgccctgtgcactcatcgcatgcatattgagcccgataatacttcctacaatgagcctcaacgacctgctcaataatgcgatgcgtgatgtcgttaagaaagatgttctagaagtcctacacaccgggattatttatcccgtaccgtacaatgagtgggttagtccattccatgtggtgccgaataaatgaaggatgacagtcgttataaatgcccaaaatgaactcattccacaactaactgtaaccggaccgatcatgtgcatggaatacaggaagcttaacaaggctaaaaaatggatcattgtacgctaaccctcatctatactaatataaa

SEQ ID NO: 66901 - DNA, 116 bp, Oryza sativa
tccactttccaaatctacaattgtaggctatcaccgtttgggcgccgagctcgccagattattactccgaaacaggtcctgaatccccgatacactcaggaggtttgaaggtgcta

SEQ ID NO: 66902 - DNA, 337 bp, Oryza sativa
tactcactgcattgcaatttactttgtaatttaataaacaaacagtttactagtttatgctaactgcgttcgtctgtaagaaataatggattttgatgagttatttttctaatggacaaaggaaaaggatgattcaaaatacttatttcttctggacttcccaaacacaaaatacctccttgtattcgcactctcaaatgagagcggaagaaattcgactttcatataatatcttaatagaattccatgtaatgatcaatgcattttttggattctatattattcgcatgtctagaatcctaccaagagaataccccccacttttatgtaattgaag

SEQ ID NO: 66903 - DNA, 424 bp, Oryza sativa
  unsure (1)..(424): unsure at all n locations
gtcctactctgtactcaccgtatgcctcatctatctatctttntagaagcaacttaacaagatattccaagtcacacttgttctagctaagagattatcgtctccccaggcagttccacccaaagggaacacttctcttcggataccaattctccagacgcctatgcaagatgcaggctaaaaacgagaacaaaccgaagaggtttctcctatagggtccttagcataaacacttgtctagaacaaacgtgcaggaatacttaaggaaaattacttcatattaaacagataagcttacatacggttttccctttcgggaaacccgaatgtaggtacaagcaagctgttcttaccttacacaagcgtattacacaactccttgcttcaatatactatgcaaggtatgctaaagtcactactacta

SEQ ID NO: 66904 - DNA, 322 bp, Oryza sativa
atgattgttccatttcctgggaggaatataacggcgactcaaattgcccggaagttaaccttataattgatgaagttgacttccttaccaaaccgattgtcctagactcgcataacttggacatcatactaaggatggattgtgtggctaagcacaataggcatatttatcgtgccgtaaagtccatcaccttgctaggacctggaagaaagcaagttcgctttacctctaacacccctaccgcgagtcggtctatcctaacctgtttacaagtcaccttcttggagtcggtgcccatagtctgtgaatattccaacgtatt

SEQ ID NO: 66905 - DNA, 446 bp, Oryza sativa
caacatcttcttagataggaacattttatggcttctttctcttctttggtatcaattctgggagatcaacattctgaggttgtctatgatacctctcatatctcttgctggaagtaccaggagactgctcacagcatattcttgacattccccaagcaatttgacgaggacgggatcctacctgagacaagaaaataaaggatgaatttataactgatcacagcatttgaacaaagagaatacgcttaaacattttccattgcaacagtgatttactgcaaacaagaaagaataatgaacaactgctaggaatttctccattatgtgatattcagtattgagtgccaccatagtaataggattggttatgagaatactagcttcttgaacatagcgtcaattagttctgtgagattatctgctaataaaacaggtaacaataatgg

SEQ ID NO: 66906 - DNA, 347 bp, Oryza sativa
catttaccaaataatcaatccgtgcactattacctcttgctattggtagatcacattgattatccccttcaccagcatcaagcagtctgtgatcaaatggtcttcgtgtctgaatttaatgaatcaatgattattaaatgtgggcttgtatcaacagaaatagaaacaggaaaacaatgttacagcaaaacccattcaattcctcacgtacaatacattaatcttgaatatacatggcgtgattgacttatagctgacgaagatttagattattctctttatacttagacgttagtgaaataatatttactgctatatgaacaactgctatattatattatcatgac

SEQ ID NO: 66907 - DNA, 373 bp, Oryza sativa
aatctgaaatgcattgcatttcactactcactatttgattccgcaactatactgtgttgtggcgcgtgatatgtgaaccatcctggctatcctaagcatcgtgtcgtcatcgtactcatctgatttgctggctggctcgccattgacaggaacaagctcggtttcgaaaatgatagtcgatccacctgcatgccggatcattacaacaccagatcagatcagatatgttacatatgtagtgaaaaagtcccgactagaaaatatatagcattgcagcagctccctcagacaatgtggccatgtgctgttgtatgataaactattcttattatacacaacttctctttgaaaggatgtaccattcttacttgac

SEQ ID NO: 66908 - DNA, 343 bp, Oryza sativa
cccgcccttaaagaatatacagtgaagcgaaatatatggtgtcgcgatggttcccaaacgtcaaccgtggagtgagtgttagtacggaggttacactgctgccgctagtgttggtgtttcctcctacgtgacgtcagttgcattctccggttgttctgagctgctacctaagttaaagtaaataaatactctatctatttaaggatttgcagtgatcataattgcaccgtgggaccacactatgttctggactggaccgagatccgtttgtagaaacggtccgccttttcctacacacctctatatgtgccttgtgagcgtgccgatgtgttgaatatcatgc

SEQ ID NO: 66909 - DNA, 358 bp, Oryza sativa
tcgtaatttttcgggcacaccacagtatgtttcaacaaaacaaatagcaccatcttatttaaattacaaatgtacgtgcgtcaaaaaccgctatatcctacatatttgaaaaaaatggagaagaaatttggacagattgaccacaaggaatcttttttttgcaacggaagaattttgatgaacttcaattatgatcagcgagagtactatatgcgattaaaagggttcacaagatctgatctttacgtggttgtcccaaagaaaataataataatgaatgatagcctggctaaacgaaataggtgaggacaaacattatatgttgcttctactattcacaagagacatatttgataca

SEQ ID NO: 66910 - DNA, 261 bp, Oryza sativa
tatagtctagcagcagtatatcatacatttatgcgttgccattttcgaaaccctaatctgattacaagctccgataccactttgtatgaaactatgggcaaatttacatttagaacaatctgtgcaatttcgatagacacgagatttaatgtggaaataccctccctgaacatgagagagaaaaactcatgcgcccaccacctatatatcttgactatatcggggcgagggttcaacgccgcattggggcttacatgatgt

SEQ ID NO: 66911 - DNA, 295 bp, Oryza sativa
catatgcgtaatatcaaatattttggtgtgcttgcaggagggcacaagataatgatttcacaggcaaaatacctgataatattggcagcatgaagtatgttggacgatatgtaagatcagctatattaagtgtgtaataatacattattcagtgtatattatgcacgaacagatggaaactgtgcaatataaattttctggatatgtttctcttctctggcctgactaaacagacgtgcacacatgcatgccaatatgctggccctatggcatgttaatgcgtagagttcttatc

SEQ ID NO: 66912 - DNA, 395 bp, Oryza sativa
tcagcttgtgaccttacccgcaagctttttataatttcttcctcgttatctaaggagaaaaaacgagcaacgcaatgatagaccgagtcagcaaattgaattgatatagatcatactccattattattatagttgccccccgactgacaacctcgagaaaaagcttgatgttgtcagtattgacagggaaatacagagataaacttaggcgtagaaacgacgaagatgttcgatattccaagagttgtcaacaacgattgagttgctatgaatcctgccgagtgacttcggagattatgaatggcccttcccatatatgagataacttgtgccgatctcgtgtagtgtgaattttcctcataaccaggtcgccgactagataagcgcgtaatctg

SEQ ID NO: 66913 - DNA, 295 bp, Oryza sativa
  unsure (1)..(295): unsure at all n locations
tttggaaaagaanacagttggagtagttttgaactgaggcaatgagcacaatgaaagaattttttaccacagtagacagtacttgataagtgatagcgccagcataatcaattgctgaaactctttaaccatgccttagtacttggctntacattttttgaatgaagatatatatgtgtttccatgcataaaagcattgttgatagtcttgtgggcatgtatcttatagggtgggtcattaaggtttgcttattggtataactttctgtcattgatttcagatttttaatggaag

SEQ ID NO: 66914 - DNA, 369 bp, Oryza sativa
gtgtttcttatctacattttctcaacagccgaatatagttgggttctgcatttgttatccaacaatataacccagtttaatttatttcatgttgatgcttagaatagttgctatataacatctatatccacaaaagtatttatgttccttttgtcttgtatgcatctgacaaatttaattttcattgcttcatggatatttactgttatttattatataaacattagatatgactatggcttcgtggaaattcctcctcctatgctcgtttttggcaattactgttttcaatggatgtggtcactatgaatggtaaccgacgcacacaggattaaaattgttgggttgccagtgaaataaaaaacacat

SEQ ID NO: 66915 - DNA, 257 bp, Oryza sativa
tgatgcttgcaatacatatgcctgttaaataataatattccactagcattaggcttactttccttttgcagaaaatgatcattaagtagatgagaatccacatccactcagacgataaatcaatctgacgatgtctataaccacacttgtgtgtgaataggccaagaactcataattgtcacgatgaattacgccaaaatcacaagtctactgagtggagcaatagaagaggccaccagccgaaattaagctggatt

SEQ ID NO: 66916 - DNA, 96 bp, Oryza sativa
taacgcatattttgtttagacgacaattattgctcatatactaatgacacttttgaatttataatatgatccgacattctgttccctattacattg

SEQ ID NO: 66917 - DNA, 447 bp, Oryza sativa
actttttacttacctttacttgatggctttcttatttttattaaccaaaaacttgtgctatttattggataaatgtcttaactctctcctttcacttgtctttatatgccgcgttacaagcctgagtacttgtttggtgttgagagattgtccacgagttgcgtacgatgtcctttgtcataggatttgggactgcccctttttatgcctagattccacatgatcgtcatgaatagaagtgccgagtcaaagtcaccttgaacagtaatagtaaagatatcccctcactgatgttcgaagctggaggaagaaactacatccatgcatgtcatgaggtggcatggattgccatatgagagctccgcgatcgctacagtgatcatgtggccgacactgagtatctgctccatcctcgccatccccatggaagtgaccgtggatattacc

SEQ ID NO: 66918 - DNA, 427 bp, Oryza sativa
gcacttgatttattatcatgatagcagagcctttttattttgtctgggcgttctcttgatgctcctaactgagcgactactgtaagaaaattctcttctgcagatttatacctgagtaattcaagcatcgaactatgaactctgaaagacaacacctcatcattgtaatctgcatctacaggttgaaccacactcctattgacaagctcgttgaaataaccctttgcaacatgctcagcatcttgcccatgcatgctgttctcaaaaccttcagctacccattgcttaaacaaatcatcttttctgatagtgtaacccgttggatatatacccagatatattaagcatgtcttcagattattcggaagatttatgtagctaagggttaattgatgccgtattccttgaaatgtggaacatgtgccga

SEQ ID NO: 66919 - DNA, 387 bp, Oryza sativa
tttctttattcactgtttccggcgaaaatagcacgtgctatcgcacatgttattgactaattttattaattctataagcactacattactctttaacattataacaaaatttggtaatgctttaatccatgcacgtctaccataatttcattatgccacatttagaaaattatcattggtgggtggaagtagctgctaagtaaacaagcccgtatagtttaaattctgatatttgacattgcccaacatatgtagtaactatatacatatataaatctggtcagtttattatacaagattatgatcactcacaactgcatgcatggggcaccacaaataatagaagactgatcattgactctactcttcgaacatgtacaggaaatt

SEQ ID NO: 66920 - DNA, 414 bp, Oryza sativa
atttgcttgagtgcagaatatgtgcactttatctacaaaatgagactaaataattattgcagaaaattctgaaaataaaacaatgtaatagattaaaatttttatttgaaaataaggactactcggattgtatccatattggtctcccaagttctacttggacaagggaacatccatggatataaatacaaggccctctatgaggagaggaaacacatatacaaaaaaaaaaccaagacaatccagaacaaaccaatacaccaccaaatatcgacatccgagataagcctagacagacccaatctggtgcctacggaagccgacaagagggatctagtgccatatctgatctcaacgagttcatactcgagaagtaagactaccctatcgtcgactacgtattggtgatctatg

SEQ ID NO: 66921 - DNA, 328 bp, Oryza sativa
aaagcatttgctcatatcgtcacgcattgtcacatattatgttttacaaacacaaagtttcaagcactaaatgcacttcttgttaacaaatgacacccgtgtgataacctggataaaacttatctgtattctgttggttcacaaagactcgctacatggtgattcataagctaaaatatccacaaccaaatgtacttcgcgtggtcctgctcatattgtacgagtaattatatattaaagcacataaaatagagaacaaattccattcattggatttactcaaggaggatacattacatgaactatgtataaatagaacacttttctc

SEQ ID NO: 66922 - DNA, 276 bp, Oryza sativa
gttatctttcaaataccccacgattatgcttcctttatggattcccagaatcctgttcttatagttccacattcctgtgcgaagaccacaaccacccttcgagtctatttctaactgttaaaagaatggtgtagaagcttatatttatcattaaaactgcaaatctattacctgtttgtgggacttattctttcatagcgatgttctcaatgtcgagcttgtgaacattaacaaagtactggcaggagaacccccgattatcatgggaagtttttt

SEQ ID NO: 66923 - DNA, 392 bp, Oryza sativa
  unsure (1)..(392): unsure at all n locations
atgtggagcttattttcataatagagtacctgtgaacatttggtcatggaacaatccgttgtagtgcgttgccattgctgcacagatggcctccatttcttacatcttgatagccctggtcttgtgtttctaagtacttcctccgtttcacaatgtaagtcattttagcatttttcacattcatattgatgttaccaatatgaatgtgaaaaatgctagaatgtcttacactagagngcatagagcatgcttatctggtttcgatgcgtctctagaattggacgaaaagctaaccatcagtgaatgtgagaaactgcaacaccgagatcaataaattaatttgtgaacacagacttacattgtaatgctccttgatggtctagtgcttatct

SEQ ID NO: 66924 - DNA, 420 bp, Oryza sativa
  unsure (1)..(420): unsure at all n locations
catgatatgcgcngggtgatatcgctggttgatacgagccgtatatgaccacaaaagtgtgccaaataatttgctgccccacatgacgaaatgctgtatccacgtgaagtaaatgatgtagactgctatttggcagatgacagtccaaactacgcaagtatacatagtcactccaatgatgtcatatacagcaacgtggtcatcctgtttgacagcttgaatgatgacagcatggagggctgcaaagtatattattattgaacagcaaactccgttcatcatccaactgagtatacgagaccagctgaagaataatatattcacgccatcttgatgtaatgataggacctgaaatatgccatggactcatcacaaataccaaaccatctctgaagtatgccaggtgacattatgactgac

SEQ ID NO: 66925 - DNA, 346 bp, Oryza sativa
tattcagtgagaatgtcagatcctttgattctgtactttatgccaaccgaaagatacttgttgcggtgtggggtctgatcaatgctgataaaattcgaaagttcatcgccctcgagagcagagcgtaacacactatgtctataatcaatggcttgtatccagtaatgatgctgtgtgcgatgccggttggtcttgctttctaaatcattatctcttatttctcattctggagatggctcccaagggaatccagatggaagaggtgagcacattgatggagatcttgaattgaccttaccttgtatctggttcaagtagttcccttgcagaaatgcaatctacctgt

SEQ ID NO: 66926 - DNA, 375 bp, Oryza sativa
aaaaaaaattgtccgtgaactggttccaccttttatagctcaccgaagaatgcggaaggtttaatatttttttgcttggaagagagcctggctggtgaatgcaacttttatggacgtctgctgaaccttcatggccttgtgccatttgttgtgctacaaacgcggtacttgtatcgcctgacgcaccgtatgtttacgattaacatcctgttcgatacacctgatggagagcatacatctgtacacctgaatgatggcatgacatacgctgctacatgtggtcaacatatactacaggttacgctactcacggacttattgtgtggatcttacattgaagagcatatttattttacaattcttactatagacaat

SEQ ID NO: 66927 - DNA, 397 bp, Oryza sativa
  unsure (1)..(397): unsure at all n locations
atcacaatctctcttgtcgaacaactagtcttactgagcgaagtggttcgaaatgtgcacctatacgttagagaaccaaatcatattacttggaaaggcacaaacaacgggcactacacgggctcctcggattaccatgcacagtgctgaggagcgccgagcacaaaattcaattccttgatttggaaagcctgagcgtcggggaaatgcaaatttcatgcttggctcatcattcagaacagagtctggacttcagaccggcttgcgaccatnggatggcagaacaatggttgttgccctctttgccgacgcgagattgagacagcattgcaccttgttgccacttgtagatacaccaagatgatcttggacctcgactctgcatgagtgggctatc

SEQ ID NO: 66928 - DNA, 341 bp, Oryza sativa
atgagctcctgctggaaacaagaagactttgcgggttcaatttatgattgctcatcgccaacttccaagaagtctgtttacttatcaattgcagtattctccacattgaagaacagtttgtatcaagacataatgtttcatatgcaaagtcaatttcatcttctcagttttttggagaccagaccactttttataatgatgctcaagtttccctccaaaagctttcgagtagtatttttactgtgctatactgccattgctgtggtgtggtgttaccaaaattgatacttatcttgtaaaaagaagatgatgcgatagatgtggccctgtcacttttctta

SEQ ID NO: 66929 - DNA, 284 bp, Oryza sativa
ttgaccgtctccatgcctagaaaccaacctgaataagtcccaatgggacatgatatcttcaaggagcttcatgaggccatcctttgagtatatgctcccgtatactggcccggccgactgcttgtcgactgcggtcagatttgcttcaaccaccttcacggtgtacgtctcctacatcctttatctctgcaaagcacagtgaaaatgcagatctttttctctgctgagaatatggattgctagctgatgagagcttgaagatgaagatgttattgcattggaat

SEQ ID NO: 66930 - DNA, 434 bp, Oryza sativa
gcttggcgactcggcgtggagctgcgctctttctcttatgtcgcgcagcgcgctcgccgactgcatgatggtgccgaaggtgaactctctgggcacgatgccgtccccaagaatgcctgagaagaaggcgaccgcgtcccggtgccggtcgctgcgggtgagcgcgccaatggccgccgtggccgatacgacgtcccggtgcggcatttcgtctagcatattgtgggcggatccagggaaccgtgtgaacggcaccaccagctgtgccgtgggctatgtcacggtcctcaaggaacccccaaggtgctgcatctgatcgcatgaaagtcgggccttttggagcggacgagctctgccgctttgatgtggtgatgaagatttctgtatctttgtggtcagtctgatgcaatcgccgaatcggccgaagagaacgt

SEQ ID NO: 66931 - DNA, 238 bp, Oryza sativa
actgggtccgaatttcacttacaattatgatgtgtgacgggggattaaattcctacctttgatacgacatgcttaggttaaagaggtcttattcagtttcctagttctcttcactgaagaatgaggtaaatcatctagctgctcagatgaaatccatttatcaagttcaatgaggattactggtggacacttgataataagccttcctgaaatagttgatttttttcattcttcaatt

SEQ ID NO: 66932 - DNA, 194 bp, Oryza sativa
gcgcgagggcgccccagcccgaggacattcatgcaacatgactggccactcgtgtgttataacacactcaatcacccaacgatgaacggcagggaaagcacacaacatactgctaggattttcagagacaacactcctgacggttgaagatgcgcatcaacaactacaatcggtgtaatgacaaaaacatgcct

SEQ ID NO: 66933 - DNA, 379 bp, Oryza sativa
actgaccggagaatgagatcatgtctttttagccctacaaacccgccctcttcatatcccttcagaagagatgcccgtccgaccaagcattgactccatcaccatattcccacatgacatggatcaaggaaggcacaactatttgaaattaactgtcgttcgaaccactagcttatcgacttagccctcaggaagtcctttaggaagacatacatgcgacatcatgtcgaatagcgcagccaatcactcgattgtttacgagctaaagccttgctcataatccctggaagctcaaaagtgcagaacatctattcctgtgaaacatactgacattcataaatgtttgatacgtatttgagatgatgacaaagccactgat

SEQ ID NO: 66934 - DNA, 334 bp, Oryza sativa
ttattctcatcacaagcttgacttcattattgccaacatgacgatgtccttggcttggtgaccactaacccatggtgtcattcattagcctcatcgtagtgggacctattccttttcacacatcaaatgagaacattagtctcaacaaatcggttgccatccttcacttgatgaccaaccggttgcatatgagagatatggatatgcttgttgagtattcattaacatcacaagtgtcatatactcgtatgcaagctcaagtgcaaatatccaatatatataataggtgaacaacatggatctagaacatgcacaataaatgtatatgatttgc

SEQ ID NO: 66935 - DNA, 410 bp, Oryza sativa
  unsure (1)..(410): unsure at all n locations
atgccgatcgaccggcttattatcaccgtacttgctttcgagccacgcccttttctcgagcagcccggcgacgaggacggcgatgacgccggcacacgccatcaccacacgctcgtcttcgacgggaatccccaggacgaaagacgtcgtcacgatagcagcgccaccgacagcgcagagaccgaacatgaagaggtactcgtcggcgaccagcggcgcgcggggcaggtacatgagcgtgtagaagcggatcaccatggtcagcgacaggtatgtgtcgcacaggacgcgcaccggcagccgccacgggacgcgggcgaggtanagagggtccttggctatgaggggcgtcagggtgtataggccaccggcgaacatgcaccacacgaggagcagcgccgctatccact

SEQ ID NO: 66936 - DNA, 419 bp, Oryza sativa
  unsure (1)..(419): unsure at all n locations
agctagactaggttcttctaagtagcttttgttgttctgtatagtctgaaactgatctactctaagtgctgctactctgttgctcttcctcatccatgacagactgcacgcgatctgatgttctaaaaacagaaagaccacactccagctttttgtcagggatccaagttggtttgtcaaatggcatgatgattttgtagtctggtgagaatttgggtacatcacaatttccactccaagtgttatccagatagggcagggtgtagtacggggacatgtaatcagcagtggtaactccaatctgacaacagacggcaatgacatgagaacagggcttatgaagcagctttgactttgtgcaagaacattcagcgcgtntcgtgagctcgcgtgcatgatccctactgatgcgggtatac

SEQ ID NO: 66937 - DNA, 387 bp, Oryza sativa
  unsure (1)..(387): unsure at all n locations
tctggcttgttcagcgcgtcaagtttttagctaacgatgttattaatcaatacatctgtgaatggccgaagaaccttgggagcttgcaaaaggctagaaaatatgtgtaacagctggttgtttgttatcatgcaatcaaagaggtctggcatgcaaaaggaaaacatgtccattatatcccgagcttccattatagctagcatntgggaaaaacattgcagaatgtctctctcctcatccttttccttaaaaagagccaaacagtgaaccccagattntagaacacccgaagtcttccgcacctataacatatcacataattttattagcaacagttcagtttaaccaaaagaataaaggtgcatggtgatggtttaatggacctca

SEQ ID NO: 66938 - DNA, 255 bp, Oryza sativa
  unsure (1)..(255): unsure at all n locations
acccctttataaagncttttttttgggattcttagaaggcttgatgtgggttggcgacaatttcaattttcacagagcccaacatacatatggtgcatggggacatttacttgcattagtaacaatttgtttttagaatattaagaatactgtatctgaagaagatcttgtgattatgctaacgaaatccaatgaataacataatactgtacattataactcgaacaacctgattttggctttgtgcttgggatc

SEQ ID NO: 66939 - DNA, 450 bp, Oryza sativa
cggatccttaagtcacctgcggcatgcagctttcacccaaagtcttttacctgtttttcaactcaagtgcagggtggattttaactgcatatattgagatggaacatttttcagatctattatgaagttttatttcggtagaggctaaattgtaagcactaaattgtgttcctttaagtgttcctagaattaatctagttcttttagatatggctttgttagcagaaccgctgttttatgaactttgcatcatataatgctgcttatgtctctggaaaacaaaaacaaatgtatgaactctggatgtattcatatttgtatatagacagaggttgcaacctttgataattcagatcttgtaggttggagacataatgctactgttctaggttcccttctcgatagtttggaacgctcaagatcttttttttaagtcacattttctacact

SEQ ID NO: 66940 - DNA, 449 bp, Oryza sativa
  unsure (1)..(449): unsure at all n locations
cgctgacacttntatatttacctgctgtttatttagctgtgattgaatgcttgngcaagcatgtgctgctccatggtagaatgtctgcatacattttttttcttgcgaaataaactgtaactttaaatattttttcatgtaaattttttcagtttcttcatatatgtaagttttgtactgttactgcagtcaagaagctgttaatattgatggagttcactgcaaattctcatcttttggttcttcattcaaacaaggtggagaattatcaaattttgtaatgtttgtgttctgtcgatatatgtttaaatcgattcatcctttcaaatccaaaagacactatttcttctcttcaattgggggtagnggttgtaatttttaatttttttataaatacaactctgctacttgcanattgagtatgtattttttatttcaaatgacttatg

SEQ ID NO: 66941 - DNA, 404 bp, Oryza sativa
agcttgtccttccagatgattgtgatgatttatgtcttctttggacttacctgttgaaagttatgaatctgatcacatttcataatctccttatatgcactcttagtattacaaattccattcttagaatgcttccaagttccaacaaagcaattcattatcattatgaatgatctggacctgcaaaattttgttcacagcttgattttcaaagattaaattaagtttctcaccatcccaagttttattatcagtccacaggtcagcaaccatggttgtgaatagggtcaagtttaatgaaatcatgaatatcagaatctagctcacaccatggttggctccaatgaatgcttctccgtggctggccagctgtatgggtgttatggtgtatggcacgaacaata

SEQ ID NO: 66942 - DNA, 466 bp, Oryza sativa
  unsure (1)..(466): unsure at all n locations
tcgctgccggacgctgggcagcaccttaaccagcaaggttgtgtttatctatgccaatagaagcaaccagcggctgcttcgcgttggcgacattaatagaacaagcaagtaaggaaatgatactctgatttgcatctgcatactctccttcaacttcacgcaagaagccccaattattntgcatatcaaattaatgtgcaatctccaatgttacctgatctcaattgatgggctgcacaagtcctacatttgcacatcgtgttccatgtggctggccgcagaggatanggtggagtccaccggtgatggaggttgtttgctatttttcttttgctcgtcatctctattgacatgaacgagaatgttttntgcatttttttgtgcttgctagatgatggatggctgctactatgcaacatcgagctcatctctatatcacactgctacatccttccatgattccatc

SEQ ID NO: 66943 - DNA, 468 bp, Oryza sativa
  unsure (1)..(468): unsure at all n locations
ctagcttacaattagcattgctattatacttactgctgttgtctccacacgtaatatattgtccagtgcttatcgtgactaacacatgtatttggatctacgtgtgttggtcatgttggacacactggacgatatattacttgggatgcccacattacgtctttgctgcgatcccctcttaaggttgtgttctttagggcctgtttggtacaactccaactcctaaatttaactctatgagttaggtctggagtggagttgtggagctgtctaaacccagctctacaactttcattttgtgagagagctccacccagctccactcctagntttgatggagctgaaactgtttggctgagctctagctccagaaggggtggagctggagctatgacatacaggcccttagttacccctgctgcagcgccggtgcaagctattggattcattcgctatgctgactcaagc

SEQ ID NO: 66944 - DNA, 316 bp, Oryza sativa
ggcataactctctttaaagagtagcacattaatctttacccactccatagcatcggctccatgttcaaccatgttgacaataactaaaataacttcaggtgagcattacgtaaaggcttgaaattacacctattcatttatcagctcgcatcacttttctatgatacatggttagaagggtcttataatacctacaggctcgtgcaactagtgcatttcacaatgctaaagagtcgtggcgttagtacagatattcacaacgaaaaccaccgagatgattcctttgttgcattcatttagacatacagatcattta

SEQ ID NO: 66945 - DNA, 335 bp, Oryza sativa
gcacccttcagcacttatctctcggcggcctcagcgacggtctccacgacggaccaagcacggtcgccggcggcggcggcgttggacaccgaacagcgcttgcggatctgcccctgcgagccggtgagcacctcgatcatgcccatcttgacgacggagtagacgtactggtcgaagaaggccgactggtcgacggcgaacttggtgacgatcggcttggtggttgcgttgaagaagaggccctggtcggaggtgaagaggccctggcggttttgcaggtcgacgtaatacttgttgtcgaaagtgttgggcgtccggatgtcgttgacggtggt

SEQ ID NO: 66946 - DNA, 350 bp, Oryza sativa
  unsure (1)..(350): unsure at all n locations
agcttncnctttggctggacaggggagacttcattatggttctttagcgggggtggtttctgtcacgtgaaccacaacggggagagaacagacttttgtgagaccctttttgtccacgcacgcccgtgctgccgatgccccggaatttctcgggggacgacgacccggtgaccctctatctcgtgatcatgacgggcgttttggcacctcctcctttgctttgcccctgccactggcctctgtaagactgttaagcgtctgttgctgtcaaaaaaatatactgcaaagtggagaaaagacaagggaggccgtgtgttgtgttttgcatggagttaggtaccgctgctcct

SEQ ID NO: 66947 - DNA, 399 bp, Oryza sativa
  unsure (1)..(399): unsure at all n locations
gcagcttctctggggtgccttatgttatgggggttgtgcgnttggctgttctactttcaaattctagctatntcacctttcctttggagaaccagttgactctgttcacattttttcttgaacgctcaaaatgttgatctttgttcatacaggcatcttgtaccattctagccatagttgctttgctgccaattgcgcaacttctcttttttcacattcttctaatcaagaaggtaactcctaacccattcccgttttatgtaatgccacggattgattaggtactacgttgctattcctgataattttttagagcagcttgtacaccagattctcatacagtcataccctttgaacacttaataaatatttatgtattgaattataaaaaaattatta

SEQ ID NO: 66948 - DNA, 449 bp, Oryza sativa
  unsure (1)..(449): unsure at all n locations
ttaagcactgagctgcagcttataataaactcgctgccctctcttgctttttattatacctccatgcccttcatttctgggccatttctcatacatcgcgcgtcgtctccacctttgttgcttgtgccaccaagctatcttctcctctcctctctactaatgcttctgcttgctcgatcagcagtgagcttcaagctaactagcaagcatggtggagactagtacatcccttgtgaaattagagcaagatggcagcttgttcttgcctccaggcttcagattccatcccacagatgcggaggtaatcttgagctacctcctgcagaaattcctcaaccctagcttcacctccttgccaatcggcgaggtcgacctcaacaagtgcgagccatgggatctcccaagtaagcctcaagtctcatatgcttacatccttaantctcttcttc

SEQ ID NO: 66949 - DNA, 459 bp, Oryza sativa
  unsure (1)..(459): unsure at all n locations
tatcagcactgttaccctgagcacacatattatatttatgctctgtacaagataccaaatagtatgaatcaaggtgataatatgtttggaaaccgattagccatgtgtttccttgattgaatatatttgtatccaaacagagcanaagcttctttttttctaacaaaatctcagaattccatcccctgcatttgttntgacaagatatatgttcaggctatccttctcttcctcgatcatgaatctttgatcttcttttccctaattattacgtgttagcttgctccttgntagtgatgccataatttcttgcagatgtattgtagcttgaacaggtgccctttggatttggatgacatcgtggatcagcctcactatcatctcaagatggtgtgcatatttggatgttgtggcaacacatgccacgttgagctagcaaaatgcattctcagaaatgcg

SEQ ID NO: 66950 - DNA, 439 bp, Oryza sativa
  unsure (1)..(439): unsure at all n locations
gcttattgattactcaacaacttggtgagattttctgtttaatagctccataatacaagcaggggcatccatacgccaaacagaacaattctaaaaaacacccaataaacaagaccaattttagctacctataaaagaaaattattttntagtagtgactatcgataatattcaagggatatatataaagtctatacatcctctggtagtatatatcaaacagaagcaacaccgcaaaatgtcgaatatatatattagggtcatagggatactgatctccacctctatatataaaaatgcagtattacacacaacaggttaactactgacaaataaaattaagagtgaattccactttggactaagtttaattacctaatttgcaaattggaccagacattatcaagtcttttcattctggactaaacattgttaccaa

SEQ ID NO: 66951 - DNA, 407 bp, Oryza sativa
  unsure (1)..(407): unsure at all n locations
atatattaatagagaacggaaagaatatacattgtatgtacatggctattcngataagaccggcccgcaagagagaagttcgttaggtgatatctttcaaaaatccgaacttctgcagcctatccgttccggctttgactcaagctctgccttcctttttgacctttgcaagaattgaggccggtgttgaggctgtacttcgaaagatccttgcattacgctcccnccagatcttccaggtgactagcatcagtagcgttcgcagaggggctcttggggtgctgggggattcgacgacaaggttccaccaatgttcaatcgaggggcagtcattccatttgtccaattggaggtcagtatgtgtccatctctggatttctgcccaatcctcttagtgactctacatt

SEQ ID NO: 66952 - DNA, 406 bp, Oryza sativa
agcttcagtgccctcgcgagaactcgctcgtatttttctgtactccgcccgcagaccagcaagtcatgtcccatgtcccggacgagagctctgagatcttcccgccgctgcaaaagactgatggcacgcgcccggaggatacaaagctccggcattccgatcacgcaccaggtcttcctcgcagacaaatcatcgaacagtatatgtgcgtcctcgagcgggtaacagccggagacaacaactaccacggacttgtccggctcgagatcggcgaggtcccccatgcgcaccatgccttggaggctggagatatagtcgaccaggcgaggtggaagaggtaacgcggtggcgtccatggcggcgaggcgagggcgcggttgggcgcgtctcgtctcgtggcgattcg

SEQ ID NO: 66953 - DNA, 402 bp, Oryza sativa
tatcctccggctcctgggtcccctccacatacctttcaacgtgcctctcctggttcccctccgcatacctctgcacgttcccttcctcgttcaaatactggattggatcctcgttcccctcttcttcgttccagtactggctgcttcccttcgcgattggatcgtacaatatctgttcctcatcgcgatcagccatctgttcatacatgaaacagctgctaagtcatgagacatttatgttttaacaatcttatatgcgtaacatcatatgctaagtctaggtgacgtatattacaggaccctaactcgtgataaatttatagtcagctaatcacaatctaatatctatattaaactatatatctatactaaactccataggatattgcttatctcgtgacg

SEQ ID NO: 66954 - DNA, 172 bp, Oryza sativa
gtgcaaccacactacccgccgtctatataaagaggcgactctcgtggtctctctcctctgaaaccttcgatgccatcacaaaccacgcccgactagaacgatcgatccatagctctagatggcctgagatgacgccgatcgcaaccgtcctctgcgtggtcgagagactcag

SEQ ID NO: 66955 - DNA, 231 bp, Oryza sativa
caaccacttccattagaaacaacagggggaaatgaaggaatagggaggaattggatttttatcacctcgagcaccagcttcttactggacatttcgtcaaacatgtggcttgccctacattcccatcttccttggcccttgcatcaagagttggcaagaaaaattcaaaaaaaaaacaaaacaaaatagagagctgcatacggtgcggcaacggtgttggctagcagctga

SEQ ID NO: 66956 - DNA, 416 bp, Oryza sativa
  unsure (1)..(416): unsure at all n locations
agcttgggacttgatcgaagttcgtagcttgttcgatatatccaaggacatcagttctagggcccattttgcgatccgcccgtttgcttcgcgattatgaagtatatcgctgagcggaaacgatgtaaccaccatgactgagtgaccctggaagtagtgagataatttcctaacggtaattagaacgatcattgtgagcatcgggtcacaccattggagtggtggaaattgtctgttttctttaacagcttgaagaaaggcatcccccgctcgccgagtcgtgaaacaaaccggctgagcgccgccatgcatccagtcagcttttggacacctttctgggaactcggcggtttcatgttgaagatggcatngactttctccgggttggcctgtatgcctctatgagacaccatata

SEQ ID NO: 66957 - DNA, 425 bp, Oryza sativa
  unsure (1)..(425): unsure at all n locations
aatactaagcttgcctttatgagtatgagcgngcttgtttatttgaaccttcnatctttaagaaacaaagacgaagaaaccgcgggtaaatccataaacgatagccgatcggctagttgccgatgacatatcatttatctctgatatatctaaatgtaacaagatcttaacataaagggcagatttaacatgtcaattaagcacatatgataaaagttgttaaatcagggtagatcgattgaaaccccgatgctaccataatcggcaaccaaaagcaggctagagattgagattctaatcacgacttatatggtcaaacccaactgatgcagctatatagttgataaaaaggacaatatctagaccatcaagccgttggatggttcatagagtggtaaatatcatatataatctacgtcaacatc

SEQ ID NO: 66958 - DNA, 422 bp, Oryza sativa
agcttatctgcaccaaaagtgcaggtatcttttctgtcactctctccccacccttctgagtcaggactatgatcagaccaaactaaatcacacaaaagaccatagtcaggaatctcagtgggcctctcgatatgctttatttgatccaagctattcagttcaagtgagaggccaccatgcatgcagagtatcttatcgtcaatgagtgctgccataggcaagcagttgaagcaatcacagaaaatcttccacagtcgaacatagaatcgcctcttacattcatcatagaaaccatacactctgttaattttcgcatcttcatgggttccccttaacaggaaaatcttatcaggatacttcactctgtatgccagaagcaagcatatggtttccaagctttgtttagctctgtccacataatc

SEQ ID NO: 66959 - DNA, 446 bp, Oryza sativa
  unsure (1)..(446): unsure at all n locations
ctagacaatctaaaaacatggttatgataatcaggattttctaaacctgatgggtggttgacataaacttcctcctgtataaaaccatttagaaaagcatttttcacatccatttgatataatttaaaaccttttgaagcagcaaaagccaacaaaagtctaattgcttcaattctagcaacatgagcaaaagtttcatcaaaatccaaaccctccacctgggtaaaaccttgagcaacaattctagctntatttctcacaatcaaaccatcctcattttgtttatttttgaaaacccatttggttccaataatattatgtccagaaggtggttcaactaaagcccaaactttggttctctcaaaattttcaagttcttcatgcatggcgttaatccacgattcatcagntaatgcatgtgacacatnctttggtttaaaagaagc

SEQ ID NO: 66960 - DNA, 453 bp, Oryza sativa
  unsure (1)..(453): unsure at all n locations
ggaccttaagcgactgggctgcagcttgaaatgtaattggatttataatgtgagattgagagcttaaaacttgatttaactacacttgaacagagactgtttgatgctgacagctntggtcagcatgtttctgctgataaagccatagcagataataaactgagggagtatgagctccagctgcaagaggcacataagactattgaccatcttttacttgagaataaagaactaaaacggttgttccctggaggagttgccactgctttaacatctgatgagcaagttgacaaaacaattgagaagattgatggtcaatactatgagaggggcggtgcaatacttgaaaatatggcaaagcgaagtgaagaatctgaactactgattgagcagctcaaggttagtttatgtctactaaatgtacttcagcacttttgctttccctcctctatt

SEQ ID NO: 66961 - DNA, 448 bp, Oryza sativa
  unsure (1)..(448): unsure at all n locations
atatagctgtgccgctgatcatttatatatagaagcctttgttctttttgtgnnaanagcaancgagtggatacaatatcattgcttttcgccacgtaagtgtgcatttttattgaccaatattatggcttatgctgattatatattgcggtcattttctaggcggttggtaaatcctctatgagtttatttactacggatttacaccacatatgccatatatatccaggtgtggtgaaaccatgtgtcttctagggacataagcacatctgttaaagcagtgagcgcatggcgtatgcccaatacattggaaaatttttttattttcaatatacgagcgtttttatagctattttgctatatcactcatcatattatacaaagcaaggtggtatatcacttcggatcaattttatcttgtaggaatcacactcgcatatgctatata

SEQ ID NO: 66962 - DNA, 417 bp, Oryza sativa
agcttaattgaaagagatgattctgtcattatgctttgatagcagtaagatgactgcattggtcatgaagataatatacaggtaaagaaactaaccgtgtgagcatagatgatgcaatttactccatgactgaatcaaggattagtgtattttctgctcgcatattgactaaatttcattgagtggaggtcttctctcacatttatagaattaaggtgtggtttatcatcatgaattcaggtgtggtttatcaccatgaattcccatcagcaattgcgctgatcatcagaacttaacatgagacacttaccatgaggaagtatatatataatcacatccaaaattttatgtctaatgtgagcacctagccagtaaaacaactaccaagatcatgaccaaacagtatgttaataccat

SEQ ID NO: 66963 - DNA, 395 bp, Oryza sativa
attgctatatacgtagcatgtttattataagatattttttttcagctaggtagcgtttttttttgtctagaacagtttctttcctttactgcaccaaatatatccaatcttcaaatcccatataaatgattaaagattgctcaattaacatgtccttagatggcgtattcagcctccttttaatcgcctaatggtcagcgtttatcttttacatccaactgaagttcattgcctactttgtgagtatatatttggagaaatatataatctctttattttaaaaccaattaaatttgaaaggagaaatgtggtggatggtctatggctcatctacccagatttgctcagcataacttcacttattattcggttacacacagcgagcataggctcgt

SEQ ID NO: 66964 - DNA, 354 bp, Oryza sativa
aacttatataagttctactaacacagaagtagaaaattagaaatatgatgcctcctaaggtgacatctgatcagcatctgatgtgttcattgaatcttaatgcttgtactaccaatagaaattattaacccacaaaactgagttcaactaatataaattttcactcaatcatagctaggcaccagcttgtattacgaagaacacactaatcaatcaatattctcacctcatggcggtatctgattccacccttcataggtcccctaacaatgtcatgttaaaccctaaacccaacatgtaagatgctaaagtcccatcatctttcggaactgtgcattcaacctgcaatcaacc

SEQ ID NO: 66965 - DNA, 324 bp, Oryza sativa
actgagctgcacctgcacttgtttttgccctggtttatttttttttaaaccctctgcacggggttttttgatcggcagatatgctacttagagctggccccctgcacatatcttaagtgagctactgtgtaatagaggaggttgaagcatcatgcgggttatattgtgaagctttgctttatacactctacattcacgcatcaggagcgataagagatgaacctttacttactgttttctcagatcgacttttttcataattagcttctttcaccaactatggtctgtttgtttgtactgtaactagtgctgatcactggaatc

SEQ ID NO: 66966 - DNA, 456 bp, Oryza sativa
  unsure (1)..(456): unsure at all n locations
aaaaagaattaatctatttcatatataatngnactactcaattgggctaaacacctcggtcacacgtcatgcgtgacaattttaaatcacccccatccattttgcagattggcaactaattggtaagttgtgcttcattgcttcagacttaaaatctgcccacttgtaaattcttaaatactgtgttgataatggaagcctccatatggaaagtttattttttctttcccatggtacaaaggattttcccccattgacatgctgcatccgacacgttgaatccacttctatcttctgcttctcgctctcttgcaattaggggtgaaaatggtacggaaatttccgagatttctaatttttgagatttcatatngttgttctaggttgcacttgatcgttcagtcggtgtcggtaaccgtcggtcggaaatcgaaatggtaaataactttagaaatg

SEQ ID NO: 66967 - DNA, 334 bp, Oryza sativa
  unsure (1)..(334): unsure at all n locations
tagtcgctctagccatccacatgattacttggatctatgatcttgcgccctaggctacgcactgaaggatgaagaaatcataaatagtagctttaattggtgttgaagataaaaataaagagagtcaggacacagcacataagaaagtattaattgannatttaatttaattattataaacacaaagtataaatttatattatattttaaattatcttataaatataaagttttctaataaaatatatcggttggaaatcgagataaaataaaaataattataataacatttgctacaattcgcatttcataaagactccgtggcccaatggat

SEQ ID NO: 66968 - DNA, 464 bp, Oryza sativa
  unsure (1)..(464): unsure at all n locations
agtaaatntcattccgaccttnggcactttgtcttccatagatttggttgtatcagaagttccattatttccttgatcctgattttattgcgtggtattattacccatacaaatgcaaaaaaaataaagaagatcaataaaattgacatttcagtggttcctatgcacatacacttgattggaattatgagagatgtccaatgagacaattcaacttagatccaaataatttaacaaagtgtaaaggagaacaaatagatcttacatcttctaattgatttcttcctaagccatcgggtggatccttggattcatcaaggtttctgaatgttggcgccgaagtatcatccaagatgccatccgatggatccttggattcatcaaggtctccgaatgttggcgccgaaagatcatacaaaatgctagtcgttcctgcattctgcaattgtgatggcactgataca

SEQ ID NO: 66969 - DNA, 435 bp, Oryza sativa
agcttgaccaaaaatgtgatcacaactgcgatgaatcacaaagcaatctccgtaggtgcaatgatcacatctcaacacggtgactaggagctgcataaaaccgtatggcgggagaaaaggaacaatgaatttagctaggtcttacattttcatcaacagggcccaaagcattcaacaaaaaaagaaaaaaaccaccttgcttttaatttaataaacatgttttctaaacgaactaagtctaactcctttttagatgatgatgaagattatatataattgcttataaatattaattaaatactatatagtatatagcatagagaaattatcaaagtgatgcaacaaagaatattttctgaggaaatgcacttccaaaacatggcggaggctatctgataaatatgatcccgtttcaaatacagtgcacgatacatg

SEQ ID NO: 66970 - DNA, 475 bp, Oryza sativa
  unsure (1)..(475): unsure at all n locations
atataccgtangcatgggaatgtcgngaaccgtgacttgttcatgttgtgcctttatgcttgcgtgatactgttgcagtaacttacctctaaatgttgaagtttggacaaatacattgtacaagagatgttttttagccggtcgcagaaggacaccctcaaaacagagaggctgggaaacatatcatgtggacttagtcggaagcacttaatatgttttaacatttttagattaaacaactcgatcttcttgagagcctcgaaacaataattcggtgcttcagcgcctctaaaaatttctattacgttcatgtcgctatctgaaacctccaggtaatttaaagtagttccaagcaagttgtcttgaaaaatactttccgacagccggaacaatgcacatgactgttccattttccgtagagcaactagccttaacgggagggtacagcattggcttagtaattcatactggaatg

SEQ ID NO: 66971 - DNA, 372 bp, Oryza sativa
  unsure (1)..(372): unsure at all n locations
tgangcatgcagctttcacaaacatacagagcatctaattatgttctattttctctaaaaccatgggttatgcataagagatatgacagctaaaaagacctgaatgaactagttaaccaaaatcaatatcacacttcataaaggtcatgagaatgaactgttgacccaacactcacaataacttacaaagccattcggcattcctatttagatctgagtgagataggggaaccttctctcccaccccttgcaccagaggctcgtggatttcttcggctcgagaaattctccgggcctccaccttgtcccgtacacctgctctgctgctcaagaagcgaggagctttcagtgaactgcatggagggccggacc

SEQ ID NO: 66972 - DNA, 459 bp, Oryza sativa
  unsure (1)..(459): unsure at all n locations
atgacctcactcatcgaaggtctttctttacgngcagtttgtatgttccaaaaccctattatcactaacttgtgtgcaacctctgatgtggaattgctaccgtcgatgcctccactatgaacaccacaaaactgattcaggttgtcatacaaccattcagggaaatacttgcttccactctctgtgctcgcattgatgttttccctttctccaaccatatgaagaatcagcatcccatagctatatacatcagacttggtggtcactgctccacggtgcccccaaaacacctcaagtgccatgtagccaattgttccccttgcacaaccaatagagattttgctctcttttggcttacatagattcgctaatccgaaatccgatattnttgggcagaagtcttggtccagtaagatgttttgggggtttatgtcaagatgtacaacacgatgattacac

SEQ ID NO: 66973 - DNA, 356 bp, Oryza sativa
accccatgcgcgcactgttttaacagatgtgcttaaattcctaaaagacacatggttccaccacacctgaaaatatatggcatatggtggataaaatccgtgtaaataaactcataaaggatttaccaacgcgcctgagaaatgaccactatatataatcagcctaagccataatattggtcaataaaaatgcacacttacgtggcaaaaagcaacgatatagtatccaatcaattgcttaaaaacccaaacagcaccatgactatattaaatagtcagcggtgcaactatataaagctttactgtgtgacaccttctaagaatgcattgaccaactcctaaaaagttgagtaact

SEQ ID NO: 66974 - DNA, 422 bp, Oryza sativa
  unsure (1)..(422): unsure at all n locations
cgagttactggatcctttttggaaatngggtatacatcccaatcattgcgctttaacgagccaaagatataaaatagtgagaaaacaatatacttgtaggtagaagtaacatgaagatgatgaggatgcgagtgaaacgagaaaagaatttgggagatcgatgcaacacggtggcagacccatgatttcatcaagccactacactataaaacactttccaatccaacctttaataaactattaaaacacttcccaattcaatctttatttgagttaacagatctgttntattaaatatcacataaccctatttattatggttttaaatggaacaagatatatgggttttggcatattgcacagtgaccatcggtattagatttcacaaaaccacactactagtaatcaatctgaattaacac

SEQ ID NO: 66975 - DNA, 396 bp, Oryza sativa
  unsure (1)..(396): unsure at all n locations
cacggctctgctaccagcttatacgagcaggggtgattgatattttgatgagtggaagataactacggtttataaaaaaaaaaaaaccttgagctaaaatcgtacaatacgtgggcatgtttttccatagcttattgatattattatgtagatcaaccttattcctctaaacaaatcaaacaaataaaccataactagataaaagtaatcaaacttgtagataaaaatcaaatctcaccataaatcggacactcggtaagatggggttccgaggacgagtaactaggaggttttatcgacacgcgcaactataaggttaaatagcaatgattaaatcttaatctaaacagtattaaaanaaagatttttgcagatagcacagaaagggttttcacg

SEQ ID NO: 66976 - DNA, 393 bp, Oryza sativa
gacttaaagcatcagcaacttcgttagcttttcttgtgtggtatagaaattccaaattataatccctaattaattctaaccatcttctttgctgaagattaagatctgtgtgggtaaatgtatatttcaaactcttatgatcggtatagatcttacaatgattcccaattaagtagtgtcgccaaatcttcaacgcatgtacgactgctgctaactctaaatcatgagttgggtaattatcttcatggggtcttagttgtcttgaagcataagctactactttaccttcttgcataagaacacatcctaatccttgtcgagaggcatcacaatagatctcaaaatccttatggatgtctggcaagaataacactggtatagaagtagcttatg

SEQ ID NO: 66977 - DNA, 416 bp, Oryza sativa
agcttgtgcttcttgtactgccacgcatattgtggtaacccaaacttccatggaacattggagccaatgccccttgttcgtccaccgtgttcttcgcttcccgacgctttcatgaagatgtcatcctcccgtttttgtgagcagacctcttgggaggcctgtctctcagcattcagttcgacctgcggtaaagttatgacgcgttagacaaagaatacgatacaacataatgaaacttattctatttgttcaacttacgattttctggtacaccgcttgatcttcgggaattgggaacgaaagagttccgtcactattcttattcaccctagcccttgcccagtttcttgccctgtggagcgggatatcaacaagcacttgtggagtgttagattctgctgcagcttcatactcct

SEQ ID NO: 66978 - DNA, 366 bp, Oryza sativa
  unsure (1)..(366): unsure at all n locations
actaagcttgccctttcttgcttncnctatctattctccgcttttccattctgacagggagaagcttcccagggtcactgttcactgtactctgcataatttctgatcacccctattgtgccttgtctctttcacctcctccctcacttgtgctgcctctggccactatagtggcgccctgcactgttgccatgcatggctgccacttcgagagtggagataggggttggcctttgggtgatttctgtgtgccatcttttggctcaatgtcgttntgggactggtgcatgtactggcaatatgtgagatgagatatgaaatgtcctctgctgctctttctatctaaagaatagcttaactatcacc

SEQ ID NO: 66979 - DNA, 375 bp, Oryza sativa
agcttgtgcactcccgcctttgcctatatttcattctcttcattgattcttgcgattatggttgctggagttacaactatgctttgaaaaacttgtgtattgcgctctcacaagagtatgcagactaccagaatcaagagggatttcagcggctttgtcaggttgtgaggagtggaaaggatatgcatccaccatttctcaagagaggcgcatgtgtctcaatgttgcatttgcaagtcaagccaggtccttgttttttttagatcaaagggagtacactcgccctccatttatattaccaaaaaaatgtaggaaaactatcaattgtccgtgatcaggagttaggctctccaaaccacagcagcactaaaaaaa

SEQ ID NO: 66980 - DNA, 416 bp, Oryza sativa
  unsure (1)..(416): unsure at all n locations
tgtacggtaactgaaccttgtcattatcaagctagccattctagtgtccccagcttccgtgctaccgctgcttcctccgaccacacacacaacaatcacctacacctcacgtactaatccactcgatcgccgattaaaacactgacccagttaattaccacagtaaattaaacacaacaagtacattcaaaggcagattgatcgctatcctaatgacgacgccaccgaacgaggggctccaattggctcgcgcgtcgctacctcttgtccatcgccgatggcgacaacagccacgccactgctcgctccattttatattataaatcgttttcataaaataaaagtttgtaacgtttataactaaattagttntattaaattntgtattgaacatcatttgataatatatttggttt

SEQ ID NO: 66981 - DNA, 416 bp, Oryza sativa
  unsure (1)..(416): unsure at all n locations
tgagcactgatcctattttgctaatgatgctatactgttattgtgatctacttatattnatatatatttctatacaaatagntcccttctgacatcgattgttcaaggaaatgctcttctactgatgtatatttcctccttgtaattctgctactttttatactatattccaaaacagttctgcctcttgaattaaaatataaggctagttctattcatagcatggattaatgcctaatgcagatcactgatgataactcatttttcactcgcagcaggtaatggagctactaatagccttgcagtaatgcccttctgctcttgcacttacggagaatttggattnttgggactcttagtttctgtttgtatgaaatgaatgtaaataactcttcagtggcttatcctaactgatt

SEQ ID NO: 66982 - DNA, 377 bp, Oryza sativa
agcttaccaagttagaagttggttatgactttatgtatacaggcatgagacatgctatattttgtaacttgattttcgctttattattgtcaggtctacctcttgcataatttctttttttttatttttctccgtgcactcttaggccttattaaacatttttctgaacaatgtatgtctatgcggctctctcctcacttacatgttaatgtaacatcctaatcaacacttaaattagcaggattagtcttgtttgtgtgttctttggccttggttcacatggacctggcaagttcatgtaccaaaatgagtgttttactagttcatgtactacattacatccatctaaagtttgtgtaccgctagtgtaattactc

SEQ ID NO: 66983 - DNA, 398 bp, Oryza sativa
  unsure (1)..(398): unsure at all n locations
tctactgctactaatccatggaagccaagcgtcacatattataaatcccacacaaaaaacactagatacgaactgcccacgaaaccagcagcgccgaatcgaacccacccaactcccaaaaaaaaaaatccccttcgatcggagctcggggacgatcagagaagccatcatacctctctctctcgctcgctgcctcccttcggatcgaatcggcggcggagcggggggagaaagcgagtggactcggcggcggcggctcgcttccgcgagttcaaaaatcgaanaaaaaatgaagaagaagaagaagccgaatttgtttgcttctcctctcctcttttgtgtgcgcttcgatcggattcgaagcgagagaactgagagagaagagggggagtcaatgg

SEQ ID NO: 66984 - DNA, 427 bp, Oryza sativa
agcttacatggcagttggatgagaaggtttacatgttatctaaacaagcctctgcggcatgagatcccaagtagagtggttacatcttcttatgattatgttttaaacaggttttggatcctgcattgcatccattgcacatcgtctgttcaataatacatcaatcctttcccttttgttccttgaaaaatagcctgcattttggaggattgcctatacagggtattgtcttatcttgaactctagatctgataaatggtgttatggaattggtagaatattgttgacttgctcttggcctgtttgttctttgatcatcatcaaaatgtcatgatcgctgaatgtgtgctctcatccttgttagttgttttcagaagggcctcatccttactatcataatgtttttacgtgattatatcttatttca

SEQ ID NO: 66985 - DNA, 253 bp, Oryza sativa
taacagaaatctaaagagtgggaaattatcaaatctcaccagaacctaagcgcttagggggggaaaacaccacataccttaccgtctaaataacatcatcaccttaattttataacataacgtaaaatgtattcatgccaccatgaatctgacatttcacgcttattggtcaacaccaacatatcagagttagagcttagtgctgctcgcaacactataaaactgaaaaacgacaaaacggaattactatata

SEQ ID NO: 66986 - DNA, 353 bp, Oryza sativa
ctgagctgcagcttcgtgtcccaagggggaactggtgttttataaaattgtgcctgacaaccgttgcgggaaaaaataccatcggaataccacgcggccgccatggtgtataagtgcatctggcgcaagttaccaaatgcgctattatgagtaacctttactatattacgtttttaagctggacgcgcacacacaaaataactaattgaaaataaagataatatctgtcatcggatttggactgtgtcgcgcgtcttggcatcattcctggtggaaagcacaaccgtatcgcgcttaagcgcggaagtgcgggacacattatctcctgatatacaaatcacggaactttggct

SEQ ID NO: 66987 - DNA, 402 bp, Oryza sativa
  unsure (1)..(402): unsure at all n locations
agctttctctctcttccgccatggatgagatctgttggttttatttggtccgagatgtggctcgaacgggatggggaatcggtgcggtggtcgtgcaaaaggatttcacggagttattgaggatggattggagcggattggtgaaccctagcttcgtcggcgcggttttgcactgtagcgagaaatggggaaaatggcgagagtctctgcggggaagacgaaacgtcgcttggacttcattgtttatttcactagggtatcgggagtgctaatgggcctaggcctatacagtacttcagcccaatattattatcagcgtggcccgttgtgatccctaaggacttacgcattatttgctttggcaatntgtgctcacaatggtgtgacccgatgctgttaaaa

SEQ ID NO: 66988 - DNA, 437 bp, Oryza sativa
  unsure (1)..(437): unsure at all n locations
caagaaataaagactacgaaaccattgttaaatccataaatgatagccgatcggctagttgccgatgacatatcatttatcttttagccgatgtcatgtttgaatcgattggcatatataaataagtaagaagggactaaatctactcaatcggctgtagatattgataatatataatctctatgtcgatatatgtcacaccctaaaaatcctaaatatataaattgttgtttaattggaattattagaatttattttaaaagtctagaaaagaagatctaattttaaataataaattccaatataaaatggggccagataaaatntcattaaatactctgcttaattctataattcctagatatttctgggatttatntgagctaacggaagtattttaataaatggaattgcatttcctgaatacattaaattgg

SEQ ID NO: 66989 - DNA, 406 bp, Oryza sativa
  unsure (1)..(406): unsure at all n locations
cctgaggcatgcaagcttcttactgaagttcactagaagngcttgttcacttgatatggacttcacaaagcgtgcagcctcctcttcccggatggcgcagaaagactggacacgctcggcacacaagagctcacggatgcagatcttacggagctgcctccattgatcatcatagggcgcgaacacaagcccctgttctctctttgtaatgatcttcattatctcgctttgcggtctcatcgcaaatatgctgtcatgagtcttcatgatatccttggcagcctccggggaagaaacaataatgaatggtacctgtccaaacttgagtaacatgacaggcccataccgtcgagatagatcatgtaaagagcggtgtgggagatcaccgatcaaatggtgtatacta

SEQ ID NO: 66990 - DNA, 461 bp, Oryza sativa
  unsure (1)..(461): unsure at all n locations
actatgtgtgctcttgatacatcattactatgagtctgtttngtatatttcgtcgagactaccattggatgtatgaagtanggaatcaccccttttgcccccatgtagagctcgctctgtagaatatcatcgtggtacgagtgtcatagcttctatggagtgggttcttacttcgttgctgccaacgggaaaggcacatcaacaaccaggaaaacaacttctgtatgtttggatattagctcttgtttctttatcaatccttctttctgtgtttctaggcctgtaaattgaatttgatctgcctgagacatgaatatgattgcttaatattcttgtagttgcaccatataaaagtgcgtacatgttcatgatttcattcaacttatctttcaccaactcatgattgtatgcctattattatattgattgcataacatatctatcataacagatcggccatc

SEQ ID NO: 66991 - DNA, 379 bp, Oryza sativa
  unsure (1)..(379): unsure at all n locations
catcaactttatgtctttagagatatttttttgtagattctatctctctgatgagcttgtctttcatatttttctgcgaccttatatgggtacccggatgttttgatgaatgtcagcacaaattcagctgtttgacataatactcaattaattgacaatatgatctatatgtcagtggcataccccagcaccataagcatctgaagtttagatatttagtcgttagcggcaagaacaaagtatcaaatttatatctcatatgtcaaatgttcatatggttctgcctaagtattctaggactcttgaatgtggtcttgaaattagtgatggagaccanatagtgttgacataggattatgagagcctatcattgtagtac

SEQ ID NO: 66992 - DNA, 415 bp, Oryza sativa
  unsure (1)..(415): unsure at all n locations
gcacatgtccatgacgggctcctttcgcctggcgacactggaaggcgaagagttcgaccattcctggaacgctgcctctctccagcgtttctatgtgtagaacgggtggcacccagatcgccaacatgtaaaaatgtacatattgttatgtaagcctttcggcactatgtaagcccttcgacacanaaatgcaaaaaaaagaggaaaatgaaaaaaaagacaaaaaaaatggatgtagggctattatccaccctggaggcccgaaccagtataaaatctttgtgtctctcgccttcttatttgtgtgattgataatctgtggaaaaaccctaatgcaaacgcctgatcagcgaaaatgccagggggcgaaacgaatcggccgaagcaccgctcgccgaacgttgaaccgcaacat

SEQ ID NO: 66993 - DNA, 435 bp, Oryza sativa
  unsure (1)..(435): unsure at all n locations
agcttctgataaanaacgggtggttctagttatatttgtaatatgagtacctttacgctntgccgagatgtaaggggccattttaggattccatttcttaataccatgaccaaaatgaactcccgcttctatcatctctttcaaattgatgttccaatatcttcttgtcattttttccacacttccttttgattttttcttttttttcatcctacctttccattacgaaatttctttcttttcgaagattaagaaagagccgaaatagcttgaaataaataataattgttccgatggaaccttctacatggtataagcataaccttaatgaattaactaaacttctttttaaattaaaataaaaatagaaaatctaacctcttagcgttctaaggtcaaaaatctagtttaaagtaaaaaatctgctttatgtat

SEQ ID NO: 66994 - DNA, 255 bp, Oryza sativa
gtttttcgtcttcaaaaaacaattgaaaagtcattgacaaatgattttaggccgggattttacatcagtggtaaaagccggattattggcatgtagatttcttgatcatttgaaatcttttttgttaactatttttgttgcagatgtttgctgcattcttattctatatctatcaaacgagaaatgccagcaggcaaacataaaggacaatctttagaggatgctgctctaatcttttggccaaaaaagcttttc

SEQ ID NO: 66995 - DNA, 352 bp, Oryza sativa
  unsure (1)..(352): unsure at all n locations
atgtgcatgtgtagagaggtcaagccgtcaaggacttgtgcttttttttttcctttctcctagnagtagtaggagtagtagacaattgtaccttgggctaacactattgcaacgtgagcattgtccacatgacagaaatgcagcaagcagccaagccaagctccccaatgatgacctaccttatgcgtacatttgctcttcatcaacgctatactttgaaaaggaaaacagggaagcagaatggaaaaagaagaaagactcgtgtcaatttcagtaaagaatacctcgggtcttgtcgatagagtacgaagaacaataccattgcaatggtattgttcatttgctatactag

SEQ ID NO: 66996 - DNA, 349 bp, Oryza sativa
  unsure (1)..(349): unsure at all n locations
ntacctgaccgcgcatccgtttccgctaaagtcccgtttcttcatcggtcttgtggggattcgcacagggaggcagttcgccattgtaaacccggttcgcctgaccagctgcctgctgtgtcagcaactggctgtactcgacgacagacacatcgccgatcatcttgcgggcttcggcttcagcttggtcaaggtttagcactgtaaaggcaaggagggggaatcaccgttttcgagttcacggttgcgaagaatatggcgctgaaaagctcggcgttaggcccaaacccggaagtccggcatgcccagttgaagatagcgatccgaacaagcgccgatgggctcagct

SEQ ID NO: 66997 - DNA, 432 bp, Oryza sativa
  unsure (1)..(432): unsure at all n locations
agcttagtacaagttaacctcgagtttgatcgtgacttgtctctctcttaatagtcgcatccggatcttgcttgcactgtcattcatctccaccgttttgaaaacattttttttcttccaggggatccatcatttaaacttgcatcatttttaacgtgttgccttttgaaaaggtagcatgatattagtcgtaacttttcttttcttcacatcgacacgcaaacttcttaatatatgagtttgaccggataattttctctttatgattggacgctgacctgacctcttacaatctccattctaaaataattaattataacttttagcccgtgatacacatacaaatacaaaaatgtaaaatactaaaatgtacttcacttttatcaagtttcaattcatttatctttaactntatcaagtcaccatatattt

SEQ ID NO: 66998 - DNA, 397 bp, Oryza sativa
  unsure (1)..(397): unsure at all n locations
actcaagcttcaatcatgtggaagtatatgaattttttgcatataacttttctacttatatntgaaantaactagatgtatgtgattaattctatttgcaatacttatcttgtacatataatttaactatatagaaatgtatggtttcaagctatttgtctaccaaagcccccattcttgcaacttctgtaccaactcactaatgcaacctagctaaccagaaacgaggcttcccagataatcctcattgttggacctcggtggtgttcatgcagccatgcaggccatcaatcaaacccatactgtaccaattgacagtatatactagagtcttagatagtaatctatttggtgtgttgttaataatcacggtgaagctcacttgcgccccatctga

SEQ ID NO: 66999 - DNA, 52 bp, Oryza sativa
  unsure (1)..(52): unsure at all n locations
agaaactatcatgatgacaacaactttgttatcagncacatgacgtagtttt

SEQ ID NO: 67000 - DNA, 423 bp, Oryza sativa
  unsure (1)..(423): unsure at all n locations
agcttggcgaggaacgcctagattgtgtatttttaggaagagaacaaagaaaggggaaagagagatgacgtgtatcatgctgacatgtggggcccacgtgagacccatgctgactcagccgccacgtaagccaaaaccggggtcaaaaccaccgaaagacctcgggtgaccggttttgtatagttaagggaccccgcgtatctgattttgcggatcaaggatgtttttctatcccgatgacaagttgagggaccttcggtgcactttttccctctaccggacattagaggtatgggctttttgcataggatccgataacaacgtgtccaacaccggtccgtctanataaacacgagtaacaggattatactaccctctcgatcatattatgtttaccaaacatgatgagtaaccggtactact

SEQ ID NO: 67001 - DNA, 440 bp, Oryza sativa
  unsure (1)..(440): unsure at all n locations
ttagttnttgagctgctctgatttcaccatttaacagcttatgatgacagtaggtagaaatgcatttccaattcccacatgtttatacacacttaagtgaagtaactgaggtcacaacattattgtttcacaagagtaccaagcaccttttttaaaagaacttgtctgcagcgaagatttatgggatgcttctgaaatggaagagcagattatctttcatgcttgctcacattgngtttatatttatttcctttctatttcaactatgcttattcttccccagctcaatcaaccaccggcagcttcaactcaacgaattcagacaggttacgggataggcctggagcttgcccatcaactaaatgttagttcttgcaaacatagtatcgtcatcacttgcattatgattataataaactgcagccatctctaatacatct

SEQ ID NO: 67002 - DNA, 417 bp, Oryza sativa
  unsure (1)..(417): unsure at all n locations
ttacatcggccgatttctttttagttttttacataggtganggaacccaaccaaagccgacttttgttaaccaaaatatgagaatcgattattaggttaagataatcgagctacttaaagagtatgttgattgctttgcatgggagtatcatgaaatgccgggtcttagccgtgagcttcttgagcatcggcttccaattaaaccaggttttacgccttataagcaatcacctcgtcgttttaatcctttgctatatgaccgagtcaaagaggagattgatcggttgttgaatgcggagtttattatgccatgtcgatatgcggagtgcgttttagcatagtcccggtggagaaaaagggaagtggtagattagagtttcatagatttagagattaaataaagccctccaaagataa

SEQ ID NO: 67003 - DNA, 326 bp, Oryza sativa
  unsure (1)..(326): unsure at all n locations
tcatatgacgggagagaggagtatgtttacaagtcttgatgaggagggtggaaagtcgtgaaaatattgtctttggagatgatggtaaaggaaaggtaatgggtctcggtaagaatgccatttccaaaaatcaatctctatctaatgtcctccttgtcaattcattaagctacaatttattatccttgtctcaattgtgtaagttaggatttaattgcttgnttaccgatgtggatgtgaccatttttatgcgagatgactcttccatagcattcaaggggtgtgttaaagagtgatctctatctcgttgatttcgatgtagatag

SEQ ID NO: 67004 - DNA, 354 bp, Oryza sativa
  unsure (1)..(354): unsure at all n locations
gtcgttgcccaagctaagcaccaaagaaagaaaagttgtacgccacagttgaagatccgtggatcgcatctaacttcaacaatctttaaagactgaactctaatctgtggctatgtggtctggactgtggntttccctggtattattacattggttggtcggtcattggtggacaaatggcaatggaagctcgccttgtgctgaaaagaagctaatggttatgccgntactgttttgcttggatattacattactcattcgtaggaggacaatagaagcatctcttgtgctgaagcatcttgaacgattatcgccactaagcctggtgttactactgtgagctctccgacgcta

SEQ ID NO: 67005 - DNA, 380 bp, Oryza sativa
  unsure (1)..(380): unsure at all n locations
acgatgagatgtgggacagtgggagtatgcaaacaacggtggagagctcaaaggtggatgccacgtcaaaagcaggggacggagctcaccgaaagatgcaatgcaaagtcaggggggcgtgcangaaagattacctaccaaactctatgcaactagagccatatggaggatgccatgcagagctgtgctctagctttgtttatgcggaggtgccctttgggcctctagcaacatggaagttagactggactagcaacaacaagagcgctaccaccttataggtggctacaaggtcattttggtatttttgccttatcctccacgtcngacatggacgaaacttgcaaaatgatgtcacaaggatgangaaataaagtgtc

SEQ ID NO: 67006 - DNA, 419 bp, Oryza sativa
agcttaattcggatagtgacccatataggagttctactgtctctatgaggcccattcatggatcctatgaaaattttaagggggtgtgagccgcgcattcattggatcacgtgagaaaccctagcagccactcccatccatgagcaaaaccctatctgctctgcccacaggtgcttgcaagtctgcacatagcgttctatccctgtacgtgtggatactattaaaggcgccggtgtcttgcgatgcttatcggcgtaagaacactgagaggagaactctcaatgaggagaacgttaagctattgcgatcgactacttgctctacatagatgcacgctacgtccccgacatttcttttgcttcttagcgcttaattccattgcacaacgcgttgagtggtaacgatctatgatctaatac

SEQ ID NO: 67007 - DNA, 415 bp, Oryza sativa
tcttgcttataagagctgctatggtcatcataaaagcttgtgggttctgtgttctcgatactgtaatccaaaccaggtaaccttctcttcttattgaaagcatccgcgaaaatcgaagatgcttctgccatcttaacaagcttgttgacaaactgagggttcttactagcttgctgcaagaaggcaatcatcttggtctgtcgctgctccatgccaagcactcgtcgctcaagatcttcaatctggttcatcgttcccgactgctgctgcttggatttccagaggtcagcctggagggtggatttctctcgtgaaagccgttcgatctcatcctcaaatattgcacgctcattatcgggcagagcacctggtggatggctgtggctgtggataggcttacgcctgtggatattct

SEQ ID NO: 67008 - DNA, 362 bp, Oryza sativa
  unsure (1)..(362): unsure at all n locations
gtcacctgaggcatgcaagcttgtaacanggagtcagggacccacatttttgttgtcccagagantcttttntctgagaattgagagtgttagcactcaattatgcagtatattactactgagaaagagctagtggtacctggtaatggaagtgtttgcttcgtgcttaatgctactaagtaagacagctgttgcatctagcttgtaactgtttaattactgtgcatggcagtgcacaccatgtggatatgggtgatggggatctttgtgcccccagtattgaggtagcccatgtgtggtctgcagcttaattaatcattcattcatgcatctatcttctttgttaacaaagagaacactgg

SEQ ID NO: 67009 - DNA, 293 bp, Oryza sativa
tctggtggcatttcttagcgacactactgggaataaaattcccagcaatatcactaaaaagaatcctaggatactatggtgacagatatgattcacaagcacacggatataccattgtagcatttcacccgggagtactccaaggaatcgtatttattttatcccaagggaagacatgataagagagaactatgctaacaattcatatattacttatatacatcaaaggctatgcatgggttaattcacttcacagggtagggtgacacacagaagacagaactaagaactac

SEQ ID NO: 67010 - DNA, 362 bp, Oryza sativa
attcatcctcagctcatattttgattcattgccaggtaatttgctccttcttggtttgctttattgtgggtgatttgtgtatgcacaactttttgcatccttcatgcactcttgcatattccttatttcatctatttaagccttgtttagatccatctggaatggcaaatggcaaaaagtttggtggttaaagatttgacattgcaaaaatactagttggtttttatatgcatcttaacagtttgccattttagcactaaagagagagaaagagggagggtgtggtcccagagcactctttttgcaattttgctaccatggattagcaaatgccaaataccaaaattgctaactttactatt

SEQ ID NO: 67011 - DNA, 434 bp, Oryza sativa
  unsure (1)..(434): unsure at all n locations
gcttggacaagtagtcggcagctgtttgttttgtcggatctgaagaatcaccgcttatttgggccgatgacgttgatgcggaggccgcattcttcttgtgccatagtaatatcctcttgcgagcagcatcacagacctcttcgttcgacattacatcccagaggccatcacttgcaagaataatgcaatcatctgtcttttgcacgagcgacaactgtgacctcanggaccgggattatatatggcttcaggtatttgtcccctgcaaatacatcaatgcacagaccagaagtattggcaagcgcaccaataaatcaaacataatttatctactttgaactttgaagtatcaacaaaagccatatattaaagacattgaaatcaaattaccagtcacagaataacatgttaagagcaacaaatactgacaggat

SEQ ID NO: 67012 - DNA, 450 bp, Oryza sativa
tctagaagccaagggtccttccttctctggcagctcgttctctccaggagatactttaatttggttcttcctcttactacttccttggcttgagcaagtcgccttcttcgatcttggcaaacctccctcgcactcttggctggctgtctgcaagagccttcctgcaagcatactgcaaccatgccaaacgatgcatcagtcagtgtcagtcagtcagtcagtctccttgtttgtactattattcatcagcctcaatcagcttctctaattaatcatgtagtagtaccttctctgtccttatgttctcttttttcttttctttgaaaaattaaaaaggaagaggacaatatatagttttaccttgatctttctgccaaagtttctcttcaccttcttctttctgtacctagatagcttctgcttcctttcttcagatttcaggtcactgat

SEQ ID NO: 67013 - DNA, 312 bp, Oryza sativa
gcgtactttctttctgtgggcaaagacctccttttatagcttaaggggataccatatgcaccgccttacacaatccattactggatgggggcccacatgtcctgcgtcatgccgccatccatgccaccgatcggtagcaaagtaaccattcgtccccgagagggtcccaccgtcgtcctccgatgggaggcacgctctgttgctagccgatgggaggggcatacctatctccactccacctgacaaacggcggccgtaggtgtgctgccacctgttacatccgcctgcggcctgtcaagcctgattgacaca
